United States Patent Application Publication US 2020/0157537 A1 - sequence listing, part 10

SEQ ID NO: 19622 - DNA, 2670 bp, Mus musculus
caaacatgcattaagcagttggcggggagatggctgtgtttcttggggtagggagggcggagttgatgtggcaggctccttagctccctcttttgaacagaggctgcatcatcttatttaagagtggactcagcagggtgtggtggcacacccctgtaattccagcatttgggaggcaggggcaggcagatttttgtgagttccagtccagccagaactatacagtgagaaaaccctgtctcaaggtgggggtggggagggagggggaacagggggataaaaaacaaaacaaaactgtatttatgccaagttgctattttaattgtttttattttaaatttttgaaatgaaaaccccagtctttgtcttttggcatagcttttatgacgagaccacaattttacacaacaaaattttacaacaagcaactgaccttttgctggaggtgagccccacttcagtacttagttccccagaaggcatccatcgtgttgctgagctgcctctcccatgtcctttccctggagcttttgttccctctgttgctaagagctgcaaatggcatctttctgatcagcacagtgagctagctctgcgcacctccgccagccgggacgcgctcgctcgctctcctgacatctgtgactagagccgcagtccaccgccttatgtcatggtgtccaatctggttgctttccttaattaactgctaatttaactacactttacaaagctgttattcccaaatacatagagaggaatttctatgcacgtctctggccttcccctacccccatgtgctagcccctccagcggctctttctttagtgatccccccaacacgtgcactcatgagatgcagtcgtttgttttagtgtatcaggcctgttgctgaaaccgcctttctgtttcatggctcgctcttgcagtgtggtatttgagctgttgagtgcaggttacaacctatatggcttctttagaaataacttttatatttatttaaaaaaacttaaattatgggattttgtttttgtttttggttgtctttgttggtcatttgtcaatatacagtcaccaaccaactctgctcacttcttgccatggataaaatgggcctttctggccaattaaaaagataaattttataaatggcactttaaaacaagccataaatagatttatttttataatgcacatggcaagcaaatgcatttgtgatgaaggaactgctcatccaagcagaagatttgtggatggtgcgattaatatctttttaccttttcttcactggaatgtgtctgacaggctgactgtcagctctggagcagcgggaggctgatccagctgtgctcctacaggcacctccagcctttcaccagccccttcacgcgtgtgtctcctttcttgtagggcagggaccacacgtaggggaggttgtcatgcacacttgcaagtgtctctgtgcctgtccatcttaagaacttgtctgtcttgtagagagcaggtctgcccgtactctgtgtgttttagaactggaggatcctgtgaactggccacatgccacacacatctgcatacatgtgcatatacagtagtgttgatgattcccagcaaaaatggcacaaagcagttgattgccattgtcaaaaactgatttacagtaacttagaacaactgtacttttgttggattagcaaatcatgtgtttaaacaatcccatatgttgggcaacagttcaaataagcacagagaagcattgcccaaacttggttctcaaactctagtgcatttgtaaggctgggcttcaaaatcaaaacacccacccccaacaccggcaggcagagtgctaattcctgaaacatccatgggaagccaatggccctgttttcaggaagagcaagcccaccaagagttaagactgtctttgtgtcctatttatactaagccatgtcccaacagggaagagtttggaaccagagtgagagctcccagtcccagtttgagtgggggaatgtgcttctagacgcttcctggcagtagtggctcaccttcacaaagacagtcttgtggcatccgagccaggcagacagcctggggtgcctgggcctgacaagcttgttgacaatgacgtgcaatgacgtgacaaggtgagagcagaatcctgagagacttaaagggatggttttccccataagttatttattctttttttttttctgtgtaaatatatttattttattgtggcactctaataacatcctggtggtatggtgcagaatgtatggtaggaatgtatttcttgtagggatgtagatctgtgtgtattaaaagggggagccaagccagcccccacctgtctcttcatcagatacagtccacattcatttttaactctcatctccaatatgggtctatttaaaatatgcaaaaaggtatggatgaggaatgttttaatacctccaaatttttaaaaaaatcaagcataaaagagttgataattttttaaagttttcttagtagcactttctcttgatgacagaagggcaacacataggcacccaccttcataccaaagggtgagaaatggccacagcctcctacaccactccagtgtctttagcaattgagctttctatcgccatagccccaaccatcctgaggtcaatcaag

SEQ ID NO: 19623 - DNA, 1245 bp, Mus musculus
ccatgagctcccaagaacaagcagacgcgtagctgcttgcatccatcggacagttttaaatacaccttccttgattccaccccttccctaccatcaaaagcatatctgctgtaatttagaaataaaatcattcaagtcagatgatttgttggtaagccacactagaaaggtatacatagtaatgtatatttatttacataccgaagtcctaaatttatattagaaaaaatgtaaataattggggatgaacatttttgaagatttattcttttgtgttgctggggtgtatacatttatgtctttgtgaaatacactggtggtgtccttcttaaaaacttttgaaataaaaaaagaaaatgaaaacctcaaatctttcctgtctgaaaccccttcagtctttccccgtgcctgacagctcttgacttacctgtcctatggtctgttacttttactatcacaaaaagctgcaaaattcttgtttgcttttcagttgtgtgtgatgggtgtgtttaagacctggctttcgttcactttcctgggctttgttttcagtcttcatcaggcgttctgctgtgtgaccttctctgaggtcacgccatcgatgcttgctggttgtggagtgtggatcactgtcaggacatgattgggggcttgaaagagaatgtacctgttttaactggtgtgatttggagaaggaccaaattatatgaatgtcttaaaattgagtttgtagagatcttcctgttctgtcataccactattttttgaggattttgcacagtgtaaaatgacataatcatagattgctatggtttaggttgtatatacagttggaaaaaaaaaactatggattttaaatgtttggggaaattcctatggaaaaaagagagagatgtagaagagcctctaacaaggttgatgtgcatgcccaagggttttgagatttgagtgtgtaaatttccttttagcttatacaagaataaaataatttaaaagaaatttagccttttgtctttgtatctagtatctcagggaaaatataatacatttgaatgtgaggttttattcataattaataaattttgtttcaaatgaagtaatttggtaggacttcgacctggttaaagtcagggagaattagaacctgctctccaagaactgaatcgtgaggctggagagatggtccatagcccaagagcacttgttcttacagaggacccaggttctcctcccaaccatgtaact

SEQ ID NO: 19624 - DNA, 2011 bp, Mus musculus
ttcagaatggtaatgataaggatatcactgctgaactttctactcctgtgaaaagtcaatctgatgttgtactttctaccaccagcaaagaaatgattccatctaaaactttggatccttccatcgatggtatggaaagcctggaagacttagataaagtagtggtgcagggaccaagcactgggcaactcagaagtttctctcctggagattttagaactgataagaacattgttcaccaaaccaagcagttagagagctgcaacggtgaaaagcctccttgtctggaaattctaacaaacgggtttgcaggtttggaaactgtaaatcctcagggaacagatgacctggacaatgtggcagattcaaagggatcgaagcctcttaacacttgtggcaccgagtgcattttagagtctgcagctagtcatgctacggaatttgcagatttttctacattttcccaaacagaaaggacacaactggaagaaatagaatgtccagttttaaatgatggtgatacactgaccattcagggaaacagcaaaggccccagagtcaaggaactaaactgtgtgaaagaagtgactttggatggaagctttgaggatacggggaacactgaaagagaacatcaggtctgcgtctcagaaatccatgccgtagctgacagagggctcagtgttgaaaaacaagaccttcaaacactgcaacaggatgagtttctaaattcaaggattcagtctgaggcttggagcttggtagactcaagtgaaaattcagaagccattacaaaggagcggtgtaaaatggaaaaaaatgacttatttgcctctaagtgtgctgacttatccatggattctgttaaaacttcagacgttaatgaaattggttcttccaaagaagaaaacagaaagctgactaatcccaaaagcccagaccctgatcccacaggacaaaatgctttggatgattctgctgcaagcatgaaaaatggtgacagtgggaatggctttgtgacttgtcatgataccaatgaggatgattttggtgactttggtacagccaatggcaccactccaccctttgttactagtactcaagattcaatgagtgacgtcacttttgaagactcctcagagcattttctacatcttagtgaaccaggtgatgattttggagaatttgaggatacaaatgctgtttcttgtcaagaggaaatgagatttactgagtcagacctaagacagacttctgatggcttatcagaggaatgtccattggcaggagagtctggtggaaaagacagtaaacctgactcaaaactgaaaaatggtcaagacagtgaatttggagattttgattctgtgccaaatactcaaggtagtgcttttcaagactcggatgattttgcagacttcagttcagcaggtcctagccaagctgtagattggaatgcttttgaggatgaacagaaagatggttgttcttgggctgcctttggggatcagcaggagactgagtctcatcatctaaaggaagtctggcagtcacagaggacagatgaaactatgggcactctgggaacccctaagatgcacagtgtttcttcagcagcttccaaaggagcagttgctagtggccatttgcaggaaccaggcacttcagttcaggtatgtacttactgcctctgatttgtagaacatattaattgccaaggagacttctaatacagctttaaacaaaattacctgagtatctgtcaaagaggtttctgtgtgatatatgaggtttgttggtctggtttgcacattagttagatttttcacaaccctttgaaaaattgtaaaactgctacacagggagtgtcttaactagttaacaggaatttatcaatttaaattatccatggatagtatctgttttaaatagtagccatttttccttctgtttttatctttaataattatttcaattaacagactggtgaaatactttcagtttagaatgg

SEQ ID NO: 19625 - DNA, 1093 bp, Mus musculus
ctcaagcaaaggaatttttgaaagttccagacttctgaactctgagttttgaaaatctattttgagaaaaaaaagacatagtttaatttgatgccttcctttgtttagtgttcttgaatcaccgcccaccctcagtgttgagaggttgtgctgtagaactgagggtctgttggttcaaactatgttagtttacaatttgttgcagacattgtaaaatacagcaacatgtatattaatttttctatttatctttatcatagaaagtaccttagaatgttgtgataggctagcatggtaatgatggtgtcacacatttggtgtgagtggtagggtagtgagcacaaggctcaaaggtttgcaaagttaaggagaaagacaggagagcttcccccccccccagccccataattaggggatatttcataaaaccagaatatttcataaaaccagattcatattaattaccattgtctaaaaggtgtttgtttttaaccatattgacgttaaccagaaaatggtttttttccttaatctttctctcaagtgtagtactagaacaaaagttaatgctaagaaacgttttatatgctcctttgaatatgcaatttaatctagatgatctatttttctcccatgataactgatctgtttttagtgccagcaacatttggcaagtttatttttttggatataaactgtggttcatctgttcactgtttctaaaaaaaaaaagaaaaaaaagaaaaaagaaaagaaaaaagaaaaaaatcctatgagaaagtgaagaaattaacaagaaaattacttgatttgctctagaaaaattaaataaaaagtgttttgttaattattctgtatttggattattccaggcattagaacatctagagctgtaaagggttggctgcaatggtacctccctttgtagcccagcagaccagccttaactgtgggcttgactcctcaggagctggcctcagtgtgactcatggaaatgtttgcttagcggatgaaagtgaggacacaccgcaggggctgctgttctcttcctccatatgtgctgtgcaggacagtttcttctcaccgtagcctt

SEQ ID NO: 19626 - DNA, 1667 bp, Mus musculus
ttaacacttggaaaattgatggtattattgctgtggtcttctaaggagctactaagatgtcaaataattagaaaatagaaatagaaaattataaaactatccttttccaattatttgtttatttaaaagacttaaaaatatagcaccataataattaatttaaatctaatatgctggtttacctacacacacaaacaaaaaggtgtaacttgaatatatttgagttactgtgttacaaagtgatgaccggctttagacatcttcagctctgtatgttccaagttttggattctaaagtattaggaaatttcagctaaagtataaatgttttaaatcataaatataatatgatacaactaacatactaggaaaataaaaataacagtagcagttactaagctccgtcagttttatagctcatgcatcttttgtgtaatactaacttttgtcatgatgcggtgtttttaaaacttaggacggttttcttgaaaaattgaattccacggaattcatagcactctcgagattaatggagacattcatagtggacactgaacagatctgtgggaggaagagcacgtcactgcttggggcccttcagagccaagcaaataagtttgtgaacaggtttcatgaagagaggcggaccaagctcaggtagcgccgggtaccttctctgctttccttttctttacagaacagctgtggttaaagggtaaacgtagttgatcacaggccaaattcctccgaatgggggagtaagatcaaatttcttagattccgatggaattagactttttatctttgttgaagtcttttatcagttgatcctcactgaatgtctctttctcagggttgactaaattggttttcttagctgattttggctaggctaagagacaaacacctgtttgttctgttagtgggtgggtccagtttattctgttccttctagctaacgactgatcctgagatgtgcctgttaaagttcaccattttttcctttccttttgaacagcctcctcttagacaacgagcgttggaagcaggctgatgttcctgcagaatttcaggatcttgttgattctatagcggatggaaagattgctttacctgaaaaaaagccagtgggtatgtgtagtttgtcacacatggttcctcccactgtatattgatgacgatgagggcatacctctgtcccacagcctacagtctacattctacattatgcaaacaaaataggttttcgattaaagttatagagtgattgctttaacctcgtgcttcaaccttgtgctttttcctgctttgctgtgtgctgccagaaccccgtaagggtgccatgccccatccacatctcactgactcactagagactgatgtgggcaccaggaagtgaaggctacttgacatgtaataatgagtgattgcttgccggcaggcattgatattctaagccatttatagatgttatgtcattgatggtcctcacactaagcttttaacaaacacaggtgcttgagccctacacagttatgtaagtagttgcagaacaaggacttcagattcaggcagactgacatcaggatctttttcttatctgctgtgcctcaccctatctgtgcacaatagagagttaattaagagtgcttcctgtcactctgata

SEQ ID NO: 19627 - DNA, 1099 bp, Mus musculus
tgtttctgatttgtccccaaattggagtacttgctgtatagtagagacttgcttaaaattgccatgctgagggaatgacaagatttctcatcagtaaaaaaaaaatgcttttttttcttgcagagaacccaagtttggttcccagccacccctggtggtcagcaactatttttaactccagttaaactccaggggatccaaaactgtcttcttgcctccctgggcactgcacacatacggtgcacagatctatacacacacactaaaaccacctatacatatataataaaaataaataaatcttaaaaaacaacaacagaatgccatacagagaatggtgtttctacagcacagagtttgagaacaaattcattatcagtctcttagatgactctggaattatacaactaccaagattagtgtgtttccatagatgtttttaactggttgtttgactcttggtgagtgtctgagggttacccttttctcctagaaccgtcttgctgttaataagaatcattcttgaatattgccagtgtgtggataacatcccctccgtcactactgacatgctcactcgcctgacagatctgctgaaggtgaggacagctttacctgtttatctgaaaaacagccggagtataactaattcttaacttgggagacacttaccacgatatttctagggtaggggttttgtgatactgatcatgcgctgtccactccacattcagtgtgtgcataggtgtgaggtgcacacatgctcgtttgtactcatgtgtgctcacatggcctaacatccttagagctgcgaatagccctggagacaggtgctgagcatgacgtcactcaggtcagagcagggatgctgctttcacatgcatgcttgggatgtccagagactttatctgctatgatgtcacttttccagaaccattaatgggaagtgaaatggtgataatttcagctattttgtaataatgtctttatgtgctacgatagtaaactaccttacctaccccttgtgaattaagatgtatttttctcacataatctgatgattagcgtttcccctccctctcctcttcccagttccgtc

SEQ ID NO: 19628 - DNA, 1740 bp, Mus musculus
gttggatactcagtagtaccttcctaaagccccagttttcgtttactctctcagcactgccaggaaacctgagctttctttgagcttctctgttgaagccacatgtacatgttttagtgacaaccaattgaagtcatttcagtttagcttgttaattttttttagttcatgctttttagaaatctgattttatcagttagaatctaccatgaaaccttttcaaatcagtattaagtggacctttgatactggaaatttgctaagacaagtgtcaacattttcatccctagcaattctggatctaaaaaaatattctagcagctaggctaaaaaagtgaacgttgttcctttactatcagaagagaaagtattgtatttaaaatgcctttctccctactgttcaggttggtcacagcagatgtagctttttacactggaaatcttcaagccttaaaaggccttaaagatctggatctaaatatggccgagatctgggaacagaagaggtgatgacagactggagacccaggtcgttcatctgaccacgggatgtgtttctgaagaaaatctggatgcctggtgtgttaggaactgaacctgggacccaaagtgactgaggtgggggaagggaaaagaaggatcagtgttgggaactggattcagtgggatctacagagaaagccattctgtgcatccctgagtaaggagcaagtgatcaggtgtctataacatttttcattctctctggaaacagactcaggtttctttggaccaaatccaaaagaacacatagctgtaacacagctgtagctgcctagaatgctctgtatactttatattaaaaatgctctgcatttcttccagtgcaatgaaattcatatggtgtcccaccttatttaatgatggtacaattgaaaatattaaaatcttagtcaacctctgtagaaagttttctctatgaaagtaaagctgtttgagaaattatttttttacagatctttataaaaaataaacatcttttgattgcttggatttaggaattcagtttttgttttaatgaccaatgtcaagtttcaggttttgtgtgctgcatatttaactttttcactaccactgttatgtcactgggtaaaagcctcaaactgttaaatatatgggagactgattataaagaataaagaatatttgcatttacttatgcaactactaatttaaatactttccagaagtgggatacataaagctatggtttaatagctgtatttattaaagtacctatgaagggtttggggtagcattctgttttttctttgctttttcatttctagcagaggcaagaatacatattcatatacgcttacttatgaattaccattttaacatttagataacatgaaatatggccctcttgaattcttgcttttaagttccttttgatatgtatataagcaaagaccagggataaatggaatttttaaaatacaggctgctgtgttggggccagaaatacaaggttgatgagtaagctatctgaagacttttataatgcctaccttcaaaaccagaatcggcagcactctacaaatgaaagtgcctgtgtctcacaccaagaatcttgcctaacctgtcagagtgcctaatcttgtggttataatgtacaatgaaataatcttgtgggggttttttgttttctcaagaggaattttttttttttatcattgcagaggtatgtcattggtt

SEQ ID NO: 19629 - DNA, 1188 bp, Mus musculus
taagacatagaattgttgccagttaactgttctttaaacaggaaagggataggggccaaagagatagaaacttgtagagccaacataagacaacatggtggtaacgtggtatctattggtcatacctacactgaagcagcagagggagcatgctagccagcccaacctgctgccccaccgttttgctcactgcctagtgagctccagcaaagtgggagagagatcccctctcaagaaaagtagtacgtggcacatgaacacttgaggttgccctctggtccccccacacacatgtgcagatgtactgacacacaacaaaaccaaccctgtgtgtaatgtaacccagcaagcagccttggccatttgtgatgcagcctgtgtctgcctcctacttccatagctacctcttaggagacagcaggacacatcatgtcccattattggcctttcatgtttatttacttattatgagcttgattttaagataactagttgtatgtttcagctatgatttttaagtacaatctcttttttttcttcttcttcacttagggaacagttattattattgcaaatcatggtgacagaattgacatccccccaggagccgtgttagagaacaagattgtatctggaaaccttcggatcctggatcactgaaataagcactttcagatacactttctactaattatgggctaaagagtttcttataataaaatatcctctaagattataaaataagcaggtactttatttactatgttgtactctgcagtgttgattttttaaagtagttttctgcaatgagcttttagtctaaggaaagcatagatgaagcaatactttccttctttgatgaaaagcctagaaattagttcctcttaaagtgcaatattacttaacctcagaatcgggccagttctgtagatcctcaagagaagcttcagtgactgtccctttgaattgcctccgatttcaaaaataaataaataaatctacacgtttacttttgctgtctagtgctcactcttgtgaaatgcagaaaaagtcaagtactcttgctccaacataaacaggaaggtttgttcttgcagttttatcactagccagtccaggattttttttttttttctgattttcatttctaagactattaaacatagttgacactagaactaaacttga

SEQ ID NO: 19630 - DNA, 1130 bp, Mus musculus
ccagcaggcgactccactgcagctgcggtgcatctgatttccgtgccagcatggccttgctgacaggagggaggcccagagcttgctgtttgctgggcaagcactcttcccagctccaaagtcaaattgttgaaggtattttctccagaaagtaaacaaaatcgatgctggaagttcatttaggaatctgagatgaggaacttctctaaaatttggacatggcatatcgaggcataagacccaacaggacaaatactggaaataaaatatgccagttcaaactggttccttctaggagagtctggtgttggcaaatcaagcctggtgctttgctttgtgaaagaccaatttcatgaatttcaagagaatactgctggtgttgcctttctaacccaaactgtgtatcgatgacacaacagtaaattttgaaatatgagatgcagacggccaagaactaccggtatcatagcttagcaccaatgtactactgagaagcacaaacagccagagttgtgtatgatattacaaatgaggaatcctttgcgagagcaaaaaactgggttaaagaacttcaaaggcaagcaagtcctattattgtgttacttttgtcaggaaacaaagctaacttagcaaataaaacagccattgacttccaggaagcacagtcctatgcagatgacaacagcttattatttatggagacattagctaaattataaattatggtatgtaatataaaggttcccaaagaagcttttatcctaatctccaatagcaatggtggaagaggtagggtccctcagcatatagcaatgacttgcttgccactggcagctcagagacaaaggtgcacagatgtcaaggcctctagaagctgggaatgaaggattggcagcaggctcacttcttaacatggagaaacctgaaggtcctttaacacacgaaatacatgcaaaaacatatatggacacacatgtacacactcacactgttacactcactcactcaaacgcacacattcatacaaaaacacagtaacacacagacaggcccacaaggaaacactcatgcatatacacatgattttatgattgacatacctactgacacagaaaattactgcatagttg

SEQ ID NO: 19631 - DNA, 1226 bp, Mus musculus
ttgctgtaagtagaggctaggaagatgtttataggccaccctgtgggcactgaaaaccacctgcaatcaggtcttccacctggtgcatttctgtagctttgtgtgactggctagcaggcaacaatcagtgtgtcactcactaatgagagtaactcttggggaggggcctttgaaaaggttgtagaatctgtcctttgtttctaatcttggtgttttgagcccaaataatcagatgtgaaatctacaccacaggaaacaggcacccgtaattctaacaatgctaaaatatgtatgctaaaatccttttctaaagtctttgttaatttttttctctcgacctacagataattgaactttctcttcatgtcagatatcgtagtcatctattgttagctatttataaagagaaatcatacctgcagctactaagcaagctatggcatctctcttccataattatgactaattagtgggaactaaatatatacaaacaaaaatagggtgggactttgtgtgagagagaatgcagtaaccaccccgaccttcaccataaccgcattgcctgctgtccttgctctttggcagcccatcattcttgtgctgttggacatcacccccatgatgggtgttctggacggtgtcctgatggaactgcaagactgtgcccttccccttctgcagggtgagttgggaagtcaaagaaaacagatggtatagcactgcatagcttactaaagatagattgttttaaagatttgtattaaagattgtcagaaattgtttcacaaaagtgttttgttgttgttgtttgaactacactactgtttttaacgcaaataccaagaacaaataagtacaaaagcaagaagcaatcggtggcaagtcaagggcttgttttccctcatgcctacatataatttataatactaattaagtatagtatgctcaaggattttacatccaggttgtttgcattgtgctgttatttgaagtcatttagaagtaatagtaggatcctataacagactactttccattccaaggggtgttctccaggttgggtgctgctctaggcattagttgttccttgtatatttcctcttccatttgccaagcacaggtttgagatgggtaaactgtccttaaactgcccagcttgagggaaagcatgaactaactccgtgtcccatcagacatttcctagaagagcgactctccaggtcact

SEQ ID NO: 19632 - DNA, 1233 bp, Mus musculus
aggaattaggggctgctctagagtctctccaggtcagaatggtaaataaattggattccacttgtatccttaagtataattatttttgtctagtttttaaaattgcttcctgacagattaaaagaatctgtgctatcatatgcaatagtcctcaagacctacttacaaactgtattactaaaccctatgataatagagcctactgtatattaggagcaggagccaaatcaaaagtctagtccaatcccagatgatgtggcttgcatccataaagctaacactcagaaagtgaaggcagaagactggtgaatttagttggtttgaggccagcctgagcaaactgaggtagaggcgtggggggatggcaaaggcagcgggggactagagagcggagagaaatactatatttcattactacttaacttaatgaaatgtagactataattgccattcgtgacaagaccactcaaaatatagccaaacacatacctgttatttttaaaactgtcacaggccaaatgtatggtgcctgcttcaggaagtgtgtgagatcattctaacatgcatacacactctgtaatataacagacagctaccctcctgctgtaagaactcgttccctgggcaaaccaaagcagatccctgccatctcttccacagagcaccacccacaatccgaaggacaattctacctgggaacccttgcattggggagggggcggcaggagtgtgagtgccacagagcagccccacccccagaaagtctcacctctgagcagatggcaggcagccgacatctagctgcttagatggagtgcccacttcagctaaccccccactcccaccgcagaccacatcatcacgcccctggaacattcgtaattaaaacagaactgcatacaaatgcccaggccatgcttctatgaaagaacattaacaaccagcaagcctgattcgggtgctctctcgcaagtagtcagagctgtcctgatgaagatacagctgtttggcttaaaggaccgtggtgtgcaacccacattccttatccatgtttcatctttgttcgccttgcttcatgctttaggtgtgaatttagcatagcactagctcgagaaagcaacagttaccccttcccttcccccacgttaccctctatcttctcactgtgcccattaatctccagtataaaagccctaccagtgacaagggatttacttgaatgatagaagcggg

SEQ ID NO: 19633 - DNA, 1195 bp, Mus musculus
tcctccaggaaaagagccaagacctgctgaggtgctggctgaaggtgaaggaaatacagaatgggtagtagaggaaggtagttataaataccaattaaggccacgtaaccagttgcagaaacgaggattataaagtaatatgaatgcccattgtaaatttactaatgcgtttgcgattgtacgagggatagttatatcatgttaggcgtatttacaaccttgttattgtttcatgtgaacatgagatattatttgtgtcaagttgacaaggggtggattgtagtggctattcctggttgtcaacttgacaatatttggaatgaactacaattcggaattggaaggctcaccagtgacccttatctggaggcttggagatccttatctggatcttggtttgaagatcttgagccatagtggctatggattccagaagattgaatctccgagtttaaggaacacacctttaatctgggctactcctttcatctgggattaaaggtgtggtggaacacacctttaatctgggctacaccttctgctggagacaatataaggacattggaagaaggaagtctagctctagctcttgctcctttgcctgcttgctgcgtgagactgagtaactgctagatccttggacttccattcacagctgcgactgaacaattgttgggaattcggctgccgactgtaagtcatcaataaattcctttactatttagagattatccataagttctgtgactctagagaaccctgactaatacagtacccaaggagctaaagggatctgcaaccctataggtggagcaacaatatgaactaaccagtaccccagagctcgtatctctagctgcatgtgtatcaaaagatggcctaatcggccatcactggaaagagaggcccattggacttgcaaactttatatgccccagtacaggggaacgccagggccaaaaagtgggagtgggtgggtaggggagtgggggggggtatgggggacttttgggatagcattggaaatgaaaatgagaaaaatacctaatcaaaaaaaaaaagaaataaaaagaaataaacaaacaaaaagaaaaaaaaagaaagaaagactcacagttacagcctgcatatcacctggtactatgaaagccagcaggcagggtagaagcttcctggtcagtaccaattttatttc

SEQ ID NO: 19634 - DNA, 1154 bp, Mus musculus
tgagtgtgtgtacatgtgcacatgcatggatatagtagaatactctattggggtacttgatcatctttcagtcagtaatagcaggagtgagctcttaaccatgctttctgttgcacatttaccaggagacttgaggttggcagcacaaactcccacccccactccacccctgctcccatctatcctagaacagcttggcctccaggaaaggaactaaagtcaaacacacttgggacaggttactctcaggatgagtgatgagtctgattcttcacgttccagcccctaagcatttgcctcaaatgatcaaaatgacaaggcaggaatgtttttgtaggagagcccgatactgtttccagtgtattttccacttgcataactttgcttttgtccctgaatagagcataaggtggagtgttctccactgaaataataaaaatctctttcctggcatgtacgtattcagatctgtgcctgatactgtgtgtgttattaactatagctaggtttgctgagagcaaagtgtttttatctttggtgaggaaatttgtgaactcttggttgcttggcctccacgagtggaggaagcattgtggcagcggcttgagaggtcttaggcttttggagtgtgtgtgtgtgtgtgtgtttcatttttcaatctatttgttggtttgggtttatttgtaaaagggcttattccatctcatgcagcaagagctgttttaccgcccagggagctgtttttgtagctttacagactcaagttttcaaaataagccagacacccctttgtggaagttttgtgtgagaaggagtcatacaataacgctctaagtgtatgtgtgtgttaacctcataaacaaaaatcagaaatggaaagaaaacaagtaaaaatttgcattaagatgttataatggatgaaaggagggtaagattgcttactggacaagcatgaagaactgagttcacattttagtaccagtgataataatgataataataataataaataataataagcctggcgtggccacaggagcctacctaagcattgtacaggatggagataggaccacccctgaggcttgctggttactaacttagcttcaagttgagtgagagatcctgtcttcaaagaataaggacacctaatg

SEQ ID NO: 19635 - DNA, 1483 bp, Mus musculus
tattgatgatgtttatacgggaatgtgccttcagaaactgggccttgttccagagaagcacaaaggcttcaggacatttgatattgaagagaaaaataagaaaaatatttgttcctatatagacctaatgttagtacatagcagaaaacctcaagagatgattgatatctggtctcagttgcaaagtcctaatttaaaatgctgaaatagacatgagctgcatttcacagaaaggcctagcctgactagttcccatggtgtgctctcacaataggtgagttctgtgtgaggctattagccttcatgagcaggtagcccctgggctcccaagccctcagtccttcccttgccttgtgaagagggaaggctgaagacagctcagcatggcagggtgagtggttatgacccttcctctggctgccggtcctcagtttctaatttgttttctttctcctccacaattatgtatgtatgtgtgtatatatgtgtgtgtgtacatacatacatatatatatatgtaggacacaacctggtggctttgtgaaatggaattctatgtattttcataagattttgaaagttgtctagaaagtagactgatgtcaatctcccgtcacccagcagtattgtccttgttactagaaaccgttacttcctttatgcaaggaaagccacgcagtgcgtgtagttcatcttgtcagggcttatggccatgaggacagaggggattttctttttacttgtgtttggtttcctgggtggcatcatggtagttaacctatttttagtatttgaagatcatgagtgtgattccctaatggccaactggagactgagtagcccgacagccatgggtctgtgagtgttcagagactgggaagcattcgccacttctgagctttggacgtgattagtcagttaaaaccccaagattctattcttgccatattatcacgtattccttagataaaattctgggtagtgacacttccctgtctcagtgtagaagtgcctgtgcttttatttattgttcagatcaaacaccaaaacattttcttaaaaaatattttgtgtaatattttatttgtatacagtgtttgtgaaatatttaactagagcatgatattttattttttctcatttttaattctttgagaatttcatacaatgtgttttgattgtattcacctccccatctcctcccagatccagcatgatgttttaaatgttaagctgtaacatgttagataaagttaactcttatttttgaattttaaaatttggatgggggggtatgaactgctagagaaaataaagttctgccaaaatattgcatatactagtatcttgtaacatgctttcttgaaatatttttgtgctttagagggttctcacctgtgctacaggggactgggaaaaagtggaaataaagtgattgtattttttaatcatcacgtataataagtgatactctttctgttct

SEQ ID NO: 19636 - DNA, 1138 bp, Mus musculus
tctctgttggaagccaatgaacttaaaacattccaccaattttcattttatttacattggtagagtaggaaataattcggggttgggtctgcatttttaaatgacagacattaagagcgaattacatgacactgtacttagtgtaacatgtaatttatagtgatattatgtgcatgtgtacatattagatcacagaattaaaaatgtgctattatgaattgtaagtgacttagtttgcaaagctctgatttgtatgtatgtacctttttaagcaaagtagttgaacaattacaaggttatttacttagtgatatttgcttctgccctccaagtgtctaaaatacattaactattacatagtgattgtaatgggccaggcaggatttcaaaagcctgtgtgtaaaaattgcatattttgtacaaccaaccccctttgtagatggaaaagttgaagatttagtttgaaacagagctgatgagtcaggagtccttattttagaacatttattcttaggaagacttttttaaaaatacagaatgggtctcactgtgtagccttggctggcctggaactgggcagttcatctgcctctgcctcttgagtgctggaagtaaaggtatgtgtccatgctaagcctaaagtgtctgtgggcatcagagtcacagttcactaacgtacttccctgccttttcccaggtatgagagatgagtgtggggcgtcgaagagtcaagttgctgggcatcctgatgatggcaaatgtcttcatttatttgattgtggaagtctccaaaaacagtagccaagacaaaaatggaaagggaggagtaataatcccgaaagagaagttctggaagccacccagcactccccgggcatactggaacagggaacaggagaagctgaacaggtggtacaatcccatcttgaacagggtggccaatcagacaggggagctagccacatctccaaacacaagtcacctgagctattgtgaaccagactcgacggtcatgacagctgtgacagattttaataatctgccggacagatttaaagactttctcttgtatttgagatgccggaattactcgctgcttatagatcaaccgaagaaatgtgcaaagaagcccttctta

SEQ ID NO: 19637 - DNA, 1194 bp, Mus musculus
ccctgggcctctgcaccttgctcatgccagataaagaaccttagctagagctcgagtcttagtcactgttgtgtcactgtgaggagacactattaccaaagcattacatttgggggcttaagtacagttttagagggttagttcatgatcatcacggcaggaagcaagcaggcatggtgctggagcagtagctgagagctttatatcctgatcagcaggcagagagggggtgtggaggaaggagattggtcttgggcttttgaaaccttgacgcccatttccagtgacacacttcctccagcaaggccactcctagtccttcccatcctgctcatcatctggatgcaaatgtatgtgcctaggggccattttcattcaaaccactactgctgtcttgcaggtttttccttaaacatctttttgtgttttacaggaatctgaatttttgtgtctggaatttgatgaagttaaagtcaagcaaatcctgaagaagctgtcagaggtagaagagagtatcaacaggctgatgcaggcagcctaactgaagagagtatcaataggctgatgcaggcagcctaactgaaggctggaggaaggggcgtttgaagtgaagctgctcacagactttctccactgaccctttgaaagtcctgtttgcccactggtgttaccaaaagacattgtatacatgcatgaaagtcttcaagaataaataaaaatatattttaaaaagtgggtaaaaaagagaaacctctcaaagtccaatcttgcttgtctctgcttgttgggttctttattttcccatctgttccactggagagggtctcatattttagcatgcataaagattatgagggacatttataaaaacatactgaaatttgccaagtggtggtacacacacttttattaatcccagcacttgggaggcagatgcaggcagatctctgagttccagttcagtcaggtttacctaaagtaaccctgtctcaaataagtaaaaacaaacaaaaagtgaaattaaacaggaggctggagggtaagcactcatttagtgtgcaaggaggtgaggcaggttcacctcagagcctcagggtcaacagaattgacactttagaattctttccagctgttgtttgttcttgggagagctgttagtcatccacacaggacacattgtgtatcatataatat

SEQ ID NO: 19638 - DNA, 1729 bp, Mus musculus
ggtgtgctatgatgttgtgagcattaattgctaaactgtatctaacactgcctcaagaagactagtaataataatttctataacggaattggttttaagattgaggtaaaatgatcagtagagctaacgaaagaataaggagtttttagctggacatggtggcacacacctttgattccaggactcagcaggtgcaggcaagcagatctggtttgaagccagcctggtctacaaaatacattctaggaaaaccagggttgtacaacttaggtaggaattcttcacataaaattaaatgcctttttttcctttattgctatttgcaatcttgatagtgtcaagtgttgtaataaaagaaaagcatatatattcttaacttgtatatggagcaatttgcaaactgggtggagaaaacaactttaactttagtgtcttatctactgtatcctaataggtgataataagtccttgtaaatctaaagtcggtatttcttaaattattgcttctgtagaagtaactttctgttgtaaatctaggttgtctctcagtattcaagtctactctctccaatgagtgtcaatgcggtgatgaaagtgattgacccagccacagctaccagtgtagatcttcgagatattaaaatagttaagaagcttgggtaagcgtctctgatttcaatttcagttttgccaaaaccagataactttgaagaacaactaggggtggcttatacatttagtgccagcaattgattggctgaggtgggaggctagctatgagttcaaggccagcctggaataaatagtgagttccatgacaggctgagctagagtgaggttctgtctccacaaaaccctttaaaaacaaagatgttcttagtccgattacctttctgcctgggccagtggatgtaacataagtgaaaataactctgaaagtgaacattagaaatacttgctgacttaaactttattatatatggtatcctcaagggtttgcctgtatttccttatggtaggatggaagtatatccaagaggtcccagaatgggttctgagaatgagtaagaccaaagcatttcctctgctctgattattttttcctagtgggacaatagatgactgtgagctggtggaaggcctcgttctcacacagaaagtagcaaattctggcataacaagagttgaaaaggctaagattgggcttattcagttttgcttatctgctcctaaaacagatgtaagtaaaatccaagctggtttcctacttattaactttctagtaagatctgtttttttaagatgaaaatagaaaatgctggtattagtgatgtctttaaaatgtagattcaaaacaataaaattgagacaaaatcagaaattgttgctactacaagtaataaggtggagactgattataggcatttgcataaaatagaaaggtgtgtgtgtgtgtgtgtgtgtgtgtgtgtgtgtgtgtgtgttgtactcattccttgagtttgcagattgtgtctagcttcctgagatattacctgctggagcccacaaagattgtgtttgtgcaagtggagccttagactaacttgatagccaaactataaaaattttttttatgaaagatattaccatattagtatgattctctaaaaagtgtgttggtacctcagatttgtttttactatattctgccaacatataggtgtgttcagtattttgttcaaaaaaa

SEQ ID NO: 19639 - DNA, 1804 bp, Mus musculus
aaattggtttttgcttagctttgatcaggacggtaatgtctgtcttgctggatcacagggttgctgttactaggattggtttgctcgtttgtgagaattgtgcttctgaataatgtaagcggtcacctagcaaaatgtgctcacttcttaagaatcacagcccacttgtcatgtacagttttgtgtcatagtaatttttctagtaaaattagaaaccttcagaagaatttttgaacttctactgggtataataatgtcccaagcctttgatccagcacttaggaagcagaggcaggcagatttctcagttctagacaactaaagctacataggaagagtttgtctcaaaaggaagagggagagaattttgaacttgtaaatggaacattaaaagtgtttcccttcataattagccatttggataagagtaaaattaaaatcttaactactcaacaataacactttttaaacgtaagataacacttttgtgttttagagatgcccttagtgatcttgcattacattttctgaataagatgaagattatggtggttaaggacgttgaaagagaagacattgaattcatctgtaaggtaaaattaatgtgtgcaaaaatatccattaacatgtattgtgggtttgatttgtatgttatggatagttgtttggtttagtttttaattttaagtttttttgttttgtttttatgtatgtgcttgcatgcatgtatctctctgcaccatatggtcctcttagagacctcatgtgggcttcaggtccacctggagctatgaactgccattgggtactctggaagagcacccagcctcttaactactgaaccatgtctccaggcccagcagtggtttttttttgttttgcagtccagtgttgagtctagtgctttgaataaaataccagacaagtgcttgttcttccactgagctttgtgtctagcacaatgctgtcttgatatgtgcacttgattatctttttccagacaattggaaccaaaccagttgctcacattgaccagttcactgctgacatgctgggttctgctgagttagcagaggaagtcagtttaaatggttctggaaaactattcaaggtaacaatatattgttaagcctttttttcttacctttttgtttttttcttttagccaattacttaatttgaaatttgttcactaaagattacaggttgtacaagcccagggaaaacagttacaattgtcgtacgtggttctaacaaactggtgattgaagaagctgagcgctccattcatgatgctctctgtgtcatccgatgcttagtaaagaaaaggtactgcatcatatttattactctgtgtgtgtgtgtgtgtgtgcgcgcgcgcgcacaatgtagcatctcggggggtggggtcctggggcaatctcttcttttcctaccatcatgtaggtcccagggatcaaacttgggttggtgtcaggcattttacatgctgagccatcttgctggcctcaatattctgaagactttaatttgaggctgggatataatacctaccattgataacagtaattgaccagttcagcctccacccagcactgcatacagcagatgtggtggggcacatctgtaacacttaggaagtgggggaggaagatcaaaagctctgtgtcttcctctactttatccaagttacagggcagcttacctttaaaagacaaccaaactgctttatcttgacttttataaagttagtaaagtagcttcctttggggtaaaaataagctaaaaatatttgtgaatttca

SEQ ID NO: 19640 - DNA, 1485 bp, Mus musculus
cccatttctacagtaacagagctaagaaaccgccatgcccaaggagaaaaaactacaggcattaatgtccgaaaggtaatagtcttggtgcttagagttgctgaagaacagattggtggaaggaaacgtttacaattttgtcattgttggttagtaggcttttgaacttaaaagtagtgtgattttggatttacacctgagacctggcaagtttactgcatgttcttcagaataaagatgatgccatgggaaatagcatttatttactgtcatttactaacttgtaaaacttagtctggtctttgacttcctgggttgtaagaacagtacctcataggtcttttgggagggcactagttaagtagatataaagtgtgaacagggtattctgttgtatcagcaattagcatgccagatgagtacagaagagtgatacctgtgctcgtgtttattgtgtgatcagatactgaaggcatctgcttctccgcagggtgggatctccaacattttggaggaaatggttgttcagcctctgttggtgtcagtcagtgctttgaccttagcaactgaaactgtgcggagcattctgaaaatcgatgatgtggtaagcgaatagagttaaattccaggggaagtcaaaaaggcatacttaaaagttttatattttgcttaaaagcttgctactcatcaagaagagactaattcatgactaattttttttccataaaaatgaagcaaagatttatcttaaacatgattacaagttatgtgattacaagttttgaaacctaagtgtttttttctcatcaggtaaatactcgataatctggataaaaggatggttgactgcatcattatggacagaagtactgtggctggaatgaaggacaaccaccttgttccttgtctggaagcttcagagtttttggacattgtcttccagttggcatttgtttgaaattgtattgaaacaatttaatgaaaacattaaatacttggttttaaactccatattaacttgtcattttaaaattatactgtttttgatacttgggagaaactgcctataggtaaactaccttcaaattttaacatttacctattgatcttacagcttaattctgtgtattaacattatttttgtttgttcacttgtggttgtttggtttgtaggtttttgttttgtgagacatctcaactgtccttgaacatttgatctgtgtaccttccaagtgctagaattaacagatgtacactgtgacgcccagtttgtacagctcttgagattgaaacccagggcatactaccaaatgaaccgtccccctatcctggttggtggttttagttttcagattgtgctcatatagctgggcccggaattgattgtgtcctgcagattatctcagctcttgatcctcccttgtcaaccttaaatgaatgctgagattacaggtgtgtgccagatgttaggtctttaatttcctt

SEQ ID NO: 19641 - DNA, 1224 bp, Mus musculus
tatattattcagagttctaaacaaacatataagatgcttgtaaaaaaaaataaaacaataactttcatattagaactgtcacatctttcaactgtacattgcatctgaggtttttgtttctctttcaggacagggtctgacataaaccagtctggccttgaactcccagcagagctggcaactttgaactcccaggtgctgatattacaagtgtgcaccagttttacacagtgctacagatcaaagccagagcatcatgtgtacctatatcatctgagtcaaatccccaacctatatatatttagtcagaggcttattaatccagactcgcctcaaacttgctacttagccaaagctagtctgcactcccatcctcctgtgcctacttcccatgttctaaaattataggcttgagtcaccatatccagtgattgcctggaaattttattttattatttatttgcttgtttgtttatttaattacttatttatttatccggtgatagcctagaatgttttacttgcttatttatttattttgttgtttgtttgtttgttttgagacagggattctctgtgtatcacttactgtcctgaaactcactctgtagactaggctgtcctcaaactcaaagattcacctgcctcagcctcattggatactgggattaaaggcatatgccaccaacacctgactgttgtttttttttaagcatacaagtgtcaatggttttaaatataaaagatactgtacacatttaatcaaaattttctgtgttttacttgatcttattgggtctgttggtcacagtatttgtaagccaggcacagtagcagtagtctcattatactgtggagaatacaattctccataaaaggcttttgaacttctttaagaaataaacaattccagatctgagtagagaaacgtaagttggtccttgaaactatcactgtgccttaaggaaaggaagtggaccaactggtggggagccagttcatggggcctcacgatggccaaattaggagaatgtaagcataattctagaactttaatgatggtaatacttataacataccaaataaatgaattcatcagtcataatgatatatcacctaaaagaagcaggaagccctttagggactgctgtctaacatagagtagataaacaatttaagaaaatggccattggataagccccaatatcacaacacattcgggga

SEQ ID NO: 19642 - DNA, 1206 bp, Mus musculus
cccagctaagtaaagctttattcaaatttccattagtgtgtaacttccagaaaatgattaaaattcgcctgcgtggaagagttaatccactggcagctttctgtcacctttacatttcaaccatctttgccactagcagagaaagggatgtgattcctttgtgcaaagtgaattttggcttagagaattgacttatagaagaaatagtatactctctttgtttgtttgtttgtttgtttgtttgtttttgagacagggtttctctgtgtagccctggctgtcctggaactcactctgtagaccaggctggcctcgaactcagaaatccacctgcctctgcctctcaagtgctgagtagtatactcttaattcatttattttctgctaatgaatgtttctttgaccatttttgctataaaagaataccacagactaggtaatttatgaagttcagagatttgcttctttcagacaaagagaagtccaccatgagggcggtggtgtcttataagggccttcctgctccacatggtgttcaaggaggcattctatggggagaaggcacacatctcagcataaaggtctcaacatcaggatttcaaacagctctactcgattctgaaagtaccctcctctaggtatcgcctgcatatgagtctggggaataaggttccaatcttaaatgtttcagagatatattcaaaccattgcattattattttaagattataattagtgattatgattgtgaacaagccatgtgagatgtgctgtcttgatatttaacagtctatgtgcccctttcagtgaaaagtatgtatggattttatattattttccttttgtctgatatactgacttgttcttatttgttgggtttttattgttttgagacaggatttggagagtctcgctatgttgccctggctggtttgggattttctgtttaccaggccagtcgaactcacatagatctgactgcctcttccttctgagagctgggattaaagtcacagaccataatgtctagccttgatatgctggctttcatatatgtattgaaatgtaaaaatggaagtttacagttgatacacaatacatggaaatcataagaaaatccagtggtctttatgatatctcgtgaacattttgttctacaaaggtagattaatattccatagacacatagagaaagataattcttaa

SEQ ID NO: 19643 - DNA, 1099 bp, Mus musculus
gtgacccagagcctcatcctggctgcctgatgaagaaagtctccttctagctgcctttgaatcaaaatgtaggactctcagaaactccagcaccatgtctgcctgcatgctaccaaactttctgccatgataatggactaagcttctgaaactgcaagtcagccccaattaaatgttttcctttataagaatcgccatggtcatggtgtctcttcacagcagaaaaaggctaagacaggcaggctgttacaacctttgaactcagcagcactcctccttaggctcccaagtgctaggaatacaggtatgactgtgatatatgcaattcccaacacataatacacagtacacagtaggacataaattgctttttaaatgaacaaaagagcaagtgaagaacaagagaggatggggagaggatctagtggctctgtccctactatcaagagggtctagtggtcctgtttctactatcagagtgtttgggaaattttgctgttttgttcatttttgcttatttgtttatttcttcttccagtggtgggaattgaattcagaggtttgtacattgtaggctagcactctaccactgatctacatccccactctggtttttctcttttaatatcatccctagttataataaaacctgtattgcctgtagggaaacatctttcagtttgttcctctttcagtctatgtcacgtttgcaataagttgcctgtaacgatcttgatttcccagacttcccttcattgctatcccccaacccctcacctccagcctgtagaaatcactgtgcatttcccctaggctaacctggacaagacaccttttctttctgcattatttactacctggatttaaacttggatgactcagagttaaattaaatcttaatgcctacagtcctctctgcttttgttatatagcaagaaaactggtcacagtgggtgcaaaagtgcctgttacattgtgtcctggcatatctgctttgcattggcaaagtacttaaggggaaagaagactcaattaggttttgttttactttgttttgtttatctgagctaggatagcacataccctcaaactccatttg

SEQ ID NO: 19644 - DNA, 1201 bp, Mus musculus
gctctgatccatctgaccttctgtgactcaggcctgcaggcaaagattgaatgagagtagcagttggaccaagtaagacttactaggaaaagattcattattttatgctgttttaatacaagttctcacagcagtcatttctcagggaggacattaagataagacacttcacagctttggatgtattggtagtcgtttgtaatcctagaacgcagaagccagaggcttgtactttccaagcaactgagttctttcaaattccagtgccttttacaagcatgatatatgttgagtgtatttctaatagagtggtatagatgcagatgcccttaggccagaagaggatggtaatcgatccccctggagctgcaattacaggcagttgtgaatactggtaactggtacatttctcacatgtttctagaaagtgaagtatcacttcactgtgttgttagggtgtgcattattctctgtactttacgttataatgaattctaaagaacacactaacttaaattgttttggtgtaacattctagcaaagaatggctcaagaagtactgacacatttaaaggagcatcctgatgcttggacacgggtcgacacaatattggagttttcgcagaacatgaacacgaaagtaagcaagtggtggtttaaaaatcattattcttttcttccagtcgtaaactttgaggaaggtatctcatttttagtattagcagttgttaccaaatcattttatattgctaacttatttcagaatttctctaaagcttagaattcttgcaaatagtcctaagaattatgaagtttttataactgggactagagtgcaaggtgttttttttcttttggggggtggctgggtatttttccatcgtagaacatgtgtagagtaagttgtaaaagttattcagagatgagataataacattattttgggcaattaatacaatataggttaggcaccaccaacacccagtagtctggacagcttaaaatcctactccgtggtaccagtattttcaatgagacagcactcagttcttatttgcacttgaaaatgttataactcagggctctttgtttttatttttttaatttttttggcttgagtttgaacagaagggttgatcaaaatgtgttttgactgtttattgcttggtgattcacgcttctctttaaacgccttaaagta

SEQ ID NO: 19645 - DNA, 1099 bp, Mus musculus
tatagaatagctactatagatcagccatggtgtgattgtgtatatcttacctgtaatgttagatagaaatttttatgtttttctctttgaaatattaaggctttagggataccatgataatagttctagaagtttgaggttgaatattgtgaatactgatcacactggaaaactgaccagtgttccctcagactgatgaagatctgttgttgctggtgtaaaagaattgttttaagccccaatttgattcatctgaatgcactgctagtgttgttgttgccttcttgaggaaaagtctgatagaaaaattaaaaaactttaacatcagtctggattggccagaaacaaatccaagatagtcctttgtatgttagtattagcaatggctgttgtcattttagaggttttttttgatggtttcataatatatagattgatgatggttttcaacttgcagatgcttcctttaaacactaatatccgacttgcatactcgaatgggaaagatgatgaacagaactttattcaaaatctcagcctgtttctctgtacctttctaaaagagcacggtcaacttctagaaaaacgactgaatctcagggaagcactcatggaggtaagtctggtttttgtcatttatttctataaaaagatgctcttggatatgagcctgttaggtgtatgtggattttggagatggggtcctgtatgtactcctgcctggctgtccttgaactcactgtgtaggatgtggtaacctcaaactcagagatcttactgcctctgcctgccagatgcttggattgtatgcaggtactgggctcagttttgtttttggtttggtttggtttggtttttcaacacagggtttctctgtatagccctggctgtcctggaactcagaaatcagccagcctttgtctcccgagtgctgggattaaaggtgtgtgccaccatgcccagcattacttttaatatgtacttttttttgcatgttgtaaagaactacctttactgtgttcttcatggttatgtaatatttcagtgtgagaatttacacattttgtgtttttagcccttgtggcattttactttgttc

SEQ ID NO: 19646 - DNA, 1146 bp, Mus musculus
ggggaggaggcatgagcatctagttttcagggatttctaaaatactgagtcaattcagcagtgaaaattgattacttttaaatggagccattctagcatctggtagggacatgtttcatcatccttcatagagctcatgagttttgtatatgctctttgtccattagctcttagtatctatcttaaaaaccagtgtggtgttagaacttttttttgttgttcttttggttggttggttgtttttgtttgtttgtttgttttttgtttttttgatttcctgtatagcccgggctgtcctagaactcagatttgcctcccaaatggtggaattaaatgtgtgtgtcactacacccagtgttgatttggcgatttgtttttcatcaattctctagcccctatctcatctctgcctgtgcgtggaggtgtgtgtcatggcttgcatgtgcaagactaagtatgcttgcttgctgctgttcctgggaacctgggtttgatttcttactggttccaatgtgtctgttatactcttctgacctccacaggcacaatgtacacagtatgtgtgtgtgtgtgtgtgtgtgtgtgtgtgtgtgtgtgtgtacacagacagagtataagcatccatacacataaacttgagggcaggatttactctttactgacctatgctccactgtaagagagacaactttcttttctgggcattttggcttgctttctctgggaccctgtaggaattcccatgtgtaggaatcctgctgtctggatacccatgggtaattgcatggctcgtaggctgcccctatgaaagggttattcaacacctttaggatcaggactgaaaggttgagaaccagtgtttatgattgtttagcttttatgaatgtctttactccatattcttgcctggagcctgtggaagccagaagtgggtggtggatgccattgaaccaaggttgtggatatagttgtgagccatgaagtacattggtgctaggaatcaattctttgcagcagcaaaaagcattgtaagctgctgagccacctctccagctccaatttattttttgacacagggtctcatgtattccaggctagtcttccaacttaatgatcattctgtctctactttctaaattctggaca

SEQ ID NO: 19647 - DNA, 1456 bp, Mus musculus
agagaaacagcccttcgacaggctcaggaggagaaacataaacttcaaatgtctgtacctgggattcttaatccacacgaaattccagaagaaatgtgtgattaaaatctgaagtcatgctaggcttttttctctctgcaacatttgttcctggaagaaaagagcagatggattatttgtcgaccaaaatgatgccaatttgtaaattaaaatgtcacctagtggccctttttcttatgtgttttttgtataagaaattttctgtgaaatattctttcattgtttaagcttttgttttggtcatctttattcagtttgcatgaagttgaaaattacggcatttttaagataacttttacttcatgcccattttgaggcaatgctgtgggaggcagtaaatttgatttgaaaatagacttgtaaattctaatacaaaattataaattttttcttgtaaacaatacaaattttaattagggagcatttttttctagcctgtatcttggcctagaagaaacgtaatgagtaaagcaattgcgtcaagggggttctagagctgcattgtccggagttggcacctcctgagctgaattgtctgtctctagactacgtgtattaaagtctgtgtgtcaagtttgcagcaagatcatgtgcatatcatcccattgtaaagcaacttcaaaaatatgggaacagttagttatttttacacagttctttttgtttgtgtgtgtgtgtgtgtgctgtcgcttgtcgacaacagctttttgttttcctcaatgaggagtgttgctcatttgtgagccttcattaactcaaagtgaaatggttaaaaatatttatcctgttagaataggctgcatctttttaacaactcattaaaacaacaacaacaacaacgaaaacaaaactctggcttttgagatgacttatactaatttacattgtttaccaagctgtagtgctttaagaacactacttaaaaggcaaaataaacttggtttacatttattttcccttcactgacttaaaattattcctacttaatgaaggtgattttaaggattgtaatactttatatgaagtttcgtacttgtcttgttaaaaggactcctacctgggagtggtgcctcatgcttttagctcagcactacagtcagagactggatctcttgagttggaggttaccttagtctacctagtgacttccagtacagttagggctactctgtctccaaaacaagggttctaagatagttggtaggttttaacagtcagagctttgtgccaaagtcttataatcccatcagagtctggtggatctcgagttttgttttacttttggttttttgagggagtttctctgtgtagccctggctgtcctggaagttgctatgtagaccaggctggcctcgaactcagaaactggcttatctctggattaaaggcaggcatc

SEQ ID NO: 19648 - DNA, 1154 bp, Mus musculus
acaaaaaaaagataacagccttgatcttgataacagcttgagtcactgtggggtttagggaacatctttttgtgcagctctagttagtggctgtgtaagtagattagctttggaaggagtacaggcatactcttcatcctcgcaactggcacctgaggctgtaggcttagagttttcaagggtaccttggtcacttgagtcccaatggaaataagtgttagccaaacagtggccctagaaagaaagatgtttatagtggtgcgtgtaactagttaatgtgttgtcttagagtctctgcttgacaacaaaactgttaggctaatatgaccaggatggcaagaaaaaaaaggctcacttatatttgaattgagatgtggagttagtgtgtacagtgtgacaaggggttgtagttatggttgtaagcctgcatcaaggagacagcctagctaatttggtagaggttatcttcttgggggttgtggggggtaggtagtccacttactcagcatatcaggtattcaaggattcaaagatcaggtaggccagggaaagcaagaaagaccctgaattcccttgccagtcttggaaaagagagctggaactgtgcttaatgatggatatcatttgagtaaattttagaatacaataaaatgtctaagcacacttaataaagtgcttaaattacagtgtacatcaaccagtgcaaattcctctgaaattggtgtgtgtgtatgtagaatttgacaaagttgcttctttccaaagaagttctgggcattgaattctggttgtccagcttgcttgcaagcacctttacccgctaaaccatcttgttggccttttgcctcttgacttgaatttttgagtacacaaaataatgcaagagtagggtttggcttacaaaggtggtggttcagtgcttggagtgtttgctggagctgggaaggtggctctggttaagagcacttgcagttgaagaggccctgggttcagttcccagttccacttaagtctataactttttacagatacctaaatatgtgagtcaaaacataaaatttaaaagtagtaaaataaactgggcagtggtgactcatgcacagcactcgggaggcagaggcaagtggatttctgagttcaaggccagcctggtc

SEQ ID NO: 19649 - DNA, 1294 bp, Mus musculus
atcatatgtttattgggttttagaagaaaaccaaaatccccagtgctttgaatgcatgccttaacaatgtttgctagtgtttaggaaggaaatgtgctgtgtcttatgaagtcagctcctaatcactaaatccagaactgtaaatacgacagattttagagagtgacaaagcattatggagcacccaatgataaatgacttggttctttgcaattgtgaggtcaagctggaatctaagcaatgacacaattaagagttttttttaaactattaagtaaaatagtttaaattgcagctcactaaatgtcttagtgggtggacgtacttgaagcctgatgccctgagttccgtccactgtgagccatataagtggcagtaagggccaactccctacattgtcttgtgacccccacatccatagtgtggcacaccccacatacctgcacacacagtaagtacatgtaaagattccaggagtctcataaaacggaggtttggagcaaaggaatgttggtaaatttctgttgggattttcagaagtgtctggtgagtttgtgtgctttctgtttttgaatcattaggtatttatgcaagctctctgatcaggagttacgacagagtgcggctcgtaatatggctgacctaatgtggagtacagtgaaagagccattggatacaacactgtgctttgataaggaaagtctagaccttgcatttaaatactttatgtcaccaactctgaccatgaggttggctggattgagtcagataacagtaagcaatgcttcctttgtttttggtaactcgtttgtttgcttgctaaacaaatgtaataatgatactagagaaggactttattattctaggtttaatgcatggattattttgtattgccttcacaaataatctctgtattttccttattttaaaactgagactagtgagaactaaagtaatggcacagtggttgagagcatttattgtccttgagaggacctggtttgattctcctcacccatatgtaggctgacaactccagtcccatggcatctgatgcctcttttatggtggtgcatttacatatattcaggcaaacactcataaaataaaaataaatctttaaaactaagagtgaagctttgatttgtactttagatctatttgatctaaaaaaatgagatccgagtctcatcattgttacacagtttattttgcttatattgtttatttagccagtgtcttagtatattgtcaaagctagtcttgaattcctacacacaggtgctagttatct

SEQ ID NO: 19650 - DNA, 1162 bp, Mus musculus
catgcaggttgttattgggaacaattctttatgtgttcatctcttaggtaacacatacttcctattttgcttattaattcattgtagaattggtattgggaaatcttttctaaatgctacagtgctactgtggaaattaattcatgaacacaaagttctcatttcaggagttggtgttacgttaacttttcaaatgtgaattgtttataaattcaaggaatatgatgttacatttcagtgtagttatgatttgtagtattgtactttttttttaaaatttgtactatatggaagtttttctggtgtctttatgggaaaaggctttaaataatattttttcaatcatttggttctaggtccattgcaaaagaacttgcagactggcttattagcaacaatgtagtagaacatatatttggaccaaatttacatattgaggtttgtagacaattgtttctttttcttaattatatagagaggctttaaaaagtaactataccaaattttcctcttgtagattattaaacagtgccaagtgattttgaatttcttggcagcagagggacgactgagtactcagcatattgactgcatttgggctgcagcacaggtaacactaacatttcttatttaatgttttgtttgtaatgcttcaaatgctactattttataaaaggagaccaagatatggggaagatatggcaggaactctgaggtttcagttgagtctgtgtgttcttatgttattgatagaatataggatattagaatcattagaactgaaggctcaagccgcacagtcgtggcgcatgtctgtaatcccagcacttgggaggcagaggcaggcagatttctgagttcgaggccagcctggtctacagaatgagttccaaaccagccagggctacacagagaagccctgtctcggaaaaacaaaaaaaacaaaaaaaacaaaaaaatgtatgttacatatggctggagagatggctcagaggttaggaacacttgctactgggggactgatgtgttggttcccaaacctacacatcagctaactcacaaatgtttgtaagctgtgtttcagagaatctgacacctattctggcttctgaaagcactcacacataggtggcatctcctaaacagaaacacagacacacac

SEQ ID NO: 19651 - DNA, 1160 bp, Mus musculus
tcctgtgagtttcacatgtatgccagagcaaatgtgcatatagacactcgtaataaataaaatctaattagccagtttgtttctttttagctggtctgaatttttaaatatatttgtttataaatacaggaatccatgcaaggaagttctgatgaaactgccaacagtggtgaagatggaagcagtggccctggtagcagtagtgggcatagtgatggatctagcaatgaagttaattcaagccatgcaagccagtctgctgggagccctggaagtgaggtgcaatcagaagacattgcagacatcgaggcccttaaagaagaagaggaagaggaggaggaagaagaagaagaggaagaggaagaagatgatgaagaagaagaagatgaagaagaagatgatgatgacgacgatgatcatggtcacaatcctgccaaaaatacttgtggtacagaacttcgaaacagaaagttagaaaatccagcaggcatttgcttgggggaatcccaaggcacatctgaaaggaatgggacaaatagtggaactggaaaggacctggtttttaatactgagccattgccatctgtagataaccgaatacgaatgctagatgcctgtgctcactctgaagacccagaacatggcatttcaggggaagtgagttctgctcacttagcacaaggttctcaggaggcttgtatcacacgaagtggggacttccttggggagactattgggaatgagttgtttaattgtcggcagtttattggtccacagcatcaccaccaccaccaccaccaccaccaccatcatcaccatcaccaccaccaccaccaccaccaccacgatgggtaagcatgcttaagaataaatgcttagtttgcattttttgtagtaaaatattgctagtatttcttcagttgatatttattttagtgtaatactatttataagtagtgtaatgcaaaatataaatgcaattttcaaataagtaatttaaaattttattgttgtcaacttaaaagaaatacaaaataaaggctaagactatgattgttgctagtgtacctcaaaggtcttggttcactccacaacactgaaaaaagtaaggctcattttatttacatactttactgcttaaaagatcgtaaataccttaa

SEQ ID NO: 19652 - DNA, 1108 bp, Mus musculus
tgatgggtcctctgaaacagtagtacgggctcttaaactgctgagtcatgtctctagctctggtgtttctacttgtagagcataagtttgtggaatttgttttaaaatactttatagaaaatgtgctcagtcagctcctttacatatctggctctagctgcttttaacagtgaattaggaccaaagtgttttctatattcctgacttaaaatttctagacaaaaaaccataaggaattactactgatctagtaattataatatatgtatttataaaaacaaactatttacacatatgtgtccagaaagagtgtataccttttttgcataatatataaaatgcagatgtcataactcaccagtattgtgttacttggcaggtgcaggcaggtcaggtacaaggctagagtgagctatgtagcaaaggtcctgtttgacactcctaacctcctaaattaataatgtacaaaatatgttatttctgtttagggttaagtttagagcaagtggacattttatggcattgtttggtagaagactctgagtgctatgatgatgcacttcattggtttttaaatcaagttcgaagtaaagatcaacatgcaatgggaatggaaacctataaacatcttttcctggagaaggtaattatatcttagaagtttgatctgcatattcttctacatgcattcaaatctcttcaaatatgacttcttgttcctctcacgtagtttttaaataggacaaatgcatcagtttttgatgatccttatataagttttctaattcagattttcctgtcatgttatattttaactaaatgtaaatttagttttatttataaatgtagtttattacttatttgagaatttggagtaactagaataatatttaagtatggtagtaatcataaatgttaatttaaaaaatgattgtccagttgtgaaatgtgtgcccataacccacatctatgaattttagaccaggccaatcttgaactgtcagagatctgcccgtctctgctccccaagtactgggattaaaggcatatgccaccacctcctggctctttaaattttcttaatgtttttgttgttgttgttgattag

SEQ ID NO: 19653 - DNA, 1831 bp, Mus musculus
ggctattagattatccattggaagactatatctctgcccatagtttgagacctttcacttaaattatttctgcgttagcctttagccgaaacatttctttcattatctcatagttaacatcactaatttgaacaataattagtttattgtgtccactatattatttatgactctatgaaattggtagctttatcaatttacctctgatgaaaatcattgaagcattatgctaaattattattcttttgtgacatgttttatataattgaaggttttatactatataatttattaagcatcatattcttttcctgctttataaataaatacaattggctttaaaagttcttcattaactgaggaaatttgtaagcttttattaattattatttcattaattccatatactataatttaccctcttaatactttataaaatattaaatttagtgtgcaaacatgaaaatgtttggtattttaatgataatctgtcatctaacaaaatttttaaaacgttttatctttatttcttagctgtgtggtatggaccaattttggggtattgcattaagagcacaatcaggtgatgtcagtagagctgctattcagtatattaactcctactatattaatggtaagtaattggaaatattgtttaaaacttacaataattaaattgataaaatttcaagatttctctttgttcttgtttctttaaaacttttttgatacatttataattatttgttttcatgtatgtatttttgccatattgtacagtgccatagaggccagatgagggcctcagatttcctggaactgctgttaaagatggttcatatgggtgctgggaattgaacttgggtcctctggacgagcagtcagtaatcttaatcgcttagccatctctagcctgtgtttcttttcctgagactcagtcttgctatgtatcccaaattggcctagaattctcaatcctgcttaagtttcctgagtgctggactaacaggcagctactgccaattgcagttctaattaagtacctttttacgtgaagagatttgattaagcttcagtttggttcattttatttaatacagataaataaagatgtaaaagtgtaataagtatatatctgggttttaggtaaaacgggtttggaaaaggagcaagaatttattagtaagtgcatggaaagtctcatgatagcttctagcagtcttgaacaagaatcacactcaagtctcacagttatagaacgaggattgcttatgctgaagacacatctggaagcatttaggagaaggtaattttgttacattgtactatagaatgaatttcagtattcatattgttaacttgtctgaatgtattctaaaaggttttattatgggcttgttggaaacatattttacccaaactaagtggatagtaatggaaatagttgatataaaaatttaagtgtcatttttccattgaacaggcaatataatttcctcataaacagattttaaaatctttagcacttatgcatgagtaagaaactggacaaaatttcatttctcctgaggtgttagtcatgactgaaaaggcaggaacacaggtattgaaacaagtcacactacagcttcccacagcctcatagaatctttcatattttatcaagttgaatcatttgtttcatttgctgtttttttttttttttcttcctggactaggagagagtattttaattttgaatttccatttaccatggaaacatgaccaaaagtttctgtgttaatgaatatctgtataattaatttagacataccctgtgtaatacagaata

SEQ ID NO: 19654 - DNA, 1179 bp, Mus musculus
ttatgaataggccacactttggagggttaaggggttgcagcactgggaaggttgagaaccactgcgctagaagctgctgatgtttatctcttccatgggtcttacatctgactccacaagagttattgcatctctgctctgacttcctcacacagtacgagttatgatgtctctctacctgcactatgttgttcagatcttgttttttattagatgtttactttatttacatttcaaatgttgtcccctttcctggtttcccctccataaaccccctatctcctccccttccccctgggtcgttttcttaaaataaagttgcataatgttaaaaactcatgtagcacattgatgagaatctacccataatttttattttttgtctgtgaatttcagagttgaataatggtcacacctgtcatgtacatgaagtggagctgacgttgtcttctcattcacagtggcagctggattgtcttgcttgcttgctgaaattaatctgccagtttgcagtagatccgtcagatttggatttagcttatcatgatgtttttgcctggtctggcatagccgaaagccataggaaaagaacctggcctggaaaatcaagaaaggctgctggtgatcatgccaagagtcttcatataccacgattaacagaggtaaagtttggaaattaacattaaattgttctaatgaattctgcttaaattttgagaaagcatatgatttagtttttataaagttaagagtacactaattgattcctatgatacttcctaccagccacagcaatgtcataatttgacgttgtaatgaagttttggtaatagttttcagttcttcatttaacaggatgcacaatgtaccattttaatatgatatcttaccttacagttacatgtacaattagaactttatgatgtgcgttctgagtgtatcagagtccattcagaaatacatatttcaacagaggaaatgtagtagacgttgagtttcatatatgtgttgaagtgttaaaaatataaaatgaagtcctaaaggaagccaggcaaaactagtcatcactcctatagctgaataaagatcattgttggaattttaaggagttagaagctttactagagagaacttgttgaactagatttagtaaaatgggtctttttgaaagctgaagac

SEQ ID NO: 19655 - DNA, 1101 bp, Mus musculus
ttgtttttaaaatatagcaactacatggctattaaaaataatttagccaggcgtggtggtacacgcctttaatcccagcactcggaggcagaggcaggcggatttctgagttcgaggccagcctgatctacagagtgagttccaggacagccagggctatacagagaaaccctgcctcgaaaaacaaaaacaaaaaaaatttcttttttagattatacaaatgaaccctttatctagtcagacatacctgccatttataatttgtacatactttgttcatagattttgcattaggtgttatactgttaggaaacataaatttctatatttattaacttatttaccacacagttgtggcttagtatgcacataagaaataaaacttactattgcatgattttaggggggttgggtaatgaaagtacatttggtattttgctctgctcaacatttttttttctcttccttgatgtttttgtttttaaaggtgtttcttgtgcttgtccaaggaaccagtttgattcagcgacttatgtctgttgcttatacgtatgataatctggctcctaggtatgcatttttgtgttttttatatatgtatattcacttcttaagcttcattttgagctggacatgctggcactcacctttagtcttagtattgtggaggcagaggcaggtggattcttcactttggggctagagagatgactgagtaaaaatgcttttgtaagcgtgagaacttgagttcagctaccaagcatccatataaatgccagatgataaggtatgtacttgtaactctagagacgatgtgtgtcagagataggatcatcccctgagctcaaccaggctaatcaacttggcaagacccaggtttagtaacagagagacccattcttaaaattaaaggtaaggtggacaataatagaagatactggcatccacccctgaccatggttgcatgtatatcatatacattaaaacagtaaacaatcacttccttttgaaaaaggtttttatataaaagttacttggattttataatatatttccctactttttcacctagacttaaaatatcttgttaatatttgtcaa

SEQ ID NO: 19656 - DNA, 1385 bp, Mus musculus
attgaataacccattgtgtaaggagatggatgcactttttaatgttattcatctagtttaatattaatttggattcatggatttgaaatatttatttaaaaatcttttgtttttgttttttgggtttttttgggttttttttttttttttttttttggagacagggtttctctatatagccctggctgtcctggaactcactctgtagaccaggctggactcgaactcagaaatccgcctgcttctgcctctcaagtgctgggattaaaggcgtgtgccaccacacccaactgctttcttacttttttttaacaaccccctatactatcctatcttctaaaaacaatcttgttgcttttccaagtgtttcacttactagtagttttaaaaatacgtgacaatcagagtctgactatgtaagtctctgaagtctatttggagtgaagttattaaagaatatatagtaattattttactaccttgccaaatttaattaggagtgatgccattttcttgttttacagagttttgaaagctcagtctgatcataggtctagacatgaaggtaagagctcaacaaagtttattttaggtttttttaaatataatttttaaagaaagtgtaaaaaccattgttaaacactctgtatttaatactgagcattgtgtctttataacacaaagcatattatgcctttattttctttcagtgtcccattattcaatgtggctcttggtgagctgggctcattgctgctctttagtcaagtctagtcttgccgacagtgatcatttacaagattggctaaaacagctgactctccttattcccgaggtaagagaaaaaggaaaggttggttagtgctgctgcttctacaagctttgtattactagcattgctaattaaataagatcaaataatggtaaaggaatgttcatgattctattaatcattttcattatttaccatttagatacagaatctgataaactaaaaagtgtaaatattataaagtcatatttgtctctttttaagttttgttctgttctggatattccaggtggccacatctggattattcacttggaatctgtgaagtgacttaaatactttttaagttgcctgtggttctaaaatgtttttatgttgtaaataccataattatgaaaaacctttaatcctatttatttgtctacgtgtatatttttatatttgtttctgctttatagccttaagcatttcttttcaaataaagtaggcatatactgccatgcactactgaatactttaaatggttatatgttgtttacagtacattgctagggctggtgatataggtcagcacttgcttgccttacatgtgccaggctctatgtttagtctt

SEQ ID NO: 19657 - DNA, 1150 bp, Mus musculus
tatcgctccccttccctcttctttcttcattggttttatcctcttcacttttttccctttctgtgcacacacaagtgctcctctcctttctgcttacatctcttccaccctccgctgtgctggagcccaaacccaaggccttatttatacatgcggggaacctgctctaatgctccattatatgggttgtattcccaggatttatccgcccctccccccaaggtcttatgtagcccagtttgataccaagattgataatgcaatttaggataagcttaattttttgagacagtctggcctccagcctactgagtagccgagcataatacttcagtgctagaatctgattgataaaatgctgtgaattaaaattggggagcaaactcaaagcaacctctcagctgagctgtttatctagcatatgaatagccttttaatactctaagctgtctctgttttctcctttagactgcagttcgccatgaatcttgcaatggtctctataagctatctctgtcaggcctagatggaggagactcaatccatcgatccttccttcttttggctgcctcaacattattgaaattccttcctgatgctcaagcactcaaacctccaagggtaagatttttaccttgttgcaaatttgttatcgtgactgtatccttgttacttcataaactcctgattctccagtcccaacctaggagtgctgagaatgtcagtgcacaccatgatgcctcataccgttctcagggtcagcattacagccactaacagcatcaatgtgatgagattttagctttgaattgtctgtcatgtggatgtaattttggagataatgtttgtccctacaaagttgaaaaattatggagcacccttcttcactcattttatttgttttttttttttaaattccttttgttttacctagtgtcctagtgtgacactttttaaaaagcttttattgcataataaatacaataatttttaatacctaataaaagattcatgccgggtgtggtggcgcacacctttaattccagcactcgggaggcagaggcaggcggatttctgagttcgaggccaggctggtttacaaagtgagttccaggacagctggggctacacagagaaaccctgtctcaaa

SEQ ID NO: 19658 - DNA, 1184 bp, Mus musculus
attgtaccttgatagatgaagtcaagggggaaacaaaaaactagtatctggtcaggtgtttactgttccactataattactactgtggctgtgataatctattttaaatttgtctcctgtgtgctgaggtttagggcatgagccaccactgccttttttaatggacttgatgcactttaaagtataggctttggggtttgttcatttgtttgtttttaatactatgtagatgaaaagataaatcaagtttaacttaatttgtaaaataacttttattatatatgagataatttatatttttctaatttgtgatacatcaaacataaaaatctgcatttgaattttgtattttctttttgccttaagacaacactccttgatttagatgctttggcaagacatttggctgactgtattcgcaggtaaaaatctaatgcagaattaccaattaaattattaaacaaagagaaaagaatatctttatttatcttttgcttgtgttcttttctaacagtagagaaatcctggaccacctagatggcagtatagaagatgatgggctttcggggctcctgagactggcaacaagtgttattaaacacaagccacccttcaaattctcaagagagggacaggtatgctttaaaatatatgcatgagtcatagttgaagcttctttttacattgtatgtgtgttctgttttgttttacattatatccaagccatgtttgctagaacttgatgatgaattctgaataaattaacagtgaaaataggaaacttagaatatatgtttagaatgtaaaaacaaattttaatttctgttactcaggggaatgtccactctgacatttcctatgtgaaaacatttttatatatgttttctcttgtgcactaatgtcttcacgtagtagagtcagttggtgatggtcattctgactataatggctttaccctgcctcttactttttttaatatttatttatttatttattttatatatgtgagtacactgtagctatcctcagacacccttgaagagcgtatcggatcttattacagatggtcgtgaaccaccatttggttgctgtagaattgaagtcagggaactgctgagccagctctgtagctcatgctttcatatttttaaggcctccttgaaatgtgtcttgaatatttatag

SEQ ID NO: 19659 - DNA, 1101 bp, Mus musculus
ctagcaaggttcttattgtttctgctcttttgcacggctggcactcagggtgggtgaggtacttctgttctcgttgttcaccacatggagaaacatctgtaggatttggcaaatagggaatgacaaggccttaatagaatatcagtaatttacaaatgaaaataataacactgtgcaaggataatctgtaaggatagatatgaaatttgaagtggggagaaactaaaagatgggtccattctgttccgttttcttcaagaaaaagaactttggtgatgatttatgatactgctatatacttatgatggatatcttagtaaattatagttagcccattatccaatttgttttttgttatgtttggaatataattggtatcatgtttagataacatacctgctttcttcttatctcctaggaatttttaagagatatcttcaatcttctgtttttgttgcccagtctaaaggaccgacggcagccaaagtgcaaatcacactcttgcagggctgctgcttatgatttgttggtggagatggtgaaagggtctgtagagaactacaggctcatacacaactgggttatggcacagcacatgcagtgtaagcgctcatccttttcttgactctttataaattgaatgcagcaatgaacacttaaggacactgattaaagaatcaccttttcgcacacttggttatacacattgttgatagaagagtcagcatttgattttactagaaaaatgtaaaaagcctttatgtattttcaatatttgtgctttctttgtataaagtagcataataccaagtaaagtaatgctttgactgttaatctgaattttataattagatttaaaatgtttttttaattcttaatattttaaattctacacatactagttggcaaatcaatagaggtagtaggtgccaatcaaagcaagatatgtttaagtttgtttggggtatcttctccctctttttatcagcagcccatgcaccttacaagtgggactactggcctcatgaggatgtccgtgcagaatgccggtttgttggccttactaaccttggagctacttgttacttggcctctactatt

SEQ ID NO: 19660 - DNA, 1196 bp, Mus musculus
tgttttgttctcgtggagttttttagtttgttctttgttttgttttgatatttttgttttgtttgtttgttagtatgtttgagacagggtcgtactgtatatagccctggctacatttgctgtgtagactaggttggcctaaaacagattcacctgcctctgcctccctagtgctgggattaaaggcaccatatccggcccagcacaggactctttaagtgtgtgggagagagcctataaaaatagggtttctctgtatagtcctggctgtgttggaactcactttgtagaccaggctggcctcgaactcagaaatccgcctagctctgcctcccaagtgctgggattaaaggcgtgcaccaccaccgcccggctgcaaatagtttttatatgcatattttatatataaagttttgttcctttttctgttgataaaataccttataaaacataatcttaaagcgacattgttactacatgttttcaaaatggctgtcgttatgtcatgtaaattattttaggtttcaaagatgttggtgatcgttcgaaagacacagagagctatgagtatgacttgattggagtgactgttcacacaggaacagcagacggtgggcactattacagtttcatcagagacatagtcaatccacatgcctataagaacaataagtggtgagtttttagtgtttttctttaaaaacatttcccagatttaaagatataaatttatggtagttcttcggatgaattcttgatttcatggaaactttctatgaagttaggcagaatattaaatccttttttctttatatatgtgtcttgtctgtataggtaggcagacagatcagtggaagtcagactttctttcatgttggttcaggttgtcatacttgatagcagttatctgctgagccatcttggtgctccacaaaaagaagctttttcattcaaggcaactttcagacacaccagaagagggcaccggatcccatcacagatggttgtgagccaccatgtggttgctgggaattgaactcaggacctttggaagagcaatcagtgctcttaaccactgagccatctctccagccctcaaggcaactttctttttttttttttttttttttattttttttatttatttatttatttattatatgtaaatacactgtagctgtcttcagacacaccag

SEQ ID NO: 19661 - DNA, 1103 bp, Mus musculus
aaaacctatgattcggttacagataaattcatggacttttcctttgaaaaggtgataattcttttcatatgtaataatttaacaatcttctatattatttaattttatattatactttgtcaaaaattaaaatacgtttctccttgcttcataaagacacatagtgcatatatgctgttttacaaacgcatggaaccagaagaagaaaatggcagagaatacaaatttgatgtttcatcagagttactagaggtaaacattactttgattttaacagtagtttaaattgcattaggtgtttgtgcaagaaatacttcagtataaaagcagtcccaattagatcttagcatacttagaaaaaaatgataacaatactgtccctcaataagtgagtgaaatacatgtgaggtattaggacgtgcttcagcagggaagagtacttgcttgctgctttttcaggcacatgcgtgcgcatgtgcacctgtgaacacatacacactcatacacacacatatacacacctgcccctcaaattctgtaaacaaaatagtgcttatagatatatttagtaattaaatgaagatatattgttgtgatgtagagtgactagaggaagaaaagccgaacatgaggttaaacaatcagagcagatttgaaaatacagtatagtagtttaacatttaaatatacatccagtttattttaaagtaccaaaagacctgtatgagaaacaagctgacctactctggaaatagaactacaagcattgactctactatgagacatactatgcttaggtctaaagcaaagactagagcctgggtctcactagataaccagaaatacaagtgaatctagaaataagaccacgactgaaggtaaggtttgggagagggctaagctgaatgctctaatgcctttttagtattgtagacatcaatggtctagaaataaaaacagtgaagcactaggcatttagggactaagcctgtaatttcccagctaccctgaaatacaccttaatacagcagactagaaaggcaagttagcggtagttgaatacttttaatggagactagaagtggtcctatcagttgcaaatg

SEQ ID NO: 19662 - DNA, 1192 bp, Mus musculus
atttggaagaaaaaaaatcaacatgaattttaatgcatatattttgatttggtaaatttgtaagtttttaggctataccttttcttgtcaaaaaaaaaagtattggtaaaatatattaaactgctttctgataaatgccaacatttttttttctccagtggatttggcatgataacatgcaatttttacaagacaaaaacatttttgaacacacttattttgggtaagtttggtatttttagtatttttttttcttttcccttaagtcttgtgtaagaatttaatgaactctttttaaattccaggtttatgtggcagctgtgcagttgtattccaagtacattaccagatcctaaagctgtgtccctcatgacagcaaaggtgatgatgagctcggatagctttgtcagatttattgctatacaataattgagtctttcatgcttaattgtatcttttttttttaacagttaagtacttcctttgttttagagacattcattcattcaaaagagaaggtatgtgtgtttttcctatagatttatatgccatcatcatcatcaacatcattttaattatgtttaggtgttgttatcattgacataaagtccatatcttgaatattttttattttcctttttaagccaacaatgcttcagtggattgaactactgaccaaacaatttaataatagtcaagcagcctgtgaggtaaggttacaaccaacattgcacagcttaaaattctctaattcgaaggctgttttttttgggggggggttgtttttgttttttaattaaatgaagccaaaaaaatgtttttatctgttatgaatctcatgtaagttgttcctaatatttgttcacttagaaagttacagcttatatttcaaacctgttataaagattaagttaatacttaattcatttcataatctttgacctgccctctagtgttacacaagtataaaaacaaatttcagtttcgatgtcatcctgtagaactataatccatgtacacaggtgggagaaacagaaaaatcatgagtcaagggcagtctgggatggagatggggacacacacacacacacacacacacacacacacacacacacagagagagagaatgaatatgaatgaatgaatatattagagtaaggtagaggtcaaggttagcctgagttgtgcagtg

SEQ ID NO: 19663 - DNA, 2007 bp, Mus musculus
tactgtgtgtgtgctatactgtgtgtgtactatactgtgtactatactgtgtgtgtactatactgtgtgtgtactatactgtgtgtgtactacactgtgtgtgtactatactgtgtactgcactgtgtgtgtgctatactgtgtgtgtactatactgtgtgtgtactacactgtgtgtgtattatacactacactgtgtgtgtactacactgtgtgtgtactatactgtgtgtgtactatactgtgtactgcactgtgtgtgtgctatactgtgtgtgtactatactgtgtgtgtactacactgtgtgtgtactatactgtgtgtgtgctatactgtgtgtgtactacactgtgtgtgtgctacactgtgtgtgtactacactgtgtgtgtgctatactgtgtactacactgtgtgtgtgccatacacctctacatctgctatgtctgttactgactgtgagtttctccttttaaagatgttccagcgtttatgtatccatgtgattcagagactgagacctgtgcacgctcatctctatctacaaccaggaatggaagatgggtaagaagagctttacaaccaagtcttctgaagtatctatgagtagatatttagaatataaaaattagtctctaataagatatgtctcaagaaaggaagactttttaaatttttaactaagtgcatctttaagatattgaaccaactaactttttgtttggattgatttagttccagtaatgagaggataactacttacattattgaaattggtatttgttttacagaattaaaggattggatttttaaaaattgttctagtatgttggcatacacctttaatcccaagccatctagggccacacagccagactctgtcacaaaataaataaataaacaaacaaacaaacaaaaaccaaaaaaacagttttcatacaagacaatatatgtctgcatatttattgtgttctctgaggtatatttgtttttattttcaggtcagatgatatggatgcctcagtagaagatattggtggtcgttcatgtgtgactcgatttgttagaacactgttgttaattatggaacacggtgtaaaacctcacagcaaacatcttactgagtattttgctttcctttacgaatttgccaaaatgggtgaagaagaggtaaggctaattcttgtttgcttgtttttagttttgaattataaacccttttaagatttccaatttgttttttatttaaaattttaacttgcttgttttttagagccagtttctgctttcattgcaagccatatctacaatggtacatttctatatgggaaccaaaggacctgaaaatgtaagtccagttgtgtcctgtatcagtgcagtagggccattcttctaatggttcacatcatgtagaatcatgacaagtcctagaaacttaaagtccctttttctttttgtatttggtagcattaagggtcctagatttgttggtctgttattatagtgtatatatagagtagtaaatcaaattaagtgttaagttgtttcattggaaagtctgaaacaaagcagactttgttttcatactagtagccacagcttaactacagggtctgcaaaggaatgtgttgtttcaatttgtggtttggattgtcacattttaaagttttttttagagtctctgaacatttctgtagttaataaatttaataatattttaacatatagatggatttagagtgtgcaagtacatttcatgatctgtgtgcaacatttcattcaaccctgctcatatccctgagaagtatagtttttatgtttataatacagatgaagcagctgaaacttagagaagttcacttgttttagatcattgaaactcgagactactgattgaaaactgtctcttaaatttgagttggttttaatctaattccatcctatgtagctgttgggttaacaacagtgatagctgatgctgtttctctcctctccctgcctatgttct

SEQ ID NO: 19664 - DNA, 1149 bp, Mus musculus
gataccatgaccaaaccaactctacaagaacaacatttaattggggctggcttacaggttaagagattcagttcattatcatcaaggtgggagcatggcagcatccaggcagtggtagcactggagtagctaagagttctacttcatctgaaggctgctaggagaagactggcttccaggaagtcaggacaagggtcttatagcccacacccacagtaacacacctactccaacaaggccacatctccctatagtgccactccccaggccaagcatatacaaaccatcacagggtctatctaacataaatacttttgagaactattgctttgcatagtcctcctgcttacctaacactgtcctgattgtcatccaggcagtatcaggttaaggtctaacctttgagtgattttacttagtacatactcctgccatgtttttctgatagttatactaaaacaagtcagctgttttcgttatgctattagaactaatcacacattaaaattgaattttgttctgattagcctcaagttgaagtattgtcagaggaagaaggggaagaagaggaggaagaagaagacatcctctctctggcagaagaaaaatacagacctgctgcccttgaaaagatgatagctttagttgctcttttggttgaacagtctcgctcagaaaggtgaaatgtttcaacattcaaaatgcttacagcgtgtttggctttattttttatacataattgttctatcactattcgtttttattacataaatcttttaaaataataattttgcttcaactcttgtggctcacgaatttcagtcctttctatataactcgtctgagtcgtgctagaagcaattattgaagaaatctaagtaaaatatctggcaaaattaaatggacattcattctttaccccagcaactatacttccagggatttgcccccaaaacagaaagatatttatggggaggtaattattaaaataccatttctagtatctaaaagttggagacagccaaatgttcttcagaaggggactagtcattgacaaattaaggaacccattcagtccccagtagttgtgtgtttgcctgtttgtttggttggttggttggtttttgttttttgggttatttttgtttg

SEQ ID NO: 19665 - DNA, 1104 bp, Mus musculus
gtttaagtaaatcaatagtctcagaagtccactggaatcttgttttcgtctgcactattttaaattttgtaaactagcaacagatttttttttctgagcttttcttactacttacaagtaaatatattcagtatagtaggaaaacatgggtaaaacttttgtgaagattctagtttaaaggaaaagaaaaaatatggtctggagaaatagcccaagagcattttatttttggagaggacccaggttcaaatcccagcacctatgcacccacatggcagcttacagccactcatataactgtagtttcaggggagctgacaccctcttctaacttcctctggaacgggcacacatgtggaacacatttatgaatgtagcaaatatacaaataaaatcaataaggaaaaagttaactaaataaatacttagtggcatataccaaaagaaagtaaattaaattctcattcagtttgctgcatgtcatatttttgtcatttcatttataggttattgaatacaatccttctcagtgtctggactggttggcagtgcagacaccccgaaataagctggcacacagctgggtcctccagaatatggaaaattgggtggagcggtttcttttggctcacaattatcctagagtcaggacttgtaagtcaaatgtttaaaatttagctaattatttattgttcaaatttttaggattgttttactgtttgttggttcgatttttagggttttgggagagtggggggtaacccaatgataatgcctgttattatgtaaagctcgaagtggtgtcataaaagacccaggtgtgtgtgtgtgtgtgtgtgtgtgtgtgtgtgtgtgtgtgtgtgtgtgtgtgtgcgcgcgcgcgcgctttaatacttgtaaatcttgacactgagtatctatggtattttgtgtgtgtgtgtgtgtgtgtgtgtgtgtgcgcgcgcgcgcactttaatacttgtaaatcttgacactgagtatctatggtattttgtgttttgtttttgagtgttactaaagaaagtaaaagatgagaaacttttcttaaaagtaactcttgattctaggatagccaaagctaca

SEQ ID NO: 19666 - DNA, 1558 bp, Mus musculus
aggtgggaaaattctacattgtggaaaactgaacatcataggcttgaaaactcgtggtgatacctagtgcttgggaggagagaattagaaagagttcaaggctagctagtgtagcagtttctgtaattgtgattattgttgccacttaaatacagcaatggtagaatggaaagttctacccctactcccctttgggaatctttcttttggacaaaaggtaaatcagagggatatgtaaaagatgtcatgtcccttaatttttattcatttttattaataaagggaagagtggttttgtgtttaataactgctcttcagtctactaaaatcgttcaaggatctgacagttttgttttacattttatagctgcagcttatcttctggtgtcccttataccaagcaattcattccgccagatgttccggtcaacaaggtctttgcacatcccaacccgtgaccttccactcagtccagacacaacagtagtcctacatcaggtctacaacgtgctccttggtttgctctcaagagccaaactttatgttgatgctgctgttcatggcactacaaagctagtgccctatctgagctttatgacttactgtttaatttccaaaactgagaagctgatgttttccacatatttcatggatttgtggaaccttttccagcctaaactttctgagccagcaatagctacaaatcacaataaacaggctttgctttcattttggtacaatgtgtgtgctgactgtccagagaatatccgccttattgttcagaacccagtggtaaccaagaacattgccttcaattacatccttgctgaccatgatgatcaggatgtggtgctttttaaccgcgggatgctgcctgcctactatggcattctgaggctctgctgtgagcaatcacctgcatttactcgacagctagcttctcatcagaacatccagtgggcctttaagaatcttacaccacatgccagccagtaccctggagtaagtacagtttacacttttaatatctgtttcctgtatttggttagcaatatattttctttattaagaaatggcaaaatgtagaatagtcttttcatctttaatcattcacctgttttgtcttccgtgctgggagtgggacccaggctcacatccatgctaggcatgcgcttggcaactgagctacattccacccccctcttcgttttttatttctaaatattttcctttaaaattttatgtgtgtgggtgtttggtctgtgcaacacatgtaatcctgatatccactgaggtcagagagggcagaatttcctggtacaggagttgtagatgatcacaagctgccatggggatgctgggggtcaaacctagtgccctaacctctgccgtctccccagacccatctccgtcgtttataaggatttaaaatgtttgctttcttagataccctcatataatgcgttatgtaatctacaaaataagtgattatattttcttatgctgatgttaaaattttgttaccagtggtacatacaatatattgttttcttgtttt

SEQ ID NO: 19667 - DNA, 1151 bp, Mus musculus
ctatccaaaataacaggggtaaacagccaaacaagcaagcaagcacaaaagcaaaatagaaagaaagaatgtaagtaagcaagtcagtaagcacaaggctatggagtgtctcagttggtaaaggtactttccacaagccactaaggacagtggtgggaaagaaccctgctctgcaaattgtcctgttcccttcctaggcacactgggtaagcatgcgcatgtgtacgtgcacgtatacacacacacacacactttgaagatttatttataaagatagagaatgattgaggataatgcctggcatgcacacaaatacgtgcacttttcataccatacatagtccatacacatactacacatacagagtagctaaatggagaaacctaactcagaaaacaagaaacatttgcttggtatacacacataatatctgagtctgaaaatgccttttagaagataagaatttcatttttgtctaaagtaaaaatgaaattaaaggtttttaattttttattttctaaatcacttgtagtctttcaacacattgcacatgatgtatcatgaagctacagcttgccatgttactggagacttagtagagctgctgtcaatattcctttcggttttgaagtctacacgcccatatcttcagagaaaaggtttggtcatatgtactttttgtttttttaccattttgctaccatttaagaacttgtatttcaaatgagaggcctcagaaaagttgacattctagtttgtgtgccaatggttcctgagctagttagtattgtacaatgtttatcatctcataatgtagagagggaatgaaatgtttgtacatactttacttatacctacttaaaaacagtaggcaagcatagtatgagaatcaagatttaggaggttggaaaacttccacacacaataagttggattgttgttgttgttgttttaatcttcatggctcaaaatacatcatttttagtgtcagtagaagtaagtttaaaaatatttgttagtatctcagtctataaacactgaacctcatggttctagaaaatgcagtgtattactgccctatataccacctgcagtcttggtgatgtgaaaagccgaggcagaaaatccctcgagcttcagagcttaagaca

SEQ ID NO: 19668 - DNA, 1411 bp, Mus musculus
tggaaggcccatcttcattttcagaagatggttcacatatccggtcacagcatgcagaggaacagtctaacaatggcaggtttgacgactgtaaagagtttaaagaccactgttccaaggatactacactagctgaagatgaatccgaattcccttcaacgtccatctccgcagttctgtctgacttagctgatctgagaagctgtgatggtcaagctttgtcctcccaggaccctgaagctgctgtgtccctcagttgtggccattccagaggcctcattagtcatatgcagcaacacgacattttagataccctgtgtaggaccattgaatcaacaatccatgtggtcacaaggatatctggcaaaggaaaccaagctgcttcttgacattagacgtggcatgtctattctcacgtgccctcccctatgctgtttgtcaagtttgctcctttgttttgtgcttcagtttgtccagtgctctctgcttgaatggcaagatagatttataggcttcaattcttggtcaggcagaattccagatgaaaaaaaaaatgtgcatcttctgtatactttctaaagggcaatcagataatggatatgttttatgtaattaagagttcactgtagtggctttcatttaatatggctttctgggagaagcagggctctgaccctgtatgatgtaatttaaacttacagcatttttactgtgtataatatggtgtcctctgtgccagttttgtaccttaaaataagagaggcagattgcctctgatcgctgtggttcttattatcaaaattaagtttacttgtatacggaacaaccacaagaaatttgattctgtaaagaatcctctttagctgtggcctggcagtatataaatggtgctttatttaacagaatacctgtggaggaaataaagcacacttgatgtaaaaataatggttttatttttattgacatgactgctgttctgtgtacttataaactgactgtgatcacttttcctttgttacataagtcgtttgtttcttcaaatgacagcagtaaggagactgaaagggaaccacgtggcctttctgctatttgagaagtcctcttgcatccaaaacagttaatttaccatacagatgtctcatccctccaatcccgaagtgtgtggctatttggaagacatcaaggagagccagagaagtgtaacagaatgcagccacctagccctcacagcaacactctggaaacaccttggaaactggcttagaataaaggaatagtatagcatgccatttatttgtcttaagcttaaatcaattgtagcaatcaagtagcagcctatgaccagccttagctcagcctacctacttatctcagaggaacacccatggaaggtgagatatgacacccgatt

SEQ ID NO: 19669 - DNA, 2146 bp, Mus musculus
ggcagcaacaaaatcctgttgttctagaagcaaatctgactttgttttctgtttaaaaaacctaggtctaaaagtcgttttggtcaagggcgtcctgcataaagcaccctaaacataaaaagagaggaggtacactctggacatctgaaatgcccacttcctgaagatcttcagtgactgataggtgctctatgagtcattcctgcagaccacataaatcatgctacagtgactgctaggtgttctattagttatccctgcaaaccacaaaaatcatgcttacacaaatatatagttaggttttgttaaaatcttaactatatatatgaattttttatataaatttctctttgtataattctaggctgtgtaggagataattgcaaacttcacatagttaggatttctaatatttgttgccttttatttatttgacaaagaagaggcctaacttgacaagtaactaagttggtatgaccctaagaaattaacagaatgactggtagtgttactatgcatgggcactgatcgttgtatgttttggggctgttgaatcttaggcatagcattgagaaatgaattgtgtatgatgaactgtccagtgatgttaaatttagtttgcatggatattaaggagtgacagatctcgaagctgtattaatagaatttcaaggtgaggttatttcaataccatgctggtcaagaagggttgatctttttcagtagtattacgtgggaggtacaatgttattgaacttctgtttctttcagtttttcatgcttatctgtaaatcatttgagcctaaaatccaatccttgcctcgcttctggatgaagctagtggcactctgagtggtgagtcatttcagttctgtggcacggtcagacccatccattctctaagtctgcttgagctccctcacagcatgattgctaggtacgaagagaggtcttaaagttcccaggtagaggagacggctgggaacttcagatattcacataaaactgttttatagatcatgttttaatttttttctaacaaggtagatagcatactcagggaaattttgttccagactgtaagcatgtactaagttatgtgtttggaaattgtttataggtctctgagaaccgtgagatgcacactgtttctatgtttagtttttctctgctttgtgattgatgtcttcaaattattcagataataaatcttgatgatgtaagggaacagcaattgtaaaagaaaaattcatgtcttacacctagtttacacaaaaagaaattataatttttagtatcttttagttgctatatgaagctcttaattatttggtaattatgcttttaatatctatttggaaattttattctggtgtacaaatgcctttcagttatctgatactttggaaatagcttatatcatatttattttcaagaaagtatttctttgtatgtgatatgtaaatcccacgagtaccagccttatagttggctcctggattctctgatagaaggatttggatttatatgtgtaagcaatctatgatcattgtaattagaagggaatatgctcttttgattttcacagatggtagaagtgctcattgcttctccccagagggggctgctttactgattgatgttaacagactcgagtaaaatctgattctctacagaatgtgctttgtattttatatctgtctgtgatacatggacaggcatttcttctgccaagtacgttaaggttttccttacattaattctgagctcaaacttattgaaataaatggcaatgacaaaaattgtggagaaagtcccttgatctgacttgttctgctgtctgaggagactggagtgctctgtattctacataattccctggaaaattagctgtgaaaattggtgaaaaccttaggttttaagattatttgagtgtggcagcacaccccatcactctggaaactgaagtaggaaaatcctccattcaagaccccgcctcagaacatttagcaaatcatttaagggttgaaatactacagcgaacaggcgtatagtatagctcaatagtagtcctgcagcacaccaggcgtatagctcaataatagtacacttgcctcgggtgcacagtagcctggctttgatcccc

SEQ ID NO: 19670 - DNA, 1099 bp, Mus musculus
agcagaggatggcctaggcggccatcactgggaggaaagcccgttggtattgcaaactttatatgcctcaatacaggggaatgccagggccaggaagcaggagtgggtgggttggcgagcagggcagggggagggtataggggactttcgggatagcatttgaaatgtaaatgaaaatatctaataaaaaattaaaaaaagaaagaaacttacttggggaagaagaggctatgctgtgcttttgaaccctcgacttagtttggaatactacatcacaatcttttgaaaatgttcactataacattagcagttcatgattcattttctatgtttcttccatttgcctttaaaatattaacattaaagcaagaatgccacctgacaaatacctccttaactgccttggaaactgcatttaccatgttaccatgctgtaagtaaaacccattctcagctagaaatgctaacccatcccccctttttttgtatgtgtttctgtatttaaggaagacatagtatagctaccacaaggaattgctcttcagaaagtgaaaactgtactgctcgtaatgctggagaagagactggagaatctgaagggtaggaggctagttgtttgttggatgagatttaatactgatactacctctaactgtgaaagtgcatggttggtgctaatgtacagcagttaccatactgtaggggtttacattacacaattgctgagcctccggagtcagaatcatccctgtgtgaacaaaaataatacctaacacattacttgcttgtgttatttatacattttggggggttttcatcaaaaattaattgacatgtttaaaaaaattagaaataacatctagtaacacagaacattgaaaagtaaatttcaatgcccaaagaaaaatcttttaagtaatcagttcttgaagtttattaatgagattagatgtttattttagaaccattttaatataattgctacacagatatttaaaaataagaatgtatttcagtatgcttcagcttttgatattttgaattgttgtgtatatttcttgtaggacaagttgcatgcacagtaaatgattacttgttt

SEQ ID NO: 19671 - DNA, 1169 bp, Mus musculus
tggcttctggctagtcttgacggtcaaacaacaggacttatacctgcaaattatgtcaaaattcttggtaaaagaagaggcagaaaaacaatagaatcgagtacaatgctcaagcaacaacagtcttttaccaacccaacattaattaaaggagtcactaccaccaatcctttggatgaacaggaagctgcctttgaatctgtttttgttgaaactaataaggtttccagtgcacctgattctacagggaaaaatggagacaaacaagatctttgatgtgtttcatgtttgtgggcaggtgaacaatattttagagtattttaaaaaatcatttcttacagagaaattaatttgcagttgaatgaaagcatttgctcgtggctgtgccgagtgttctgctgctagaagttatgtagtcacacgctagctgctagtcaagtgatctgtctacacttgactgtcttgtggaccacgaggacatttgtttcacctagtttttaagattatggagatagttgtcagctccatcttatctcagtccctaggcttattggaacagtaaatttgatgaacagtagaacacacaagctgcctcagaagggatcattaacgcttcttaaagttctgagttagttgacttgaagtcttcaaaaattgagtgataacatctacttataagaacagacaaaaggctaatttttttaaccttataaataaactaaataataaaaattttctcatctgtattatgtccagtgttgaatttactttaggtgatgtgtttttaccagcaaataattgatagtattatcttttattgtatttataaaagtgtgttcttaagaggtcactggagcactgtgaagaagatggttctgactgacagcttcttaacctccttacagtgtcacagatctcatcctgagcgagtcacaatatatagctagatctcatcctgagcgagtcacaatatatggatttttgttcttttcctccaactaaggcaggagtcctttaagattatacttaatgatataatcaattctggcagtaatgatttttaatcctgaattttctgcttctatataagataattacttttgtaaattccaaaatcaggttatacattaaatatttgaaatatgtctgtcggggttggggatttagct

SEQ ID NO: 19672 - DNA, 1171 bp, Mus musculus
aaacaaatacaaacatattttggtgtttcaattattttccaatttcaaatgttttctaatttcaagtggtctatctaacatctgattacataaacaaggaaacaaaagttaaatgacacacctagttactcttataacaggtctggagctgatgttgtgtctccaggagcctttctaaaaacccttgtcaggagcacctgcatctcctgtgggtgacagtgtcctaagaaggacagttaggcttacaaagccaggaggttggcttctggaacttggatatcaagtgacgcccccaagaaatggctaatggtatgtcttatatgatctcataattgtcaattgtaatggcatggtgaagagaaatcttaaacatattgaaccagaagaattaatcatcaaaaataccagaagggaagctcaataaaattttgacttaagtaaaattttcatcagctagtgcaacttcttgactttttttgatgcattgatttgaatagcatttgattattcacgtttctcatctttgcacacaattcatactgactctgaaagatgtattatatcaggaagatgtttttgattgcgatgaaagggcagcctgctcctttgaaaccttgtttcatcatgtgtgaataatagcaaagggtttttcattgtcagaaaattgaaaaggagataacagaaactaactgatgaaaagtgaaaagttaaagacttctatgtaatgtttctcagcttctgatgaaattttgctaaaagattaaataatttgggaaaagtctttgagcattgttttttttttagctcagttttgaatgtactggacccaaaacatgaaggtcaggaacttccaacaaagcattccttgaattatttcctgttgaaaggtaaacagtagctatagacaatgtctttgggagtgaggacacagggctaggaagtcttgtgggtttgtgtcacttggcttacagtgtatcctcttctctatgctttgtttaacttagaagcaatgtttatgtcatctgcagaatgagctctctcttcttatctgtgttgcagatataagctgtagcttattttcagaagggaaaaaaccacccaactctggagagcgagagaaagcaaggaaaaaaagacttgataaaggagaatcttcctagtaagataactg

SEQ ID NO: 19673 - DNA, 1751 bp, Mus musculus
tcagaaaaactatatttttgtggagagacttaaaattggtgatccaggttgtctaattgtaccatatcaagttttaatcataagttggaatattgaaagtttaccataagctgtcagacagcatgcaacaagataaagaagagagactgattttagtcagttagcctaaatggacctgctggtcttcagaaactcaggcagaaaatcacaagtttaaggcctgcacagtctgcagagtgacttcaagggaacaactttgtgagctcctatctcaaaatataaagtggaaaaaagggcgtcctgagctatagttcagtgatagagcacctagcatgtacagctaaagactcggtgcctaactccaaagaactaaaaacctggccttcctacttcctagggtgtggtttgtgctaagaaatgtctgaatagaaacaccgagttaaagattgtgtttctcatgggccctgattagtctattatccaaacattcttaaccacttgatacccagagagaaaaatcacagggtggataaacactttgggagacctatgagaaaagcaggtttctctttagacaaacgtctttaagttgccccatatggacctggctctctccgaggacactttcttatcaagggaagtcagttactggctttacttttggtattttgtgacttgatttctttgtgtaagttgagagtctttgggagtactttaactcctgtgacgttgccactgcagggtttcaggtctgttcagaggttggatgtgcacggaagaggatagaatgcttttgtgtctaggaatggaaagcccacgctattcttggaagcccagcagtgggccataggcatgaaggtgccacccaagtctatccagtttcatcccttgaatatttaagccgaacatcatggcagaatttaaacctcaaggtcaacagtggatgagatcaaatctcaaaagtgatcaggtctgattgttttcatgtctgtagaaaggccgaaacccacgcatgtcctcatcatcttttgtctttttggttggctttggggaggttgggtttggtttggtttggtttggtttggtttggtttggtttggtttggtttggtttggtttggtttttttcccaaacagggtttctccgtgttgccctggctgtcctggaactcatggaagtctgcttctgcctcccagactttatttattttttttagctttcagaactttaaagaatcacaaacaagccaggtggcactaacacactcctttaaaaccagcacccagggggcagaggcaggcagatttctgttagtttgggctggacacttactctgtagtaagtgtcaggccagatggggatacacagagaaaacttgtctcaaaaaacaacaaacccaaaaacaaaccaatacaacaacaaaagaatcacaaacaaaataaaaagaaatgttgactcctcaacaaattgagtttttagcagctttataatttttggtaaaataccaaatttacctatggtaatttttttctaagcttctttagccaaaatgtaacttctcatgagctggagtaaagtaaggctgaggcatcttgggataactatgacttcactgctcttagtgaagcagccatagtgatatatcctgtagctccaatacttggaaggatgaggcaggagggatgcttgagggagacctcagctagtcagtcaccagagaactttaaaacactattggctatggttaatag

SEQ ID NO: 19674 - DNA, 1186 bp, Mus musculus
ttgtgttgccctggctgtcctggaactcactctgtagaccaggctggccttgaactcacagagatctgtctgcctctgcctcccaaactctgggattaaaagtgcaccataatgcctggcctgcttacctgctttaaaaggaaaataaacagatgataaagctagataaaataagggcagaaagaaacattttaggaattgaaagataagttttcccagctgatatattctctgaaaactttaatctcaagtaaactgctgactatttgaattttattgcatgctgactacattatataaattgaacttaaattaatggatcaattctttttatttgtttgctttttaaaaggggcattattgtaggtagccctggctggccttgaacttgtgctgatcctgctcagccttccaaatgctggggctataggcatatgctacaatacctacctattgttaacaagatatacatacagactgtatatttaatttcccttttcagattatgaactactatggaaaaggaaaaataagaattacattagtaacaaagaatgatccatataagcctcatcctcatgatttagttggaaaagattgcagagatggatactatgaagcagaatttggaccagaacgcagacctttgttgtaagtatacagtgacagaaaccttcagcaataggacaaagatataattttagtttatagcaaaataattctgtatttaacttactgtaacatgtacattacattttaattacactttgttacctgtggggaggacacacgtgcttggggtgcatgtggaggtcagagttggctcagctggtggagtcggttctcttctccaccacgtggaccctgaggattaaactcaggttgccagacacctttacccactgagccatctcaccaacctgatattaaaatttttgttcttaccacttgcattcatcctttattaataggtacgcacatgatagttagtagaaattcttcctaatggcacctagactgggctcaaacttactatgtagaatgtctttgtacttaccttcctgcctccaactcccaagtcctgacattagaggtaacaccaccctgtctggctcagtaggagtattttttatgttattattttgttttcctttgttgttcttttgtttttttcaaaacaatttct

SEQ ID NO: 19675 - DNA, 1145 bp, Mus musculus
aatattagtctcctgcacactttattataccatctttaaaacaattgattcacacttccatctatacctgcttataaaaggcagcttgtcaaaccaggatttaaacccaaaattcccatggagcccacattagacagaatatgagtatcctgtaagacttattagagcaatttatctttataccatctttaaagcaattaattcaaacttccactaatatctgcctataggaagcagatagtttttaattgttaagctctctgcttagagcagccatcctgttataccatctatctgttgtgctctctacctggagccacagacttcttttaattaatacctgttcatagcaggcgattatcactgctctctctacttggagtcagtgactaatattccctatctagttctgaaacacaggtgaaatttcccatctttaagtatcaaaaggttatatttctctctttatatcaatgaattttatggcacagggtgctttgtacctttgtctcctgattctttattctcagggaggagctgagtgaagaaagacaatcgttgtctgtgtccctgtttgggggtgggggagcagagtggggagcgaaggatacagggaagtgaacacagaaaggctttcttaggtgtagatgcctctctgccattctctgtaggcccctcaaacccagtcagctttgactccttactgatgcagccccattcaagggttgggagctgggggcagtgaatttttatctaaggttagttgagttcaaatcaatttgttgtggtaaatctccaacccaaataagcctgggcaatgaaaacacaactcaattaatatgaatacatgctgtgcgcataggttgggcatatctaccactacactgccctcttccccatatgaaagaccccttataacttgtggtttctccaggccaggtacttctgctccacttttcttcttcctcctgttcctcccaagtcattctcattctctctctctctctctctctctctctctctctctctctctctctctctctctctctccccccccctctctctctctcccaaaaccttcagctccaccttcccctctttctctgtccaatcactggctctaacctttcttttataaattaagg

SEQ ID NO: 19676 - DNA, 1138 bp, Mus musculus
caacaaaaaacaaaagtcattcaggaaaatggatcagaaagagaactgctgcttaattccaagatgttatgaatctaatgaatctaataatagacctatacattaataatataatagaataactataaaataagtattgtggtgactaagaaatgtcataattggaaatctgtaggtgggaatgggatgagggacctagaaaaatcccattcctttggtccttatcaactgtcaaacttgtgccatgttccttggtagtggattgtgagagtctctgactacacagaggctaatgtgattagtttcttccctgcatttttacaatatatatattcatgttctttgaccctatttctcatcattattatttaaattattgttaaattggcactatctcatagcagtcaaatagcttttgtaggactgaagcaaaattcagagcttgggtgcactcagctatcagttgtcctatgagtggggttcatgacttagcatgcacccatttctcaactccacagcaggttctctgtgagggctcttcattctccttgtgaaaaacacaaacactcagcagttacagattttcttactgtcaactctttacctgtctccgcacccccaactttttttttttaaataacagccacatatttgaaatgagaacaaacttaaatggtcagcttttaaggtattataaaagtgattaagttttatcatgaggagacagctagctaatggttttagtggaacacattaaacctcatagaacacaaaagttaaattttgccatgtaatagggattggttagagggagtaacagagttcccttttctccttgaataaatcctaaacagaccttagaaaatgtgttatcagactgcaaagcaggatgaaatattctatagtcataaaaactaaagcaactttcagaccatttagttggggaaggaaaaaaaaagtgggggctagagcaactcgccaatgtggttgtggtttccctgccaagggcatcagatgctggtctctgcctccattttaacagcttgaccttgtttagaacaacctgaatccaatcctcagacctccctgagagtccccacctgggatagaaagcacacctctccaagagcgctttctg

SEQ ID NO: 19677 - DNA, 1219 bp, Mus musculus
tcacaccactgtaccaatctgaaaaactggcacccactgtgtctcaaagacatcagtttggcaactcagcagatttttcaactgcctgtacgtggttctcactcctcccacactcttccttttcccaagtcctgaagaagtcagacactggtattagacattgatttactttttttaatatgtttttattacgtattttcctcaattacatttccaatgctatcccaaaagtcccccataccctccccactacttccctacccacccattcccattttttggccctggcgttcccctgtactggggtatatacagtttgcgtgtccaatgggcctctctttccagtgatggccgactaggccatcttttgatacatatgcagctagagtcaagagctccgggtactggttagttcataaagttgttgcacctacagggttgcagatctctttagctccttggatattttctctagctcctccattgggggccctgtgatccatccaatagctgacttttatatgcaacctacaccaattggtagagatttgtttctggcaaactgaaatctccccaagccccacatctctatcatgaactaagaataatcacactgacttagcacaacttgtctcctatcaggctctcaatacatggcagctttcttcacctttgagcttctatctgtctgaacatttgccatgtttcaaagcctggttttaactccatctgctccttgaagctctgtcgtgtggctccaacccacattctgttatctattctccaattgtttttgcactctttctctcctactaaaattcacccttcattatgattgacaagtaagctgacatccatagtgaagtcttgtttagtcaagcttttgttgagctttatgttcccactggtgtacacattgactgaaaaatgggctttctcttgagtttcccatatgcccacacagagaccgtcaacatgtatttctttaaattgattaccaacttttttctctgctacaaccagcttgagaaaagggtggcaactcaattgaagaactgcttacctattttctgtgaggtgttgtgcagacaaagggcacctcagataaggaaaacactgattcagaaacgaacggagcacaactagctagtgttgtttagtgtgagaaatagaaccacgggctgtctagatgatgtgaacacaggacttctggtttggg

SEQ ID NO: 19678 - DNA, 1172 bp, Mus musculus
tattgttttttttttttttttctgttattatcttttgaagggctggattcttggaaagatattgtgtgaatttggttttttcatggattacgttggtttctcttgtatggtaattgaatgttttgctgggtaaaagtaaaagtagcctgggctggcatttgttctctctctctctctctctctctctctctctctcttaattttcccccaattttattaggtatttacttcatttacatttcaaatgctatcctgaaagactcttatacccccgcccctgctctgctacccaaccactcccacttcttggccctggtgtttcccctgtactggggcatataaagtttgcaagaccaagtggcctctcttcccaatgatggccaactaggccatcttctgatacatatgcagctagagacacaagctctggggatactggttagttcatatagttgtttctcctatagggttgcaaaacccttcagctacttgggtactttctctagcttttccattggggaccctgtgttccatccaatagctgactgtgcatttgtgttctcttagggtctgtgtgacatctgctgaggatcttctgccttccatagtctctgacgagaagtctagtgtaattctgataggtctgcctttatatattacttgacttttttcccttactaattttagtattctctttatttagtgcatttgttgtcctgattattatgtgtcaggaggaatttcttttctagttcagtctatttggagttctgtaagcttcttgtatgttcatgggcatctctttctttaggttagggaagttttcttctataattttgttgaagatatttactggtcatttaagttgaaaatcttcattctcatctatacctatcctaaggtttggtcttctcattgtgtcctggatttcctgtatgttttgtgtggctctctctacttgctgcagtctctgacctgcagagacaagaatgacacagacaccaaggcgggttcatgcagcagctctttacttgtggctttttcccctacagctctcttccccagcagcttcttccccttccttcttgcagctttatttacaactctgtccactttggcaagggtaacaacaacagaactcctttactcaggccgactgacctcatctagct

SEQ ID NO: 19679 - DNA, 1213 bp, Mus musculus
ataccttaaccttatcctgcagtgcttttacttactacaataaactaggacaaattttcatagaaatttatgtaaattcagtcccttctaagtaccagacatttaaaaaatatgtccaatacttagtagaataaaaaaattccttctttcctccagaataatttgattaaaattgtaacagacttcagttgtaaagcctattggttaccagagtcaaagttgtgcttctcctttggaaactgggtcacttctacagagaatgtaaaatgagtgacttgaggcatatccgtagatatagagatgctaagctgagaagtctatattccttccatccttggcagaaggaaaatcacagggagaaagcaagcatagcattaggtcagaccccagtgacagtgtgttggcagtgggatgaagagtgcggaagcaatcgtctcatgtgtttggtggactaaggtgtgtgtgtggggataatagatggccagagagtcatattcctgagcagttataactcatgcaagtgaaatggaggagggaaatccagcaagagcaggaggaatgggtgatgggtttgtggttggaggtgatcaatgcactttgaagtttgtgccattctggtctgctgcacatgtattgctatggataggctatgaaggtcaaggtctataaactttacctcttcctgttttcagttcctacttatcagttattggcctaaatgctcaatacttaattgtttgggaccaaataagatcacttaattgtgatatcatattagttcatttttacattcttcatatttatctctctatgtttttattgtgacaaatagtcatagttttggtgaatagaaaaccaaagcttaatctgatgtagatcatgaagaatctatgttggatctagttggacaataaattgtgcttctgtgctttccaatcaaatattctttcactagaattgctcaataaaagtcatgaaactctgaaaactcatgatgattttgtaactttttattcttgtaataagtcctatttccaatgaacatatttcttttatatatttcatttgggtatgattaaaatatatcatgagagagacaaagtaggattatttccctaaagtttctaagaaactaataatctattcagagagccaaatggtgttatccaagtgaaaaaattatttatcccccaaaggaatttctacctattac

SEQ ID NO: 19680 - DNA, 1216 bp, Mus musculus
caacttggaaagaggcttaaaggctcactgggtttttgttttgtttttgtttgtttgtttgtttttgttgttgttttgttttgttgttgaactttaaattctttttatattattatttcccagtgtttttcaaatatggaatctaatgataacacatagctgggacctagaaatgtgatcttatttgccttttcgagaccacacaagtcagggaacatcctctatctccagtacctgtattttcttgctttctgagaatgtttatgcgtttgagtgtaaggtatttgtgccaaaccacacaggagcatttagactcaaattccagagcatcagtggttttcatataccttacaattccatcagtttcaataactttgttagactctgcctggttatatgtattcatgtacatgcctgctcatgcaaacacaggtacacacacacacacacacacacacgctaagaacatgttgccgggacccattctttattacaacagcaagtgcttggacaacagaatcctgcagcactacattcacctttcaagcgaaggccttctagggcttctcacattaatagaggatcttcagtaatcaggcagaacatcccactttctgctcttgtggttttaaaagactttagggtacatacctagttctgaaatgaaaggtttccctctcaaacaaaaattccaaaaacaaacttgttcttgaatgtttaaatttgactgctttctgggccactatgaatccatcttgaagtcttgttcctgtggtagtaattcttatccatggttgcagtgaatgaccagagcctgtctctttatctaacacagacctatgctttggcctcatctcttaatctctaacctctagccctaggaactggacttagccctgctcattctaggcaattgctctaccagcgtgctaaatatgaaatccagacgacacttcagtgtgtttgtgtattgatgcttttcatccatcccttccatcactgatgaatgctgttgacaaaaatatttttagatcccttttaaaaatagaatgtgttttccagccaccagccatgacagtggagatgactctgtttttcggatgactcagtgtctactgaaataattgtgtgactattttattattgctcctccacaagtttttcagaggtctgtttacttcattttcaattctggagccacattctttctaacagg

SEQ ID NO: 19681 - DNA, 1179 bp, Mus musculus
atttaaaaatctttactaattttctaatttaatatattttactgggtttacgaacatgtatacaaaactgtaacattagagatgaaaagatgttttctttcttccaaaatgacatacggatgtttcctacttgaaacagcagcatgggtagaggctagatctcaacagcagctccccaaaagatgcatagcaatggttggagatacttgcattgccacaacttgtgtgcatgtgcatatgtgaataactctggtgtctatagcacagaagctaaacaacctacactcatagagtgaaccttttctagagggtgccttggtgagaagcccttttcatatgcatggagatgaaagtataacaaagtaaaaacagaattctaggcctttaggcccaggcttgggaatgtggcctttgtaaaggtatgctaattataaaacagatagcgacattcctccacccacctgcttcatgggttcaacaagtgctcattcaaagaaagtcacaagaacctgcaatgcaaatgtgctattggtaggggctcttagaagctgtcttgagagttaacaattaccaggtattccttgtgactcttgtaactttgcacttccttgtgactcttaactggtatctttggtatcttccaacaacgccctccccacctccttgagttgtggtttcttcctttaaatacccccttacccagctactcggcgtttggtcttctacccctgtgtggtgtatgaccgtgggcccgagagggctcttgaataaaaatcctcttgcagtttgcaacaagactgtttcttgtgggtgattttggggtgtcacctctcctgagtcagaacgttgtgggtctttcagagactccccagtttggcttggctttcagttttactacaatcatcagaccaaatatctgtatcttctgtgcatgctggctagggttgagttcattgtgctgtgctgaaaatcccaaactcagtggtttcttacaagtaacatttatttcttactcttgctacattccaacaagttgacatgtttttggcacagggactctggctgataacaactggttccattgcaactcagatttccataaagggaaaagaaggaagagataaatcaagtactggacctaccagcctctagaaaaatcatttctgcttatatttcatt

SEQ ID NO: 19682 - DNA, 1170 bp, Mus musculus
tgcttattcacacttaaattaatagtgacatatagtgattggtgtgttcttcttgattattttaacatacaccacttattcagttggtgactgaagctaattgaaatgtagttataatcagaataattaaataacaattggtttaatctctgtttaaagaaaaactgaaactcagcttttggtccctcagttcatagcatgagcaccgatactgactcaagtcgatgttgcctactcagtactttttggaaccagcacatcattgaaccttgtacctcctaagcatggggtggctgctactcagctcccagtggcactataatagtgcaatttcagtgtatgtatgcatgtatgtgtatatatatatatatatatatatatatatatatatatatatatatatgtgcatatacataatctcttaagattacatcaatcagtatatgtgttgaggtaataatggtttgtctaatgagtctagtttttatgaatgcctcatgtcagcttgtcacacagacacaggaatgacctactttcatgctttgttacagtatcctgtagagccaccagattgtgttgtggactttcctgtcccattttctgtttcctggacaccacaggtaaataattgagtttattttaaataattagaaagtatattctttttactcaaatgattgttttagggtctaaatttatttatttatttatttatttattcatttatttatttatttatttttaagccattagatgtaaaacctcattctttaataattcatatttttccaaaaattaaagtttgtttttctctctttaaatacaaacatgagcatgtacacacacattgtctagatatctgtaggcaagcatgtagaagtacagtctactgctatacattgttaagtttaaatcttaaaaaattctttagaaagcagtggatataagtggagtgtgtgtgtggttgtgtgtattgctaaaattgatgacctaatagataacttctctaagagatgtcctttgtgtccttgcttgctctccttaggctaattcagttttctactacattgatagaggtcagtgtctttagaatcgttctagaaactggtgttatatacaaagaaggtgatattagtagtaaaatagctttaaaaatcaaaaaagccggtg

SEQ ID NO: 19683 - DNA, 1567 bp, Mus musculus
tgggtgccttggcaataggactgggattgttctatggcttaacaaactttataggtttgtttgttcgtttgtttgtttttagggatccagaaaatagtctgttacaaaatttgaaagatgttttagaaattgatttcccagctcgtagtatcttggaagaatctgtaagtttaattattagcttcaataatctgcattatgttaataataaaatttaaatgcttctctcaggaaaatgaggctgaaaaaaatagaaattggtagaatgttgcaacacagaactcttagttacaagtaacactggcatcaatgggcttgttaactgtctgttagctaggctcttaaagggatctgttcatgatctttagcagggaagtggttaatgacagatacacttattaaaactacaaagaaaagaagagacactaatgagatgtttggggttttgtactgtttgctatagatgactacagtacagttttaattagtttgctgtaagtttgtgaaggacagcgatagtttttcagaagtgagcagcagcattgatactgtaaagataacagaggcagggctggctttggactgagctactgccgttaacaccaagtgatggagatcatctccttgttccctatgctgcagaactgtggcgatctgctgttcactagctcatgtcagactgtctttgtgtagacacagaaatgactgtgaacatggaaaaaatggctaaaacataaaaatcttgccagccccaaatgaaatctgtgtatatgtgagtgcagagtggatactgtgatgagactaggtgttatctctgcttgtatgttccccagtgcacaagcatacttaaaacacagatatagaaacaagtatcatatttgttcttcttaaccttgcttatccacattcaacacaaacacttttcttttgaaggactttagcatggactgtggaatctgttatgcccgtcacctgaatggtgccattcctgatcaagtgtgtaataatccccagtgtggacaacctttccatgaaatatgtctgtatgaggtaaaactagtaattctctacataggaaatacagcattaaaataatctgttttccctaaagtacttctctggtttgccacaaactcctcttactagttaatttcacacacccacaggcttcatgtcttcatcttgtaaactattgagtgtgccagggagaaacagaatctagaatatactcatgaatagcatactgacacataatacatatgtggtaggtataactgaagtctccctaaacttgctaccagtatgcaagttctctagttgtgatgtgccagatgaggaaggcaggaataggtaaggcacttagtcaataggtagtatgtgctactgtgcaggctgcatatacataaatgaataaaataattctcttttggatggtcaaagattcttgtgaccctgagcatctcttttctacatgaattgtgcttccgtctctcaatcagttagttcctggagcactcctgttagagcacatatgattgactgtttttgtgcaaagcatcttacagtg

SEQ ID NO: 19684 - DNA, 1170 bp, Mus musculus
attgcaatagattttcttactttgctttaaaaagaggtaatatactatataagcttgatatttttatgcctttggtgaaagcataccaatttatgtaaagcaaacattatgatattgaccattcatccatgcaataagataaagtaaaattagttccttgatattttcttgataataaactttgtagttgtttaaataacatctattaaataacatctagaacagtatgactattgctatctttttaaaatttttttctattttatttttcattttttattggttattttatttattgacatttcaaatgttataccccttcccagttccccctccacaaagcccctatcctctcctcctccccctgcctctatgaaggtgctcccccacctgtccaccccacttctgcatcagtgccctagcatgctcctaccctggttatagagcctccacaggacagaggagctcccctcccagtgatcccctataaggcaatcctctgctacatattcagctggagccatgggtccctccatgtactcgttggtctgtggccataccaccctgaacgtgcctgatctcgtctgatctcggaagctcagcagtgtcggtacttggatgtgagactataactaccttttaaatagaattaaattggataaaatgaaattattgagagtaattacttttaaatttttaaaaaaaacttccctctcatctcctcttcccccgttatacctgccctccacccttgcaacctccccaccaacaaagaaaaaaaatcagtcttctcatggaagttgtaatgtgtcacattgtgtcctacagtaaacctttttgtccacatatttttgtttgtaaatgtgtattgcagtgatttattggtctgctaagaggcctctggctgctgctactttatcaatactggaatctcactgggactcctcttggatatgctgttgtcctgtgcagtggagatagtgtagttttggatctgaaggactggacaggactctttatggacttcaacagttcactgatggggtagatgttagggtgggttaattcaaagccctagatctgtacctgagaggtatctgacctgttcaacctgctggctcttcctctttcatgccctctggggatggctcaccagccacccctgttacc

SEQ ID NO: 19685 - DNA, 2583 bp, Mus musculus
aaataaataaattatgcacatgtgattcttaataactttgcaagccttctagttacaactgctccttaagaaaattgattaaaagtgcaattagtcactgcccctttacagccaagtatttaaaatgttttgtcaactagttattaattcaaaagtttaggtattgtgaaattttaaaactttaacttcttaaaagacaaaaaaagagagaaattgtatccccgtgcatactatttagtgcattcccatgcacactatttaagtcttacctttattttcaaaatttaatattttaatgtcaaagagtttaataaatgctttatagtatcttaaagggatctacttattggcttatagattaatcctaaaacagctaccttattagaaaagggaaaaacaggttttctccacagaacgctgcagaagcatattagtaaattcgtgtgacgagctggtaaataagttgactcatgtcctgattgaattgactaaaaaactaaattaaattcatgttttagatccatccttacttgtcatttttccagtttagactagcttctagccttttaactttatggcaatagtacatcagagactgtatatccagacttagtaagattagtcatttaatagagtcataatgatttttctcttttcttcagtgtgaccagtcattttaactcaatcttagactggtctaatattcagtccaatgttagagattcctatattctaaattacctagcaatgttaattcagagcacatcccccactccccctagatccctaacctcagaaggattgctggccttacagctaatagaaaaagctattgaagagcaattggtcacttaatacattggtaaaatagaaggaccccctgactaacaaatggaagggtccagatccagttctaatttggggtagggactcagtttgtgtcttttcacgagataaagatagagcgcggtggctgccagataaaataattcgtcagatgaacacagattctaaatattctaaagtatcaccttgaggactaaaattcctcttttgcttaaaagtcggcttgaggactcaggctccaaaaagctactctctgagccagctccccgacaggaggccggagactagcctcagctttacaatttgcatttaaataaagtacctggactgccccaaaagaagttctgctttcctactttctcactgtcgagattttgtctttcaagcaggtaaatcaacattctcgagccggaccagcggatgtgcatccccgccccccttgagagcacaggtggcagctgttatctccattctcaggacattccagcacgtggccttcagtctgatttaaaatttaggttttcctagagagctagaaaggtagatatttctatactaataaagattggtttttgttttgatagacaggcttagtcccttagctgacctctggcttttcacccttgctgttactacaaggtgtccttagctccttaggctgtggaaaaaacagagatgaggaggaacgacttccagctcctattttagccacaaatcgtggtgttactaatgacataattattgcttaggccttgctaatctgaggttgataattctcctttaggagctgcacagcactcagaactgtgcatactggtttgtgatcttacaaattcagtatgggcatcgcttggtgcagagagcactgcaggggaaggtccaacttgaccatttctgagtttcctgtgagataaacccggtttgaaagaggttggtatcaaattttggctaaaaatcaaaaatatttttcggctctgcctcccctccccaaaagataccgagagccacaggtgtgggtcttaacagtacccacgggaggaatcgggtcaatgtccacccaagccaaggttaaaagcccactcatctacggatgaaaaaatcatttgatcacctcagttaagcgttgccttatttaacttaattaataggggggagagagattggagccgtactattgaaagggcaagcccttcactgcctccctgtttcccacctatcatccaaaaatgcgaaggaatatcaacttagtgttattcttattatagtgtatttcaaagttgttcagtcaaacttagccagagttccaacgccctacttaaaattcaactagaaagttacctaccaagtagtaattagcattataaagtcagagcctacagctccaggcttttcagttagttgtttactaagatgagaaaggacagtcttaagccagatacagtttaccataagaaaagttaaagaatcccagggaagcaggttttttctttagccctagattccaggcagaactattgagcatagataattcccccccccccccctcaggccagctttttctttttttaaactttgttaataaaagggaggaaatgtagtctcccctcccccagcctgaaacctgcttgctcaggggtggagcttcctgctcattcgttctgccacgcccactgctggaacctgcggagccacacacgagcacctttctactggaccagagattattcggcgggaatc

SEQ ID NO: 19686 - DNA, 1839 bp, Mus musculus
gctgtggctaaaaaaaaaaaaaaaaatcagatggcagatctaacaaatccaaacaagcggcccaaggagcaatgatcctggcagtcaagaaacctaaagattattatgacatcagagagaccagctttagatacaccgctgaacactatcaagttatggacagtatttgacccacctgggggccaagaaattaaaaagtgtggttaggtcctttgactactatgttacaggactctatgacttgacagaagaaatagtcaaaagctgcaaggcctgtgctatgatgagagaatttctaaaagaaatcttcccaaggtaatagacctgcctttgttgcccaggtaaatcagggactggccaagatattagagattggttagaagttacattgtgcatgcaggccccaaagctcagaacaggtagagagaataaatagaaccattaagagacccttaccaaattgacagcggagactggcgctaatgattagatagctctcctaccctttatgctcttcagggatagaaacacccctggacagtttagactgacccccctccactggtaaaaatagcctttgtacatggtgctgacatgctgctttcccagcctttgttctctaggctcaaggtgctccagtgagtgagacagcgaacaaagaagcagctccagaaggcctactcaagaaaagaagacctgctagacatctccgcacagaaaaccttgagtctccggtggaaagacccttatcttgtactcttgaccaccctactttctacctttatgggaccccttttgattttgcttctgcttttaattataggtccatgtgtgttaaatagacaagtcacctttattaagacaaaaattagtgcagtgcggcttttaattttgagacaacagtaccatgccctaaaggatcaagtatgtcagggaaaagatagtgtctagttctaagattagaactaataacaagtagaaggggggaatgaaagtataacaaagtaaaaacagaattctaggcctttaggcccaggcttgggaatgtggcctttgtaaaggtatgctaatcataaaacagatagcaacattcctctacccacctgcttcctgggttcaaagagtgctcattcaaagaaagtcaccctgaccattaccagaacctgcaatacaaatgtgctattgttaggggctcttagaagctgtcttgagagttaacaattaccaggtattccttgtgactcttgtaactttacacttccttgtgactcttaactggtatctttggtgtcttccaacaacgccctccccacttccttgagttgtggtttcttcctttaaatacctccttacccagctactcgaggcgccacggtcctctacccctacgtggtgtatgaccgtgggcccgagagcgctcttgaataaaaatcctcttgcagtttgcaacaagaccgtttcttgtgggtgattttggggtgtcgcctctcctgagtcagaacgtgggggagtcctcacgttgtgagtctttcagtatccatataatttcctgactctccacttggtattggataaccagttgtggggaagcttttccctggggaagacattttcacccattctcaggattttctagttgaccaaaattctttctcggtttagagacccataagcatttgccttttatgttagactgacattgcttttcaggtcttgtttaggcagctatcctgatgagacttcatggtatatagacacatttttttaaaagatgttttggaatacatttttattgctttagattaattcctattatcctagtccctcttgtacattttg

SEQ ID NO: 19687 - DNA, 1210 bp, Mus musculus
ggagggtgtcctcaaattccttgctgctagaacccacttaggtgacaccaaccttgactttcagatggagcagtgcatctacaaaaaggaaaagtgacagtatctacatcataaatgtgaagaggacctgggagaagctgctgctcgcagctcgagctattgttgccattgagaaccctgctgacgtcagcgtcatctccttcaggaacactggccagggacctgtgcttaagtttgctgctgccacaggagattgtgaaggtccaatcgcttcacacctaggactttcactaactaggtccaagcagccttcagggagccacggcttctagtggtaactgatcccagggctgaccaccaacccctcacagaggcctcatatgtcaacctgcccaccattatgctgtgtaacacagattctctgctgtgctatgtgtccattgccatcccacgcgacaatggagctcacattgtgggtctgacttggtggatgctggccagggaagtactccgcatgcgaggtactatctcccgtgagcacccatgggaggttgtgcctgatctttacttctacagagacccagaggagattgagaaggaggagcaggctgctgctgagaaggctgtgaccaaggaggaattccagggtgaatggaccgcaccagctcctgagttcactgctgctcagcctgaggtggccgactggtctgagggtatgcaggttcactctgtgcccatccatcagttccccacggaagactggagagcactgccagccactgaggattggtcagcagctcccacagcgcaggccacggagtggcttggagccaccactgagtggtcctgagctgctctgcagacgcctgagcaaagggaaaaaaggtggaagaaaaataaagttcataaaagcttaaaaaaaaaaaaaaagaatttggatttttctcctagataatttgtaggagtacctaattatttacttcattgatcccagggcggcgatggtgttccttgctacctgcctcaatgttctaggtacccaaataaaggacacacatacacacacacagcctttatattttgttgtgcctaaaacagctcaatggctgggctacttcctaacccccacctccctccaatatttccaagttattagtcacaaaattctatatttcatcttggctgccctgggcccagtttgggagccgtc

SEQ ID NO: 19688 - DNA, 1139 bp, Mus musculus
aaggaagggagagtggttgtgcgccgcggtgaagggaggggtagcggagaccacgagcggagggctctcggtggctctggtcaccccttctcgcggctaaacctttagagccatggtaaactcgggcctctccagagtcgctgccaccaccgccgctgccgccactaccggctctcaagagtgagggataccggcgaggtgagcgaggaggtggcggctggaacggtggggccagaagccaccatgtcggatacacggaggcgagtgaaggtctatacccttaacgaagaccggcaatgggacgaccgaggcaccgggcacgtctcctccacttacgtagaggagctcaaggggatgtcgctgctggttcgtgccgagtccgacggtaagggtattggaacggtggggtaggggatagtgcatcggttgcggcacaacctgagggttaagcgctgcgctccggtactgtattctgactagcaccactagggacagcgcattggtcttgagcctgcccttctttacgataaaaacaaactgctgggcctggatttactctctgtcagacgtgaactcgcagttctccgcctccatccctattgaggatttgactccttctccccccccccccacccccccatcccaacccggtagttgaggtttagaatgtatgagtgggaagtcagtagaagaccaggtaggaatatcgcccatgagatgacccccgactcccgagccgctttaggtacagtcctgtcggttgtacctatgtagcataaaaggtttagagaaactctgccttaaaaacaagtttcagttgttccaatcgccaggtgctggggaaaactaaaacggactttctcttggagttactacagactgttgccacgaaacacacaagcacgtacatatttattgattgatccctccaaggctgccgttgtagggagtgaaaaagtgggttccacaatctcggcaagttagaaaactaaagcggactgtgaagttgtatttgttgattgcagaattcatagaaaccattttaatattaaaaactgacagccataataaaaaagctactacttatatatactcaagagctgcccaactggaacagctaatgcattcaagaaataaaa

SEQ ID NO: 19689 - DNA, 1099 bp, Mus musculus
tctcttcttatgtacttagataagactgttttgacagcgttaaataggaaatcattaacatttactgaatatatgggcttaatactgttctataataagctttcaaggcctaaattttgtcttttggtaaaatggtaaaatattcataggattatgataattatatataaaattataaaagttttctttaaattatgaagtacttactgtataaagcactaagacataaactaaatccattgcttttcaaatgttccttatagccccctaaagggctccagtgaattgcctctccttgttccaagttttctgtggagtcctgtcctggctcatgtataaggaatctaggacatttatttttagaaggtgattttgaaaaaccttttttgatcaattttggaactatacaagtttttatttttgtttttctcaacaagtattatattgttttataatgtgaattttgtgcctatacaggaagatatcaagtctcttactgcacatatagttgaaaacttttataaagcacttgaatcgattgaatatgttcagacattcaaaggattgaagactaaatatgaacaagaaaaagacagacaaaatcagaaactgaacaggtattatttaagtgtattattacatttatagcaagcaaaattaagtacaaaattgtacacagtttagatcttatccagtgaaattttctctattagcagagcataaggtaaactgtctttctgccacatcagttaattatatgacaacttgatactgcatatagtaattttgatagagtcttaatttgcaacatacaaaaacatttgaagatttctctagctacatcttatttgatatgctgtacatgctaagttaaactacattagttcatcttggttagtcattcttcccaaagtttatctagttatgaccttgtagtcattactcagcatctgacatatttcttacagtgtaccatctatattgcgtagtaaccgatttcgcagagatgcaaaagccttagaagaggatgaagaaatgtggtttaatgaagatgatgatgaagaaggaaaggcagtcataacaccagttgaaaaatcta

SEQ ID NO: 19690 - DNA, 1187 bp, Mus musculus
gctattgtttggaaaagatgggctgtccgtgtagatacgaagtatagtttttccataaaacagatgtttattttgtattaaaaataccactgtacttgttttacaccatttgtatacatgtggtgatattactgctaaactgtaaaattcaggaattaaaatgtgaccctataattccatgattgaggcttctgtttgttttattgtaaaataagtgaataagtgaactatttttgagatatgtccagtttacattgtcttttaaaggctgataaaatccataaagatatgttataagccactaggtcagaaagtcttaaatgcaagactcaaccattctttaaatatcacttacaagaggtaaaccttgagcaaacctaacagcataaagccattctcacctctaaacaaaggtgcacatacatcatgcattcatcttgtatcacaagtgaactgggattctttcagccaatatcagtaagttactgtatgagtaggcattctttcaaacaagttttatgaagcctctaccatcttagtgcttagaatctaagcagccctgatctataaactgttctgttaactcttttgttatgttaactaaagtactgtaccatataaagacttcctttaattttcctttctgaggaacttcaaacttttaagacattattatgggaagtgtttcttacaatggaaatatgaatgttttcttaaagtccaagggcaacagttgtgtaatgcatatgctcacccacatgatgaaaggatccttggaaggcacaactaggaagattccacagtagctgctgtcctgaatgacgaccctcatgcaggctggggtgcttacagcattatctccactcagctagttcaagtcagagcacacatttgtatgccttaggtcctaaaaatatctgtaaacatgtacctaataaaaaactatttttaataaaaagttatgtgaaacagattcacgtgttttaatcactagtttttctgcaggtggaaggttttacattttacattcaaacagattagatgaaattttagtaaaatcccagttgaggccagcaagatcactaagtgggtaaaggagcttgctgctaagcctgatttgatgtttagaaagaccagcactctatggtaggtagcattttcctcaacaggttcagtcagggaatcct

SEQ ID NO: 19691 - DNA, 1161 bp, Mus musculus
catatgtgctcacatatgtaaacattcatacatgcacacaaaacacacaacctgcacagaccaaaagttaaaaggataaaaatttaaatataaactttgactttccaagaaaatctgactactctgaggagttctctagaagcttagatgttaacagtaaaagacagatgtaaacttagagagtggcaatggcagtaagatgcacttctgctgcatttatatccccataagcacctgcttttttcgtttcctttcttcctcctggtcatattcttcttttgattttctgaaatataaaaaaaaaaaaattaaacgttaatcggtttggtgtggccctggctgtcctagaactccctatgtagatcagcttacccttgaactcacacgatccacctgcttctgctgccctaatgctgggaagaaaggtttgcacccctactggctggctaaaaagtaaattttcttcttcatcaaagaataaataaacagcatgttaacctgacattatagtataggcaaagttatccactggactgatccaggataagtgatatagaaatacttttctcctaattaaatataatacaaattggacttcaaacatgaaaatctaaaatgttctaaaacaagaaactttggctcatcagcagaacattcaaaatgtaatgtgtaatgtttgaattccaaattttctggttagggttgctcatctgtgatctgtgcaagtattccaaaatctgaaacattcattcctaagcatttagataagagtcactcactcaagctgtgtatacatgcccccccccaaaaaaatcattttgtcggtagtattttctagggaaaagttcaaatacattcagatcatatacaacactactaacatttcatttaaaaacagttgaaaatgcatacctgaggacctctcttagaattttcatctcttcctgttcaaggtcactgaccacatctgcaccatcagttaagcagtcaggtaacacacctgttcaaaaccaaacaccacatggaagaccatcaactcaactgaaacactcttcacactgttatggaccatgggtacaaattagtttacaatgtatcatttttaaaaattccaagccttgttaattatcttctgcttaacttccttacattttagggatt

SEQ ID NO: 19692 - DNA, 1156 bp, Mus musculus
attcaaagtaccacattaagcttgagtaattcagcctaaagggaaagaaatctatcttcatgaagatgtgatttcaagaagaattgaaacttataagtcctatatccttttctttaagtacatttaaaggagaaatatggaagaagatcactgttacttcttaattagttctcatttatcagtaatggtttctgcatttatgttctgggaagtaaggtaatggtcataaagtcattggataaaatattacgcatattctaaaatgtaatttccatttttatagtgataaattaaatgaattgagacgacaaaaagaaaaattagaagagaaaattatggatcaatacaaattttatgacccatctcctcctagaaggtaacactaattgaatttaaggatctgttttaaagaatatgttattattgttgaacttagactaagaattcttctaattctactaggagaggcaactggattactctaaaaatgagaaaattgataaagtcaaaaaaagatattaatcgggaacgtcagaaatctctaacactaacacccacccgctcagactccagtgaaggatttcttcagctgccccatcaagacagccaagacagctcttcagtaggatcaaactctttagaagatggccaaaccctggggaccaagaagagcagcagtgagtgctctaaacagattattgatttagattgctcttttaaaagacaatttctagtagtcttagtttgatcaatgatatttcgttttaactttatgttcataatattaattgcagactacaatagtgtataggtagagataagaatcattgtgctagtaaggtaaactattgtaaaaagatcattcaattaagaatgagccttttgctcatattcttttatagcataaaattggaacaaagttatattagggaagtaaaaaaaaataaatactaatttgaagaggtattacagaattatttaaagataactgaagtctcaaaaattattgcgggatacttgctgacgttttggttaaaatgaaataaagatggggaaatgtaaatatataaacttaagatttagttttcattagacttagaagtcccacaaattgtgcctgatacaatttctagacttactataatttatacttcac

SEQ ID NO: 19693 - DNA, 1201 bp, Mus musculus
attaaattactttaaaactcttgaatgaaaggtgctatttaaatgtaaatactaagggtttactgaaacacgatacacatactaaaaatctattctctagactttgaaatcttctttgtgactccttagattcaagtctcaaattggtaaatgggtatcatggaagtctagagacagttgcatgtaaaaaaaaaaaaaaaaactgtaaattcactgttggttgagaagttgaaaatgagtgtagaattatgttttagcttaatatataagagaataagttaggtttatattaactagcatccaatttgcacaattagcacacatcccaggacagttaatgaatgagtgtgaggtgacctaatgagggtaaagcagtttgaacctgctgaggtaatcagcacatcagctagaaatactgtaatgtattaacttggagtaggccaaccctgaggagaaaaaaagagaaaactaagagaatacaatgagactagtgcattattctcaattatattaattgccttcctcatagcaattcaacaaaggactagccgataactccatgatttttttttctttgaaatctacttcagaagcagactttgtaggaatctaagccaaatggaaattaatccaaaccatttttctaaccaagcctacacccaactatctggtgctattcctaaacctccatgaacactttaaaaatgagaataacagcatctgcccagagctctaataacatgcctcctagctggccatggaaatgttttggttcaaggttttctgagttggtggttaccaaagagttcacgagacaggttcatgtgaagcacctttcatgcaaggcatgttaaaagcctatttaaaaatcactgtgcacattacagaattgtaaccacctcacaaatggattactacagcctgaactgtcttaacactttatgtcaggaagtaaaatcaatactgtaccaaatctggaattgtgatggggaattatgcattctaaattacttttgtactttaagttactttttatgaaaaaaagtgaattgtctttcttttcagctatttgtcctgagatgtattttttttctttgagtcttgaatatgaatagtacaaaaagagcccattttataattataaatcttgatatacaggttaagctatttggacaatgaaaacgccttaaatggaatgctt

SEQ ID NO: 19694 - DNA, 1137 bp, Mus musculus
gataatatttagcaggtcagagtagcctaaataaaagctgcaaaactatatcttataaaagaacaaagttaaggtcaaaagaataaattcaagaattattccaagctgggcatggtggcacacgcctttgatcccagcactcaggaggcagtggcaggcggatctcttgagttcaaggccagcctggtctacagagggagttccagaacagccagattaaataggatataagagatgacaactacatgtaatttatgaacctgatctaggtgaaaagttttttttttttttttttaagaccaagtatgatccttggatggattatataattaaggttagcactactctggtcactggttttaagtgggaatacacacacacacaggcaaatgaacatatttcaaaatttttaaaataaatttggcctttaacctggccaagaatatgctagaatactttaaaatatcaagacaaaaccaaattgttcttctatgtcagcctattatgagcattgttcatgtgtagacttgagccaatttttttttttttttttggtcttttgagacagggtttctctgcatagtcctggctatcctggaactcactttgtagaccaggctggcctcgaactcagaaaaaccccctgcctctgcctcccgagtgctgggatcaaaggtgtgcgccaccacacctggcttttttcttttttttttatttttttaattaggtattttcttcatttacatttcaaatgctatcccaaaagtcccccagaccgccccccccactcccctacccacccactcccacttcttggccctggtgttcccacatactgaggcatgtagagattgcaagaccaagggacttcccttcccaatgatggccgactaggccatcttctgatacatatgcagctagagacacaagttccaggggtactggttagttcatattgttgttccacctatagggttgccgacccctttagctccttgggtactttctctagctcctccattggggatcctgtgttccatccaatagctgactgtgagcatccacttctgtgtttgccaggccccggcatagcctcacaagagagagctatatcagggtcctttcaggagccaattt

SEQ ID NO: 19695 - DNA, 1233 bp, Mus musculus
tggctagctcactacggtgtgacagacaccttcagcccccaaatgcctttctagcccttaagccttccctccggggcatttccagagagtccccacccacgcgcaaatcatagtgcctcatcccctgagtcctcacctgactctctcctaaccctcactccacagcttagacagtgtaatcaggtatccgggaagtgtggaaatgcatcctgggacaagtagttctaacaagaagaaagcagtgtaaaactacaattcccagatagacttgttttacctctctcttatgtttcacaagccccctttaaaggaaagcctctcttaatcgcatcggctgtataagaaagccttttgaggcattttttttagttgagcacatcatttcgaggccattctgaggtaaaccgagaaaagagcgtaaagaaaccgagcgaacgagcaaatctggcactgcgttagacagccgcgattccgctgcagcgcgcaggcacgtgtgtggccgcctaaggggcgggtccttcggccaggagaccccgtcggccacgctcggatcttcctttccgatccgccatcgtgggtgagtgtatgctctgtggccgcgctctggctagtggcgctacgcgtcgctctcacgggtgtcgtcggatctaatccgtctcttttcgaatgcaggtggagccgccgccacgatgcagatctttgtgaagacccttacggggaaaaccatcacgctcgaggtacgggccaccttgccgttgaggaagccaaggcctgactgaggcccttagtgtttgagggcgggtttctgagttttgagttgtgaaacttggctttgagctgagattatggtgcttagcaaaaacaacgtttggttttcggtgtggtacggtttagcctgctttatcccgagtggcgaaatgtagggtaggtgatgggagacgcttttctccgggcagacgcgttcctgtgcttcccccgccgtcgctcgccctggtatggggactaatttggattgtagcactctgggtagtttgcacgcggtgtcatcttaattgattacctttagctcacctcctccttgctcgttttgtataaagctagcagttaatgacttactatgtaaccgtatattaactacatatatcaaaacttggcaggttgaaccctcggacactatagaaaatgtaaaggccaagatccaggataaggaaggcaagtaaagtttgtcactag

SEQ ID NO: 19696 - DNA, 1170 bp, Mus musculus
cttctttgtctttgacagctcttcaatggcacctttgttaagctcaaaaaggcttcaattaacatgctggggattgtggaatcgtatattgcatgaggcaaccctaacctgaagtcaataaacgaactcatctacaagcgaggctacggcaaaaatcaacaagaagcggattgccttgaaagataattcctagccgggcagtggtggtgcacgcctttgattccagcacttgggaggcagaggcaggcagatttttgagttcaaggccagcctggtctacaaagtgagttccaggacagcccagacagccagggctatacagagaaaccctgtctcggaaaaaaaaaaaaaaaaaaaaaaaagataattccttgattgcgctatctcctggtaagtttggcatcatctgcatggaggatctaattcatgcgatctatacaattgggaaatgcttcaagaaagcaaataacttcctgtggcccttcaaattatcttccccacgaggtggaatgaagaaaaagataactcactttgtagaagacggagatgctggcaacagggaagaccagataaacaggcttattagacggatgaactaaggtgtcagccatggtatttttgtaatctggtcagttaataaacagtcacagcttggcaaattggaaaaaaaaaaaagaactcctccctgttgggcagtggtggcacatgcctttaatctcagcacctgggaggcagaggcaggaggatttctgagttcgaggctagcctggtctacagagtgagttccaggacagccagaaaaacccccatcttgaaaaacaaaccaaaccaaacaaacaaacaaacaaacaaaacaaaaaaccaaagaactcctcctttagggcacaacagataatgtacttgcgggcaaaagcctgaagacctgagttagagaccaaaacaaaggtgggaaaagaaaaaccgaactccacaaagctgtcctctgacctccacacaagaaaccctgccagaatgctgatcaagcatagaaaaccccctttcctttggaaaccaagctgactcctctcatgtgtatcacttaaatgatagcttcttaggtttcaattcaacacttaaaaacaaacccaccatgtatttcagaacactggggataaaatcagtctctagaac

SEQ ID NO: 19697 - DNA, 1185 bp, Mus musculus
agttgggacgcctggttaaggacatgaagatcaagtccttggaggagatctacctgttctccctgcccattaaggagtctgagatcattgacttcttcctgggtgcatccctaaaggatgaggttctgaaaatcaggccagtgtagaagcagactcgggctggccagcggaccaggttcaaggctttcgacgctattggggactacaatggtcatgttggtcttagtgttaggtgctccaaggaggttgccactgccatccgaggggccatcatcttggccaagctttccatcgtccctgtgcggagaggctactgggggaacaagattggcaagccccacactgttccatgcaaggtggcatgccgctgtggctctgtgctggtgcgtctcatccctgcccccagaggcactggcattgtctctgctcctgtgcccaagaagctcctgatgatggccggtatagatgactgctacacttcagccagaggctgcactgccaccctgggcaactttgctaaggccacctttgatgccatctccaagacttacagctacctgacccccgacctctggaaagagactgtcttcacaaatcaggaattcactgatcatcttgtgaaaacccacaccagagtctctgttcaaaggacccaggctccagctgtggctactacataaggattttgtacaagaaaaataaaagaattaagtctgctaaaaaaaaaaaagaaaaagaaaaaaggagtccacaatttcttagctttaaggcaaaaaagctaatagttgttttttcctagaaaaatctctacagttgggttcaacaaatgacaaagcgctttttatcttaaaattatagctaaaaaaagtaaaattctttgattggtctaaatttataagattcgtgtagccatttcatttgttttctgactggccttaaaggtataaatatgctctacatgtattggtcatgaaacattggcttatataagttattgggtatgattaaaaaggtgtaacactggttacaagaaagttagctttaaattggtaactcagggttagagtcattttaaataacaacacgtggcaaaaaccagtcccaaaaaactaggcctctaggatacttctaaattgagataatattttatgtaattcttattctaaaaaagtagattataagaga

SEQ ID NO: 19698 - DNA, 1101 bp, Mus musculus
ggtgggggtggatcccagctccaaaccccgccctccgaacgccaccaaggaagtatggcaggctccgcctgcaccctatttctattggacaaccccgtgatccatcttctctatcccgcagcctattggctctctgtcccccgcgccagccagccctcccctgccgggaaggtgagtcacgccaaactgggcggagagtctgccctcctctctcagttgctcatctgggcggcggcggctgctgcaactgaggacagggcgggtggcgcatctcgagcgcggaggcaggaggagaagtcttattgttcctggagctgtcgcctttgcgggttcctcggcttggttcggccagcccggcctctgccagtcctgcccaacccccacaaccgcccgcggctctgaggagaagtggcccgcggcggcagtagctgcagcatcatcgccgaccatggaagacatagaccagtcgtcgctggtctcctcgtccgcggatagcccgccccggcccccgcccgctttcaagtaccagttcgtgacggagcccgaggacgaggaggacgaggaagacgaggaggaggaggaggacgacgaggacctggaggaattggaggtgctggagaggaagcccgcagccgggctgtccgcggctccggtgccccccgccgccgcaccgctgctggacttcagcagcgactcggtgccccccgcgccccgcgggccgctgccggccgcgccccccaccgcccctgagaggcagccgtcctgggaacgcagccccgcggcgtccgcgccatccctgccgcccgctgccgcagtcctgccctccaagctcccggaggacgacgagcctccagcgcggcctccggcgccagccggcgcgagccccctagcggagcccgccgcgcccccttccacgccggccgcgcccaagcgcaggggctcgggctcagtgggtgagtgctgctgcgcgttacgcccctccctcttttgtgtcttggcccgggggaggaggggacgggcagggctgctcgggaccctagggctttgtctacgagtggcagggtgatggcgcccccgctggcgggaggcgggcagaagggt

SEQ ID NO: 19699 - DNA, 2051 bp, Mus musculus
aacacctgaagttttctcagatttgatttatatctcgcatagtaggtaactgcctctgaaactgcacattattcttttttctttaggtactttaataactgtatttatagggtacagtgtgatgatcccatacattattcattgttgcctggtcagggttagccgattagcatatccatcatcttagatgtttttaattactttgtagtgatttagagtcttcacttggctataaacattgttaactgttgtacagtagccatgtactctttaaaattgacaatagttcatattttcagtaatgatccaagtctgtatttattaactaaatgctattcatattcatttaataataaatgtttactaacacttttattaatatgtcataatacttgcattagctctgagaacattggcattctctaattttcctttctatccatggccacagaaaaaattatggatttgaaggagcagccaggtaacactgtttcgtctggtcaagaggatttcccatctgtcctgtttgaaactgctgcctctcttccttctctatctcctctctcaactgtttcttttaaagaacacggataccttggtaacttatcagcagtggcatccacagaaggaactattgaagaaactttaaatgaagcttctagagaattgccagagagggcaacaaatccatttgtaaatagagagtcagcagagttttcagtattagaatactcagaaatgggatcatctttcaatggctccccaaaaggagagtcagccatgttagtagaaaacactaaggaagaagtaattgtgaggagtaaagacaaagaggatttagtttgtagtgcagcccttcataatccacaagagtcacctgcgacccttactaaagtggttaaagaagacggagttatgtctccagaaaagacaatggacatttttaatgaaatgaaaatgtcagtggtagcacctgtgagggaagagtatgcagattttaagccatttgaacaagcatgggaagtgaaagatacttatgagggaagtagggatgtgctggctgctagagctaatatggaaagtaaagtggacaaaaaatgctttgaagatagcctggagcaaaaaggtcatgggaaggatagtgaaagcagaaatgagaatgcttctttccccaggaccccagaacttgtgaaggacggctccagagcgtacatcacctgtgattcctttagctcagcaaccgagagtactgcagcaaacattttccctgtgctagaagatcacacttcagaaaacaaaacagatgaaaaaaaaatagaagaaaggaaggcccaaattataacagagaagactagccccaaaacgtcaaatcctttccttgtagcaatacatgattctgaggcagattatgtcacaacagataatttatcaaaggtgactgaggcagtagtggcaaccatgcctgaaggtctaacgccagatttagttcaggaagcatgtgaaagtgaactgaacgaagccacaggtacaaagattgcttatgaaacaaaagtggacttggtccagacatcagaagctatacaagagtcaatttaccccacagcacagctttgcccatcatttgaggaagctgaagcaactccgtcaccagttttgcctgatattgttatggaagcgccattaaattctctccttccaagcactggtgcttctgtagcgcagcccagtgcatccccactagaagtaccgtctccagttagttatgacggtataaagcttgagcctgaaaatcccccaccatatgaagaagccatgagtgtagcactaaaaacatcggactcaaaggaagaaattaaagagcctgaaagttttaatgcagctgctcaggaagcagaagctccttatatatccattgcatgtgatttaattaaagaaacaaagctctccactgagccaagtccagagttctctaattattcagaaatagcaaaatttgagaagtcggtgcctgatcactgtgagctcgtggatgattcctcacccgaatctga

SEQ ID NO: 19700 - DNA, 1129 bp, Mus musculus
atggagaatcactgctcttgggcgaatttaatcttcctaatttaaaaaaaaagtaaaaccaacataaagagtccatatgaaactaaaatacttttgacaagtatgaaaacagacaactgtttttgctagaaatttgtgtttttcttctttgcagcttcactgacaaactctttacaaaatgggattgaaaatgtattagtgcttgtcacagtgctttggacgatggattctgtcctgtgtgtacttacttaccactgtgtagctgtctcacctcctgcctgtacttccctaatggtctcaagagtatctcaacttctgcattcctaggacttacttcagcttgactaatccatagtgtgtgctttgaggtagtcatgtgttttcatgtggtatctgtgaactttcatgtatgacttccagagttcttacaattattgacaagatctgactgcatctgatcatttattaaattatcaggcagcattgttctttgtgtgtatgagtgtgtatgtctctgcacatactggtatgtggatatggaggctctaaggcagccttgagtggtggtacagagacaggatctcttattggcctggagctggcatatgagttggccttttggccaatgagccctagaatctgcctctctctgctttcctgacatgaggattacaagtgttggccattgtgctggcctttatgtgtttgggggttggtaggtccctgtaccaactgagttgcttccccagtccgtggtgttcttatagtaggaaatcctactctaccactcattgaatggggattaaggcagtattttgtgattataaattgtggttgccactagcatgagactgtttcaagtagcacagaaatgtataaagaaacaggtaagacttatctataatcccaatattaaagaagtaaaaatatttagtagatttttttcagacttaatggttagacatatttttgtttgttttgtttgttttatatgtagcccaaaatggtttcaaattcactgttgtagcccaggctggctttgttctcttgattcttttaatactctgttttcaagtgtcattataggcatctttatctttctttacagaccagtttttccattatacgt

SEQ ID NO: 19701 - DNA, 1181 bp, Mus musculus
tcaggacctctgctcttaaccattgaaccatctctctagcccttcaactttttaaaaaatttgatttcctatacttatgtcttacaatagtccttttcgtatgtactatttccctgtaatttgaatatcatgcatagtatgaagaagaaatgtctcaagataattttaagtgagctctgccaggcctaagaagtatataagggtaatttgtagctagaatgatttggtcactcaggagggaggttggcccaaaagaaggaaaagtacaaacttagcatttcactgataggtagcttatactgggtttaatgttttagtgtgtttcctccgtgaagaacatgtaaatgtgctaaatccaaatggttaagatagtattctaatttcagacttcttcttttaatttttagttgttgacctcctgtactggagagacattaagaagactggagtggtgtttggtgccagcttattcctgctgctgtctctgacagtgttcagcattgtcagtgtaacggcctacattgccttggccctgctctctgtgactatcagctttaggatatataagggtgtgatccaagctatccagaaatcagatgaaggccacccattcaggtgagatgtttgaaaaatgaggcaacagtgtaactaggattggtagtgagacttcatctcctatctgtagaattatagttgtgtgatttctttgttgcttagagataatctatcaagaacatatctgcctttgagatttcttatggtagaaaagactgggctcattagtatttatagtagatattggttatcacagtgaattttagaattggtgaagttatattgttcttactgtttacatttaatactatctaatactatataccttttccctagtatatgttcttacctacatttgcttcagtttctcagggctttatacagagagaggagataacttcaaattgaagcttcaaaatgacaattatatgccatgaactattgacaaataggattttaaagcagttgtaatgaaatacatgaaaatgttacaaagttctaatttatccacagtattagttttatatatcatttagttttaaagaatttttgaagactccagtttcttttttttttttttttaaatatttctttttagacatacctttttcataaaggcatttaca

SEQ ID NO: 19702 - DNA, 1181 bp, Mus musculus
acatttgacatttttccataaagtgaatatggaaatgagtaggatctttggtagcagatcctaataagactcagaaaataattttctgagtgatctggaggccaagtgtcattaaacattttactcattaaatcctcatgattaacgtccatttaaaatgagaaaacagttttagaagattaaatttgcacacttagattactaagaaaatgatagcagttaaaatttaaaatgtctttaaaacacgcttctatcagcttgggggttttggttttgttttattttgtttgagatatttctgtagccaaagttggttttacactagtaacaatccttctgacttagcctctcaagtgctgggattacacgcatgaaccaccacagccagcttactttggatttttataataagtgtaggcctttatagtagattgttctacactgttaatctcttttatagatctgtgattgctgattgacatgtgagaatcagtgtcagttgaggattttttctttttttctttttttaaagggcatatttggaatctgaagttgccatatcagaggaattggttcagaaatatagtaattctgctcttggtcatgtgaacagcacaataaaagaattgaggcgtctcttcttagttgatgatttagttgattccctgaaggtaagtttattttgcttttcatttacatgtatcagacagattggcaatataaaattctattttctctatccaaataaatcataaagatgaaatgaaatcatatcaatgtaaatttaggtttgaaaactcagtgtcctgtgtttagatttgtgtgagaactatagtttgacacttttctccttcagggaatactttaagaaagagaaattgagaagaaaattttgcttttgattgtgggtttaaaactcaaaactcaagaaaagtgggttgattctgtcttcggatgtaagttcatgcttcatcatgtcagcatacgaagtgaacccaaataggtctcatagtgtacttcggcaaaaaagtatccaaggagctaaagagatctgcaaccctataggtggaacaacattatgaactaagcagtaccccggagctcttgactctagctgcatatgtatcaaaagatggcctagtcggccatcactggaaagagaggcccactggacaggcaaa

SEQ ID NO: 19703 - DNA, 1829 bp, Mus musculus
agtactgattgatattctttggcaatattaattttataatgcttttatcctcttttctcaggcgcagatagatcattatctaggacttgcaaacaagagcgttaaggatgccatggccaagtgagtatgccctgcagccttcttaccaagggcgagaccatcatccggcagtgtccttctgaggccagcattaactctttttaatgcttttttttaaaaaacattaggcaaaggtggaaaattagtttgtattttggtagctttatgattctctaaataatatacagcataacgttttttaaagaagtgggaaacaaacacaaaatttgacatttttcttttttcatttgtagaatccaagcaaaaatccctggattgaagcgcaaagcagaatgaaaaggccccaaacagtagacattcatctttaaaggggacactcccttggttacggggtgggcgggtcaggggtgagccctgggtggccgtgcagtttcagttatttttagcagtgcactgtttgaggaaaaattacctgtcttgacttcctgtgtttatcatcttaagtattgtaagctgctgtgtatggatctcattgtagtcatacttgttttccccagatgaggcacttggtgaataaaggatgctgggaaaactgtgtgttatattctgttgcaggtagtctggctgtatttggaaagttgcaaagaaggtagatttgggggcaggaaaaacaacccttttcacagtgtactgtgtttggttggtgtaaaactgatgcagatttttctgaaatgagatgtttagatgagcatactactaaagcagagtggaaaaatctgtctttatggtatgttctaggtgtattgtgatttactgttagattgccaatataagtaaatatagacataatctatatatagtgtttcacaaagcttagatctttaaccttgcagctgccccacagtgcttgacctctgagtcattggttatacagtgtagtcccaagcacataaactaggaagagaatgtatttgtaggagcgctaccacctgttttcaagagaacatagaactccaacgtaaccgtcatttcaaagatttactgtatgtatagttgattttgtggactgaatttaatgcttccaaatgtttgcagttaccaaacattgttatgcaagaaatcataaaatgaagacttataccattgtgtttaagctgtattgaattatctgtggaatgcattgtgaactgtaaagcaaagtatcaataaagcttatagacttacctttgtgtttagtgttttagtttcatgaatgcacagcaaaaacacggtggtaggcttagagagtggacacatggtaacatgcttttagaaaggttttagttcatgaaacagcttaagaacaaagaatatatttacatagtgagatttatttgactcataacaaaaggttttaaattattttatactttgaaaataaattcatgcaccaatattttaacagaatacagtgcaagatttatgaatatacataaaattacaccatataaattttacaaataagactttcaaagtctttataacagacactattgctcttcaaatatatacatatatcattgattagtcagttgttcatccacatggttacttaatgcaagatctgtctgaatgaaatgtcagtagtacaagacaggcagacacagtgatcactcagcatcaccaggtacagaaaacagaatcagggctgcatagggctctactgaggacccagcaacctgctagtgggttgatgtaaggcattaataagttggcgtgtaaaatagctt

SEQ ID NO: 19704 - DNA, 1914 bp, Mus musculus
ggaggtaagaccaactcctcatgcccgcccctcttgaccaagtcttaacctgtgtcccttcctctatctaggaggaaatgaacacatggatccaggctatctcctctgccatctcctctgacaaacacgacacatctgccagcacccagagtacgccagcatccagtcgggcgcagaccttacccaccagcgtcgtcaccatcaccagcgagtccagtcctggcaagagggagaaggataaagagaaagacaaagagaagaggttcagccttttcggcaagaagaagtgaacttccctgttgtcccgcccttctcttacctttagtaagagtccagcatgcaagttccgaccaacacattactctgtgcctaatgttcctccatgtagttgattttttttcttttcttttttttttatttttgaaataaattttttaatttatagagtatttctgaggggtgggggaaccatacctaaacactttatctccaagtttaaaaagtttgaggtacagagggaaggccagatttttttaatgaaattatatagattagatctcagtatttaaactgttcctcaattttgtgaggctgtgttggaaataacccgcctctgatgctgttggtatgcaaggcagtggtgcttacacaatatttcctgtgctctccagagacgatggaccgatttcctgacactactctcccttcacttccgtggttaccctgagtcttgacttacaaatgcccacgatgggtgtagcctttattaaacagatcatgtattctgatctcttgctgcagccacagtgcagctccatgtaaacctacaggccaaaccatttgtatccggcatcacttactaacacacaacatgtggcttttctgcatcaattgctgtgacagttcagaatgttggtatacaagaaagaatagaaaattgataaggttttaaataatctgtaatttcagtctctttttttctgaaatacattatattgtatgtttgagataattctagtacaaagtataataaactagatgtataataaaccctttaaatcattgctaagtgtataagtggaactgaagcatttactggacaaagtaatgttactctaatggttacttgcttgtgcgtggccacactgttataatttgcttcattaccctgctatttgatacatagtgtgcatttctctgtcactgtaactattgtaataacaaattttcatcttactgcacaatcaaaatggcatctatagtaatgacctccagagtctgagcttggacagagagtgggcgctcaggcctggtgctccatcatacgacctgtacctctcaacttttgccctgttaaatatatgctatgtcattaaatgcttttaaatctagcctatgactagccggtgtttttccttccctgtccaagcatgcctaatagggaatttgcaaagtgtgtgagtgtgagtgtgtgtgtgtgtgtgtgtgtgtgtgtgtgtgtgtgtgtgtgtgtgtgtgtgtgtgtgtgtgtgttggccttggaagctgtaacaaatgaagaatgaataggcgtggtgaatggtgatacttttcatgtcttatagccttaagacctgcacaaggagaggcaaatgtttcatgaaaaagaacaagggataataataaatactatagacaaaggaaggctgtcttcccttacagaacaaaagccattcttggtaatatgcaaaaactggacatggctatggtagtgttcattgagtcttcctcaatgtcaagtttgccacagggcttcctagtgcttaggacttctgaggtggacagtcagaggctatcttggttgtggtatctttcaaatctagcagtcaaggtttcaaatctagcagtcaaggtttactggtcaaggcctcagca

SEQ ID NO: 19705 - DNA, 1261 bp, Mus musculus
cagggtgtcaagctgttttcattttttaggcaaatagaacaaaagccattttggttcatcctgatcacttgaatgatagactcaatgccctgtgcctggcagggagcgcttgcagaggtgtcctagccttagagggctacttcagtgtctctactgacagaaactcctgtatctcaaatggatctcgaagttctctagtaaggagtcctaaggatgacatgtattgggccactagcagggattgaaaacattttaaaagaaatcctttttcttaggagtaaaagctggtaaaaggggtgacttcctggttctgatcaaaaccagaccaaaccctcatttcagcaaagccttgcaagacactcccttgctcatttgccatatttagatgtcttagtggagtcagagccctgtttggtatgtgtttttcatgctaagtctaaattgtcttttcatttcatgatgcattttttctcttttgtcaggataacatcatatagcatcttgtttgtttttcctaatctctatgtacatatctatctacctgtaaccgtagataggtatctagatagataccaagcttttaagctctgggctactatgcatcattattgggtctctgccttaaaacacatccaaatttatattagaaaaaaaaaaaaactgtatctttttctttggtcactaagatcccctgaccatgtctttatggccacaaattatactgtgtcactgatcatatatatgtgtgtgtgtatgtatatgtatgtgtgtgtgtgtatatatatatatatatatatatatagccacacatgatcatacttatatatgatgtttccatatatgtgctgtgtgtttaagttttgtatcatccagactgataccaaattttaaggtttttttttttttaacaaagacaatacacacataagcacattaaaacaggaatgctatgatactgtttagcatttgctctgctgcctatctttctctgtttttaattaacaattggattttattggaagaagaaaaagcagtttcattattttggatgatgatgcagagactcatgttaatgaactcgaaaatggtgttgcttcatgtactttgaaaaccaatcaggtgtttcctgcgctactacttgtcatgttgcattcatgttcacatcctgatttcactgcctcagatgtgcctggccacaaagcactctgaactaattcctaaagagaagcaacaatatgtgtatgtgggggggttgatcaca

SEQ ID NO: 19706 - DNA, 2028 bp, Mus musculus
catcagatctcattacggatggttgtgagccaccatgtatgtgtatgtggttgctgggatttgaactcagaaccttgggaaaaacagccactgctcttaaccgctgagccatctctccagcccagagccttgcttttttgtttgtttgtttgtttcgagacaggatttctctgttgtcctggctgtcctgcctctgcctcccaagtgctgggattaaaggcctgcgccaccactgcttcttaagaactaagtaaacacagctgcttccatatgatacgtgtgctttcttgatttgtaagtgatctctttgtctacagttgggccaaaagtgcagtgttcgtcatagccctttcttcctgtcctagtcagtatggcaggaagtgactgttgctctttatatgacactgcttagacgggagccaagctagaacatggaacatagtttactgtctgcaaatgaacagggagctattggagacttagcattctttccttggtgttaaaacaggctacaagccatgtgacccccaggtaattcgagaccgtgttgcccacatggagttctgctatcaagagctttgtcagctggctgccgagcgtagggctcgcctggaagagtcccgtcgcctctggaagttcttctgggagatggcagaagaggaaggctggatacgagagaaggagaagatcctgtcctctgatgattacgggaaagacttgaccagtgtcatgcgcctgctgagcaagcaccgggcatttgaggatgagatgagtggccgtagtggccattttgagcaggccattaaagaaggtgaagacatgattgcagaggaacactttggatcggaaaagatccgtgagagaatcatttatatccgggagcagtgggccaacctggaacagctctcagccattaggaagaagcgcctagaggaagcctcattactgcaccagttccaggctgatgctgatgatattgatgcttggatgttagatatactcaagattgtctccagcaatgatgtgggccatgatgagtactccacgcagtctctggtcaagaagcataaagatgtagcagaagagatcaccaactacaggcccactattgacacactgcatgagcaagccagtgcccttccacaagcacatgcagagtctccagatgtgaagggccggctggcaggaattgaggagcgctgcaaggagatggcagagttaacacggctaaggaagcaggctctgcaggacaccctggccctgtacaagatgttcagtgaggctgatgcctgtgagctctggattgacgagaaggagcagtggctcaacaacatgcagatcccagagaagctggaggacctggaagtcatccagcacaggtaagtgaagttactactacctgggtgctaaggcgatggactgaaacataagccattaaagtcactactcttttgaattgctttcctcagatttgagagcctagaaccagaaatgaacaaccaggcttcccgggttgctgtggtgaaccagattgcacggcagctgatgcacaatggccaccccagtgaaaaggaaatcagagctcagcaagacaaactcaacacgaggtatgcatggcatcagcagagcgcctgctgtccctgtgtggctctggtgagggtgacagtgcttgcccagctttgctgtcagaaaagagtttcctgcacaggttcacatccttgtagcatggatgtcatgacagcagcatctgctttaccaagtattctcatccatgttttgcaagaaacagcttttaaagtgaggttacattattcaggacatgagtcagagtcacccagtacctaacttctcctcagattaaaattagagccttggtagaagacagacagcaagatagaacctgtctgtgttgtccctttaagttgaagttagggttagaaccctagagcagggttctataatgaagcttgatttgccaaagatagcatcagttgtcagggcagacccctgtcctgttcctgtctgtct

SEQ ID NO: 19707 - DNA, 1125 bp, Mus musculus
catccagtattgtgacgttgctgaccagccatcacttccatttgcacaaaggatgtttaaaatttctgatatactttcttgtctgtttgtctaacttgtcatagacttaggagctcgagcaatttgttcagagcctgtgactgaattgttcacattcatgtaagctgtaaaagttcccctggtttttttcccctcagtatttgaccaaccatcctctcaaggcgtgacactggtcatgaaatacaagagcagttttctttcccttggcttgacaaagtccaacatacttcagtatcttaagtcagatggtaggccctctgtaaagtgagaagtttcttaagtactgttaggaacacatctgaactcaaccagaagtttgcaagggtccaagggcagtgagaaaccagtggcaaagtcagcttacgcactgtattgtgctccccccacccggctcagtgacttacgtttctttatatttctttttgttctgtctctctgtaggacaactttggatttgaccttcccgctgttgaggctgctaccaaaaaacacgaggccattgagacagacatcgctgcatatgaagaacgagttcaggccgtggtggctgtggccagggaacttgaagccgagaactaccatgacatcaagcgcatcacagcgaggaaggacaatgtcatccggctctgggaatacttgctggaactgctcagggccaggaggcagcgtcttgagatgaacctgggattgcaaaagatattccaggaaatgctttatattatggactggatggatgaaatgaaggtaacttttgaccaaaagaaggcaggggaggccagagctgacgcagtcagaccttctctttgtgggagttgtgcgctagtgctctttgtccagtgaactcttctgcaaagccagactgaagccgcagtgctcataagctggctagctcactactaaatgagatgagcaccatggaaaagttgtaaacgaaaccattttatatcccagatctgacgcagtgatttagatttttaccaatgtagagaatcatgattttctttttcattgttaatatgttcagtggtctgtgtattagtgatagtgttctaggatcatatatgc

SEQ ID NO: 19708 - DNA, 1217 bp, Mus musculus
aggcagtgctcataacctctaaactatccttctagccctggagagtgtatagctttgaggttgacaaactgttggtatgggtatgagaccttgtgtgttaatcaagtgctgcactgctcagcagtgtactgagcctgctttattatggttactttgaaacagagtctcaattagttgtttattctagcctcgaacttaggatccttttgcctcaatttttaagtagctgggatttcagtcttgtgccaccaggccttataaactttagtactgactctcaatcttaggtcgtgcgaacagtgttatttacctttgcagtggcagcagtagcactgagattcatttggtcaaatgaatgcacacaaattttagtttgggtttgggcacaaaccatgacaggcgtgtatgattcaggatagttcctctgcccttctgagtaaagtgtctccactctgttctctggctttcagcctaaacccactaagggacggatgcggatccactgtctggagaatgtcgacaaggctcttcaattcctgaaagagcagagagtccatcttgagaacatgggctcccatgacattgtggatggaaaccaccggctgaccctcggcctcatctggacaattattctgcgcttccaggtaaggagcttggcctaaagaatatagaccagctttccacatacgagctttctgttccacaggaaccaggctgatgccaccctggaggaatgccagagctaccatgttcttgtacatttcactgcccctggcatacgtgcctttcctgtcttaatgggacttggtaatatgggttcctaaggtgtacctctgaacatctgatctctgctgtttggctttcagtagccaaggtcaagcagtatggctagtgctgggtacttctaggctggctagactttgctaaattgtggcccgtatagaataggggctccgttctcaccttctcatcccccttggggtggaaaggagcagttttcaggaggaaagggccaaaaggcctttgatgaatttgaattggtgactatgtgatggagttatctctgtatagaagcgagtatgagatggctccttaatccgtgcaactccctcaagtcttgggtacagtttaggctgcctcggggccagggggcccaggaaaagcacttctgtttagtcctggctcacgatccaggcgtatgctttgtgctcttgttc

SEQ ID NO: 19709 - DNA, 1146 bp, Mus musculus
tcccagctactaaattttcttgattttaaaaacttcagcttctctcctatttattgttaagtttaagcccaactggccctttgatatctgatgtccacattggaataaagtagatactccatatttggggtgtggctgtctcctggcataaatgaatacttctagtttccccagtcacttctcaggccactttttgaatttccccatatcatgtaaaaataatttttagagcagtttatccacgcgtgttagtatcttaaaaccacaaaacttggttttctttgctagctgataatgctttaattctggcaccaggaagtaaggttttttttatttttatttttatttttatttttatttttatttatggtttaatttgatctgagccagtgtcttttggtagtgactttttctgagtgtatgtgataattgtactcagtccagaatcacaagattcattataggattgatgggctcttttctttggcttctctgtctagagaagtctagagaacttcttaggaagttctgaaagatgtcatgtccctgataaagggtctttcccccaagatgtgtcttctgagcaacttgcttgtgtgaatgtgtgcattctgtcgtcttctctcgtaaacataaagctgactgctgatttatataggtcacgggatattcccctttactttaagctgtagtgcatctgaaatgtagaaggagctataacaggtacttggtcaaagacagccgaaacaatttacttttgtcttgtggcctctgtaggtgtgggagggaagacatgcagtattaggctacatcttggcattttcttccagattgagcctgtgggtgtgacacctagtctcagccctcacataagtaaactcaaactttgtgacaccagctgtagcactcaaggagccaggcttccctctatagtagggttagcatgattagccccttaacatgctcacttggctcctacagtcgcagagcagcattggacaaagctgctcctctacagtacttcctggaggctctgaaacgcctcaccttaggttcacataaggtgagtctgagagagtatgaggacttaggaacttactggttttagctagtgcatctagaccataatgtctgctgttttggggt

SEQ ID NO: 19710 - DNA, 1197 bp, Mus musculus
aatagagctgatgaagtcatcaacagaaagcgtcacccacctcacccacatattttctagtctagaaagaatctaatgataaagacctcctaggaaggttgaggagcaaaccatctaccaacacactacacttctcattctccacttctgaaatatgattgttagtgtctggcttccctgttagaagtacaagctcataatgattaagaagctcagggagttatctaagccaccaggcttataaatgcagggcatcaccacatatttatggtgattctttaccacctgtggtgacataggcaggtggcatggcacctaaactctcatggtcaaccaaacagccaaacgtgctatttttattacagaataaagaagaaataatgtatatgtagttctaaatgctatgaatttcttttaattttttcctgagatatactttttttctaattcctaaatctatataaggtatttagaacaaaaattgcatgtatgtgcaattttaaaacttagagtatttctaaaacagattgtgacctggagtcttgtcatgagatatgggaatttctgttcatggtgaagttgactgttttcctctgtgtggtcagtagatgctggggctcctgcagtgcaggaggtgggatgaaagtgctcaaagaggatgtgtctccaagtattgccactatcctcacagaactacatttcctgacacaatcacccaactgaaaaaagaataatagcttattaatttagaatagacctcacacagaaacccatccacagttgtagttatctatcttgtcaagaagaaagtcgaagccaggcgtggtggcacacacctttaatcccagaactcaggaggcagaggcaggcggatttctgagttcgaggccagcctagtctacaaagtgagttccaggacagtcagggttatacagagaaaccctgtcttggggggaaaaaaaaaagagagagagagtcagaaaaaaaaattggttgtctcctaaaagcagcacattggactcttgtaccttgaatgtctccctcgttagaactactgtactttatctaagcacactgtacattcccacttcccagcattgagttctcttgttttgactggtctttaaagcaaatgcatccccttctttaccatgcctataatgagctaaaatttctaagcctttggccagataaatc

SEQ ID NO: 19711 - DNA, 1510 bp, Mus musculus
gcattttcagtgttgcccagaagaatccctgaagctgtttgttccccactgctatggtgttataactcagcttacaatgagtaagtcgctacaagtaaaacctgtgtaattttcaaatacatttttctttgttcttagaatactgataatatcaatagatcctttagtctgtgtagcatttatattttgtttgtttgtttaatttatgagattatttttgagagaggatagccttggctatcctggaactcactagagccacctgcctatgcctctgaagaactagcattaaaggtgtacccccttccacatgcacacataatatatcatccaggttagtaagtaactttgaagtcatgccatattgaattaatattttcatgaaacaggtatcaggagctacttggaaaatgtcagtctttttgtgagatgccaattggcagaagtcttggttagtttgatgattttctttcttttatttttttctgtctgtctgtctgtctgtctgtctgtctgtctgtctgtctgtctgtctctttccttccttttttcctttgtttctctctctctctctccctctttctcctctcctcccctcccctcccctcttctctcttttttttttctcctttggctttttctgtgaagcccctgactgttctataactagccttgtagaccagactgaccttgaactcagagatctgcttgtctttgcctcctaagattaaaagcttgtgccattacagcctgtgactttcttaaaaatactttttcacgtctttctgaagtgactttacttttatgaagacttaagtctccctgaaagattttctgaactattaggaatataaaatagaaatattttaatgtactatatccattggactcatgattcttccatgatgctattttgccattgtagatgatgatgtattgaatgaagaagagctagacaaggagttgctgtggaaccttcagcttctgtctgaggtattagaagcatttggaagaaagcactcgcttgcttctaggtttagtcttttgtttggtttggttttggtcagactgatgtttacatatgaaaagtaagacattggggatttaatgttgttgctgttgttttgatgagacaaggtatcattatatttccaatatgtaggaactcatggtaatctttctttcttgccctcctgagtgttgggtttacagggacacaccaccaagctttagcttcaggaagatgaaatatttaaaagtctgtcattgtcaaataagatggaaatgttctgagttcacttttctgttaaagatggataacttatcatttgggagtttattatatttggaatttttaatttttattttgttttgttttttgatgggggatgattgtcactttgtggctcgggttggtctccagcttaccaagatgtgcctgactttgcctctagagtgctgaagctgaaggtgggcaccaccatgccaactcttgagaaatcttttacag

SEQ ID NO: 19712 - DNA, 1159 bp, Mus musculus
ctacatgggtgatggaatgtaaacccctatgccctgggaaagcattcagtgctcttaactgatgagccgtctctccagctccaattccttgttttaaagtacagtgtttaaagctgttactgggatgtagtagtaaccttgtgctttttaacttgtcatggagctaaaactcttcccttccttcctgctatgtagcctaggttggccttgaagttgtgatcttcctgtgtcaactactactgtgctgtgatagctaatgcctgggtagttttctacctttctgcagtggctatgccatatctaacttcaagagttatatataattttaatcctgaactagctggcttcatataaacttgctttctctcctacagtaaatgcttattaagtggcttttagggagacattcaggagtaataaaaatgaattttttatgagtctcttttgcacatattggctcatattatttctatgtctgcctttaaactttagaagtattgtatatacatgtttttctccagcttaacaactaaataaaaagcttctcttttctaggactggggtaagcctggagatttgtggaatctggggatccagtggcatgttccttcttcagaagaagtctcttttgccttctatttgttagactcctttcttcagcctgagcttatcaaactccagtgttgtggagatggagaacttgaaatgtctaggttagttttcttctattattatttgtcaaacctcagtgcctgccccaaactttgttatctgatgtatgtattttcctctttttttttaaatcttcttttgaaggtttctttgattttatgtgcatgagtgcttcccctgcatatttataccatgtgcgtgcctactggctgcagaaatcacagaaggctttgggttccttggaacgtggacttggtggttgtgagccgccgtgtggtttctgggaactgagccatctgtagccccatgatacataaacataatcagtgtttgtttttaaaatgtgcattaaatgtactgagaaaaacattgaacactatgtaacaaaattcgtgaatgtttcaactcttgttttgggtgtgtggtttagcttgggtttttgaagaccttgaacttctgattcctgtcctgtcctgcctgggtcacg

SEQ ID NO: 19713 - DNA, 1168 bp, Mus musculus
ttctgaagtacttggaaccaaaactcacccaggtttacaaaaatgtcagagaaagaataggaaggtatgtgtagttcttccttttggttttatgtcttgagtctttgtagttaagttttaatactaacagtacatacttactggtcatgttcccagtgagtgtgctgttgtctgcctcatgttttgatcattattatgttttgaaaaacaagacttcgaatatgaattgggagcactgtactcagaagccaccaatgagagcagccatcatactacagggttgcccctcaaaattgtatggcatatcttacactgggagtgttcagagaccctccctgggaattatcttttgaaaagtttggctgagctgtaacttttgaacctcagttttaattttcatgtcaaaccccctactcttctgtgttttatttaacagtgtgctgacctacatatttatgatagatgtttctttgccaaatactgctccaacaacatctccttgtatccctgagtttactgctcgcgtcctagaaaaactgaaaccactcacagatgtggatgaagaaattcagaaccatgttatggaagaaaatggcattggtgaagaagatgaacgaactcagggcattaaactcttaaaaactagtgagttgttaaaattggtagaaattcacttgaaaacagagagctctttttagttcatttgaatggttttcccaacacacacacacacacacacacacacacactttttcttatgataaaaaaatgtgtgttttctaattttaatcttttctgttagcttgtttgggcttgctttgtttgtttgtttgtttgtttgggttttgagatactgtctgaccaggtagctgtggctgtcttggaactcattgtgtagactaggctggccttgaactcccaaagatacaccttcctctgcctctacctctcaagtgtactaccatgcttacatttttctccatttttttaaaatcatattttgctgattttcatttgtagttgtttatatgttcttgctatttgttaggattaaaagcatgcatcaccacaccaggcaatttttaccatttttgcgtgttcagtttaaaggctataagtccacaatcacctatgtccagatttctcttcgtgggaagctgaaagtctg

SEQ ID NO: 19714 - DNA, 1113 bp, Mus musculus
agtgaggatgttgcttagctcatgtgagaccctgtgtttgatccttcccagccccactggaagggatgaggggcagagcaagaaaggaaacggggaatgtgggcatttgacaacacttggacttactctactgaggaaggaacagaccctgtaaggtagacatgtgttgcagttctgtttcaagaaatgcatttgtcatgcatgatggtgtgtcatgcattttgtaaggggacagtcgcatagagaaaataatacttaatctgttaaattgtttcaggatcaggaattatacttagaatatgaatgagctgatcaagaaaattgtatctatgctggttttaacaatgacttgttcctggctagaaacaattacacagtcaccgagagtcagctacagaatgtcttcagaatttgcagtttctagttcagccacagaaatcatgctattattatgcacttgtaaatttatattaaatggggaaatatgcacattaaaagtacatctagcatgaatgaaaatttatttcactgtaaatgatatgttgttatttctgttgcagagttggtcaaacgtcatgctggtgtgcttggacttggtgcatgtgttctttctagcccttatgatgttcctacctggatgccccagctccttatgaacctcagtgcacatttgaatgatcctcagcctattgaggtacattctatatggtcccgagaacgagctctaatagccatatcttcagttttgtatgagtgagtttaagtacccaacaagccaaagtaaaaggataaatagcaagtaataggcacatatcatatagacaacaaaataccatcaaattggaggctaagcatatctagcagaaatccactggtgaagcccctttaaggcaaccagcaggagttcccaataaggagaatgaatctccagcagagtagagtatgccctctctagtgaggcttccaagtaaaagaacaaataacagatagagataacactgtcaaatcaagtgcttgtaacagcataatgttactgggcaagtagctagagttcacagttgagctgaacttcccatggctacttttcagtattcctactgctggtacttttac

SEQ ID NO: 19715 - DNA, 1131 bp, Mus musculus
agacatttctctcatgtacaacaaaataaaattctgtatcttctattctttcaaacccagcataaagagtacttacagcattagctagaaagttaggtttcttgctactactattattatggcattttgtgtctggaaagtctcatctcactgaaagctaatattaaagtagaaatagtagttgtattatttattagtaagcacccaagctcttacgcaaaacaggtcaccttcgtagatgtatgtatatatatatatatacatatatatatatattgaactggtctagcaatgtgacaatatattacagttgtttgtcctgaaattaaactagtaattttatagaatataaatatatatataatattcgtggtttagtgacagaaaattgacttggttttctaacattgtgagagctgaggtctaggtggatactagtgtaactgaagataacccacatgtaactctggttgttagaggttaaaatgtatatgggtcaattacagatgactgtaaagaagaccttatccaatttccgaaggacacatcatgacaactggcaagaacacaagcagcagttcactgatgaccagctgcttgtcctcactgacctccttgtgtcaccatgctattatgcatagaggggtgagttacatgggtctttcccagcatgtgtcgtcctaccagtagccaaggaaatacctacaagattttaaggtttgctaacattttagatgtaactgcttagataaagtgaagagagttctttgttttgacttttggagacagggacagctatgtagaccaggctagccgtgcatttgagattcccctaccatagtctcatgaacactaggattgcagctatgtgtcaccacacttgaatgcttttaaacatgacttttgaggtagggggtagatagtttagaggaagagcccaaatttagcaaagatgagaccctaattcgatttccagtgctgaggtaaacaaacatggtagcctgtgcctgtaccctcagaggattttgttgggttgattgtaaatacagctttgtctgtggtcagtggaaataactattatagaatttttcttgatttttgtttccattgttagggaggcaatttatgtga

SEQ ID NO: 19716 - DNA, 1689 bp, Mus musculus
atattcacatgagcatgccgtccgtgcctttggcggccagaagagggaactgagttatagatagttgtaagcctccctgtggctgctgggaacagatacatatgctcttaactgctaagccatctctctgtctcatcatctggattcttttgttcatttgtttatttggtttttgttttgttaattttcagatagagtttttatctctatgtagccctgggtagcctagaaatcactatgttgaacaggtggcctcagagctctttctgcctccacccctcccctttctcaaatgctagtattaaaggcattccctaccatgcacaactcatctaaattcctaagtgcttattacatttctgtaaaaacagagggccagaaagtctttgtatagacaaaggtaaggagaataaacacaatctgtttggtgggattttagaactgagtgttttgataatctgacataattttttgttttatttttcttaatgcagatgactagtcctcattctgggctcatttcatcaaaaactccagatcctcaggtatcatccgtggtgactctgcaagtttcacaactcagcttctcttgagctttcatcattttggtggcttctctgtttggcctcattagtcttcgctcacaggttctcagctgccatttgatttcctaacttgttctgaagtgttccctgagtactgatcactttttcttttgagacatatgacaaagtcacaaagtctcagactagaagtagcctagtactatcatggtattatgaccaaacagtctcgaacgttgttaaaaacaacaatgtcctcggaatggagaatgctcatcaattatgtaggttctctcatttcattcatctcacgttattttgagttcttccccaaaggctgttgagtttagcattagtagggccatgggtcatgaatctgaagttttgaccgccttgtgtctagagagccatgaagagaaaaggatcaaagggggcaaagtctcagagttaacctagaacctgacacgctcaaccacactgcagatgtctgtatctccacagactggagtttttggtgctgagtaagagccaattgctgaaaaactgggggtttggtgaataaattttagactgatttgtatgtgtatacaatgtgtgattttaaaaataaaaaagaacatcaataaacaccatggctgattgttttttaccctgtagtccatacaaatattgttttacaccccaccttgaaatacattacacttcaaatgagtggaagattgcagtttttgatctctctccctcttcttctccctttctgtctccctctcccccccctttttcactctctttccctctccccctctctcccctctacctgtatgcctgcctacagaatcactaatattaataagtcttgatatttgacttgtttagtatgttatgtagatgtaaaagattgtacaataaactgtagagataacactgacaagattttgtacagatgcaacccttaacgcagaccattgtgtgacttgtttttttggtgtatgtttttaagttatattctttatcttctcgtgttacaaaagctgaaacataggttttaggtttttttaaatttatttactagaatatctggatttttatgtaccttttttgtgtgcatttttaaatgataacatgt

SEQ ID NO: 19717 - DNA, 1171 bp, Mus musculus
tctgatacctgtaataccagtacaggagcaggaggatggcaagttcaatgccagccttagctacagaatgacaccttttctcaaacaaaacagaatcatagctccaaactgaaatcctagagataacacagtaggagctggagagatagctcacagtgaagagcattcgctgttctacagagggcacaggttccatttccagcatccacatgatggctcacaactgttcataatgccagtcaggaagcccttcagctcctgtgaggcacttcatgtgtgctgtacaaaacacccacacatatatttgcattatttattttatattttatcttgtgtgtgtgaatcttaagtattttacttgtatgcatgtttaacatgtgcctgcatgatgcctgcagaagtcagaagaggtcatcaaatcccctagaactggagttaagaatggttttatgagctgccatgtgggtggtaggaaatgaactcaaatcctctgaaagtgcttttaactgctgagccactgtgccttagttagggtttccattgatgctacaaaacactgtggccaaaaagcaaattgtggaggagaagactgatttggctcacacttccacattgctgtcctccactgaaagaagtcagcataggaactcaaacaggacaggatcgtggaagtaagagtgatgcagaggccatgaagggatgctgcttattggcttgcttcacatggcttcctcagcctgctttcttatagaacacaggaacactatcccagagatggcaccatgtagtgggtttggcctgatattgcttgttgtctaatgttaatttgggtccccaaatctgcttacatgagtctgcacatagcttctggaaaccactccagttggttctgattggtaaataaaaatgccatcagccaatagctgggctgacagaggttgatttttggaattttgtgggcttgggactgggagagaggagggagagagagacccaccatgatgggagagtgtagaggagaaaagagacgccatacctgagaagagtgcaggacagagaggcatgcccaccatgtgagaaggccccgggagagtgaggcccagagaacggcccagtcaggcagccctctgggcccagggcagcctacatagagtatagagtttagtaagta

SEQ ID NO: 19718 - DNA, 1187 bp, Mus musculus
aatacatataaaataaatctttaaaaaatatttgtacttggaacccacagtgcttgtttggccagggagaggaataagtagctttcattgaataggagattttttttttttttttttttggttttggttttggttttttaagacagggtttctctgtgtaaccctggctgtcctggaactcactctgtagaccaggctggcctcgaactcagaaatccacctgcctctgcctcccaagtgctgggattaaaggcatgcaccagtgaattctaaaatattctttacgttcttactaatgcagaacaaaaactattaaaatgattttcaacaggttagtaaaataagtatatttttcaatagcatccagtaagggtgaaagtgtttgtactatgaaaacattttatggctgcttgaaatttatgttttcagctttctttcttctttttaaaagcatctatgtccattattggttaagtattttgttttgtgttaggtgcaaatgtcaattgccaagccttggataaagctactcctttgtttattgctgcacaagagggtcatacaaaatgtgtggaacttttgctgtccagtggggcggatcctgacctttattgtaatgaagacaattggcaattacctattcatgctgctgcacaaatgggccatacagagtaagtgctcaaaatggaataaaaatggtcttggaattaaaagctaataaggaatagatatgagtcagactctttacctccaggtaaaatgcttggtcattcctttctgaaaccagtttttggaatgcctaaatttactcctcatcttccccatacttttttttttttcttttcttattttttggtctggccctctacatctttgattttcccaccctgaggaagaataactgtatgtaggtggtatagatattggagcaaagggatttctttaactgatggctgttctttccctttcttgctagttttatttcaaatacctttaactagcaatctagcctttaactagccttattcacaaatttgcattatctctgtgtttgcaaaaagagtatgtgatctttttggaatgaagtcttccttttgtgtgagttgagtcctctaccctatcttaaaccctttgactaaactttttatctaatctcatgtctagtctggtatttttctatgcttctg

SEQ ID NO: 19719 - DNA, 1190 bp, Mus musculus
cctgaaataccaaacataaaattggcataggtcatgtggtaaggcaaataacagttaatgaggaaaacaggtatatttactatattactcaattctttttcaggtctatttaaactttgcactaagcaatagtacgggtaatattttgtagcagctctgaagcatgtagacatttactggagttagaaagtgtaggaaagacacttttttttttttttttttttttggtttttcgagacagggtttctctgtagtcttggctgtcctggaactcactctgtagaccaggctggcctcgaactcagaaatccgcctgtctctgcctcccaagtgctaggattaaaggcgtgcaccaccactatcttctagtcagtggatgattcttaaaatatgtatgggaaagatgttgcatgcacctggaatattaaatattcttccatttgtgtatttgaaggaccttggacttgttaataccacgtactaaccgggcttgtgacactggaccagacaaagtgagccctgtttattctgcagtgtttggaggacgggaagagtgcctggaaatgttactgcagaatggctatagcccagatgcacaaatgtgcttggtatttggattcagttcccctctgtgcatggctttccaaaaggagtatgtacatttgttacattttacttgtttttaattcccaagtaacttttcttcatagtggaaactcagtatctctgttactactaagttgctaacttcgaagaggtctgctgcagtatctgtcgttcagtttagcagaagtgaggttgataatgccggatggtttatcttttccttttggacctggattacacttttagtttacagttttagggaatactttaaatgtattagtgtaaatgcaagcctgctctgatgtctttaaaatgatccaagaatcagaaatgaaacttcatcaagtaaggtgctgactgcttcaggctctttacctttagctcaccctcccctcccctcctttaagtttaaaagccttagagcaaactgtggttttcagatattattacatttaacatatttgatatgtagcatttcctaatgtagttcttaataattatattttaaaagtcaaatattaattttcatactctgcatgaaatcaactttgatttgtttaaagggatggctcacaaatttaatt

SEQ ID NO: 19720 - DNA, 1185 bp, Mus musculus
gcctgggtcctttggaagaacagctaatgttattaacttctgagccatcttcacagaccttgaaactttattttctgtcatagatgcaaagaggaaatggtcaggctgcacatccctcggtttcatgtgttacgttcagaacctttggtagtaaaacagactaagagggaaatagcaatttctacttagggttttcttaagtgttagcttgtgttgtcagattattaaaatttaaagacttattttttctgtctctggatgctgacttgagtatgtgaccaattgaagtgagatcaagcaagtggaaaaagtacatacacgtttcatgtagtcatgctgaaccagtagtcttctttcaaaatgagctaagcaacgtagtgtttcttttttattgtataaaatgggctggatgcttatcttaatgtattgcttgtgtgtatgtgtatgttttgtaagtattcatgatagtgtgtacatgttgggggccacaggaggatgttagtatatcacttgccttgatacagggtctctcattggatctggaggtagccagcaagctacactgatgctcctgtttttgtctgggtaagaggtgctggccgccactgtggcttttccattgtttctgaagttcaaactcaggtcgtcatgctttcacaacaagagctattacttttccaaccatttattcagtccactgttagtgaaaattatgtttgtttgtttctccagcctctgttccaagcctaacccatctttgtcgtttggaaattcgggccagtctaaaagcagagcaccttcactctgacattttcatccatcagttgccacttcccagaagtctgcagaactatttgctctatgaagaggttttaagaatgaatgagattctagaaccagcagctaatcaggatggagaaaccagcaaggccacctgacacaggtcctttaattctgtttagtcacaaaagacggcttgtgtgactgtttggatttggtgatcaaatgtccatgtttacagttgcttttcccagtttgtgtctttcccaatattgtgaaccttatccatcttgccttactcagttttatttctagtgcactttgttgtgtattatttgtttacctgaccattttctactttattctgctaataaactgtaattctgatgtggtgctggatgtgac

SEQ ID NO: 19721 - DNA, 1187 bp, Mus musculus
agatgattgtcaacagctgttgcagatgctcttaacaaccgaagagcgagagaaaattctgttagaagctagaaaaatagcccaaaaacagctacaaaatgagatcgacgtgggattccctttgacttgcccccgttgggactgcaacatggctgaaggtagggagagcttaaaaatctattgccaggctccggtctccaaggtgcctcaaaatgggcccactaatttggctaaggtaagaggtaatgcaggggccgatcgaacctccctcaatgttccttaaaaggcttatggaagccttcaggcggttcactccctttgatcttaccttgcaagcccagaaggcctcagtggtctggccttcataaggcagttggcccccgatatcagaaagaaacttcagagattagaaggtgtattacaagagggagacagtaatgcaatccagtgaaagaggcagaaaaagtgtgtgtgtgtgagagagagagaggcgggaggcaaaaaaaaaaaaagaaaaaacaggagagatcgtagacaagaaagaaatttgccacagtggtaagagaaaaagaaaagacaggatctagacaggaaatctgggcaactgaagaccgagcctcagctaaagaggctcagctgtgtcagactcaagttatctatttgagatacaccttttgagatgggaaacagtggctaaagaaagccaggaaaaagactaactcagattcccaccccagctacaccaaggcaagtaagaaaattcttgggcaccgctggtttctgcaggctctggatacctgggttggcgactttagctgcccgttgtaccccctaaccaaggaaggaaaagtgtctgggtggaccccagatcaccagaaagcctttaagaaaatgaaaaaggccctactgatggccagcctttgcctgacctaaagagagagcaggggtcgccagaggagtccttactcagactttgggactttgaaaaaggccagtggcttacctatccaagaagttacaccctgttgccagcgggtggttttcttgcctgaaagctattgctgccataacactgtttttcaaggatgctgataagctcactatgggacagcaaatagctgtagtggcaccccacgatcttgaaagcattatacaaaagccccctgactagatgattaccaatgctc

SEQ ID NO: 19722 - DNA, 2869 bp, Mus musculus
aaacttttgactatgcagtgatttttgaaacttaaaagactttaaaaatagaaaaggatttttgttgacaatctagtacttgtgtggctcatggccactgaaattggagtgttgtaaataaagatgattacacccatataaagtcctgtgtgtcaggagaggatggcatctaaaggttcccatgctgtcttttggtctgtgtggtattgctccctttctcgggctgagctctggtggctcagaagccatcctttactgagtagctacacactgtgtgtctaatctttatgcttcttaccagttgtcacaaatctctgttgtctgggctgtgttggatgtttgcattgctgcaggaaaccatttctgttcttgctgctaagtataaatgctgaagaaaatgacgacaaaacaaggctttgctgcctttaacattatgactgcagttttcactccatacctgaggccaggctcgcttttgccgtgtgtcacatgtattggcctttgaggcagcctgctctgatttgtctcattcctttgtacaaagttggggctgcattagggatggtaggtagcagtcggctctgaatcccttcagatgaaaagccagtagcttaaactctggggaaaatggatgtttactgggctctcgaatgacacttgggacatattggtccaaaggagaactctcgagaactaaataacagtggtttgttttatctccacaggtcaggtatgttggaagcaggagtggacaggatcatttcccaagtggtagaccccaaactaaaccacatcttcaggccacagatagagagagcaatccatgagttcctggctgcccagaaaaaagaagctgtgccggccccgcctccagaacctgaaagccaggaccctccagcaccatcccaggatgcttcctaaggtctgctacaccctctgtcctccctgcctggttgatgtgtgaaatggttagaaaagggctaagctgtgattagaagtcatgcatcacacctattcagaagagtggctgtcccacggaactcagcactcacacgctcccaagtgtcctctgtaccagcagagccaagcatccaagtcaacagagaacctcacggttcctcatcagaaaccactgtggcgggtttacacaggggactcatgtggaggtcatcctctctgaaattgcttacacggagctctgataatggttgacatttgcagttttcacatgaagtcaagcatcatttccaagggtggtttctcagttaccatgcagctctgttccctttgtctcaggtttaggatttaatctaactttaagattagctggagatagagatgaatgtggtcctcgtccctgacaagtcatgtgttgtatgaggagatggcggcaggtagaggaaagccactgtaggaacagacccctcccttacctgttgtcaccccacccccagggagtgttctggccccttgttctgctgctagtgctctcctgtgagtctccaagccactgttagtaataaggtagggagggaggcaggcagttgagcaaggcctttgagcatggctgattagaggttgcaagagcactgctgtcgtagggcagtaccagtggggctgtcttcttgtgcctcttggagaggtccttgatccatcatggagtatagagtattcattttaaatctttctcatttcattaatacatttttaaggaacatacagttattgaacataggcctttgtcaaaagcattttgacatgattgtcttttttttttttttttttttttagaatttgcctggtacctttggaaagctttacttaagcaatggactcctgcttcatacgaatacaactttagtcggccatgtcattactgatgtcaagattttggccttgactgcggtggtgtccacatcagatggagagcaagtttggtggtgggacagttacccgtacttgctcatggattgtgttacctttgaccggcctgttgaagggtgtgaccctagtagacactacagaggtttaagcactacagtgacatgggctgtcctgaacgaacttttatacttgaactcagacactgcatgtggatatcagtgctggcattttgtggtatacagaagccaggctggaggctagctggtcaggacagcgagggtcagtgggagcagctgtttgatggtgggttttgatatgctagagttacagactgcagcgtgtggcagttagcatcagtagccttaaggttgttgtgaccttcctgtgcttgggaatcttaatggtttcctttccttgttggagccctggagtgagtgaggaagctgagacttggggtgcatggaaagctgcacagcttctgtcctggcacctccccatccgcagggatgagtcactctgggtgccgtgctcagttctcatgtttgtgtttttagaaaaaaaactgctaataaatagtggatgttttacaataaagttgtttgacgatctttccctaaaacctcaacagaaccttagagccttgtttgtggaggggaccccctttcctctacctgccccgtctctgtataccacacaggacttgataagaaggaaatactggtgtctgcaacttagaagcacctgattcaggctgggcggggcggctggtggggcaggcagtggtttgcctgttatgatgcagctcaagcttggatgagaactattgtccctgcatagctaaggacaaggcccgaggagcccaaggcttgtatttcttttccttttctctttctcatacgttagttattgacctagggtagtgtgggatggggcagtcagaagacagcttggagatactggttctctcctactatgtgggtcccag

SEQ ID NO: 19723 - DNA, 1102 bp, Mus musculus
atggtgatggtataatcttggggaaggtctactgtggccaggtgcaggagaagagtcccctgtggggtacttgatggaactgaagtccctgcacaggccatcagcgtccccgtgggtgccagcagcccacccggctactcctgactcttatctctttcttccccagcacaagcgctgtatcccggcctcgctggatgcttactactcgtcccaggaccccagctccaggagccgcttctacacagtcatcagccactacagtgtggccaagcagagcactgcccgggccatcgggccatggctgtcagcagctgctgtcatccatgagcccaagccacccaagacgcagggccattagaggtctgccccagctgggatgggggtgggtgggtggagagggaaacccccctccccactagttaagcaaggctggagctacaagacaatactgtactgctagggtacggggtgggggcggggcaggatggggtctggggagcactccccaaaaatattgtgcactggagttgtctgaatcgatctttccttttgttcttttgtattgttgcttcgtacccaagtcaggctcgtgtacaaaggcatgtttcgcgttgattgttcccatgtaagatattttcaaagccgccgcttattctttgttaggataatttagagacagaaaggggagccggataaaatgaatttaaaaagcatgaaacgggctccacgtggaagacacagcagggcagtaaagagcagagtctgtctgggacttcttagataaggccccatggcttctgtgtgggcgtccgagtactgcgtggcgaagggtgggctgttcagtttgcctgtggtctgcaggagagaagcacagcgatggcaggcaaggctgatttggagaggaaggtgatgttggcatttctcaactaggaatgcacagagtaccactcaatggtgagcttgcaagatttgcacaaactcatgggggaggcatccacgctcagccctgggcagcccatggggacctaggctccgatgctcacagggcggctgttgtgcctcagcaaacacaggcgtggatagatgttgtctttcttttgtt

SEQ ID NO: 19724 - DNA, 1360 bp, Mus musculus
tgtgggaacaccggcttgtgcaggatctcctgatcccaaactttcctgtcctctttatttctcaacccctggccctcccgctacaccggcctcacctgccatttggtgttttcccagagaaatccctgctggaattgtgactgcctcgatcctgagtgggttttgtgcaggcaaccaaagctgctgtgagtggaggtgtacaatagtgatacgagacatattctataagtgagaggttcctgagagagacagccagggtcttcagggttgcggtcgtgatcaaggccgcggggatcgtggaggtaaagctgaagacgaggaggtaggtctgggcggctggccgggtgggctacttgctccctgcacagagaggcagccctttggctggtgtcttccttcagtggacctctgtcaccaagctgggccgcctggttaaggacatgagatcaagtccttggaggaaatctacctgttctccctgcccattaaggagtctgagatcattgacttcttcctgggtgcatccctaaaggatgaggttctgaaaatcatgccagtgcagaagcagactcaagctggccagtggaccaggttcaaggcattcgtcgttattggggactacagtggtcacgttggtcttggtgttaagtgctccaaggaggttgccgctgtcatccgaggggtcatcatcttggccaagctttccatcgtccctatgcggagatgctactgggggaacaagattggcaagccccacactgttccatgcaaggtgacaggccgatgtggctctgtgctggtgtgtctcatccctgcccccagaggcactggcatgattttccagtctctgctcctgagcccaagaagctcctggtgatggctggtatagatgactgctacacttcagccaaggctgctctgccaccctgagcaactttgccaagaccacatttgatgccacctccaagacctacagctacctgaaccctgacctctggaaagagactgtgttcaccaagtctccttatcaggaattcactgatcatctagtgaaaacccacaccagagtctctgttcagaggacccaggctccagctgtggctaccacaaaaatatttttatttaaaaaaaaagtaaataaataaataaataaagtgatttaagtatgtgaaagaaaggaagaaagagagaaaggaaggaaggaaggaaggaaggaaggaaggaaggaaggaaggaaggaaggaagaaagaaagaaagaaagaaagaaagaaagaaagaaagaaagaaagaaagaaagaaagaaagaggagggagagagaaagagagaggggagggaggaagagagggggagagagagag

SEQ ID NO: 19725 - DNA, 1156 bp, Mus musculus
cagtttccaggagtggaggcttcccaaggtactcagggaaggcttagcagcctaggccatgctatagagaagggggacgcagaggggtctgatacagtggatgtggtttgtacatgcaggaagacagcaatacctctacaacactgggtgtgcatggcaggaggcttgaggtttactgccaagctttctgtctttcccacaggggctggggcttgtgtcttgctaagagcactagagcccctggagggcctggagaccatgcggcagcttcgtaactccctccgaaaaagcactgtcggccgttccctcaaggaccgtgaactctgtagtggtccctccaagctgtgccaggccctggccattgataagagctttgaccagcgagacctggctcaagatgatgctgtgtggctggagcatggccctctggagtccagtagcccagctgtggtggtggcagcagcccgtataggtattggtcatgcaggggagtggacacagaagcccttgcgcttctatgtccagggcagcccatgggtcagtgtggtagacagagtggctgaacagatggatcagcctcagcaaacagcctgctctgaggggcttttaattgttcaaaagtaaaataaatatcccgtttttagagaactgtccccaagtctcagccagaatttgtgttcatgcagttaattctttatccgggtcaggaaactgggttacccagtatgtatggcaacagagaggaaaaacatcaacgtgcaggtgtatacacctaggaacagaatgagctgaacaggtgtgtttagacactttccagggcagctccacaagggaccggccggaaagggatgacaaggacataacctgtatgtgtataaagaaaggacttggactctgaagacacatcctgggggctggagagatggctaggtggttaagagcacttcctgctcttaaccagaggtcctgagttcaattcccaccaaccacatggtggcatgtaatgccctcttctggtgtctgaagacagcaacagtatactcacatacgttaaataaatacatctttaaaaaaaaaagtcacatcctggaagaccttctccagctcagcaatattaagctgccgtaaggaccagattgaagagggaggctggtgg

SEQ ID NO: 19726 - DNA, 1649 bp, Mus musculus
ggtggctaaggaccagcagcttggtctgtgccaaactaagaacagtacccaagggcctgtagtgtcctgccccagcagcagctgctgctccgtgtagaacagttggctttttagcgtgctctttccctgggagaagcccagggtagcccttccctattttgaccaatagacggctaaggcctggagaggtccacttagttattgcagagctaaaaatcaggacccagatttctagctcccagcccagaccaacttgtacctatgaatgggcttcctgtgaaagcggggtagggttgggagggccaagctccatcccatcccacagtccctacagaagaggggacagccctgtctggttctacacttccccagtgttcatttttaatgtggtttggaaaccacgaagccccctttcccaagatgcttgcatcttacttgcagtgccaaagattttgtgcaaggggatcctttctgcaccccacccctgcccaactctctctgctttcctctgacccacctggcgctgtcactctcttcctctgttcagcctgcagtcccctacgccccacccccaccccccagcactgggcctgggtaggaggcacctgaaggatgaccctgcttagtctgtgccctgggcctcgggggaaagcggcagttagggagaggggaagctgagagagtcttcagctctggagcagcacttgagagcctcatgcccacacccacgctgtgcaggaatcctcatagctttctatttgttggtggtttttgagtttcgacacctctgcttgaccagctttctgaagccgttttacaggcctttggttgttgctgttttgtttttcctgcttgcacttggctctctgtgaccttctcaagtattttacaagtcccttctatgccgcagatgctgggtagaccagggagcggggaggggggcatcaccctgcactgaagaactgagctttgcccactagctccagtgaagaagtcatctgccttctaccctcctctctggtcagctgaggcagagcagacaggccttcctgtgggcaatgagagaatttaccttttgtcctatccttgtgctgctgtgaactgtatgtgtgccgggttccctttctgttcactgtctttttcttgggtcacacacacagtctgaaggtttctgtggcaagctccatcggccatagtgcttcatcactagcctgggcaaccggaagcgagtgggtctgcagagccaagtcactcacccaatttcccttgcctgggacttagcttttcaacatccaggactgtggtcactcctgtcgggatggagcatatatgccagactccccctcaccccccatccctgcctacttccaaggccagggtagcaatgtctgggccaatcacagatcagatcaccgacacaaacttgtgcccctcccctgcaactaacattcacatcaactctgttgatgtgatggcagggaccacctcaatacataatgggaaagttaaggtatggagagtgaagtcacatcctgccttgttcaggttcgggccaccagcaaagaaatgttacagttctgattttaggtgtctctccctcaatcccctgaccaaacattggtcattgaccagatggcccctcttggatg

SEQ ID NO: 19727 - DNA, 1172 bp, Mus musculus
tgttttgttttgttttgttttgtttttgagcctctgccaccagaccgccccatagagttgatttctatggcacagttcttgaccttaaactgtctctgaacccactggggacttggggagtggatggaaagtggggatacatgtgcttcactaaagaacaggtgccaaatctccccacaagaacttaggacagacagtctagtgtttatcgccaaattctggcccttagtgagaggaagaaactgaccatctaaggagagtggtgtggagttgtggtgcagccagaaagcaatggcccgaatgtgtgggccccaggctccatccccagcatcacagataaacaagaaccttaatggcttagctcctgtccttccattgagcccagggctcttcagtgtcgacatagtccataccctgggaagccttgccatttctttgaacagtgtggccatctcggccccttcggtggctgtctaaactttccttcagggtttttcctgtatactatggacagccatatcctaccacagaccaaagattccctgaagtcagaggggtgtggactgaatgggtagaaaattaatttgtatcaaggcccaagggtttgcctttgcctggaagaattgctcctaacttgctaaggttctagcagcaggactgacctgaccccaagcagagctgtacagttaagacaatggttcgtactcctcacctcctggacaaccgtcccacagaccagaccttcctgctctagggagtgatgcttggtccccggtgctatctagttgaggtaccaagcccctcaaatgtgagggttccatcttcttccctgtctctgtactccttccccaaggaagccctcttagctcccatcagaatgagggcttagcttctgtccttcaaaagaccagacccggtgccatcgccagtggccttccctctcacctctgcttttaagagcaaaggtgccctgccaggcttattacagcaataaacaattctaatgcaatggaggtgtccggattatgcctgcaatgcctttgtgccctgtaattactagtagcacctctcgtacataccagagagtgtgataaactgtggtcaccttagccatacatggttcctgtttcggggccactgaggttgcttctaacatccctccagaaacagtg

SEQ ID NO: 19728 - DNA, 2561 bp, Mus musculus
cctgtgcaaaccccaacaccagtggagaactgagctggacttgccttcttccaagatcccgtggctcctttttattgttaccatttcttactcttaaggcgtgaaatttattttcactgctctgaattccctatgaatggatttagttctgaggaattaccagtgaaaaattccatctgtgatggagaccaacaaaaataataaaacacacagagccagcctctgatactcttataattacaatttctaatttgaaagacagttaagaaatagataaccatttattttaaaacatttatcaactgtgtaatggctgtatttaaatgatctcgaatgtaaacagacaccagacccatcaaaaacagcaccaagcaccttttggacacagaatttttatgacatacatgtcaaatttttttttttccagaaccatcaataacagttacaaaacctaatcttttttttcttttaaagtggaacctaaaagagcatagagttttgcttctcttctgggtttgtagtcctacccaccaggaggcagtgagactgggagttgtcagtgttccttcccctcccaccaagttctgctccctgttgacatgcactcagtcctgtggccgtcatgctggcagcgggcaccctctggcgccctgagcagcacgttagtaagtagttagagcttgtattctcagttgagaagtttctagtcttgcttcatagtaatcttaacatatctgtggacccaggcttgacagctagctactatgtgatgtctttgctgaccctgatgctctgcgtgaccatttctgtagcttcctggccccgcctatatattcctgggccaggcaagacagaaatggagtatagctgcttccagtccagaatgaaaagcaatcttctccttcctgcctgcagggaatgtgagtaaaaccctctctgcctgttcctgggaaaactgtgcctattctaagccttggagaaaattccaattcaaaatgttcgtgtgtgatagctaactagtgtcatttaaactgcattggtgggaacagatggtagcgcctggctcagactggagtgctttcacttaactctgactccagtcactgtggtggcagggttcctcccacaccttcccaacaaaggtgaattaacctccatctgcacactgggctaagggactgaacatagtaaatcaggctcaccttctctggagaaagctgccaagggttatatttaatctggagccttttaaaagctgtttttgccaggcatgttgtacctgcctttaatcctgggccttgagaggtagaaagaggcagatctcagaatttgagaccagcctggaatacacagctagttctaggccagccagagctacttagtgagactgtgtcttaaaaaaaaaagttggttccctgagaaggggactatcatgtgaccacactgtctctgaaagtttgtgagatgtgaacagtagatgaaagaagggtctgtgcttttctcagtcaggaaataccaaacctcctattcggatataaaatgccattcataattttagtggcagaatgaaacctctaagcagtttaaaatgtaatttttaagtattaaatttcttatagcctgtttaaatatatctataattataacttacatttctgagaactttaaccatttccctaattctgttcatcatttagtttgtgattgtatctaatttagatttggtggtgactgatctaaattcagaagtgcacacacagctttagcaaccaaggatgcccacatttccatgtggaggctctagggtattccagtgcatctccctcccaccatcaagaaggttggttcatttgtcatattgaataacagtatctcaaagtccgtcagttggaaaagtggttaaacctattatttttctaaaggaaatttgatggtgtcatgaataacctgattgttaaaaggtcttgtttcttgagggtttgtcctaagagatttgtggggtcttttggtttttgtttgtttgtttgtttgtttaaattttaaaggaacatatactttgaataacaatcctccaggcatggtgagaaaaaaacctaggtgctggaaattgtcaataggttaataacctaggtgagaaaaaaacatggtgctggtaattgtcaataggtcgatgtaagattggatcaatacttgatgtgtatcattttagtatgtaggggttttgtgctttttttaaaaaaaaaaattcaacttttctctttgtctttgccattatttctctatacagcgacagtttcctgcatcctataggaaagtgtgaagtgttctctctaaaaccggtagtgaccaccaaacctaagctctgctccaccacatactgcaggtcacttagaggtgtgcctcaccagcactgctgccttggtctaaaataggttcaccatggctcagtcgctactacttgctgtgctgccaaggcaacactggattccaacactcagccagttgggccaaactggggagctccagtttcagtgagcgacccgccttgagaggaatgacac

SEQ ID NO: 19729 - DNA, 1187 bp, Mus musculus
gacaggggcttggcttttcatagctcacagccagctcagatctgagttgcgtgtgactgtagcaccagcagcctgtcgtggaagcgctaacaagggctcaggcaggggccagtgtgctggccagggagctcacgctgtgtctgttcagcttcaggaagccactcagtgcctgtgcgtgttggtagtggaacaagaggtggtcacagagggctggggcccagtgccgtttgtctggagaccctggagatgattggcttaaggcaaagacctgggctgtgaaccagacctgcctgagttcaagccctgagagttgctttctagtgtgtgacctgggacatgtctctttctctctctgggccttttctcttttccacagaaggggtgatttccatctccgttcctcctaggcctgtactgggtcaaggtcagtgctcagcttcctgcctccagaatacctgctgtattgtaagcctttcttagcctgcctcctccttgccagcctttgattcccagctcctgctgaacgctaggctctaggtctgctgcctctcatccccttcttttccttgcaataaccagttcttctctggcctgcactgatgccctctccctggtccctaaaccaacaccctcctatgattggtggcactcatcaccactccctacgacatggtccgagacccgctggttccaggggcctggacctcatctgacacatgcccagtacagccacgagcatccagagacaggaaagtagaaactttagctttgcctgctccagacttcagctgttggccacacatagactttcatggacaggtcagctggaactctttcctcacacctgagccttagccaagttgctaggtgacctcagcaacagctgtgtgtctaggggtgggagtatctgtaccacccttatgcctccctctctctttctttctgtctgtctgtctgtctgtttctctgcctgcctgtttctgtctctgtctgtctctgtctctcagtctctctctctctctctctctctctctctctctctcactcatccgtgtgtgctggaaccctccctctttctgtctgtctgtctgtctgtctgtctgtttctctctctgtttctctctttctgtctgtctgtctgtctgtctgtctgtctgtttctctgcctgcctgtttctgtctctgtc

SEQ ID NO: 19730 - DNA, 2943 bp, Mus musculus
tcagagggacaggcacacaccctcccgcaggcagtgggtgtcctgactgggggtgagcactgtcacttggccatctctttcttctgctagatcctcccctctggctcttctttatccatcctgctctttccccatcacgggagtcctgcctgtacctctcgccccttaacaggcggttccccaggattggccctgggccatgagcagttcaggaaggcgtgtggcaggtggaaggggtgcttacctcagggagctgtccagagcaggacatgctgttctgattggaatcgttggcatcccgctgaataccatctgctctcgcttccccaggccctggaagaggatttgaaccagaagaagcgggaacaggaaatgttcttcaaattaagcgaggaggcagagcccagacccaccacacccagcaaagccagcaacttcttcccctacagctctggggatgcttcctaacacccacaagcctgggctgcggtgggcagcgtggctactggggcccccaagcctctatgaacaagtgactcaggacctcttcctcttgcttctgtgccagctcaattacccatccccctgcagcgccccagttgtccacagtgccaccttggtgcacggtgacctcctcaagactcagattcccatcacctaggagtgatttagactgttgaggtcaggggccaggcaggatgggtgaacccctcctgtttgcccaaacaccagctctactgtctgtgggcacaagcgctactaatgacatcaccgcgaacgcatccttattgtgatccttgtgggttttttgtttgtttgtctgtttgtttgtttgccttcagtaattcctcacagtgtcgggaaacatccctaagagccacttgggttctcagcagccagctcccgggtgtccccattcccttgtttcacatagctgactttgctttgtgtatgtcggggtagggagcgtggagaaggatgccagagatgcctgttctgctgattctgacattgtatcccatcttattttcctctccctgtgagacatgcaatacacacacacacacacacacacacacacacacacacacacacacacacacacactgcaaatacataacttggcccccctgacaccacccaggctgcctctgctgtgacctcctaggaccaatgcattggaacctgcttgcttgcctcctgagcctgatccagggccactgagcatgtcaggtggagcagctggtggggccatgctgagtgctggcgccagaacccagagaaggcacaggctgtactgccagcctgcaactcatttggctgcacacaggatcccgtgttcaggggtacacccccctccacacttgacttctgctgcctagcacgtgccaatctcacccttgcccgcttgtctgcaggtacccaggaaggcttttgacttctgccctagtcctgtactggagtcccactgtacatttccactaagctttggacttctctgttcaggaagaactgttccccaccctcaggaacatgctgcgctcagggaaatgtggagcctccatgactgggccttcgggctgctcaggtagcctcccaagaggctgagccccatagaagaaaagcagcctaagtgctcagttacagtacaggcaaatggctggctgcctcagacaccctctttttaaaaagccccttcccagggacaatggggtggggtgggggaggggggacccaggcggttgagtctggcgagtggctgagaccttagcagtatttctctgtcactgcccgatgctgaagcaactttctaaaaagtttcctcaaatgaaaactgggtgcttgggagggagtgggctagaaaaaaaataggaaaacaggtcttgggactcccagatctagtgtgcagtaaagaagctcacagaaccccaggaaggccatagttctcaggggagcgagtgagccttcgcttgctttcaggcctcacatcaaggagttgactcagagggcagatgggccaggccacgccacaggaggccgggcagggatacttgctttcaggggacttgacagtggctattaggcaaaatgctagttttgtggttcatataacagtctttgaccgctccctgacatcattcgtaatgttccagtcctttgttgaatctgcacttagtaccacctgagccctggtagctctgctgtgccttttggagtggggtctagcctagtcttccagcctcataattatagcgtaagtgcaatgcctgccaccaccaagggcccacgcagtattcctcatgccctgtgctaatcttttctgtataggaacaggcagaagtgtttttagcgcagtaaatataactaacttatatttcccttcatgaaggatggaaataacgtgtatgcatttccaagcaccgtggatatttgtaaactgttctctgcaaacaaaaaaagaatgtaaatatgcttctaataaagtaataaggtgatttgcaagcactgttgttctttctggttggaaagagaagataggtgggcctcctgtgcttgctcagcaaggaagggcttatcctctgagtatgtgagagcctcctccatcaggcagcaggtcagactctggggtttctgatggaaccccaaagagagaggaaagagaccatattctctctggccatttaatatcattccgattcaaagacaaacattggttaacaaacacccccagattttgtatgttaatggactgaattttttccataactctgataagaaagtagattttgcgcagagcccaaatctcaggacacggccgagggacacccatggaattcaaccctggagtttgtccccctgatggtgctaccacacctctctccagctgccacttcttgccatcaatgctgtatcttaaaagaattttccaggacagacttaaca

SEQ ID NO: 19731 - DNA, 1302 bp, Mus musculus
gttttaaaggaccaaccagcccctcccagtgaatgaagcctcttcccatggaagcacactctaggagagagaaggcctctgggctccacctggcctggcattatgaatgcagtggggtcagtgtgtggtggatgtgtgtactgggttggctttcctttttagtttttttactttttagtttagtttgttcttttccttccccaataaatcattctcacatgcttccatgtttgtttctgagaggtgggggctcaaatgtatagaaagtaggccccagtccataaggaggtgtgaacacacccccttactgcttatcacccatttgacaggaacgcccaggaggggagggggaggggaagaagtgagttctgcacagtcggacatttctgttgcttttgcatgtttaatatagacgttcctgtcgatccttgggagatcatggccttcagatatgcacacgacctttgaattgtgcctactaattatagcaggggacttgggtacccaaggaattccaatttctgggattacagtagtaattcccagctgtactctggacttgattttgctaactgtaactgagcaactgtaaattactgctatattaatgtgttaaagcactggggtagtctaattctaactggtaattatgtttgccaattatctgtttgaaataaatatgtgtctgaacagctattgaaactgttaaattgtacagatattatcatgacggctttgtactgtggaatgtgcttaataaaaacaaaagtttgacctttgtccaataaattgctaagtaatgtcaataaatcaagatgagtattatgcagtacacctgacctggcttcctggcgattgttacttcagctactgattcaagccaatcctctaaataaagtgttgcagtgctcctctgttctgtcacatttctcagaaaagcagttttgtcttgccaggagctaagtgacacgccattagaggtggattcccaattcatctgtacggtgaagccgaaggcagtgtttgtggcttatggaattcttcacttttggttttcccagcaagcttcaagggcagagggagagctccccgcttggagccgtccctgcaggtccgtgtctcaggtgagcgtgatgacttcctgagttctgcaagacaggaaaggggtccccaggactcgtaggggaggggatccttcctcttgaaatggtgtgcgtgatggagctgcaggtctctttaaaatatatagcaagaatttggataagaaaatcagtttacaaccctaaaagagcagagtgcagc

SEQ ID NO: 19732 - DNA, 1195 bp, Mus musculus
tagttttatagaactctgttataatttcctaagcttttcataaagcccaccacaggtatacttctgatgaattgtccccaataggaagacatgctatgaagaaaatgttagtatcttagtagagttcctggaggcagcatgactgtacttgcacttggaaacctactgaccaaggattaagcctgagaactgtgtaaatcattaagctatgctctttgtgtatggaggttgcaaaaaaaggcacctcctttagactgaatcttttgtgctgaaatttttcttacatgatgatgtcaagccagctgaaatgtaggctgtagcaaatagttttacaaaacatatttcacaattaagttttactttttaaatgtgtcccacttgttttgctagtaataagcagtggttttcacatcgtcttcctgacacagatgttgtaatgcatatagtaaaggccacttttataaattaagtgcttctgcctgtgttcagactcctgtgtaaaaaccgttgcacaagctttgcactcttctatgctctgctttgtagaccgtttgtcataacatggaaaacaatatgtccatgttaaaaggattggtctgccgggcgtggtggcccacacctttaatcccagaactcgggaggcagaggcaggcggatttctgagtttgaggccagcctggtctacagagtgagttccaggacagccagggctatacagagaaaccctgtctcgaccccccctcccccccccaaaaaaagattggtccatggataatttctgtcactttaaaaataaagtacagtttgaaagaattagtttaaaagtaataaggttaaaatagtcccacttttaagtgatccattttaaaatttgtaaatcaataaagttttttgttgttaaacataaaaaaaaaaaaaaaaaaaaaaaaaaacaagcgcttggatgtccaagtgcaagcaacgatgctcgaatgctgtgtatgaagccgagtcatctcaaagctgccttttcagtcacagatgaatgaatctgtaaatgaatctgcccatgtggagcacattttgcttgaatcacgtggttcaaaatcaaagggaaacgactatgaggaagacaaacaaacagagggaaggctttctacatttttttattattgtttttggtgttaaggcctgggggctgataactgaatgaaat

SEQ ID NO: 19733 - DNA, 1186 bp, Mus musculus
tttttttgcaacctccatacacaaagagcatagcttaatgatttacacagttctcaggcttaatccttggtcagtaggtttccaagtgcaagtacagtcatgctgcctccaggaactctactaagatactaacattttcttcatagcatgtcttcctattggggacaattcatcagaagtatacctgtggtgggctttatgaaaagcttaggaaattataacagagttctataaaactaaaatatagcacaaagtcaaataaaataaaccaagtccgttttcagagtaaaatctattaaaaaatggtattatatatgtatgagaaataaaagaaatgatcactgtggttagtcacagatgcaagagatccaaggatccgaggctttgtgagcacagtaattaagagtaaagtaatatgctagaggaaatggctagtgatgagctcaaagagatgaggaaaaacctgaccaaagaagccatcagggagcatcagatggccaagactggtgggacccagactgacttgttcacttgtggcaaatgtaaaaagaagaactgcacttatacacaggtgcaaactcgtagtgctgatgaaccaatgacaacatttgttgtatgtaatgaatgtggaaatcggtggaagttctgttgagtttggaagaattggcaaagtatctggaccattaagaaaaactaattttgtaattagctttaaaattaagccaggcaactcgtttccttgcaagtgaaatttgtaaacaacatacatctcatgggttggtctttgttgttcacctgacagtctttcttaaatgccttctgtggtctcagatcagccgggagaccataaaataatgatataatgtgttgctttgtttttctctttcataagttgatgttgcattttattaaatattaactttttatagcctagaacacaaaaattttgttgatctgttaatgcataaagataaattgcttttctcattggtatgtacctaaacatgttaaaaggaaaaggcataatataaattttagagttaccaaatgtagtgtgtattccaatagtatgtggccagcttatcaaagttgtgcacacaatttgaactagcatattactttactcttaattactgtgctccaagcgcttgttaaatgcttgcttacacagagctgcctcccttga

SEQ ID NO: 19734 - DNA, 1844 bp, Mus musculus
ttgtcgggctgagaggacccaccccgggttttttgcttttctaacagtaagggaaagcctgactatgaggcagtcccagacagctgaaggaggtgttcccctcccagccactcaggatgagcagtttccttggctcttagaatgatggcctcttagggccttttgttcttctgtttgaatgtcaaggcccaagggcagagagctaattggcagctgtctcctgcatcttccctacccagtcctccccaggaggataaaggaaggccatttctttctcacagagggaaggggaaatgccagcacaggaacgcgggagtgacatgttctccttcccactagcttgacgatgggtgtgcgaggctgtactttggagtgctgaagaacgttctggaatcacaaagagaagcttgctcaaccttgtaaatatgattaaaaaaaaaaaaaggcgctttccgcactacccggggacgggtccatactgcgttgttcttgattcccatcgtaacttaaagggaagcttacacaatgtccggagcccttgacgccctgcagatgaaggaggagggtgtcctcaaattccttgctgcgggaacccacttaggtggcaccaaccttgactttcagatggagcagtacatctacaaaaggaaaagtgatggtatctacatcatcaatctgaagaggacctgggagaagctgctgctcgcagctcgagctattgttgccatcgagaatcctgctgacgtcagcgtcatctcctccaggaacacaggccagcgagctgtgctgaagtttgctgctgccacgggagccactccaatcgctggccgcttcacacctgggaccttcactaaccagatccaagcagccttcagggagccacggcttctagtggtgaccgatcccagggctgaccaccagccactcacagaggcctcttatgtcaacctgcccaccattgctctgtgtaacacagattctcccctgtgctatgtggacattgccatcccatgcaacaacaagggagctcactcagtgggtctgatgtggtggatgctggccagggaagtactctgcatgcgaggtactatctcccgtgagcacccatgggaggttatgcctgatctttacttctacagagacccagaggagactgagaaggaggagcaggctgctgccgagaaggctgtgaccgaggaggaattccagggtgaatggaccgcaccagctcctgagttcactgctgctcagcctgaggtggctgactggtctgagggtgtgcagcttccctctgtgcccatccagcagttccccacggaagactggtgtgcacaaccagccactgaggattggtcagcagctcccccagcgcaggccactgagtgggttggagccaccactgagtggtcctgagctgctctgcagacgcctgagcaaagggaaaaaagatggaaagaaaataaagttgctaaaagctgaagaaaaaaaaaaagcaacatgccgaattatacatgatggaaaagcaaatcatatggtatatgagttatatttaatttatgtattttaagtagctgagttcactcgtgtcttatctcgagctctcggttgacctgggacccggcctctcactgctctctgttcttcagggagcctgggcctgttctcctcctgaggagcctccagggttgggttggagtgaagagccctgagcgtgtcctgtcagtcacagtctggaggggcagggacgacccccatgcaggccacccagtggagcagcagccacagagaaagcatttttttctgacgcagggagggaaaaggtacgggattctctggtgaagcca

SEQ ID NO: 19735 - DNA, 1142 bp, Mus musculus
ggaaagtagatctttataacacagtgttgctatttgttctacctgacaacgaactgggtacagcaccccaataaacccatctcctcatccgtgaagcatggattacaatagctcctagctgggagcacactgaaaagctaaagcagactgctgtggcattgaaaacagcacttacaacatgcatgcactgtacaagtgcttgaaccatgttagtttatttaacattagtgttgctatcactgttgctgttaagcaatggccactgggaagctgggcagtggtggtgcacataccttccaccccagcactcgagagtcagaggcaggtggatctccatgtccgaggccagtcaggtctacagaaggagttccaggacagccaggactacatggagaagccatgtctggaagcaaacaaacagacagacaaaacaacacattttttgagtccaagtccagcctgttctgcagagtgagtttcaaaacatccaaagtactagggatacagagcaaagaccccagtgcagcctggaggtgggaaggggtggacaacactccctgcagaaagtgatgtgcaagtagaggccagaaacccaactaggagttcactttgcgagtgagaggcctgtgcagaactgagcaacagcagacgcatgccgatagcttctcaaagcccaacttgtcaaaacacagtggggagatcagaaaaagatgaggggctggagagatggctcagcggttaagagcactgactgctcttccagaggtcctgagttcaattcccagcaaccacatggtggctcacaaccatctgtaatgagatctgatgccctcttctagagtgtctgaaaacagctacagtgtacttacatataataaataaataaataaatctttaaaaaaaaaaaagaaagaaaagaaaaagatgagagccaaggaggaggtttgaaagtgaccttggggtctctgggggctttaaatagggcaatgcaatatcgcatccctagatggaatgggttgagaggggctgcctggaaagatgggtggcggccgccatcagtgggaggaaagacaggtccccacaccaaggcttaggggacaagtggaagttaatgcccaggtcccagagacttagaggcttta

SEQ ID NO: 19736 - DNA, 1388 bp, Mus musculus
aatgatagtattgcctatttaaattatagctcccaggtttgtagtcaaaagtggttaggattgaggcagactgtcaatgattggaagtagtgatgtcatcaaattcagtcctttcgtgttagctacagattgacctaagttttagaattcaccactgaagagaatacttgatatttttaagtttttagaaacatactggcttgtcttaagtatgtccctttgggtttttctaggttgtgatttttttttttttttgctttgtaatactttgcctagactttaaacattctcactcaaattctgaaacctaaatagggctgacccacaggctgaggaggcaacactggccataaagtatttaagccatttaattaaggaaactcatgctatgagttaattctgtatttttcctttgtaaaatgaaaaatatttaactgaagaaatgaaatttgtttaattctataaagttaacatttctttaccatttttttcctcctttacaggctattcaagatctctggcagtggaggaaatctctttaagaaaagggtttaaacagtttgaaatattctgtcttcatttctgtaatagttaatatctggctgtcctttttataatgcaaagtgagaactttccctactgtgtttgataaatgttgtccaggttcacttgccaagaatgtgttgtctaaaatgcctgtttagttttcaaggatggaactccaccctttacttggttttaagtatgtatggaatgttatgataggacatagtaatagtggtcagatgtggaaatggtagggagacaaatatacatgtgaaataaactcagtattttaataaagtagcactgtttctatttgcttatttaactctcatactttgaagttaacgttagtgccctcatttctgagcagaatcactgttcatacattcccatttaggaacttaacacttaaaacacacctttcctctattgatagccaatctgttggacataaccataggatttattcatcctgttttgctgtggtatattgtaacaatgcatgggaaaatacatacttaagaaaaaaactcagtggatagtgtctttcacaaacactcaggctatctgtatggatgcttttcttgaatccttttaaaatctggtttggaattgagtctaaagttgcctagcaggtcatatggggtaggttaaaagaggtatggtatagtttgtctattcctgctcaagtttgaagtaactttagtcaaaggctgcttcgtgcctgaacctttttttttttttttggtttttcgagacagggcttctctgtatagccctgtcctgtaaaccgggctggcctcagaaatctgcctgcctctgcctcctgagtgctgggatta

SEQ ID NO: 19737 - DNA, 2374 bp, Mus musculus
ttaaagatttttttttttaatgtttcatttgagttgatttcacagaactttaggctttgggttttgatgtaagtatcattgctaggtttgctttcttgtttttgtcttacatacaggctgtgaactaaaggctgacaaagactatcactttaaagtggataatgatgaaaatgagcaccagttgtcattaagaacggtatgtaagctctgaaacttaaaaacatttcagacatttcctactgatgaactaggagtttaatcccagaaaagataggggatctttgtcacttgtaattttgtatagcttggtcactccaaggtgctagataggtgctttgtagaacagtgcttgtttttaatctgccagctttattcatttaaaggaacagttgtgtatatggtaattctgttgtgaaacgcttcaattctaattctaatggtgagatgactagttttcttttcgtcagtagtggtgaaaagccactttaaaagtttctttgaaacatttttattcacaggtcagtttaggagcaggggcaaaagatgagttacacatcgtagaggcagaagcaatgaactatgaaggcagtccaattaaagtaacactggcaactttgaaaatgtctgtacaaccaacagtaagtacatttctaaattttggatttcatgttggttcaggtctcttgcgtcatttggggtcagtgtcatttaggttttgcaaagacgtatcttttaccaagattatttctgctgctattataaataggtttatttcattgtagaacttgctggtaatatctgttgtaaaactcttatttttaggtttccctagggggctttgaaattacaccacctgtggtcttacggttgaagtgtggttcagggcctgtgcacattagtggacagcatctagtaggtaggtttttttttgtcatagttttcaatataggctagcttttttaatattttaaacatttgtatctttgcacatctgccatggaatgcttgtcctggtcagacaagacaatttccctagcatctttaattgctatcacatgagttctggggatcaatctaacacgacgaatgtgtttggttgggttcagctattcaggaccctatgaccaatgaggctatctttcaatctagacttccatttggactgtcgtagttctacaaagacctgatttctgtctttaaaatacagtaaatcttttctgttcatttgctacctttaatggaatcttaaaaatgctatgggttacttgttcttgtcgagttagtatgtctaattctattttagctgtagaggaagatgcagagtctgaagatgaagatgaggaggacgtaaaactcttaggcatgtctggaaagcgatctgctcctggaggtggtaacaaggttccacaggtaaagaaaggaaagatctttttgtttgttttttgtttttcaagacagggtttctctgtgtagccctgggtgtcctggaactcactttgtagaacaggctggccttgaactcagaaatccacctgcctctgcctcccgagcactggggttaaaggtgtgtgccaggaaagagttttaaaaagtatttctggctgggggtggtctacaaagtgagttccaggacacccagggctacacagagaaacattggtatcgaaaaaaaaaaacaaaatttctggcatttactttggctaatcaccaaaatttctcttgctaatggatgcatattattctttcagaaaaaagtaaaacttgatgaagatgatgaggacgatgatgaggacgatgaggatgatgaggagtaagtataagtactatgatctcaaaaacttgatcttacaggtacttgtaagggtttaggaggattgacttgccagtggttgatgtttgaaagtaaaagattttgacctatgattccatgtttgccttacaaacaagctatttattgtatgtgggacattgatgggggggttgaattaatttatttttttgagacagggtttctctgtgtagccctggctgtcctggaactcactctgtagttcaggctggcctggaactcggaaatctgcctgcctctgcctcccaagtgtgtgcgccactgtgcccggctgggacattgatttttcttgggagttattgttaggagtaagattttatgtgttcaatataagtaacagctagatgggaagtatggaattcgttaaaaatatttttattacatattttcctcaattacatttccaatgctatcccaaaagtcccccataccctccccccgaagtatggaattattatttgtagtcttatatttgttaccttcctgtcttatagaagttctggaattggtcaagtatattctgag

SEQ ID NO: 19738 - DNA, 1286 bp, Mus musculus
tcagaaaagaggtgcaaaagcatggctgcggggaaagtagcctagatccagccactccgccctgggctcctgaagctacgtgaaaacgaagagcaagccttcgagcaagccaaatcctgaggtgattatgcttgttccaggcctacggggaacggagggtggagaaaagagacgctctgtggttccctggctgcagccgccatctttcagggtgggctgcgcacgctctcggccctgggcccgcgagcacgagcggagaagacgtggaagccctgaaaacccagagcgaggccacaaagagaaaacgcgcctgcgcttgggcgacagtagtggagggacggggccagagacgaacgcgcgtgcgcagtgagagcccgccaagcacctggaggaggaggggggcgaggtacctaggcgtgaggatgaaaggcgcacgcgcaaaagcgcgactgtgcggggagtgggagggatccagaggaggctcgcggaggcaggactagcgcagatctcgcgagatctcctgcgaccatatatacgtgcggagagcccgcgtcctttccttggcgtgattccgtcctgcgcgtctgttctgtggaacaggaggcagttgttttccgtccggcttctcccacaccgaagtgcgcgcctccacctcatggaagactcgatggatatggacatgagtcctcttaggcctcagaactaccttttcggtaactgactggagggggaagcgtgtgcagggcctggtgatgggggggggggcgggagcccagccgaggcctggcgtgtggggaacgcggcgtaggtggaggccggagagcaaggaggaatctcccaggccttagaagcagcggcctgaacactaggaaagccgccggaaaatggggcgggagcggcccagcctgtagcctcgggtgttaggagcggccggccggccggcgagggtgcgaccttgcctgtggcgcgaacttgagaggcgtttctcctgtgcacgaaagcccgcacggtcgcttccgagctcctttttttcctcttgtgttgagccacggcaggcggcacgggagaaaggggcctgtggagcgaggcgaggcctacctccgccctgttggggaggatacatctgcaggcgctgggctttccaggggccgcatcttgtattctgtggcgaccgagggcttcgcccagtaacggggaatggtccgagcaggcgccctgaggcagaaggggcagcaacccctaggagcacgtggttgccacgtggttgggggttagggagggggtgt

SEQ ID NO: 19739 - DNA, 1165 bp, Mus musculus
ttctaatctgtgatgatcccccctcctcagagagaaaacagaagtgggggccaagtgtccaaggatcaccttcatggcatcacagacataaacccaggttgggactcccaagcccaccaaagctttgaaggcgcatggggacagagaccccagaggtttaatgcaggagtggcctctggagacattctatcccagtattaaaaccgacatgttaggatacccagcaaaccagagggcacaaggaaacagcaagtgccactattcatgtgatcagatagcaggtgtatctgtctgccttagttcagcaataaggaaaaatagtgctgacagtgccacagggaccaccacttggtaaaggcatcagtggaataggggtatggggtgcctttgcacgccacagccctctagaaagattctagtgtacaaacatgcatgcagtatgcgctctatgtcaagccagctacagagtcaatgctcaagcaagaagtggtctgtggatatactgactgagatgtgtctcacttttcagtgcccttccatcaacatgtaagggcagggcaccagggagcacatggtccctgcactgtgtgtcatgatctgaacagcccagaaaaaccctcttggttccctggactccctcccactggcatggcagtctacacataccttgggattgtggtcatggggaccccttccaaaatgcaaagctgggctggcttatagctgaaaacttagatgagtgaccagattatctcagtgcagctgagcatcagaatagggcaggctggtaagagaaactgaagggcaaatgacctgtcatattaccctattcagatgtagtagccagcctggcactttggagggaggcgcatttgagggccatgaatgaggaaaggagcctctggagagagagagagacaggacttggggtatggctctggtggagcatttacagggccctatgttccatgctagcaccacggtgaacaggaacagtgagtcggaaacaattgcaagagaactggattcacctgctaggccttgcttctcggtaagaatgccaagtattgttttccttgttttagagatgagaaaacaaacaagtagactgagaaaaggctgcatagctagaccctcccatacttagtccaagagtagaaataag

SEQ ID NO: 19740 - DNA, 1183 bp, Mus musculus
tccattggcttggaataatgcagtctgtaattgtagacatggcttaaactttgaggtaatttgcatctgtctatattaatgtttttctttaacaaggtaatatgctcttcttttgttcttttaaaaataattatattaaatataaagaatgtatgctaattttgaagaaagaatttttttttaccattctacagttaaaatcgtgataaataaatgttgctataaactgatagcagcttccttgggagcctcagtaagctcctgatttcaggttattagtcttgtgcatcagttgaagacatcacatgatcaccagtaagcagatgcagagattgcaggggagacaggccggatgtagaactgtaaccagaagtgttggcaaaccacaagtttctcttctgttgtgcacctgctttctatacaccagtggtctaaaccagctgcttttatattccccctacctacctactctcagccatcttagaatttgaaccattttttaaaaaagaggtccagaactgaaggaaaaaccatgttgtattatgggatcattcacagtaaatcaggactccatgccaccctctcagggcctgtgctttcggaacattccagtttaatctttgacagaataactaatttaagtgtagtatattgtatgttatggggtcaaaaatgtttttctccctcctcaactactcattctgagatatcagagtgtaaattgcctgtgtagatggttggccacagtgtaatacactacaaacagtttttaatataagcaatttacatgtaccttgtcgttagagatggggaggggaagaagaagaacaccatttggtaaaagatcctaattcttcctaaactagatataccccctttattatcaattttaaaagtagcatttataaagtacctattgtgtaatggctcctatactatgcattttcttctcagcaatgaaatgtcctcttcagccttgtccaaataggcatattccctttcattttgtaaacaataaaaatgatttcagacaagtttcaaaaatggttcctggatcccatgtgagcctgaagacttgacctctagactgcgtgcacgatgttgccaaagtccaagccacaagtggggctgggagtttttctgccagagagacagtatgttttacttaggtggatctgagtaa

SEQ ID NO: 19741 - DNA, 1173 bp, Mus musculus
taaatttactctgatctacacaattggtgagatgaaggctggaatcatatctgagtttagtaaagtgacaaagatggaataatgagtagttattttttaaaataatagatttgaagaatttgagatgcaactgaaactatattatttataatgtataaaagatgagaaaatcatacaaaataatttggaaaagagatttagaaaattatagaccgtcaaagtatcttaatattctgtgctatatggataacaatgtgcagtccttcaattcaactgagatgaaaattttaatgctaaaagcttcccatgtaaacatctgaaaagaaatatggagggaccaagcatattttcagttactgggggagcagttgcccagcatgtgcgagcctctagactaagattagggagtctataggaggagtgttcctccattttggttgaggaagtagtcagggtgaactctgtgagtttggattcatgggtgtattgaactcctccatcacctttgtgcttgataagcttggtgcttgtaccatcactaatagctagatatctgtcatctgttaaatacaagagaccatggaaaaaagatctctagtatctatttcagttcaaaaatctattatccaactcatacattttcagtgactttatgtaaaagatactgaaataaaagtaaaaattgaggtttactgtgaaaataaaaaaagagaagaaaacttttcttaactttttccaagatttccaagtacagttcccccatttcacttcatttaactggattaaggttgatcctgtgcatagagctcatgtgttcattaacagtgcccctactcaagagctttagattacccaacgcctgtgagatagtgaagatttgctgatagtgattcggcttgatctttttgttttgttttgttttgttttttgagacagggtttctctgtgtagccctggctgtcctggaactcactctgtagaccaagctggcctcgaactcagaaatcctcctgcctctgcctcccaagtgctggaattaaaggcgtgcgccaccacgcccagccggcttgatctttataagtgctctagtatataacttcgtgaaaaatcacctggcttacaaaagtattcaggccatttgatgttcagtctttaattttctgcagtaagtat

SEQ ID NO: 19742 - DNA, 1141 bp, Mus musculus
gtgtatgctatcagattcagcccacagtgatgcatttttgtgactttgtgggggtggtggtgggcagagtctctgtgctgagcgcaggctagcctgggattgacagaggtggtgctctcctcctgcttcagcacccactctcctgagtgctgcattaccttatctgcatctcaaaaacccacttgtctttgactctctcttgctgggattaaaggtgtgtatcaccatgcccagatctattaattttaattttaattttaatcatgtcttatttttccccatttgcgaatgaaaaccttaaggcttaaagaggtaagtaaggaactcatgcaaactcgcaacagcttgtcgggcctggaatctcaaagtacttttttccctgctgaatccctgttagcatcactgccctggtaaactgtctgttgaaaactgactttttaatagttgatcatttgttttaaaaaaatagatgatttttctgatttaagtattttctgaaaactaagcttatttctattaatacttctcaccttctttcttctttgttgtaaggacgtcttgcatggctgatctacttggttggcacagttgtaggagggagactaacatataccagcacagatgagcatgatgctatggatggagaactatcctgccggtgagtgacagctatttactgcacagtggaagaacttccacctttgttttaactttatatggccatgtgtaaaccagtgcacgtggcctttgggtgttagtttcctttttacccgaaaggaaatccatggatggagattgtgattagaatttgatttttcaacaaataggctcagatttacttggttttaaccccctagtgctggtgatctcaaccttaccaagctactgaatggctcttcacacattcctaaacggagggagggaaattcttgtgtgtgaatactgtgaatagcttgctttcccaccgatcttgactaaatagttatttcctgtacacttgtgcatggtttttgtttcatttgttttggcgaagacttaaactttatgaaaataaatgtcataggaatttccagagtactgatgttagttttaaagaccctttgagtattttgaatgtgtagaggtgtgtatacactgcatg

SEQ ID NO: 19743 - DNA, 1176 bp, Mus musculus
tatgatctttaggattcttttctagttgtttgaatacttactatctctgaaattttggttggggttaccgtgtttctgtaagtcactttagtgatgaagctgttttcataaaactagtggtggcaactcatgagcataggaagtcctcatccgcagcccctggggtcaccagcttctccttcccgtggtctgtagagcataaggagtcctcatccgctggtgtcgccggcttctccttctcgtggtttgtaaagtatttactgtagttgtgtttgccctcctcagttaaggttgttattgggttttacttatttaaagttattatgaatgggatttttaacctcctgatttttccctttagcaagtgcatcattttgttaaaaaaaaaaaagcttctgagtattggatgttggtttgtgttctgcatcttgttgaaaggctttatcaagtctgagtagtcctcaggcactattaaagattttaccatctgtaaataagaatatttgacgacttttctatttgtattctttaagtgtcttcaggtaacattttaaggactattgaaaaggagtgtggactatatacccttgtcttgttccacatttgaggggaagagatctcggtttccatgtttgtttaaatagtcttccatctttgaataattgggactgatttgctgtataatatctttaatatgttttaatttggtttgtaagaattttattgataattttgttttatttattaaggtctttggttttattgtcttttgaatccatctggtcttgctggtagggtaatgctggctttattgtgtgactttgatgtttcttctcttctattttcttgtgtgtgtgtgtgtagtatgagtgtgtgtacctatgtgtgttcgtgcaggtccacattgcctgcatgtcagatgttgatatggagtgtctttctcagtcactctccctttaaagcttttttgtttattattcttatgtgtgagtgtcttgcatgcatgtatgtctgtgcatcacatgcagaaaacagaagaggacatcagatcccctgtaagtaaagatacagatagtttttagccactttgtaggaattagaaatcaattccaggtactctggaagcacagccagtgctctttaagtccctgcgcactctctccatttcccccactt

SEQ ID NO: 19744 - DNA, 1133 bp, Mus musculus
attatagagcagcaggtttgtattttgaactagtttgttatgacttcagtaaattcacttcttagttctagtagagctctctctctctctctctctctctctctgtttgtgtgtgtgtgttaatttctatgtgcacaatcatgtcaactttatatatgggattttattttgtttttatttattttttgtctttttgagacagggtttctttgtgtagccctggctgtcctggaactcactctgtagaccagactggccttgaactcagaaatccgcctgtctctgcctcccaagtgcttaaaggcgtgcaccaacactgcctggctgggattttatttttaatcttccatattcatttgtcatttatttcttgtttcatcatagcatttttacattgcaaagtttctgggttgtgattaagatgtcccacattgtaagtgaatgtctttcatatttcagagataatttagaagaccctctggatgacactgctaccgtgttccagcagctggagcagctgtgtacagttagcagatgtgaatatgaaaagacgtgtactcttcttgtacagctatttgaccaaaatgcacagaactatcaaaagcttctgcatgctgctccggggctggctgttgacatggcgattcaagaaggtcagtctgtgttagacagttgtgagcagcgtgccatagggaatcattgtcagagtccttcggtaagccaggtgtggtggtgacacctttaatcccagcactctggagcagaggcaggtggatctctgagtttgaggccagtctgtcttgaggtaaactacttttatgtttctctcattgttgtctagtccatttttaaaccactaatcatattaagccatttgatattttggtgacttgactattgacctttaatatttttatgggacacacaggcaacaactcatcatggactcatcaggaacagttgtttaatgatcctcaagcaggcagtgtgatgtcattgtctttgaagtaatattttctcctttttttaatagtagactgaacacttggctaaagtcagcctgtaaaagaagcctaaccagattttatttgtatttattcattagtcttcaccatggcttttaaattatttat

SEQ ID NO: 19745 - DNA, 1184 bp, Mus musculus
atgggaaaattcctttggaagttgacaggaaaccctgttcccatttgattatactcttgcagaatacttgtataatagattttaaggaaattcggaaacattttaatagtcactcaagtatgtcgcatagtgagagatgttagtttttaagtacttactagatttgtaaaatttgctatttgcagagagctttgttatcagtaaaagttaattttatcagggctggagatgtggcttggttggtagcctgcttgcctgacagccacagagatccaggttctgtgctagcagcaggtcttgggtatggcagtaactgtctgtaatagcagcactcagaatgtggaggcaggagaatcaaaagctaaaggtctgtcttagaacataatgaattcaaggctagcctaggctacaagaacaacaaccccagttagttttatctgtaggtactttgctatatgatttcttgtttagaatgctataatgccataatgccattttaaataacatttgctgtgtttctttgtagcattgggagtttgcccccaacagtgttcattacttattaactctgtggcagaggatggtagcatccgttccttttgtgaagtcagctgaaccccacttgttagacacttatgcacctgaaatcacaaaggcctttatcacgtcccgtttggaatctgttgccattgttgtgaggtattgaaatattaaatgttttatttttatctgtctcatcttgtaatttttaaagattttagtaaaatgttaaggttcactgttgctggtgtacagtttgtaagttctgacaattgtgtccagttgtgtagctaccaccgcactggtgatactgagtgtcatgagtataatccccaaacctagagacacttggtccctttttagttagcacacagctctggcaatgactcatctttttattttcctacaatttttgccaattctaggttattgtacagatgaagtctagtgcctttcatttggcatcatatgcctttggaatccttccatgttgtctccggggttccttcctttttattgcagagtaggatcctgtctgtgactgtatccgtgcacccacgtactgttgatgacatttaggctgttcactttgttagcaatgtgaataaactgttgacatcattgttgtgcacaattttatatga

SEQ ID NO: 19746 - DNA, 1144 bp, Mus musculus
gtggtagggttgggaacaacaaacgagctgttggcagcttgtgtgaggtctttctccccaccccatcactttgcccattatctcacagctgtttactggccactgtttcatgtcttgaaatgagtacattcattttatctgaagccctgtcaatgctgctgctttgcctgtgctgccttctagtctattcttcacttggcttaccctttaggtgtgaggcactcttcggttttgagctttttagcatatgtgtaccttctttcagacataactgttaactttgtaaaggagggactcttctcctttatgtgtagttgcgttgtgtaactcattttgtaagtaaataatttgggcagtagggaatgtgcttctcttgcacggtattaagtgagtggtattactgctcagtacctatgcattgcatggatgtatagaagcattatttctgtatctcttttatttgtgtttaattattattttccatttaagtcaaacgtctttctttttttcctctgaagagtttggctgagttggaagtgctgtgtactcatctctacgtagggaccgatctcactgaaagaatagaggctgagaaagcactcttggaactgattgacagcccagaatgtctcagcaagtgtcaacttttactagaacaaggaacagtaagtatgagatgggtggctgaccctgacaggccagtgttgatgatattagcggtggtttagctgcggtactcaaagcttttgccacatcttgttgttgttgttttctgtcagacgggttaagcaggaagaactggaaaagctggggagacatacaggaaacagccacaaagtagaaataggcatatggtgaaatagtttttttcgttcttcttggcctggttttatgtcacattttatatgttgattttagcagtgctgggaatgaaccaaggcctcttacatgctaggggagctctctactgccaagttacatccctagccctagcaattacatttcagaaataaaagaaaaaagaaaaagagaaaaaacaacctgagtatcagggtattcagaagagtgctcctgcttcttcataccttcattgtagatactcagagctgtccactcagcaaccagcagctactgaggagccaac

SEQ ID NO: 19747 - DNA, 1128 bp, Mus musculus
gtgagccatgatgtgactgctaggaattgaacctgggacctctggaagagcagtcagtgctcttaacctctgagccatccctccaaccccttctctaaggagtttttattccatgtgatggctcacaagagttacctgtctcctgctgggatacggtgaccagggtgaaatactgttggattgtgtactgagcaaggcgcaggttttcaagtccacgcaccgagtcattccctctcagccaggagaactccacatcattgccatcgtatccccctggcaaacaagagggagccctggtcagtgcaaggatgctgcagattgagctggtgtgggaaatgctacagtggagaccagcaagacttctctcctggtggcattaagtctagaggagcacaccatgcaaaaagttggccaggagcctcaagcactgaggggtgaaatcctttgctatgcccatttttcattggtgttgagaagtagttctattgtaagcattgctcaaacctggtggatgataaaaatggcttcgttcactactgaacgacacttacaaagcatatgatcacagggacccatgttagattctgcctgtcagggcagtctaagctttgataacgttgtctgggacttcagaagtggtctattcatatttcccattagtataaatgcaaaactaaaacagtctgttaccagccactttatatctgtcaatatttgcttttgaaaaatgttagctttactagtatctgttgatggtactgctaagttaccctttatgagcccttacacaacacatccctcatgatctcacaatcctgtaggatagacatctctgtgcttcttcagatttaagatggactttggtctttacatgtctgaaattgtaattgatcctactattagtttatgtgtgtgaagcagagcttgcaatgtctcctaaaaatatgcttattcactaactattgcaccttagacttgaggaatcattagcccactatatgggaaaactctcgggttctaaggggtttcttaactctctcaggatacagacaagcaagagacaaaactcagtgctgtgccttgctcaggaaagggtagtctcaaagctcatggatggtggtgtaatca

SEQ ID NO: 19748 - DNA, 1131 bp, Mus musculus
gtagttcagtctgatagtcacgttgtggttcagtctgatagtcacgttgtggttcagtctgatagtcacgttgtggttcagcttactgtttgggaggatttgggacgcccaaacaatcgtcacatggtccctcagtctgggaagtatggtgattatcgatgcatattagaaaaacctagagatcccacacaattccttaaaaccacgtaatggcatacactgggaaaatgtacaccccagttcacaaacaagccagggtaacacaatccccatgggctttgctggccagtagaagactccttggaattgtcctgcccctacctgggctccagccccagtatttctgcttctcgagttcctttagaaaaatgataaattgtgacgagtcttaatttgtgtaatcataaggtaagaaaacaacacttgcaggtttgtttggaagctacctaccacaaaggcagagtgggattatcaccttagctgttcctcctaccatcattttccaactagcttccctacttcctcagttgcacagtaaggaatagctggaggctacagtgaatttccattaggacaaggaaaagaaagcttccgaggcctcaggctgcctgaagggaacgaggcatatttagtaacaaatggaaagggggctaatgacgcccaggacttctgcatcagcttctatagggtcctagggttgatttggttttggtagaacaaaagtggttatgtggacaggcatagccattgaatgattcatctggagtcatagaccctctgaggataagtagcctgagagatctgttttcatcaagaagttttctataaaatagaaatactcatgattctatggttatgtatgtctgcgagaggatacactcctgggaatttgacagggaattagctcttggaggctcctaaaagttctgcagcgatgacgattgttcttattttaggctatgtagaccatgccgtgtagtctctatcccaaatgctcagttctgttataacagtgtgacatatgcaaatgactggtcacctctctctgcaatacaactgcatttccagcaatgggtgatgggccagatttggcagatgaattcagcttgctgatcatgacctacctacact

SEQ ID NO: 19749 - DNA, 1162 bp, Mus musculus
atggaggccttggagtagttagtagctattttagcttagtttcttctattgtaagtttacataattcttgtttttataataacaactcttaacaactacctcaaaaattcctgaacttataataattatgtcttgcaagcaagagcaaaggggccccaggatagcacacagtgaccacagaggcacatgttggtctttattaatggatgctagatgttctgtagatgcctatggtctaggcaggtctttgaaaagaatgctcacttcagcttggttcataatggacaacatattttagtatatagctaagcatccactgatagaaaaatatattaaatgctgtatattgaaattatgggataattgtattatagaacatatactacactatattataatgtaaaatataattcattatctagttctataggcatccaagaggatctatatcaaaaataaaattttggaaatggaagtgccagaaaaaaaaatatgttcagatgatccagatgaagttggtttaagaaacaaagggtggtgctcgcttcggcagcacatagactaaaattggaacgatacagagaagattagcatggctcctgcgcaaggatgacatgcaagttcgtgaagtgttccatatttttagcaccctcatagtagcagggggagagggaagggctggtggggttctggaggggaaaccgggaaaggggataacatttgcaatgtaaatacataaaaaatccaaaaagaaaggaagaaagaaggaaagaaagaaagaaagaaagaaagaaagaaagaaagaaagaaagaaagaaagaaagaaagaaagaaagggaagaaagggaagaaagggaagaaagggaagaaagaaagggtgtagggtaagggaagtgactcaatggttaccatgcaagcaggagtgtaggaggaatggcgggcctcattgagaaggaggtcatgacctctgtataaacattggtaaacagtgagtagggctgcaaagccacagaggcaacttccacatgagggccaagctgaagcctgcctgagagcctagagattgatgacacagaccatgacagccaatcaggaactgccacttggagaacatacttgcttgggaccaataggatgcaggctctccccaagaattaaaatg

SEQ ID NO: 19750 - DNA, 1165 bp, Mus musculus
tccaggtctatggtttgatggaaaaatgaaaaaaaagaaagttgattttcacattattttccagaaaagttggggcagccatacttctgggtatattttcacagtgacagcctacaagcttgggagccagaggtacagactgtggtagagactgtgacttgtggattatggacaatctctgcaagtgctacttactgaccgtgaacttgaaacccctccagcaatggatgatgggtgaactgtgctgcccaagggttctctgaatggaacagcacagtgtctgacaagcaggggattcatagccttgctgagaagacactagctttactggggaggctcccatgttacagcctccagtctccttccccatggctgggtttaatgcctacttatgcaatcaaacagtgcatgcagactggaataaactggaaaataggaaacacatgtcactgtgtgcacttaagccctgaagtagggatacatatttatgtatgtgcatgtgtataaacacacacacacacacacacacacacacacacacacacacacacacaccatgcatgtaaatgtgttttcaaagggcaagaacaatgggtttgggctgtgtggtggtcagtagagcagtggtccagtttgctttctccagggcacacctgtactttgtcctggtctcttcttgcagggcatggcctgtctttggttttcttatacacttagttagctgactttgctaaaagtaagacaggaaatgatcttgctttccactcctccgatctgcatctggatgggcccatgactggagataatgtgcagtctggttgcctaacagaactccatgagccatggatcctccaaagaccaccctggtttttaaaatcccccttcctgtgtgcattactaggtatccttgcggcctttaatccccagagtctaatggataactaaattctcagccgcttagagagatgtttgtatctaaatagctattcacaattccttctgtactttagtcatttcttacacttgacgttctcgccccaggacttcattgccccctgtcatcccacctttaccaagtacttcaggcacatgctgctcatttcaacatcagattctagtgggagcagactctgggggctgcagctgttggtggctttgatggtat

SEQ ID NO: 19751 - DNA, 1209 bp, Mus musculus
caatccacactcactctggggtggagagtggcgcaggcccaagagttatgttatcagtgttgggaaacacaaccagaacttgtcacgcaacaagacaaacccagagaagttctggatgatagagggcttattgatggctttcttagcccgtgtggtgaggttagctgaagtgagaatgtggtccttgtcacttccttgtgagctctaaaactgaaccagaaggtggaccatggctctcaacacccgagaaacacttctctaggctgaggtgaaaggagacctaagaggattctctgaaatgtgtccacaacccatggaagtcactgctagatctgtagcagctatagacggaggttccgagatgagagcctggggggactatgatgaaaaccaaggcaaagcaacaacaacaaacacacaaacagaaccagcacagccatgtggtgctaacagcccagaagcaccaggtgttcttaacatcttggcctgcagaatctcctcagtgctcgttgtcttttgtatggtggtttttctgttttgtttcattgaaaagaaagtgaggtcctagactgatgatttgctcaagctaatatgcacatgatggagctgggacgccaacatggttgactccttcattgcttgcatgctaggggcagaagatagggagagtgacagacgtgtggtacagttaccttaactctcttatgaaggctcaggatttggcttttttgtgtctccgtggccactgcataatgaatatgacatccggcagagacgtgttggttatctattaagcttacctgttgtctggcttgcagtaagacccaagcaagctccactttgtcccctcctttcttgccagcaatgataggacataagcccaggtgttcccttcagtgccataactgctctttgtcctgtgctgagctgtgctgagctgcgttgcaggtgagaggcttgaatccaacctcagctgctttcctgtacactcgatagcaggcagaaacagcccaagcaaaaccagacagagaagacctatccatgtcacacttgattgaaagggaattgaattctaccagttcagtctcctctactgaaccttcagctcaggagtgctgggcaagcctgggctcttgctacctctggactcgggagcaaaggcataaacatgtgaacaggccaccgtacagacttgccctctcccctccc

SEQ ID NO: 19752 - DNA, 1137 bp, Mus musculus
ctagtgatttttttttaaataaaagcccatggcatttaatgcataatgttgaattggagctcaggcccaacgttgcattttatatccaaagactgagatgtctgtaccattttgagcacttggtagtactactgagtctgtagagaaactgagtaccttctgggtacacggcctcagtgatggcaatgcctgcataatgttgcatctggtttgagaacattagtctccttttattaatcattgctcctgcctcattaaatctctggcttccacatgccagaaatggtgtgacaacccaggcctggaggactcctcccccccagacaaaggcatcatcgaatcgctggaaaggaggggacgcaaggcagataggcagagcaaactagtgcgtagcgggaaagcctcctgggaaccactaaaggcagaagaatcgccagtaaagatgggagagagttggcgagatggctctggcataagggcacttgccactaaacctgccctccacatgaacactgtgcaccccctgaaataaatgttcagaatttttcaaggagggaaaggtaaggacctgtgttgagagatcagatagcaaagatgggttgacaggtttggttcaaagggcattttgatgtcaaaagtctttaagcctgggagacagatttgcaaaagggggagagaggttaggggaaagtacatctggggtctcggctgctgcagtctggtatctaagggaggttagttaccagcttgcagaatagagggcaaagaggaggagctaatggcttaaggaagggcctgaaggaagccctgtgcagtttgggcctgttgacttggctgagccctcaggatagtaaggtagggaaaataatattgttcacctgtgcattgatatgaggtttattttttgttttgttttcatatttttctgatttacaaatcaatttgaaaccttcttaaagaatttaaggggctggcaaaaatgccagaattcatgtgccttgactctgtctggctgaggttggctcctcacagcaagaaccagaaaaagaaagcaaattgtgtgtgggcagtctggtatgactcccagctgctgaatcagagtttaggcctggagtcagggtcagggcggactgggac

SEQ ID NO: 19753 - DNA, 1148 bp, Mus musculus
ttgtcctttagatcttcaggtagagagacatgattgtgtatgtctcggcatgtgtacaattgtgagcctctacaggaagatatgtccacgtgacttagccttgcccatttccctggtgaattagaaaatggtcattgtcaaattctaggacaagtagggtatcactcagcactgacctctagccaccctcctaaaagctcacagttgccttcgtttcctgtctttgccattatcgctccatggaggcttctactggaatcaacatgggatggaatcccttaatatggaagttatagagtcccttgcctcttggctacaccatctcctcctcccctgtgtctctgcctcagcctctcccgttcataggcttctgctatcaagccattctcacacatggtccattcaccacttacatttgtgtgtttgtgtgacagtttatctgtgcttgaagagataggcaagatgtctgcttttgtgccctatatattctagagagatcaaataatgaaataattcaaatgataagcttaaaggtagatggtagggggatggggaatggagcaaggaaaggagttgaaacaagggtaaaaaatcaaagtgactatcagtaagattgttagagatgggaggtgtgccgtgcaaaggccctaagatgcgagtgtgtctggaataccaggaggccactgtgactgaagcacagaaagcaagggggaggtagtaggagatggggggagatggggggcccaccatgggcagtttaaggactttggttgcaccctggttggtatgggaagaaccacgcagctcacaaaagtggagtcctggtttgttcctccttctggtcttcatcagctcttctctgattctctgcgccagccccagaaggcacaggcttgtctgcaccactcgctgcaagcaagagggctctctgctatccacaccctgtgaggtcaccacacagtggctcccgcagctgcctcctcccagcaccagctaaggggcatcacgctgtagctgtgcacactgctatgccctggaatgggagaacatcttcttctggagagccctggcgcacctctccctctggcttcttccttgttcatctcctgttcctgcttttctttccttgtcctcttggccaagatcct

SEQ ID NO: 19754 - DNA, 1473 bp, Mus musculus
gccattcaggaagagctgatccagaaaccgcagtcattgtctgtcactgggaaccaaaggataaaagcctaattctacttgtgttcattttaaatgtcagaatggtgagctttgccgcatggaaagacctataatgggaagtatccctcactgattgatgtcctcttgtatgtatgatagccagcgttccatcttaaatgcaatacagcctcttgattgttgaacttttctcaatgattttctatttatttgatgcagccaacattgtagtactgtgtgctcagacacaaatcttaaaatctcagaaatgtttgtttatgcaaaataattgattctaaatgtttgtttgtttgttctaaatacttgtttgagtctgttatgtgtgtttagttactagtgagcaggaagcaacatactctcataatttattgtactggcaatcaaagatcattttctgtgacttagaaatgttaagacaatattaagtattaactgtgatagttttataacatatcctcagaaaagcatgtctatatgacctctgcccataagtataattttctctcagatgatgagttgaaatactgtctttaaacatgaacctgaatttttctattgaatccctgaagtttttgcgcatatttggtggcgctacactttctttatctcatgcattaatcagtatatgtgttaaaatgtttactgtttgtaaaattgagggcataatcacatactttggagtctatctaattaagtccttagactgttcaaatggaatatggttagagtgagtgacattctatgctctttctctaccatgtgtatctcaggcccaaatgtgcatttcttatcattagatctgaactcgggaagctgatgtgtaccttccataagcagtagtaatggacagaattagatgctatcaaaaagaatgttttaaagttaggtggctctgggcagcattactaaattacagatggatcaatgtttatggtttttggtcataaaagcatcacagaccaagaatttgtctttctgcttggaatttattcgtgggtttgaattcctgttttttataatgttaaaatgtaacattttggatgccattaatttggtaagttgaatctgtatgggaaatggacctatattaatttctgatatttctggaaataaccttaaagaggttagattgtttacattaaagagtatttcagtgtagtttctgagaccccagtgttcaaagtttccagcagactgtcaagaggttcttgataaagacaggtctctggagccaggtgtggtggcctatgcttttaatctctgcacttggcaggcagaggcaggcgaatctgagttcaagggcagcctggtctacagagtaagttccagaacagccagggctacacagggaaaccctgtttctggggtggtaaaaaaaaaacaaaaacaaaaaacaacacagatttctgtgta

SEQ ID NO: 19755 - DNA, 1146 bp, Mus musculus
ctatttcaaaaatactatatattgtcatcatgtcatctcttgtgtagtatatgggatttttctaataactgatactgataaaatgcttgtaacacatcctaatagttagcaatttccaaactaatgtatttcctttatggaagcaaaattaattccagggacttagtttctaaagtttctgagttttgtgcagtcaattttgaaagagtaccaagagacactttttatctcattgttattttttatacatacaaagagtctttctaaaaattctgataactttcaaatgctaagagcattgtcagccatggttttggtggtagtacatgcacacaaatctaaaacaccacctctcccccaaaaggttgccttttaactagacttctccagtcatctgtatacacacacaggcattgccttcctcggctcctctgaggaggtggaggaggagtggatttctcctgtggttaaagtctttgccaaggcaaggctagtaatatgcatgataattgaaagccagcccctcaagggattctcattatttgcaaatactggactcttccaaggctctaaatggatggcacccttgagtgcaggtgattgctgtgtgttaggcatccactcctaaaaataaagctgttttgtgggtgacattctcgagggagggaagttcatctggctatagtttctaaatatcctttatataactactttgttagaaacaaagttctttcttatttagtttatcatatcttcttttgttgagcactttatctttgttagtgttttgcatttttgaatataattcagaaattctaggttatgcaaagaatttataaagcataattaaaatgagtgtatattactttgcattcaacttcagttttgtggtgtgtgtaaacaaaataacagcaaaacgtttttaaaatactctgataactaaggtgattgcctctaaacgtctatgttgtcttttcccacccaagctcctatgttagagtgcacttcattgtgacagcaatgctggccagctagcttcatgtgtgtcaccagataatctcttgtttgatttttgctttttgagacagggtctctgtgtagttctggctgtcctataactttgttatgtagaccaggtgcctcaaa

SEQ ID NO: 19756 - DNA, 1312 bp, Mus musculus
cattggacacactgtgctgtcgtacatattcagtacatgtgacgttctgctttgaacagtgttttacagtgttctggtcattggcctagcttcttcacgtctctctttagttgttgaccaggacttcggtggccaccgtgagaatgacaccgttgccaggagccagagcaaacagttgctccattcctggcagggctcaagatgacttacacattgcagacctatcatgtgctagagctcatttttagtgcttcatagtgttttagtaattcattattagtacatgtggataagtacttacaaaaccaggaaaaaaagttattgtcattactgcctgtaatagctacgtgtgtaacctcaaaatcatatagggattgttattcttcatttgtacaagatgaaaattcagagatgttgaagtattagctatatttggaattttagtagcccctctctttgacctgtttttctaatcattgtgtggtcacaggagagggtgaacactttaaagctcttctgaaaggattgtatttgtctgacacacggttccagcaccatttacaaaatgaaaatgaaaatggaatcccctgcacataggttggatggattacagtcctacctaataaggcacagaagaccttaagatctctttgtgagctgactggagcagacctgggtctgacccagtgtctttctgaagtcagcgtgggctgatgctgaaatctgcagcttggggatctgactgaactcacaaactagtttgtcttccgaacaaaggcttactgcagctgctgttaattttatgtttaaaagacctggtaaagaatgtaacttccacagaaagcattttcatttttacataacattaccataagtgatgtaaaatagttttgagatctcaattgttttggttgtatgcttcaaaactgtcattgtgactgggtgtcatcaggatatcacagtggctcattcaatacttaattaaccctgcttctaagccatttgaaaattggccagttttttttctgaataaacccttagagtttccagcatttagaagaaaaataattttatgaaatctaacgctcatgctgtagtgtcccatttctgcctgtaatcgctggaccctgcagtgagtgaggttcaaacacttttgtctctttcacccactgtgttggagttaagtgaactccaggcatttaaactgaaatgaaaggtatgcttgttaattcttgagtcctgaagaaatcattcctaggtgttgctgttccagcttagggcttcctttcctcacacacgtcgctcagtgcaa

SEQ ID NO: 19757 - DNA, 1713 bp, Mus musculus
tgtatatgtatgtgtttcctgtattgatcatgctaatgggtcaagcatgattttgtctcctatgtcactcgctgcaaagatatttgactgtgtgtgtgtgtgtgtgtgtgtgtgtgtgtgtgtgttgttaaagatgggactatgtggataggaactcaaaatctcggacccaagctatgtttgtcttgagcctctcaagttgctgggactagaggcatgtatcaccatgttcagggttcatagatttcagatttcacagccagagttcaggcatgctaacagcatttaatagtggccagagctatcactaagtatcctacagtatatagtagaggtgtctctcagtggcagactgtgtgattgggatacatgatgccctgaccctgagcagggctttatcctgtccatacctatgtgttcagtgaggttgaaacacctgttttccatcacagggagaaaatggcatttttcacccggcctcggatgaacatcccagctctctctgcagatgacgtctaaccaccagaaaagtatttcctttgtctcgtgcgcgcgcgtgcagaccaagctgtgaaggctgactgtgactaatgttatttatgaggcattatatgaaggtactgagtcacaagtccccgagcgctcttgttggtttgaagacagattttttttttaaatttcaggttttcttgttattatttaaaaaaaaaaatgacaaagcaaccataacaacaaaaacaaaaaccaaacaaacaaaaaaaccagcattaaaatgacaagattgtatagtttgtatatttaggaatgtatttttgggaaagaatttaaatgaactaaagcagcattaagtggctgctagtcttaaaactgtctagagttttctttttgtacagcaacaactttcagaggtttccctgcaataataaaaaaaaaaaaagttgtatttgaggggcgacaatcctcaaaggaggtcccgcgggtggcacagcacagctagcctgccctggttaacgttattttgtacaataatacaaagacaaggatgtacagtaatcgtgggggaattcgaagactgtccgcggatctttgtgagctgtgatgtgtctttcatgtggccacgtgaccgtgaccggaagcaggtagcctggagctggctgaaccgcccggactggtgacaggccacgcccaggccacgcccatctcagatgcccagtgacgcagctgtgggagtgaggggagggctgcggagaaccgcatttggatctatctctaacaataaagtggccttttaagaaagagcttcttgtcatttgtccctttcacatcttcacttttattatgtccctgatttcactcagctccaaatcctggggggggaaattttgttttcctttttcttttatttttcgagttatacttatttgtccgttagataaaagtgactgctcagctctttgggaacctaaggtctggtggtgtatgtctgtgtttccagaacctgcaaggtggacgcaggagtttgagaccttctcagcagtatgaaaacctgtccttaaaaactgagcctggagagatggctcaggagttaaaggcactggctgctcttcctggagaacagtatttgattccaagcacccatatcgtggctcacagctatatgtaattccagtttccgggatctgagaccctttctggtctctgtgcataccaagt

SEQ ID NO: 19758 - DNA, 1206 bp, Mus musculus
aggcttagggcattttcccataactaataagtggtccaactagtgatagcagtagctagaaacctttaatgagggctaaatatgggccaaatactatgctttatgagtatgcatgtctgcgtgcatgagtgtttttcaaaaccttcagccaccaactcaggaaggagatcataaaattcccttcagagatgtgagcgccccacccagggtcttagagcttgaggtaagacactgttgcctagcatgggattcagtctctcctgcattcttgaccaggctgaaacctgaacgagaggaaagcggtaactgtcaaactctgctgtgaggatgtcctggaggctggtccttcatgtccttaggaaaacaacttgttccccagttcccccaacagtttttcatctctcataccttctcaactcccaggatcgccaacctcaagatccagctggccaaacttgacagtgaggcctggcctggggtgctagactcagagagggaccgactgatcctcatcaatgagaaggaggaacttctgaaggaaatgcgcttcatcagcccccggaaatggacccagggagaggtggagcaactggagatggcccggaggcgacttgagaaggacttacaggcagcccgggacacccagagcaaggcgctgactgagaggtaggtctaggattaagagataagtccccatgggcccaggaaaagtccccatgggcccaggaaaagggagaacatgccagtctgacctgtgagcccagcaggagccaagagtgaggggtcgcctggtgagcgcactcaggtagagatgtcacagctttccagagtggcacattagaaaagatgacatgtccctgaacaccaggaccctggtacttcacacaggaagcacggtgccggaaagtgtgcaggtgcagactctcagaaggatgtctgctcatgcaaggaagccccatagcactttatcgcttggggttttcccgtgttgtaatgatgactctccatcacttacatgagcaacaggtttcacacagtgagcatctctgctttacacacttgcttgtacccaacatcactggggaaagcttcaccctgctcccagacacacacacattgaaaattactgtgtctgtggggagcagagggtcctttgatgcttcctttcttttgttaaatcgtcagaactccggaccatatccttaa

SEQ ID NO: 19759 - DNA, 1189 bp, Mus musculus
tggttcacctacagcatgagctgcagttcaaggagcgtggctttcagacgctgaagaagtaagtctgcccctcccttctcaagacgcctctctcacaattctatttaaatgtttttccaccggcatttacgaaagatgtcatcaccccagggtggaggtaaactgagttatttcaaaccacggagctctttccccagtcttggaagcaagtgttaatcatttctgtgcttgtctcggctctgctaattaactactagactgtcagacgcagaccaagcaaaccctttagtcccacggtccctaaactaagccgctacttcacctagtacccactgaggaaatagcagtctcttttagcagtggaaacattcctagggagtctgtgtgcacggtcccctggggggtggcataaggagattatacactgaatagacagatgtcgttttcatttatagaaatgggcttacggctaagtcaggaatacggctgtttcctgtattctgtattaactgctgtgatcttggtgatggccacgaaaatttgtaaagcctttgctgtgtgccaggaaacacctttaggtgatcctgcgggaggatgtccatctgatctttgtggtaatcccaaaggagtgttttgtctaatattttttttagctataaccacattatatagatgagaaaactgagtcatatactaaatgcttagtaaatatcagcctataattatagcttttatatctttttttaatatgtcttatatgcgtgtaatgtatatatgtcaaatcatatgaaatcaaattctaacttcattccagccaggggttgtactttatgtcccttgttaattttttagtgaacaccagagacaattcagggcaatagggtgaatgcagacattcccaactttgacctatgaagacccagtgtctgtgtgtcactccagaagcttcgaggcatagtttaaggctgttcattgccccgcatcaggagctctacatcagattcttcccactgtcctcagatcctcaacaaatctgtttgaccccattgtcactgtgtagcagcattggaaattcttttcctttggtgagctgacaaccaaaccctaaagacaacccttcccacgttttcctcgcagtttgatagctggccagatgagactcctttgcagcctggttgcccacagtcct

SEQ ID NO: 19760 - DNA, 1123 bp, Mus musculus
ttttatacaaatatatcactgcctgaattttagaaattatgtttatgataaattaatatgggaggaattattggtcaaggttattaatgttttatgcctctgtttctaatttatattcttatgctattatattttatattgctaacagagtacaggatgcccattcatgttttttgaaactgatgagtgcttgtctttccttttacactgagccatagcagatggccttaaacctctattatgcccttaacctattccttcttttggttcttctcagacagagcttggtgttcagtttgaaaactgatcttaagttgtttttttggttgtgtgacaaatcctggtggaattgctttgccatgtagtgagtttaacccatttatatttattggctataatatactcatcaagataaactcatcaatataaaatgacgagtctctgtacatcatgattttgttgtccagtggtgagttctttaggccaccaacacagtaggtccttgtatggctgacacattgctttgggatctttttcagaaaccactcagatcgaggatccaagggtgcaatggcggcgggaacaggagcacatgctgaaggattacctggtggtggctcaggaagctctgagtgcacaaaaggagatctaccaggtgaagcagcagcgcctggagctggcacagcaggagtatcagcagttgcatgccgtctgggagcataagctgggctcccaggttagctgtgagtaccttccattgctggggccattgccagcatccctgactagcacagcagggactatccacactgagtactgtcaatagcttctgtacttaaatctgtctcctatccattccttcttttgttctctagatgtgtgcatatgcattatatgcacatgtatgtgctgatgctggcccccatgcatcagtgtggaggccagcaggactgggtattctgctctatcactcatttctttattaagacaggatccccaactggagtcaggctgtgatctttctatcttcctcttcttcactgtctccccccccccccccccccccgttgctgtagttacaggcacactcagctgtgcttggatttttacatgaatgctgcga

SEQ ID NO: 19761 - DNA, 1337 bp, Mus musculus
ccatctacatggtggcaggtgacgcccactggctggcttctgataatctgcaggtgcacactgtgtgctgccttaatggcagcatgcctcttttttttatagctctgataataaccagttttctggcactagaagaaaactgaaataaagttattaagctttcaagatgctgcttcctttactcatgctctgttttgtttttctttaaagattactgacagtcctgtcataggagcacagcgccccaaaaatgctcagctcgattgctccaaattggagacgttgggcattggccagaggacaccatttcgaactggaatcaaagaatctctctggcctttcctcatcgacaagagatggagacagactgtctttcattagctcatgtgttgtgtatttttttaaatgaaaagtatagtatgtggcactttttcaagaataaaggaaatagttttgtatgagtactccttaattgtgacacatgatccttcaggtaaacaatgctgttgcactaggggaatgttggaccggctgagagcggtcatgactttctgtggattgttttgttttgtctggcttacctcgctatacaagtaatgtaaattatgatctgtaatgtccgagggcgggatgaaacagactgttagactttggatgaaatgcattgttcattcctacagcttcctttcttgctgttgttttgtttgttggctcttgtatattgatagcttcagtgtgtgtagaatctcatgataatcatcggtgttcattacttgctttgcttgagcccagatcaaaatgcttggagaaaagaaaactttatttttgcaactgtaagtatggtttttaaacgcttgattctttaatgtgttatgtatatcagaacctgtatagcctgatgcctacttcatagcactgtgtggcaaacacttgagagagtgcacgtgtgtgtatttttttaatataaatacatatatatgtctctttccttctatcttactaagtgatgtttcatacatgtggttataataatgagccttgtaagtcttttgaccacttctaaataataataaatacttgctagcatgtaacactttggctttattttgtatttgcttcctttttaacataaggactactggatatggtagtacgtgtcttcagtcccaccagaagcaggtagacctctgcctttgagtccagcctggtttaaatatcaactatcaggccagacagggctacctactgggatcttgtttcaagaaaataagtaaatgtgagggctaactgtcaaccaatcactctccaggtttagtttgtagattacatacttgtaa

SEQ ID NO: 19762 - DNA, 2281 bp, Mus musculus
cggaagagcagtcaggtgctcttacccactgagccatctcaccagcccgagaggcttttttcttaacagaaactttgtatattgagtcctaactgtttgaaataccaaatatatattatatgtatatatgtactgtactatatgtgtgtaatatatatgtatattatactatgatatattatacatataattatggtacttctatagtaccatatctaaaactagattagttttagtttataatggcttaggaatttggtttggtttgattttcaaggatttatttccaggcccatgaacatactaggcaagttgtacctgagctacatcgatagcctggctcatctgttagtagttttaatataaaagacttaaagctccttgtcatactctttttcaggcaacccaaactgctgctgagttcagatgcaacttcaagaatcatggaagtatacgtctgaaatacttgttgaagattattttcttcattgttcttgatattatgtttatagtatatattatataatgtatttaatttctactgcctagtcttaggtatatgaaacggtaattcagcatttgttctctgtcttagtcagggtttctgttcctgcataaacatcagaccaagaaacaagctggggaggaaagggtttattcagcttacacttccatactgctgttcatcaccaaaggaagtcaggactggaactcaagcaggtcaggaagtaggagctgatgcagaggccatggagggacattccttactggcttgcttcccctggcttgctcagcttgctttcttacagaacccaagtctaccagcctagagacagcaccaaccacaaggggccctcccacccttgatcaataattgagaaaaatgccttacagttggatctcatgaaggcattttctcacctgaagctcctttctctgtgataactccaggtggtgtcaagttgacacacaaacacattactattaagcctcaacccttactttcttattaatccccatgatcaaaataactttaaaagtcccacagtctttgaaaattcttaaaatttcaatccctttaaaatatccaatctcttttaaaattcaaagtctttttacaattaaaaagtctcttaactgtggtctccactaaaatactttcttccttcaagagggaaaaatatcagggcacagtcacaaacaattaaaagcaaaatcaaactacaacctcaaacgtctgggaccctccaagggcttgggtcacttctctagctctgccctttgtagcacacaacttgtcttctaggctccagatgcctgtactccactgctgctgctgttcttggtagtcatttatggtactggcatctccaaaacactgttgtctttgctgtaactaggcttcaccaatagcctctcataggctctcttcatggtgccaagcctcaaatcctttgcatgaccccttcagtcctgggccatcaactgctactgaggctgcacctttaccagtggccttccatggcctctcacatgccaagcctcagctgctctttatgtcttcaaaaccagtatgactcttaaacataaccaagtccagctgcagctaaggtagaaccttgtctatctctggaacacagcctctttgtgctctcagaaaacacttccctcctatgactaggcaggccttttactcagatctccttgcttatgtctcccaattactaggatttaaggcaagcatcacatggccaggctctcaagcaaatctgaaaaactttacatgtatgatttttagagaatttatcatctgcatatcctctgaatgtgtgtgtaatataaaataaagtaatataaaaactcatacacccaatcagtgattaatttttatttaatgaatttcaatattgcttctggttaagatttaattgtgtctatctttcctcctaattttcccccagaataataaatgatacctttcccaatatatgccaggggtagtgtaacacaccttttatcctagcattctggaggtagaggcagacggataagatcggactacatagcaagtcccaggccagccaagactattgtaggcccttttttctaaacctacgttaatacgtgtactaaaatgctttaaactcctttctagccttccactcatcataaaaggtcaaaggaggatgtggccctgttcagaaacaattctttggtgaatccaatctgctttgtcaggatatcagcagttcagctcacagaatcagcagcagtagtttga

SEQ ID NO: 19763 - DNA, 1503 bp, Mus musculus
tcaagtttgacattgtttcttattttttgacttttttgtttttgttttttgtcaattatgaattcaacttatccttgtaagttttaatattttatgtctttcagaatcctggttttgactttagtggagcagaaatctcagggaactacacgaagggcggaccagatttctcaaaccttgagaaatgactgctattgcttagtgtttctctgtctcgtggatcccggcaggtgctggcaacttaatgcagttgatgaggagaaggatggagcagccagtgtctacagttaaagattgccaagtgtatttcaatatggttgtaaagatcacattcagatatggtttgcacaggaggcagagcagctctaatgtggatagatgataacttttactgctctgcagtaagttttataggctacattttcctaatttcatatttaattgtatttttactacaaaaaacattggagtacaaatcatatgaaatgaaaaaggtgccttcatggaaaaatattttttttgtatgtgtgtgatataaaaataatgttgagtaaatttctgagtaagagttgtataccctttgtctaaatatgcttgtctgttcacggaaaggacagaactggaaattttaagaaaggaaaaaaagtacactgaagtactttggataacttgagttaatgaaaagttctaactggtttggtgctgcctaagtgattatgtcaagaaattgaaaaatgataaacccctaacaacggaagagttaattgcctcttaatgtcagacaacagttgaggcccctgagtataagtcagtggcttcatttcattttaaacattcagacaaggtggtctagaaaaaaagtcttgcatcctctgtgttttttaattcttaaaaaaaaaaaaattgaaatgtgtgaaaagcttatgagtaaaatattaacagattgaaaatcttacacttttttctaataaattgacatgttgtcacctcaatattttactttttcttttcttcaaaaaagtattttctctcaacaatgtaaccattaaagttagaaaatcaacatggacatggtactactgtttaggcctcagacctatgccatctgtgttggcctaatacctacagtgtacttaaaataagaaagtcctgtattcagggtgtgctgctccagcagaggtccggagttcacgtcagcctggaacaagttccctcgttttccttggctttactgcttacatctgttctcatgatagtaccttgctggcatgtggcatctaactcacggtgacattctggccttagttcccagaccctatgattgatagtagtctcctgtgcttggcttagcttttggacttgaaaatgatggaagttttgtctgttgactgttcaggatgaggtctgttgtctacaatattcctgcatccggtaccctgtcatgaattaagaatgtcaccctattgctgatgctgacagcgttgccttggtcagggagtaaga

SEQ ID NO: 19764 - DNA, 3279 bp, Mus musculus
taaggcaaaggtacatattttatatgattaatcctaattacagaaacctatttttgtcattgacatttactttatatttatccttttcagccttctgtgctggcgctatctatccttgcgttggagatccaagcactgaaatacgtagagttaacagaaggagtagaatgtattcagaaacattccaaggtatgccaaggttatagcactggtcctattagcaagctacaagagaaatgtatccactgtacgtgctaaagtagaacaagacgctgtgtattgatctgaagcttacatggttctcccttagttccctttggatgatgtggatattaatgagaatatattactataaatacagtggggcttttttttttaatttatgtacagataagtggccgagatttgaccttctggcaagagcttgtttccaagtgtttaactgaatattcatcaaacaagtgctccaaacctaacggtcagaagttgaaatggattgtgtctggacgcactgcacggcaactgaagcacagttattatagaataactcacctcccaacgattcctgagaccatttgttagttgataaatctggttgttattctctgtatacagaaaattttccagtatgatcattttctgctacaactgaagaattgaaatactatcttcaatataaagaatatgggatgaaaacataaaggaaaagtgaattgttgactggtctagatagagaatactggaaggcattcactgtgtacagtgcgtagcagttttaagagaaaagacatatcaaacccctagatatacgctaatacttttcatcaaaagattagcgtagtagcaaagagaatactttaaactcgaattttaaaagtagttactgaaatagcacttctttaaattacgtaccaccccactgtagcttatttaaagttgcataagcccatgcagaacaacaagcaatgtgacccatatatgaacaaattttaatctgcccatcgactatgaaaatgaagtacaaacctgggtgatggacttacaaagtaatatagggcatgcccatgttaggtttctggaaactgccagagtgtcttaattctatagctagtattttacctctatagcatttggactaatacaaagtaattatatgcatgaaaatataaaattggtctctgatacatacacatttttgacatctaaatttcttaatcatagcaaagatttatctttttatgattaaaaacaattttttccttaatgcatggcagcacatgcctttaatcccagcactagagaggcagagacaggtagatctctgagttcaaagccaggctggtctacacagtgagttccaagacagctagagaccttgtctcaaaaacactcaaaacaaccaaacaccaggggtaaatgttgctgggaagtcagggaagatggtttagaagggaagcctgacaacctgacttcattcttcaggacccacatgatggaaggagagaacgaagaactcccaagttctctcacatatgcacatacctcaccaccccccgcaggaaatacatgatcatgcgtctgagatatcaccagttcacctttagcagctcgcagtttgtaggcagatttctgttaagttgggtctgtgttgtttgcctatgtagcaggattacagcagcagcaaaaacggtccctcaagtctttctgccactctgacctgagtttcctacggtacaggatttactctgagaaacctcagcaccttgccacagtagccttggcagaatggcctcacggttagggaaactcctgattctaagcttgggagagctacgcttagatttgaattcacccaggaagcattcaaatcaaggctaaagacataaatgtgaaataaaactgtgaaccttcattctaaagttcatctgacttcccagatttgatcaatatattcttaggtggtattaaaaatggtaaactgcttaatttaaatctcaaaatttaaattatgaggtttacataaaaaccaacatttcatgaatgcacttttaaggtattaaaaggggtacttaagcggtaaatggtttcttggcacccataaccaagtaatagttaatttacaggtgggatttttttttattgctatgagaattacatttaaaattgtgggtgttttatataaagcagatatcacaagttttgaaaatttgttacctttaatatttcttctagagaataggtgtttgtatccataataaaagaaaaatttgtcagaactgctgcttcaatctaatcccatttgagagaattgtctttactgtcttaataactggatgaattatcactctgaaaatgtatttattgcactaaagttagtttaggcttgataaaacactccagacatttttactacagactgtttctataaaactgccattgcttctaatggagaattttattttaaaagaaataaaattgctgagtttatctgcaaaacctttctctaagtcttatgggacgtaaggagacacctccataattataagagccgttgtgctcagagtctccatgctggcttgaatgtatgatccacactgttaaaacataggcagcagctcagggccctggacagcctgagtcaacctagagtagctggaaccattttgacatgtaatggataagaaaattatccattgagaagctgaacaataaaccaaagaacgggtgtattttatccttaacctctgtaaaccacgttacactgagaacacttcagttcttcctaaaggttgataggcttcagtctgaaaacaatattgatttggagtggacagaagttaactaaccaactaccattatgttttgaatacacctttcaataaaatgattgaaatgcaaccttccttgttttggtttcttttgtggtttaagtattttagcagtattataaaataagctttctttatattgtatattaatcttactaaagtcagatacacagaagcagaaacaaaatctcttagtagtgcagttatcaagctgggaatggtgctacacagttttaattccaactgggaaccagcccggtcctcataggaagctccaggccagccaagcctacatggtgagaccctatctcaaaaaatatagtaaccagcaccagttactttaatttaaaaaacaaaacaaacaaacaaacaaaaacccataggttaagtgtattggttgaatggacctcaaacaatgtattttgtatgcattattgtgaatcaggttttt

SEQ ID NO: 19765 - DNA, 1214 bp, Mus musculus
agaggaggactccatgatcaggaaagtaggatattgaatgggcccaagtcaacagggatggggcagaatcagaatctcaggagtacaatgaatggccagagtggtcagggcctaggaagtatagtgaagtagtgatcatgatatgttaatgaaaatgataatgataacatatattagaggacccattgactattacaggttttcttttcctgcttctatgagggtgctcccacatctccaccaaaatcttttatacctatgttctgcagtctgtcaggttgtaatgctaagtctatccttagttttgtgattccttattatcctcatttttccttgactgtgtaacaacctgaacacattacttttacctacttgtcatttgcatgcaataaacctgcctgctcttcccctgccaggccctaggctcaccccagcagccccctcacttcctcagctggcccagaggaaggacctcacagggtctaggtggcaggggaggaggccctaacccactgcctctgggccctacgtgaatggcagaagccactgtgatgtccgagtaactgtgtcattgtcgtgtgatgctgtgagtgtgtgtgtgtgcagcccccaataaacctgtggtccttcctgaaaaaaaaaaagatggaggatataagggcttaaatacgtatagaatattgagtttaaggttgagggtaagaccttatatttatccctgtaatcacctgtgtcaaatatttatatattcgaaaatcatttattctgcatacactgatgtaatgattatctttaattatcaacttgacacagcctagaatccctagggatgaaactccttgtaactcagtccctggacatgtctgtggggaaatgtattgattgtcctaaagttgtggaaagaataagcctgctgtggatggcaccatttcttaggcatggagtcctgacctgtttgagttgagaattaaacccaagaagaagaagaagcaaacaagcaacaaaataaattattttgtttgcatttatttttctctgctcttgactacatatggggtgtgactagtttatctcaagctactggagtaattgattgtgattgtactgtaaaataaattgcttctcccctgaattgctttgtttcaaagtgtttgaccatagaaatagaaaaaaaattgagctacgttcctgaaatgacttaatgaagaaaacac

SEQ ID NO: 19766 - DNA, 2200 bp, Mus musculus
ctcacagggttggtggagttccttatgttctcttatcagcctacttgagacgactgtcaacagcggttgcagatgttcttaacaactgaagagcgagagagaattctgttaaaagctagaaatatagcccggaagccaacggcggtctacacaactacaaaatgagatcgacatgggattccctttgactcgccccagttgaaactgcaacatggctaaaggtagggagagcttaaaaatctatcgccaggctccgatctccaaggtgcctcaaaacgggcccactaatttggctaaggtaagaggtaatgcaggggccaattgaacctccctcaatgttccttaaaaggcttataaaagccttcaggcggttcactccctttgatcttacccagaagatcagtggccatggcctttcataaggcagtcagctcctgatatcagaaagaaacttcagagattaaaaggtgtattacaaaaaggagacagttatgcgatctagtaaaagaggcagagaaagtgtgtgtaaaaaagaggcgggaggcaaaagaaaaaaaaaacaggagggatcgtagacaagaaagaaatttgccacagtggtaagaaaaaaagaaaagaacggatctagacaggaaacctgggcaactgaagacggagcctcagctaaagaggctcagctgtgtcagactgaagtgacttatttgggatacacccttcgaggtgaaaagcagtggctaaaagaagccagaaaaagactgtaactcagatccccaacccaactacaccaaggcaagtaagagaattcttgagtactgctggccttctacagactctagatacctgggttggcgaccttagctgcccagttgtaccccctaaccaaagaaggggaggtgtctgtgtggaccccagatcaccagaaagcctttaaagagattaaaaaggccctactgatggccagcctatgcctgacctaaccaagcctttcactctttatgtgaaagagagagcaggggtcaccagaggagtccttactcagactttgggactttgaaaaaggccagtgacttacctatccaagaagttacaccctgttgccagtgggtggttttcttgcctgaaagctattgctgccataatctgcttgtcaaggatgctgataagctcactctgggacagcaaatatctgtagtgacatcccacattcttgaaagcattaccaacgctcctgtgacacatcagagctttttgttgtctaaatgagtgaccttcacttcattctacctgctgtcccactgtgtgagactgcacctactcatcattgcgctgacattctggcagaagaaatgatctgaattatcagatcagccttggcctgagggtacgagctggtacactgatgacagtagcctcgaggttaaaggtaagcaaaaggcggggacagcagtatggtggtgaacagaaagcaagtgatctaggccagcagccttcctgagggacgtcggcccagaaagctgaacttgcgactttaagacaagctctataaatggcaaaaaaaaagtctacactgacaacaggtatgcttttgccactgtacgggacaatatacaaagagggctgttgacatctgcagaaaaagacctaagatgctgtggctaaaaaaaaatcagatggcagatctaaccgtcaagcaggtggctcaaagaacaatgatcctggcagtcaagaagtctaaagattattatgacatcagagagaccagctttagatacaccgctgaacactatcaagctatagacagtatttggcttggcctgggggccaagaaattcaaaggtgtggttaggtcctgtgactactatgttacaggactctctgacttggcagaaaaaatagtcaaaagcttcaaggcctgtgctataatgaggtagaatttctaaaagaaatcttcccaaggtaatagacctgcctttgttgcccaggtaaatcagagactggccaagatattagagattggttaaaagttacattgtgcatgcaggccccaaagctcaggacaggtaaaaaaaattaatagaaccattaagggatccttaccaaattgacagcggagactggcgctatgattagatagctctcctaccctttatgctcttcagggataaaaacacccctggacagtttagactgacccccctat

SEQ ID NO: 19767 - DNA, 1972 bp, Mus musculus
gtgtaaagaaagcatctccaataaatggtgctggcctggctggtggtctgtatgtggaataatgaaaatacatacacatttatcaccttccacaaagctcaagtcatagaaaaaggacctcaacataaaacaagatacactggatctatgggaaaaagcctcaaactcgttggcacaggggtaaattttctaaacagaacaccaatgagtcaggctctaagattaacaattggtgattgggacctcatgaaagtgagaagaagcttctagaaggcaaaaggcatcatcaataggacaaatgcacaacctataagctgcaaaaaaaaaaaaaaaaaaaaaaaaaaaaaaaaaagccctcactcgccacagacggcctgcctcgccttgtgctctcctgccgccgccccgcagaaatgcttcgactacccacagtccttcgccagatgagaccagtgtcccgggcactggctcctcatctcactcgggcctatgccaaagatgtaaaatttggtgcggatgctcgagccttaatgcttcaagctgtagaccttttagccgatgctgtagctgttacaatggggccaaagggaagaactgtgattattgaacagagttggggaagtcccaaagtaacaaaagatggtgtcactgttgcaaagtcaattgatttaaaggataaatacaaaaatattggagctaaacttgttcaggatgttgccaataacacaaacgaagaggctggggatggcaccaccacttccactgttctggcacgatctattgccaaggagggctttgagaagatcagcaaaggggctaatccagtggaaatccggagaggtgtgatgttggctgtggatgctgtaattgctgaacttaagaaacagtctaaacctgtgacaacccctgaagaaattgctcaggttgctacaatttctgcaaatggagacaaagacattgggaacatcatttctgatgcaatgaaaaaggttggaagaaagggtgtcatcacagtgaaggatggaaaaaccctgaatgatgagctagaaattattgaaggcatgaagtttgatagaggatatatttccccgtattttattaacacatcaaaaggtcaaaagtgtgaattccaagatgcctatgtcttgttgagtgaaaagaaaatttccagtgttcagtccattgtccctactcttgaaattgctaatgctcatcggaagccattggtcataatcgccgaagacgttgacggagaagctctaagcacgatggttttgaacaggctaaaagttggtcttcaggttgtggcagtcaaagctccaggatttggggacaataggaagaaccagcttaaagatatggctattgctactggtggtgcggtgtttggagaagaggggttgaatctaaatcttgaagatgttcaagctcatgacttaggaaaagttggggaggtcattgtcaccaaagatgatgccatgcttttgaaaggaaaaggtgacaaagctcacattgaaaaacgtattcaagaaatcactgagcagctagacatcacaactagtgaatatgaaaaggaaaagctgaatgagcgacttgctaaactttcagatggagtagctgtgttgaaggttggaggaacaagtgatgttgaagtgaatgaaaaaaaagacagagttactgacgctctcaatgctacaagagcagctgttgaagaaggcattgttctaggagggggctgcgctctgcttcggtgcatcccagccttggattcattaaagcctgctaatgaagaccagaaaataggtatagaaattattaaaagagcacttaaaattcctgcaatgacgattgctaagaatgcaggtgttgaaggatctttgatagttgagaaaattctgcagagttcctcagaagttggttatgacgccaggcttggagattttgtgaacatggtggaaaaagggatcattga

SEQ ID NO: 19768 - DNA, 1147 bp, Mus musculus
aggggtgtgtgctttgggcttcccaaaaggttacctgtcagttgttaaaagaggaagagcctagagttaatgaacccttttttaactgttattaagaactgctggaaatagtttctcggaggatcactctttaataaggaggtaccttttgctaattttacttatagcttaaagaaatattggagacgggataggtcccctgtcttttgaacatttactacccaagtggtgggtttacaaaggaatgttcgcatgactttttctttggcagtgatagagattgagtctcaaaagatttccgagacgatgtttacagttaaatttgttttgactagaaggttgagttcacctacaaacctctgtcttatccagtatattttcaccttttgatttaaaatgttctgggcactgctttaaacaggtaaagaaggtaatctgctttcagtctagagttaacctttttattctcttcttttgcagataggaagtgcagagactcccattcatggctctccattctgtttcctgcaacagcacacacactctggtgtctcacctgtttggaaatggctctgtgtgtttgatgtgtttatgtatttctcttctcttcttttttctctgtactggagattgagcctagagcctctgcatgctaggcaagcatcctgccatctagctacacacccccagcttcctccagagtttctttgacttttgagacatggtgtgggttagttaagttgtccatgcttgccttgagcttgcaatcctcttgcctcagcctctcccaagtactgatatgataagcattcccatcatatccatatcccggcttatgctttactctcaaattccttgacctcctgtaaagttacaggaatttgttcctacctggaaacagctacttaaaatttgcattggaatatggcagggggtggggtggggagtgttatgttggacaactcttcagttgctcagtgtactttgttagtcttcagagtccttgcttttacttattcatttatttgttgactgtctttgggttagtgctttcattagtagctttcattttcataattagaaagctgaatatagattgctttctactcatgtttttaatagcaagagagacactctaatgtgtatg

SEQ ID NO: 19769 - DNA, 1845 bp, Mus musculus
gtattatgtatgaccagaggaaaatgatgacgtctaatatatgggtgcatttactggaaaatgtgcatggttcagtgagtttaataccacatggcatctcatattaatctgtctgataacagatccattttaaataaagccactctggtattgcctagagtaaccatttatttcggttatttctagtttctctctaaatgtagaatcaaaagaagtggagaattttgttactttggagacagcagtagtttattttagattcgtgtatagatgcgtatgaagttgtttacgtttaagaagttgagttacagatatcaactcactagctttcttttgttcttccatttccttcaaaggtttgggccccatgggatccctgtgacagtatttcccaaaagggaatataaggacaaaccggacgccatgcagctccaaagtaccacattccaagaagggatagaagtcaagcaggaagtgaacggtgctgttcccgatgacctctctccagtccctcctcctgagcgcctgtgggcttccaagccacctcctctcttccatgaaggagcaccttaccctccccccttgtttatcagggacacatataaccaatcaatacctcagccgccgcctcggaaaattaagcgacccaaacgaaaaatgtacagggaagaacccacttcaataatgaatgcgattaagctacggcccaggcaagtcctgtgtgataagtgtaaaaacagtgttgttgctgaaaagaaggaaattaggaaaggtagcagtgactcttctaggtatgaagataaaaaacggagaaatgacagtgtagctactgtgaacaaaaaactgaaaactgaccataaagtggatgggaaaaaccaaaacgaaagccagagaaggaacactgtggtgagggtttccagtatcgctcacagcaggggcagagtagtcaaggtttctgctcaggcaaatacatcaaaagctcagttaaataccaagaaagtgctccaaagcaagaacatggatcacgcaaaagctcgggaagtattgaaaattgccaaagaaaaggcacagaagaagcaaagtgaaacctccacttccaaaaccgcccatgcgaaagtccacttcacacgtcggtatcagagtcccagctcaggttctctcccaccccgagtgcggttaaaaccacaaaggtacaggaacgaagaaaatgactcttctctgaagacgggactggagaaaattcggagtggcaagctggcgcctaagccgcagtctcgatgcacctccacccgctcagcaggtgaggccccttcagaaaaaccgagtccctcagaaggcccggaagagtccgccggtgaggttcaggacacaagcagagtgcgtgtgcctggtgagcaggaggaactgcggatgttgggcaaaaagggcagcaaaagcagtatctctgtttacctgaccctaaatcaggagacatctgactcttccagtgcctcagtgtgtagcattgatagcatggatgatttgaaatcctccaactctgagtgtagctcttctgagagcttcgtttttcctcccggctgtatgcacgcaccttctgcctcttccacttctacttccttctcttcaaaggaagagaatagcctccgtaattctttgaaaatgaaaatcttttcaaaaaatgtctctaaatgtatcacaccagatggcaggaccatatgtgtaggggacattgtttgggccaagatatatggcttcccttggtggccagcccgtattcttaccatcactgtaagccggaaagataacggccttttagcccggcaggaggcccgtatctcatggttt

SEQ ID NO: 19770 - DNA, 1873 bp, Mus musculus
tagtttggacaggcctaccaggcatgggatggtgcagagacgaggaattgtttgcatacctaacctttgtgctttctccaaggatgatgtttagcagttcagaagtgagcagaggtgtgtttaaaatggcgctccagtgacacagcagtggccacatgtgctaaggccagtgcttccttcagggtgccagtagacacaagaggaaggtgatctgacatcctgctgagaggatggctaagtgccccgcccacccacaagtacaatgtggatcttttaataaaacagggctgtattatcttgaatatatgtttgcttgttagaacatattaagatgtatttatttgccactagtatttaacattttgtgcacattttcataactacattcgtaccttttcatattttgactcccaagtggataggctagtgttgaacttggaatgaaatcatatactcccaagaactagctcatgattctgagctggacaggcttttattattgcctctccctgactgagtggtgctgttcagaaaaggtgacagcatcattgttgatctgggcctctttccacggccaggagcccctccttctcagtgcaggagattctcacagggttagggagcacttggccctggggaacagtggcaaaaccatccaggaaaacagcctaaacttttggtgcatggaacatgaattcttaacagagatttcagatttccttgtctttgctaaatacatagtatgaaaccccttaatttttcttgtttaatgaatggagaacacatgagaaaatcagatggacctgttagtactacatttttaaagcattttatatttgatggtgccgtaattttaataataaaactgaagatttttagtggcgatactgatttattttttaaaccagaaagataacatcatattgattacttactacaaaaagaaaaaaaaaaaaaaagaaaaagaaaaaaagccaaaagaaaaaagaactaactcactgtactcattcaaagtgacacaagtgacaaatgagcgcttagctcaagaggtcactccctgtgatctttctgtgtgggtgagagtacccaacagcccattgctcaggattaggaaatgctctgggtgagacttttagatcatttactatacctgactgtgatttgatttataactcaagaagaaaagccgggtagtctggagtctagtgagcttaattcagatcctaacactgcacgtgctgggaagtcctgattgcattttacagtgatctctttggagacttcacatcatggcgtcatcgtatcagctgggctcaggaactgtaacagcagggagctgtggagaagatgaatcacagctccaggctctggggtcactctcgtcttagacccccacaccagcagtacctctcacgctcactcaggaaccaggtatctcccaagccatgtggaatcatgcatggatcgtatcaggaagacctctaagctttagaaatttttatttgtagagtgatggaattgaccaaaaaattaaaaaggcaaaagcactgggagagatcaggttgtaagaatctacattttttttttttcctcatggcaaatccttaagggccttttattacaaattagattttcattaaaaaaataaaggatacttggtggtatttaagatctaggcctaccatgttacaacttcatttttattgctttagttgcttaatatttaagctctgcttcatgctaccttttgtctgtattaaaatcttcacaggcctatttcatttgtagacttgaattgtttctcaccttccatctgctcagagttaaatgttaaagaatgttgtgtaacgttatccaataaagtctttgtttt

SEQ ID NO: 19771 - DNA, 1205 bp, Mus musculus
actaaaatgctaaagctaagtctgccataccatatgaggttgatgcctttgggatacaaattttagagtgtagttgaaacttaaagcaataaatgtaatggggtagtacatattttcagatatagttccttttgcacttaaatttcatactttttggttgacatgtacttactataatgagatacactctgaattctaaggagatttggtagtggccttgggtataaaacagatcttacacattttaatattggcttgaagttgaatctagaaatctcatgttacaggactgaaattgaattgatttttataaatgatagaaatgtaatttttttctggttataagattgcagtcctcattgtagataaattttatggaaattcagaaaggttaaggtagtgacagttacctgccctgttagtgtcctgaggtgtcacccagctttttcccgtgtctttgtgttcctttgcttctgcggatacctgtgctgtcccttgcttctggcccctcggctgggggagcatcctccccctgtttggtagctgacctctcacccccgggctgtgtctaaggactcagtcctcttctgcggtctgcactgttcctccctgggtgagtgcggtggtacctggagggattgcatgcacttaccttctgcccttcttaccgccgcagatgtcaaggcatgcagtctggaacttgaaacggtcccagatttcttagaatcctgtgtttccatcaaccttggttcctcaagtagagaccttggttactctgtgtcctgcatcatgtccccgggtcagtgagtggaaaccagcttccagttatgttgcttggcagagagagcaacatggcctcacccagcagtaccagatggtatctggtggttcgtaatcagagtggacatacttcgatactcattgtaaatgataaaatactgaacaaaggattttaataaatcaaagtcccatccatgaaagatactctgtttcagaccagggctctggggctagcgtctcagtgtgcacatgggtgactagacacctcagagccatgtagtgcgtgcgtttgtaggtggaaggctgggtggctgggtgatagatacatttaactctccggtttcataactcactgcttcacagttggcgtgcgccagaaagacaagacttagtgtcctcacctcaagagccggtgatggcaatct

SEQ ID NO: 19772 - DNA, 1167 bp, Mus musculus
tactgccctcgaattatttgtgacatgtcacatttaacaaacactgatgtttgaacacactgtattttaagatacaaatgttgatgtttgtacttcaaaaatagtgacacattaaaattgcaggtcacgtaatactttccaatatttataatgtccccttaataaccaaatttaacaatgcttttacattttgtttctcgtggcttcacacaaggtttacacagccctttacagtctccagttcagttcagtgtctcttagtgcttttgcagagctgtgtaaactatggtcacactagatattagagttttctagtccctcctaagacagtgcttcccaactttcctcatgctgtgaccctttaatatagttcctcatgctgtgatgaccccaaccataaaattattttgttaccactttacaactagttttgctactgttataaattctaatagaaatatatgatatataggctatttgatatgcaacccctgtgaaagggtcatttaacccctgaaggggttgtgacccaaaggttgagaaccactgccctaagagatcttcatcctcatttcccttaagtcccttgaccattcccaggctgccatctgctcccctgctccccgcaatgtagttgtctatgtgagcagagaccaaggcactgggtatccagatctaacactctgccttgagtcgctgaacccattgctcagctaggctggccggctggtgagctggaaacggcttgtctccacccctgcgttgctaggattgcaagacatgcacagccatgtctacatttttatgtgggtgttggagattccagttttgatcctcaggctttcgtggcaagtgatctcatctccctagccgttgttttgtctgtttttgattaatttatcttgaactgtacaagcgtggcctttggtgccgaggtttaagacattggttgatactgaagtattttggctgcttttcctgattcttacccatccctctttcccgcctccctttttttttttgtttgtttgttctgtttttaaagcaatgatgtgcatgcaacctagtgagctgtagccccagtactttttctgtccagtaatgcccactgggtagctttggtgcagtttgttccctgctatgcacccatgcatgggcactgaggta

SEQ ID NO: 19773 - DNA, 1183 bp, Mus musculus
catcacaaatgtgattaaaaactgtagagggttatttattttctgaatcagcctttgggagtaagtattccaagttcatcatgcaaatatgtaattataactagatgaaatgaaaatctgatttaaagtatcgctcaagtctttagacttattcaaaagctgtgataacatccttaatttttttaaaaacatttttgggatgtgtgtgagagtgaggaggggggagagagagagagagagagagagagagagggagagagagagagagagagagagagagaaggagagacactgatgttagaggacactgacactgttttgggagttctcttattccactatggcttggggctctaacataggtcctcaggcttgacaacaagtcaggccccagagcatcctcctcttcctccttgtccctgtcttcctcctcctcctcctcaccatcatcatcaccaccaccatcatcatcttgtccagatgctcagggttaatgctgtctgttccccttccaggtcagttagtggtgtgcaccttgtgctcctgcgttatgaagacgaagcagatctggctcttctcggcacacatgcttcctctgctggctcgcctctgcctcgttcctctggagaccatcgtcatcatcaacaaatttgctatgatttttacaggattggaagtcctgtacttcctagggtctaatctcctagtaccgtataacctcgctaagtctgcataccgggagttagttcaggtaagcgtgctgggcacacgcggctcagtacattcccctgtccacctgtggctgtggggacgctctctccagctcctgttctcatcaggggaggcagtgaaggagcgaatctgcagatgcagagcacttgggttcatgcccctaggctgaacctatgtgactttgacataatcacatctctctactttctatgaaaggaagctgattgtaccacagcactgtgctctcctgctcagggtaactatgagatccagataagctttgggtcaggcaggcgatgtgcgctatgtcttaactattattgtaaagacaacaataagaaaatacctgacgacaatcattgatttctcttctgactctacttctactgtgtcagcagtgtcttccctttgtttacctagcctgtttaacctaggaagctaaacaggttgg

SEQ ID NO: 19774 - DNA, 1181 bp, Mus musculus
ccttgtagaggtgaagtgttttgagagacaaggactggacggatgaggaatgaggaaggtcgggtgggcctgaggagactgaacactgcttctgaaggtgcagcgtctgctctctcagtaactggtcactgtcacccacacacagccttcagtgggtaccaagagttcatgtgttattattttaaactcagggagaatgcttttcttatgatcacatttatcttaatatacatactcttccctccccaggttctgggaacactttttatttacgtcttatttatggttgaggaattccgcaaagagcccgtggaaaacatggatgacgtcatctactacgtgaatggcacttatcgtctgctggagtttgttgtggccctctgtgtggtggcctacggcgtctcagagaccatctttggagagtggactgtgatgggctccatgatcatcttcatccattcctactacaacgtgtggcttcgtgcccagctgggctggaagagtttccttctgcgcagggacgctgtgaataagattaagtctctccctgtcgcgacgcaggagcagctggagaaacacaacgacatctgcgccatctgttaccaggtgacctgctcagggggagtctgctgataggtcaggcggggtagacctcggggccgcagcatgcaccagtcacagtgtaaatttccgggcacaattaatctctggattggaaagggataatggggctcatagattagagtaataaagccctgatataaacatatccattttagttctaagttcagttttaatatagtctttcaagttctaattattattgtttccaacattattgctcacccataaataaaggaaaaacaggttaggtgtattttatattattactgactacacacacagacacagtgttcatgtgtatgtgtgattaaatatatcctagcaaccaggagtcagcaacttcagaaaagtgctgtgccaagattttgactcttcttaatatcttctgggtggggaagaagcatccagacttcatggtgggtgacagaatgctgctctctatcagagactttcagtcctgtggggttcggaaagtggtggtagaagcaggcggaagggtcctattgagggtagacagactgcctgccatccatacagctctggccccagaccgagat

SEQ ID NO: 19775 - DNA, 1674 bp, Mus musculus
agggactgggacccaggaaggttctggggacagtagtgaacacatcaacagaggctcggctagccaggagggggctgctgatgctggagagggtcctcagattccagaaggcgaagtgtgtcctgttgagtctgcctagaggagaagcaggcttggagctctggactgtggagaaggccacccaaggtggagttcacactcagatctgaggagtggatgtaggagaggactaggcaggaacctgacattccgaggatctgctccaggctactcagtggacacacccgctctccaccccacttcatgctgttggagaaattttgcaatgtacactaatcaaaatgtatttatatgttctatgctgatgttttgtagaggtttgccaagaaaacttaacctcagcaacttcaggaatggcccctgatttgcgagggataatgaaatcaggtctgagtgcttgaaaggggctaagaggacgcagatctggaggtcagagtgggaagatgaaggcagaggtggacctggctttccccttcccgtgggacggggtggctctgattggatagtgtgggtaatggccactcccctttccttcagttaattaaaaccaccaaatgatcctggagttttctacagaaccgcaatgaaatcaaagatgtagacgggactcattgactttcctccgagatggaggagcacggtacgtcaggatgtgcctggggaaggggcgggcgtgcactaggccttgcgggtgctctcgtgtcgcctgagactcttaaacctgatgctggagtcctcattattttgatgtatatggaacttttgttaatatattgtatactttgttggctgtgtgaagtaaactaaaactctagtgaacactttggagtccactttaacaaaggagccaaagtgggaggggctttagggaactgataaaggccctgggtgtactgtccaatcctgtgtaatgtttaattcttgcaactgaatcaaaagcagtgttaaattatggcagtgtttgcactctgggaatgagtactggactgtatgaccccactctgcaaacaccacttttgaagctgttaatacactttgcaccctttctttgacaaggatgtgtcatatttaaatttttacattcatcatggctacaggtagaactggggaggggggatgtaatttttttatgggtttttgatatgaaaagaaactagtcatttatttatacaataagcttggctcaaaaaaaagtgtatttcagacttggtattcctactgtggggtgtggttttcctttgtttttagtagcaaatttggatgtagactgacagacatagctgaatgtcttaataaatttaaatttgaagataaccgttgtattcctgtgatgtgtttacgctatgggtgttgtgttgggattggattctcttctgtgcagtttctgttctgaactcccaggacctcacgtgttcccattccacacatgctctacagatggcagaatttgtgagaaggccagaatttgtttgtttgtttgagacatggctttgctgttgtgtgtccttggatggcctagaactctatatggagagcatccgctcagatgagatagatctgcctgcctctgcctctctgcctctctgcctctctgcctctctgcctctctgcctc

SEQ ID NO: 19776 - DNA, 1363 bp, Mus musculus
ttcaaccttcttaatgctgagaccctttaatacagttacttatgttgtggtgacctccagccataaaattattctcattgctacttcgcaagtgtaatttttctatagttatgaatcataatgcaaacatttgttttccaatgttcttcagggacccctgtgacaggatagttcaaccccaaaggtgccaagacccacaggctgaaaaatcactgttttatatataataatagagtataaacagagtctaatatgaaaattctagagagcagcgccttggaggtcccgtggatctgtgtcttgcttcaacagtgtttgaacggaacagacccggggattcccactgtactcgcttccagccgcctttacaagtctctccagtcgcagcctccgggaccatctcctcgctgccttcggctcctaggaccagtctgcaccgtctcttcgcggttagctcctactccggatcagccatgacctctcagattcatcagaattattccaccgaggtggaagctgccctgaaccgcctggtcaacttgcaccttcgggcctcctacacctacctctctctgggcttcttttttgatcgggatgacgtggctctggagggcataggccacttcttctgcgaattggccgaggagaagcgccagggcctggaaactcctggagtttcagaacgatcgcggggggccgtgcactcttccaggatgtgcagaagccatctcaagatgaatgggggtaaaacccaggaggcatggaagctgccttggccctggagaagaacctgaatcaggccctcttggatctgcatgccctgggttctgcccgcgcggaccctcatctctgtgacttcctggaaagccacttcctggataaggaggtgaaactcatcaagaagatgggcaaccatctgaccaacctccgcagggtggcagggccacaaccagcgcagactggcgcgccccagggatctctgggcgagtatctctttgagcgcctcactctcaagcatgactaggaggcctctgtgccttccaaggggctcccccctctgctctgcaccagcccgccctgggacctccacctgaatgaacctctcaagccactaggcagctttgtaaccgccctggagcctctgtcaagtcttggaccaagtaaaaataaagctttttgagacagcaaaaaaaaaaaaaaattctaaaattattttagtggctatactaaaattattctaaatttcattatctaatcaattcttttctgttgtccaactagaccacattcaatgattttagctgtactcattgtccctgaacttgaacagatatgcttattttctgcttttaatctccacact

SEQ ID NO: 19777 - DNA, 1168 bp, Mus musculus
gtcgggttcgccttaaaagcccttacctgcctgtaccttacctgcctgtaccttacctgcctgtaccttacctgcctgtagcttacctgcctgtagcttacagtacgcattttactttcagttcacaagcacttgtgtgtgttcactaatgtgtccactgaagctacttagctatttttattttaagcattgcttactagtcatgctcttagtttttacaatgtgactccacagttgtgtgtgtgtgtgtgtgtgtgcgcgcgcatgagtacatgtgttcctatattatttttcatactcctttatgatatttaataattcctttaagaagaaaaaaatggttaaaaaatgataagttagttgctaaaatgcttagtatttaggaagccatatttgaaattttgtgtaataaaagctgaaaataagtgccagtaccaaggatctagctgtgaaaaatacaataataaagcctctggaaggttttagaagttcactgtgctgcctgtattgatgtgtactgctttcttttaggggtgggaatgggtaggacagtctcctatagtctaggatgcattttaaagcaaatttcagatacagtatcgtgttatctgttctgtaaatgaatttgttctaaaaggagcatggacacaacacaaaagaagttatcttattatttgtgtgcctggtttttaaattttatgtgtgtgggtagggcttgtgtgtgttagtatagcatgaagaccagaagaggatgttggatcccaggagctggaattacagtcagttgtgagcctttctatgtaggtgctggagatagaatcctggtcctctgcaagagcagcaggcacctttaaccactgaaccccacttctccagccctatataatttgtttctaatgttttgattagtagataatttcttctccagatatgccactcttcccttaaaaaaaattctctttctgcttgtttgttattgaagggcctaggttatttgaatttctctcagtctgaattctactgccatcatggtatgtgaatgtccttgtcccctgtatcacctaaaaaatgacaactgtgtctagtcaactgatagattcaagctccagtttgaggaagcaaaactgcttcctagattggaagtatattcttaagacttctggtattt

SEQ ID NO: 19778 - DNA, 1204 bp, Mus musculus
ccacacccccttcttaccttgctttgtggtttgggttttgggagcacatcctgttgtgctggagcctgggctgtcctagagcttgcactctctcctccatctcctgagcatgggcattacagcatagaccacaataccttgctttacttcctatttaagatattgttgttggcttatacttctctaaaatgaagaaccattaagataagaataaaatagtcattgaactcattggatgactttagaaaactggaaagtttttcattagtcttgtgtctgtggagtgtcttttgtattactcctgtagcagtgttcaggggctgtgacatcatcatgaagaaaagctgttgaatctgcattcttgacagtgactgccatggactgcaccatgctgcacttgtgtggccctgtgggagatgtgttttcccttaaggagaccgtccgtattagaaggaagggcactggagccttccgaatggaatgtcctcacttgtttgtctttgttgttgacacagatgagcggtacgatcctgagcccaagtccaaatgggacgaagagtgggataagaacaagagcgcgtttccgttcagtgacaagctgggcgagctgagcgacaagatcgggagcacgatcgacgacaccatcagcaagttccggaggaaagaccgggaggactctccggaaaggtgcaggtgggccgcctctccaccgcttgcctgagggctgcggcctttacacagctgtgtgctttggtttaaattttaggtattgctgttatctgaagtttagactttttaaaaaaaaaaacacattttgttagaggaatctaaatgacacagaaaatctgatcataaagtacagaaggcgctacacaccttttccctttctcacggtttcaagataattgtgttattttgataacatttcttaactgaaaaaccagtattgatactctgttatctacagtttatgctggaggttaccatgtcaaaggctctgtgcagtttagtgaacatgcagtattctccactaacaaatgccacctccttgacaatgccttgtgtaaaaaaagaaaaaaagtggaatcatttatgaagttgccagtcacctggtttcatggtactcggtcagctctaggtgctgtcagtggtgactcttcttccaacctgtctgcaccgtctgtctgtccgtctgtctctctct

SEQ ID NO: 19779 - DNA, 1751 bp, Mus musculus
acatgcttcctgtccggcctcaaactaaccctctcctggggggacccatgcctatgaacatgcccggtgtaatgacgggcaccatgggaatggcccctctggggaacagcgcagggatgagccagggcatggtgggcatgaacatgaacatggggatgtcggcctcggggatgggcttgtcgggcaccatgggaatgggcatgcccagcatggccatgccttctggaactgtgcaacccaagcaagatgcctttgcaaactttgccaactttagcaaataaaaggttgtaacggagcgagtggaagaagactctgtaactgcaataggtgatgttgggatggaagatgctaagcagttcccttttcttttatcagttaattaaataacccacataaagaaccaaaaaggctggtgtttcagaagcgatgcaagagcacttcagatgaggcagtcaggatcggtttccccagtgaagatacgctccaaatggggtgagggtcacgagagcctctctgggtcagagagcccatgtcacagcgtagtctgtgggaggactggcacggatggggctgagtgtgtgtgcttcactctctaactttatacttctttctccctgaggaacttgatttttctgtccctcaatcgccttgtcatgattgggtctgttcctttactaccactctcaagtccatagatgaaatcattaaagttggatgatcagttttttataaaaatatatatttttgtccaaaaaaaaggcatacatatgtgattatggctaaatcagaggtaactggatgtgtgtgcttttgccaagactccagcagtgctgctaactaccatctgagtttccatggatttgacccctcttccgcaggcagctggcagtagctgtgagacttcgcccgtgtctcctgcagttaccctgtgcagaactgggaagcctttcttgggactgctcggcggtttcctttaacagtcggagaaggaagactcgtgtgttgtctgtctgtagcggttgttcactgcctttgcagtgactgacttggcaaagctgtttcctgtgcgtagccttgtagccatcattcaagtcagaaacagtcaaaagagaaaaatatttatttttatcttttttggtgtcttttcaaaaaattgaaaggtaaaactacattaaaaccttaagttaaatgtacatgttaggactcagcaatttcacatttagattttatactgtattcattttgtttgcgttttgagtgtgtaataccgcattagcaatatggttccaatagaagttcgatatatattattaaaggagacctgtagcagtcagagattttattgatttaatgacaaataaaggaaattaattaattttttttcctgctgtgatactgcattaagctcacatgaaaatcatgatgctagagtttggaatgcaaaattaaatgtttcaacctcaagctgggaatattttttaaaataaatactataagtatcaaattattacctcccctactttatgttgaaattttttttattgaattgatacaactttgtttccattgtattcatgatgttctgttctatataacattaaaacattcattaaaaccaacgtgggcccgcctcttttctcatccactagacacgaggccattgggggaaaaataattataatttgggcaaagtaatttttataaataatttaaaattatttaatgacttctctattctctcctatcaggct

SEQ ID NO: 19780 - DNA, 1145 bp, Mus musculus
gcaggccctcactgacgtggatgagacctaccgtaaacctgtcttaggaaaagcatacgaacgggattcttcgctgactctcactagggtaggcagctccccctgacttcctgtgtacccatcctgccttgtagcatagaagccacgatcataagcccactgccttcatcagagtctgagcccctctctcacgctcccagcgtatcccaaaagcgcctgcttcttgcccacgtacaggagccacaggttgcctcttcgaaggctttaatgcctttcagctccgtaacacagagataagggtaccttttatcttgccatcgttatctgaattatgtccagaagttagaaagtgactgctaccttttaaaaaatgtcagtgcaaggcatttacaagatgtccctaaggaatctgacctcgtcctgtgatgacagagttacactgtaggcattaccatggctgatagtggtcactgctttccttgtagctatttgatcggctgaaacttcaagattcctccaaaaaggaagcggattccaaatctgcagttgaggactccaccctgtctcgatactcccaaacatctacttggaaggtggcttcggtatggggacgaggggacactgaccggagctcacacaggcgctcccgctccgtcccttcttccctgcaggcatctgcaagggaggagtccaggtctgagctgtcagggaggactacacggacagaagggtccagtgtgggaggtaccttctccagggccaccaccctttcacggggccagtcccgtaagaaaaagcgaaagcccaaggtggattaccagcaggtattcactcggcacataaatcagattttcattcgaggcgagaatgtcctgctggtccatctggcccagtgagcagctcagcccacgtgacctttgggttgtagaaataaagtgcatgaactgttctctgctatatcctagtctcccacacagtgcgagtcggagtgagtcccgctggtcctgcccatgcagggcacagagctggctcaccctctggaaggacaggtcagcaggactaaccaggcagaagccattcacaggacaggctctgacgggctgtcactggctgctcgagtctccagcgtaagcgcttcactttga

SEQ ID NO: 19781 - DNA, 1152 bp, Mus musculus
tggaagaacagccaatgctcttagcctgtaaggcatagctacagcctccagaaaataggtttttacccgtataaacctattctattctgttaaatttattgtatacacatgagtgtcatgaaaactattctgctcagtctcaggacagcattataatgttatttactataatatctaacatatacaagctacagacctttggactgctgcacagttgttaggagacagtcagtcccttgtcacccaggcatcccgtctggtggacatagtcctaagctcatagaagtaacttagagttgacgaacacaccagcgccccctcctgagcttcaaacttctcatctgtaaaatgagatttttgttcaagttgggcttcaagagccttcctgtgttacctatttaaaggacgctgtctgcgtggcaatgcgaagttcctgcttcaggagagcccctccccccaaaagagtctacagcaggatgcaaagaaacggtctccaaccatgtccttgaagttggggtgaactgttagcttaggtctcaccagttgaggcggcagaaagaagagaagggaggattacaggatggaaattacaggctcctagtcacagcctgtaatttggtggcatacatccataatattttttcctctgtgactcgcccccctgttctgaggactgccattaacctaggggccgtgtctgacaagccttatgtgctgttcaattagagacacttttcttgtgctgaagtcatcttaggagacagactcctgggggctgtggactctagttctcttgccccgcggcaaccttttctaagagaaactccactaacttgttcaagctgattctaagacagagctgaaccagggggcaaaaatcactgtattacaaggtcaccttcaacagcaatgaggaccggggatggagctcagtccgagtacttggctagcatgcgtgagcgaggccctggattcaattccctccctgcaggatataacttagccctggtggtgcacgcctgcaatcccagcactgagaggtggaggagggagggtcagctgctcaaggccatcctcgaatacactctgaggttgagcacaactgggctatatgagaccctgtctcaaaaacaaccaggatgtcaccaacca

SEQ ID NO: 19782 - DNA, 1102 bp, Mus musculus
aagggcttctcctcccattgatgtcccacaagccatccgctgctacacatgcagctggagccatgggtccttccatgtgtactctttggttggtgggaaacctgtcttaatgtacctctcaccctttacctacctcagcttcctcactgaaaagacagaaatgactgttctgtttctcaactgcctttttcatttttaagaaaaacataacggtgtggcctattcatcatctcatggttcagggtgaaagaattctaagttggtgtactgatgaatgtcctggtgaggcagagggcgtgtgtagggttttcatccaagtgaactaagcctcttgagtggcaggcaggacagcaagctgtcggtgtgcttcagctccgctaacgcctccttcttctctgtcaggcaccctttccccaaagtgttcagttggtgtaacaggaaggagctggacaggtatctgcagacaggaggagggatgtgtctctccaacatgccggacactaggacgctgtatggaggccggaggtgtggcaacgggtacctggaagacggtgaagaatgtgactgtggagaagaggaggtaagtgtcaggaccttactagagagagggacgaatctgtattgtcttcagagcttaaggacatttgaaagcacaatgtgacagataagttcctatcaaaaggacaatgcggtccttcctatggaaaggacaaagggacagatttttcccagttgccagcacttcttacacatgactaccgaaggccctctgtgtgtcagaggcagacagtgagtctgccaggtggaccgtttcgatggcctctgcagctgtggtcaggacagtcctatccaggatcagggtggagcccctttgagcagctgctctagccacagaccatgatcccagggcacgtagctctctctcctcctccccagaggagccccagatggcgtctttggccctccagctgcactgaatttatttctggaggccacacagctggatgagctcatgaccatgagcctggtgaggagccctaacccaagctcgtgctgtccagcccggagaagagaagatttgaagggagtgttggaagtactg

SEQ ID NO: 19783 - DNA, 3324 bp, Mus musculus
tagacagcaggggggtggggtggtcaacctgtgtcccctctgagccgttatgccaaaggtcactaaggacatttagaatccccatccatccatccatccatccatccatccatccattcatccatccccagtgttccatgtgtcaccttctccttttccagcatccctatcctatggtgctttggtggtgaactatggcagtcctgacttgctgatgaccatatgctggtgacctacaaatcgggatcctgccatatggggtcgccactggactttctgcactggatctcaagagcgttgagccgagtgggcgtgtatgtgtgtgtgtgtgtgtgtgtgtgtgtgtgtgtgtgtgtgtgtgtgtgtgtgaaagagacagaggcaatgagagagacagacatgcaggcaggccgacagctctgcatgtacttgtgttttacggcctcaagcagaataagggacctcctccttatttctgactcatatctaagtaaggttccccaggacagccacagttgtactgaggggggctgacatgtttggcatcctggctatagtattgtatacacagggccaccagccccgccctagtggtcagctctgaggggggactggtgactctgaacagatcgatgtcaacagccatggtgaaccagatctgggcagggttccccaaactctattcaaccagagttttatcacgcacctcatcgggtctctcctggttgctgccccgaggtgatcgtcatggaaaatgctgagaaggtgggaatgggatggggtggaccttctcttgcttggtgctccgctatttggaacagttcttacacatttgctgggcctggcctctgagaggccatcttccacccccagaaaggtgctaatggcactgcagagggctctctaggggcctccccgccccaacagcaagcagttgttagctcttggaaccctccagaggaagaggcaagcgtttgacttcccctttaccacctgaggcctccttatatctcttcccagagtaagctttgggattgtagacatgtgggagctatgacagacgtggcctggggtagaaagatctcaggaaagcacctttctccttttcagggtgaccgtgctcttcacactctctgaggcctcagtccatgtcctatatcagtttctcttttgtgtgctttaccaagtggccggtgactacaggccaccccgattctcaccacaaagttagaaaccctccactttctgtcccttgaaccatatcagaaaaagacccatttccttgctctttggtaatcacttctgtttttttctttttcattactttgctaccacctccatcccatgacattatactgtgaagtgtaagaggacggggtttttttaaacttggtagaaatgtcggcagctgctctacacacaacttcactcaaggctttgtttccagaggccagctaggctgtcacaggcaggaatcccttcccatctgctttgtgaagggtcccatacaggtgtatctagacttcaaggacagggtttgtctcacaggattgtcacttaggagatgaaagaatattaccacatgaggaggaggggcagttgcaacagaacactttggtcttcctacaccaagtctgtgagggcatccaagactgaatgaaagcgcttttcttatgcatacaatgtgagcaagaacaagaactgtttaaggcacctctgttcccagccactgaagagagacgtcagaagatgttagaataggtcaaagccaaggctctggtgggctgagggaaggtttgtagctgcgtttagtggtatacatctttagtcccagcataggcaggtgaatctcgagtttgaagctagcctggtctaaaaaggaagttccaagactgccagggccacacagaggaaaaaaaaaaccctctagaaaaacaaaaatgaagacaggatctcatgtatcgtagattggcctttaagtcactttaccaaggatgatctttgaactcctgagtacagactgcgggtgtgtgctaccatgctttatgtggccctgggttcaaacacagcccttcatatgtatatagccaaacactctacaactgagctacatcctccagcctaggctgtaaatgttttttggagctagattagctgcctgccaaccttagaactgcaaagccattcctgacctgtaaacctcagctctccatctctataagaggtatagcctgggctaataccgtccaagttacaactccttgcttgctttctgttccttctagccttggtgacttccaccaggaagagaataccccctctctacccctgctccaagacactgtagatgctagtgtcggagtgttctctgtaacgcgacagttccttctgttgcaatagcccccctgcaacactgcaataatccttcagtgtctcccctgggctcaattcacttccttatttgacaaagtggaggtgagacttgtattcttaaaattggaggctagttattttgtcaaatgcatgtaatgaacagacccgaaggaatcctccacacacaagccagggaacaccaactggaaaggtaccccgtcccagggaagcctgctagggagaggttctgtagaatccgagcctagcaccccaaagtcatgcacccagtatcctcttgtatgactgtatatgtctatgtctgggatccagggcaaatgtgaattttcttttgatttgggagattgttcacaggaagtagtcctcccctctcatgtcctcctattgattgtttacaatatttgtacatctatgcaaaatacttgaatgggccatggtgccttgttttttgttgttgttgttatttttttctccttgtttgtatttaattaaaacaaattgtcatgaggaaatgttctctgtttggatggctcttttgtgtgtgaactgtttcggtaatcccactgccaggaccacttaagacatgtgatgtgaacgtctcagaggactcatacagaccaacagccttccagtcggccatgacctgtgccacagtgatgccccggggtttcccatggccagtagtcagggctgcctgctttgtacctgtgctcaagatagtctggtttcattaaatcttggattaccaaaggctttcataatcttttagattctagaacattcttctacactattaactttagaagacagctgagatactctgtgaccaactctcttcactagggggtgtgctttaatgaagaggagagacttagtgtgggtcccgggctgagtgggtaggtgcagggaggccagcttgtgtgcacttaagat

SEQ ID NO: 19784 - DNA, 1139 bp, Mus musculus
tcaatgtcctggtctctcccttttgctcaagctcagtcatggggatgtattaacttctatgtttcagactaaaacacccctgcacagtccccacaaatagcacatcttttaaagagattgcccaagtctccatatagagctagtcatctgacctgcagagaggacatagccctgagctcccaagacacaggaataatagatattcctctaccagcctggggaggacagaagacaggagtaaccatcccctgccccaggaaggtgattgttatccatcaccgtttttttaaccacacagagaagagaagagatgtgcataatctgtactttgccagacagggccatgtaccccagggtggtcatataaattagaatccttaaggatggcacaccagagtgttcctttctggacactaactttgaatctctgggaatagagccagaagacctgcctcttctcagatatatcactgcacaccacatactcagaccttgctgtagattggacaactctactaactctgggtctctctgagcaagagtaggagcatttgtagtgtagggttgtggtttgaaacagaaactgtccagtcctcctgtctggcactgttaattcttagtctgattatttttcaatgaccatagctgtatcccagaggcagattccactttccagatcgtcagctctggctggggatagaatgtgataaacagactttccccgcttagtgtcccctcactgctctgtagagatttgggctgttcataaggccgccttcctggcagctcatcccttctaccctgcactcctgaccccaacagttgaccctctgggaagagtcacattctgctcaagatatttgatcccaataaattgaggtcctcgctttgaggacagagattccatttttgcagcacttgcctgcaaactctggacaacttcaatgctctttcctctctagtggtccttgccccccacccctttgattttttttttaatgtatttaaagatcaagaaaaaagcttagattttaaaatgttttaaaaagaattctgtttcagaaattgtcaaatgtgtaccatatttgtattaagagttgttggggattttttgtacaatgaatttacatttatttatg

SEQ ID NO: 19785 - DNA, 1161 bp, Mus musculus
ggtggagtgagagctttagaagtgtggtgaaccccagagaggctctggctggggcacctactgtgtaggaggaggatgctagagaggatgggtgtcttctccagagaagtcaaactgtttaaggtaatttctcaaacctagagaggctcatcatccaggggtggtagcactcgcctgtcctagcactgagggtctgaggcagcaggactgctctgagttcaaggacagtctggtctacgtggcaagttccagttagccaagactgttatgggagactgtatccccatacacagaagaaaacaaaggaaggaggggagggagggagggaggagtggagatgtcttgcagacgtcatttcaagaggcttagagacatgggtcacaaactaaaaatctggtttcccttcccagttctctttcaaaccttagcttacataaaagaaagacatttgtattgatgttaatgctagtctcatttcttccaagtactgtgccagattcaggtctagctactttcactgtccatcacatagccatggttgattttaatactgaaacagagtcttccgttctttgctaggcctccaaatagacaatactgaaacaatgccttgtttgcccctgatgtaccttgagggtctgtgttgtccaacttggggaccgttgtcatgtgacatctatacagcactgacatgtgagaggacagaagtgggaggtctatagacaaattttcacaaataggaccaactatggagagcaatttaagctttggaaaacggggcatctccttactgttgctcactccctatagtgaggcagtatggccggttggttaccaatctctctagctaaggccaccacctctaaggcatcctggatggcttcagcctctggttcagctttggccctggcccctgagttctttcgtggcagttcctccagggggaacccctgcaggtcttcttccctctgaccaagagctggggtctcctcgggccatcttaccaacccattggcttcctccatttggccggctctgtaagaccaccgaggttcgtgacagcggaggcaccagaactggaggcagatgaaggccagcacagcagtgaagcaggccagcaggatggccatcagcacccaaagagaaatctgggggtccacc

SEQ ID NO: 19786 - DNA, 1202 bp, Mus musculus
tctcgcctgtcccagaaacggctggcctctgtattccacaccgtcacccgtgcagcctgccctccgcggagtcccggagccaaggaggctcccgccggggcctgaggcacaaacttctggggccgggtggacccctgtgcactcaccaggaaggtggccggttgtcaaatgcttatatttttacaagaatatttcttggctctcttcttttccggctggaaccatggaggctgttccagagaagaaaaagaaggttgccactgtgccaggaacccttaagaaaaaggttcctgctgggccaaaaactctcaagaaaaaggttccctctgtgccagaaaccctcaagaaaaagcgaaggaatttcgcagagttgaaggtgaagcgcctgaggaagaagtttgccctgaagacactttgaaaggcaaggaggaagctcatctatgagaaggcaaaacactatcacaaggagtacaggcagatgtaccgcactgagattcggatggccaggatggcaaggaaagctggcaacttctatgtgcccgcagaaccaaagctggcctttgtcatcagaatccgaggtatcaatggagtaagcccaaaggttcgtaaggttctgcagctccttcgtcttcgacagatcttcaatggcacctttgttaagctcaacaaggcttcaattaacatgctgcagattgtggaaccatacattgcatgggggtaccccaacctgaagtcagtaaacgagctcatctacaatcgcggctacggcaaaatcaacaagaagcggattgccttgacagataattccttgattgctcggtctcttggtaagtttggcatcatctgcatggaggatctaattcatgagatctatatagttgggaaacgcttcaaggaagcaaataacttcctgtggcccttcaagttatcttccccacgaggtgggatgaagaaaaagacaactcactttgtagaaggtggagatgctggcaacagggaagaccagataaacaggcttattagacggatgaactaaggtgtcacccattgtatttttgtaatctggtcagttaataaacagtcacagcttggcaaattgaaaaaaaaaagaatatttcttgcagccatatttgaaagacagagaaaatgtacacatacatttttttcctttgagactacatatttgcttgtgatagatagat

SEQ ID NO: 19787 - DNA, 1258 bp, Mus musculus
tgtggaggtaaagctgaagacaaggagtggatccctgtcaccaagctgggctgcctggttaaggacatgaagatcaagtccttggaggagatctacctgttctccctgcccattaaggagtctgagatcattgacttcttcctaggtaagtccctaaaggatgaggttctgaaaattatgccagtgcagaagcagactcgggctggccagcagaccaggttcaagtctttcgtcgctattggggacctacaatggtcacattggtcttggtgttaagtgctccaaggagattgccactgccttccgaggggccatcatcttggccaagctttccatcgaccctgtgcggagagactactgggggaacaagattggcaagccccacactgttccatgcaaagtgacagtggctctgtgctggtgtgtctcatccctgcccccagaggcactggcattgtctctgctcctgtgcccaagaaactcttgatgatggccggtatagatgactgctacacttcagccagaggctgcactgccaccctgggcaactttgctaaggccacctttgatgccatctccaagacttacagttacctgaccccccgacctctggaaagagactgtcttcaccaagtctccttatcaggaattcactggtcatcttgtgaaaacccacaccagagtctctgttcagaggacccaggccccagctgtggctactacataaggattttgtacaagaaaaataaaagaattaagtctgctaaaaaaaaaaaaaagaaaaaagaaaaaagaaaaaaagaaaaagaaaagaaaaaaaaaagaaaagaaaagaaaagaaaagaaaagaaaagaaaagaaaagaaaagaaaagaaaagaaaaagaaattggattccacagaagggtttaaagtagctaagagctggtaggcaaggatcaaagggaaaaggaaagacattctcagcttcaactccagaactaaacatttcattggacacatgaaaacgagactacaatgggcaactctgcagtctggtactattatagaagaaaacccaaggtgaaagttgatataaaggatagtgagattaataattcaagtatggaagatgttgacatactagtcaatagcatacagagattcgtcaatagcatacagggactcaagtgtgtgtgtgtatgtgtgtgtgtgtgtgagagagaaagagagagagaggggggggagagagagagagagagaaggggaagggaggggag

SEQ ID NO: 19788 - DNA, 1438 bp, Mus musculus
caaggaaattacagttagaggtcacaactgtccaaaacctgttctgaagttttatgaagcaaactttcctgcgaatgtcatggacgtgattgcaaggcagaacttcactgaacccactgctattcaagctcagggctggccagttgctctcagtggattggatatggttggagtagctcagactggatctgggaaaacactatcttatttgctgcctgccattgtacacataatccaccagccattcctagagagaggtgatgggcctatttgcttggtgctggcaccaactcgagaactggcacagcaggtgcagcaagtggctgctgaatattgtagagcttgtcgcttgaagtctacttgcatctatggtggtgctcccaaaggaccacagattcgtgatttggaaagaggcgtggaaatctgtattgcaacacctggaagactgattgactttttagagtgtgggaaaaccaatctgagaagaacaacgtaccttgtcctcgatgaagctgataggatgcttgatatgggatttgaaccccagataaggaaaatcgtggatcaaataagacctgataggcaaacactaatgtggagtgcaacttggccaaaagaagtaagacagcttgctgaagatttcctgaaagactatattcatatcaatattggtgcgctggaactgagtgcaaaccataacattctccagattgtggatgtatgtcatgatgtcgaaaaggatgaaaagcttattcttctgatggaagaaatcatgagtgagaaggagaataaaaccattgtttttgttgaaaccaaaagaagatgtgatgaacttaccagaaaaatgaggagagatgggtggcctgccatgggcatccatggtgacaagagtcagcaggaacgtgactgggttctaagtgaattcaaacatggaaaagcttctattctgattgctactgatgtggcctccagagggctagatgtggaagatgtgaaatttgtcatcaattatgactaccctaactcctcagaggattatattcatcgaattggaagaactgctcgcagtaccaaaacaggcacagcatatactttctttacacctaataacataaagcaagcgagcgaccttatctctgtgcttcgggaagctaatcaagcaattaatcccaagttgcttcagttggtcgaagacagaggttcaggtcgttccaggggtagaggaggcatgaaggacgatcgtcgtgacagatactctgcaggcaaaaggggtggatttaatacctttagagacagggaaaactatgacagaggctactctaatctgcttaagagagattttggggctaaaactcagaatgatgtttacagtactgcaaattacaccaatgggagctttggaagtaattttgtatctgctggcatacagaccagtttt

SEQ ID NO: 19789 - DNA, 1060 bp, Mus musculus
ccaaggaactgaacagaagcggaaagggcggagccgcgtctctgccacgtaagggcggagaggccactgtagtttgcttgtgtgccctcagccccacttctgcttccacggcatgctttaatctcccgagaagcctttctaaaaccctggcgcatctggcttcagaatgcatttgtacagcgctgccaaactaggttgcgtggcagaagaaacgacgatacttgagacctactctcccagttcctcccacttctcagtgcagctatctttgagcagcagtgaatcatgggaatccccgccttgctctccgagtatttccggttccggcggaggccgctctttctttttctccacagggtcgtggtggcagccgctgtggtgcttggctctctgagctatccggtgccatccttgtcgctgcggcgaccctcgcatcaactgcagccatgaccgagcagatgacccttcgcgggacccttaagggccacaatggatgggtaacacagatcgccaccacaccgcagttcccggacatgatcctgtctgcgtctcgaggtacgggctgcatgccgggtaaatcacccggtgtcctggggactgcatgagagtctcgtggttaagcaagtggcgcgcgtgttggctcggttcattccccaacccagttgttagttggggcgtgcataccccaacttgggccccaaccgggacgaccctttacacatgaacggaaaccgagacacgtcgcgcaactgtactcacaccccacctcccaaagttggcgattttaaatctctcgcttgcttcctggagatgtgtttaagtagttttacggggctacaagacgggcggagcaatgatgaccccaacatgccatctgagtggctttgctgaaatccagaggctgtttctgagctgttgtcgcctggccctaaactatagacagtgggtaaactttgtagatgccttgttccccacatttccggacttgattgtcccgccctaggttttcttgtaactaatgattttttttctttaatgatgtatcttcatgtgtatttcc

SEQ ID NO: 19790 - DNA, 3634 bp, Mus musculus
caataacggctgcatttatttcagtaactctcaggcgggaaaggctgtctctgctcagcctacatacacccaagtggtgcttctgctgttaattagtctcgggcccggacgatgactaaggttagggttagtttcccagaccctgcatggtagcttgcagtcatctgaaactagttccaggagacctgacacgcacttctgaacaccatagacacaggtagcacacatatgtatgtagggagccactttaaataaaatacattttgaatgtggaacttaagtctcaatcccaggaagtgtggtgcccatagtctcacattacagctgagatctacagctcttgatattgtagagtagtaagcctcttttatttataacttgaagtttctctgtcccgtttactggccccagtgactttaagactgtaaatggtgcacagtaagtaggcttataccaacctttaccaacccttttagacaagaccatcatcatgtggaagctgaccagagatgagaccaactatggcataccacagcgtgctctgagaggtcactcccacttcgttagtgatgttgttatctcctctgatggtcagtttgccctctcgggctcctgggacggaacgctgcgcctctgggatctcacaacgcaagtagctgctttggaatcttggggggaaagtgggcagaactgaggtagattcgccggggtgcagtctccccttggtaattggtccttttgtagagggtaaagcaacatttgggggtgttgttttaaactgggtacctatgaagtgtctcatcttgtacgttgtcttagatgggcatttggcagatgtaatagaggatcctagtgatgacaagacgacattgtcaaccaatcccccacaagggaatgaggacatgtcctgcaattctgaatgggttctctgatacatgtcagacatgacataggctagtagtaggttctaagccacgtgtggactgtgtggggtaatagagcctacggggcaaggatgaagctaggaaaaggctctagctggatggacaaaacctgtctagaaagtgaccaggttctccttcttaggggcaccaccacaaggcgatttgtcggccacaccaaggatgtgttgagcgtggccttctcctctgacaaccggcagattgtctctgggtcccgagacaagaccataaagttatggaatactctgggtgtctgcaagtacacggtccaggtaaagggataagggtggtagggacagcatgttcagggctacctcccgccccctggggacttgggttgtttctgaggtgggttcctcactaggtagtcctggtggcctggagtgatctgactcctaggtgttggggtgaagctgtgtgccaccgactgcctctttagcttttcattgtgtgttgttagtcctgtgactgtctggggttgttttttgttatttttaagctaagcatgctggcttgtgactggcatgggacttacaggcgttggaattttatttaagtacgctgtagctgtcttcagacactccagaagagggcatcagattttgttaaaggatggttgtgagccaccatgtagttgctgggatttgaactcaggacctctggaaagagtagtcagcgctcttaacagctgagccatctcaccagccccagaattttttatttgtttgagaaggggtttctgtgtagatctggctgagatgggtgtgcttttaaactgctggggttaaaaggctagctagaggtggtacttccccctttcattccatattaggttgggccatggaaacccaaaccagggcataaattgggcagggtcttggcacatacgcagatacccagatatctactaaaactgccctaagggttaaatgatcttaagtctctcacctacctcctagagatgtgtatttaaggggctacaagccaggcccaacagtgatgaccacaacatgccatctgagttgctttgctgaaatccagaggctgtttctgagctgtgcctggtcctgtactctatgagtagtgggtgagctctgggggtcatcttaggattcaaatgtcagcgggcttgacctcaggtggctttgccaactgagtggaagactgctgttgtcccacctagggaagtgtggtagagatctgtaatctgggagaaagactgcttccccttaaccttcccctgcatcttctgtaggatgagagtcattcagaatgggtgtcttgtgtccgcttctccccgaacagcagcaaccctatcatcgtctcctgcggatgggacaagctggtcaaggtaagcttcaagcaagggcatagctctgccaaaaatcccaaatgtattcccattcctctcagatagtgatgcattctgatttggaatatttatgaacattagtttggctttggcttcttatggttcatcgcaatactttaggactgtggtttgttgaggctaggattcattctgtatccctttactgacctgtgtcatccaagcacaggtactgtgacctgtcttggtcacccaggtactggaactatagaggcttgcatgacatgcctgttcagtggtcccttaaaagtggtgttcatacctttcctgtttagtgtatacctttatcctggtcacccacagactcctgttttttcaggtgtggaatctggctaactgcaagctaaagaccaaccacattggccacactggctacctgaacacagtgactgtctctccagatggatccctctgtgcttctggaggcaaggtatttgggttttgtcatctttacagagaaagctttttatctggttataagcattattttaaaatatgtagaaaagtataccaaagatgtttatttttatggttggggttttgacacattagaggaaaggacttagagacaggaacactatacaacctgacctaacttcccttttctgtctgcccaggatggccaggctatgctgtgggatctcaatgaaggcaagcacctctacactttagatggtggggacatcatcaatgccttgtgcttcagccccaaccgctactggctctgcgctgccactggccccagcatcaagatctgggtaagtgtgatctgttccatacatggcacattgactgactggcagaaacccagctttctcagtagattccatcatttagttgctatcagcaccaaggggagttcatttttttccccctaaacagtttgcagcactgtgtgacatctgcctaatgaaaagtaatgcctgtgtatatagcagtttatggagtgttctaattgctatgtggtccaaggtaattctcttgtgagagccagtgcaggtggcatctagccaccagatacctattaggagttaagtagctgccatgtatcatgaagaccacagtgtgtatagcattgtagtagaacactcacttagtataaaagagatccaaatttagtccctagcaacaaagagagtccttccctatgctgctagcatccacttggcttcaattctgtaatctttgttacaggatttctggacaactaaatgacaagtagactagactagcctcagagagcacagatagcctgcctctatatcctgagtgtgggattaag

SEQ ID NO: 19791 - DNA, 3634 bp, Mus musculus; identical to SEQ ID NO: 19790

SEQ ID NO: 19792 - DNA, 3634 bp, Mus musculus; identical to SEQ ID NO: 19790

SEQ ID NO: 19793 - DNA, 1076 bp, Mus musculus
tttgtaccttaagcatttgtagcctttccgaggtaagaagtgccctttttagttggtgaagcacattttttgttgctgggggatgggttgtgcacacttgcactaagttgtgcagtcagttaaagttggcaatcctgcctcagtctcccgggtatttcagattatagacctgagctatcaggatctgaggattttttgctggttcagcatagggctattctatatccttgaaagaaaaataactgttagaaatctgaattatataaagtaattcattatttgagtataagtatatacctgtgggtcccactagctggcctcatagctaagcaaacctttctccatagttgtttctgggtgaaacctatgttgccaagcaaggcgttttcacatgtaaccagcctgccagctctcttgaaaggattctaaaagcaatggtatccttacgggctttggtctgttcctcaggacttggagggcaagatcattgtagatgaattgaagcaagaagttatcagcaccagcagcaaggcagagccaccccagtgtacctctttggcatggtctgctgatggccaggtaagtatatttgacaattcagctcagttctccaacttatctcccttgctcttacttaatattttagggataagactgtcagcataaaatgaagtcaaaccaggttaattttgatggactggttatatatagagaatattagataacctatttctgtctagggaaagattatggtatggagtttttaacctggaagcttaaaaatgtctgaatctatatggcaagctgctgcttcctcttaatatatcacgaaaggggtcttaagttctttgaattagagagttcattgttgggtgtgacctgttgtcattcattcatttacagactctgtttgctggctatacagacaacttggtgcgagtatggcaggtaactattggtacccgctaaaagttttatgacaaagtcttagaaataaactggctttctgaaactggcttctatatgtgagtcctggaagctgagtccctggttctactgcaagagcagaccactgg

SEQ ID NO: 19794 - DNA, 1197 bp, Mus musculus
gcgggtggtggtggatggttgcccactgttttgggagcctggattcctcccactgtttgttactgagttgcttcctgctccctcttgaacccaggctgcttctccctctaggagtcaaaaagacctcctagactcctccagctcagtccttcctcacctactttgtctgacaggtctgcatgggtccctgataaccaacagctgcctgatgacctcccctcccgcctagctcagctctggggatgtgtggagataattcctcaactttcctttttcacccccctccatgttttggtgcaagcttcagctaagagctttaggagctgtctaggcaatcaggctgggcaaaagggtagagctgtgtaagtctactttttcttggggaagtaggaacactaaagctttccttccaccccccaatttctacctccatagactggccagaatttagcttcagtgagatctgagatggtcagcatgacaccacatacattacccaataaattattttctctctgcatcttatgtaggagcctaagtcttcttctctgtcaggctcttattcagaagtttctggcctctccatgccttttatttccacttggtaagccctgttagggagcttgagacaggggtctggatcctcgggagaccactgggtataatctatttttctagtaaccccttgccttctgacactaaacagcttttgtcctctgctttggtggctgaggtcaactcatgttcttggggaaaggtgggttgtgttgcaaaaataaaaaaaagtgtttatttgctttttttgtggactcttttaaaagcaaagcagagattgtttttcagacctcaggctccctgttttctgacccaggacaggcctggtctgaatttgtgggctaaattatgcttgcatatgtgagttgatgatgaggcatagtgtggatccaggagaccaaaccaagttgatggatttttgtctaattggtgatgaaatgacatctgatgtgtttacttagctgttactgcttacatgccaggatagtaaacaccagtggtctgctcttgcagtagaaccagggactcagcttccaggactcacatatagaagccagtttcagaaagccagtttatttctaagactttgtcataaaacttttagcgggtaccaatagttacctgccatactcgcaccaagtt

SEQ ID NO: 19795 - DNA, 1242 bp, Mus musculus
gttcgggagtgcttggctgaaacggaacggaatgccaggtcctagcccctggctggtctgaaggcccatctcactaccccgtggagatgagaggctttgtgcaaaatggcagtcatttttctaccacagtcattaagctctgaacccacactcaaaagattgggaggacattttgcagtaactgacgatgtgcattttaagtagttaggaatgacccagctctttttttctttccaaacatttgaaagatgtttgtgaagccacttcacagcaagctattgtttgtccccaaataccagtgtcccctctaacctgcctttggatacgcatcaccccagctgacttcctttccctgagctcacctgcctccgaggagttgagtgcaaaccacagcgcctttgctcagtagctggcccgcctgtgtacagtgtagaccctgcttcatggagcttctctgcctaagcgtttgcatgactgagtgcttggaagtcaatctttaaaatgcacaggttacacatgcagaagaaagagccatctacccaacctcccaagcaccctgcaaatgtccatcctgaggctgtagatctcagttctgtgtttactgtgagcccatcacaacatctggaagaaagcgactgaaactgttgcatctttgtatttattacttgatgtaataaagcttattttcattaaaaaaaaaaaaagaaagagtgtaagaaggttatatggtattgtcatttaaaagacaaatgactcaaaagtgacagctacctgtgagtgctgttgggcatcccaggggattgatggtgttagctatgtttatttcctatctatcaacttagttcctgtctccacatggaagatcactgaaaactgccttatattagttaactgggtgagtgatgggatcttgaggtcccaaagttccagtgtgagctaaataggtcagctggagggagagctgtgaatatcctggcagtccagagcccgggataaggggatggagagacacacttctaataagcccaaaagaaaaaaagaaaatgtaagcagagggactcctagataattctcaaaacgaatttaggatcttttcactctttgccacatcttctctgggtttttaagcctattctggatcctggacttagtgatgtgtagtttctgggacagagcagtgactgagcaatgagcactttgtaggtgtagtttggaagaaagtgtgctaatgcaggtggcccg

SEQ ID NO: 19796 - DNA, 1157 bp, Mus musculus
tctaagaatgtggctggttatcttgggtaaatgatgtcactgagtgctggttttcaggtgcagcctggggtgtagtggggatccccactaagctacttttatgtatctaacaggcattaaaaaaacaaacaaacaaaaaaaccaaaaaactacagtcattacattctcagacctaagttcaggctttctttacatccaggctccacaattattcttgaaatcagatttcctgacctgctcaaattgagatccaaatcaggcccgctgtatttcttaaatttaaataaatgtctgttgaagattttaatacgcatttgttaaattgaagaaagagaaaaagaagaaagaaagaaaagaggagaaagctaggtagctaatgtggagggaggagtgttggcaggtgacaagaagggaatgtaccctgattgtagaggcagcagtgtgtgtggagacatccttcctttttctctctcctcagtggaactcactttggatccagacacagccaacccccgtctcatcttgtccctggatctaaagagcgtacgtctaggacagcgcgcccaggacttgcctaaccatcctcgccgctttgataccaacacccgcgttctggcatcctgtggtttctcctctgggcgacatcactgggaggtggaagtgggctccaaggacggctgggctttcggtgtggcccgggagagcgtgcgtcgcaagggcctcacgccttttacccccgaggagggcgtctgggcaatgcaactcaacaatgggcaatactgggcggtgaccagccccgagaggacacagctcaactgtgggcacttgtcgcgggtgagggtggcgctggaccttgaggtgggagcagtgtccttctatgcagtggaggacatgcgccacctctacaccttccgcgtcaacttccaggagcgagtgttcccccttttctctgtttgttctaccggcacatacttgagaatctggccttgaagagctgtcaggcttactaggaggggacagggcagcggtgtatctcggtgagaccgaggtactttatcttggaccttccttcacacccctacttctgctgcccaagaaggctgccagagagcacaacacaggcgctgaagactgattgagcaaagaggccctgtggg

SEQ ID NO: 19797 - DNA, 1330 bp, Mus musculus
agaaagaacatactgtggatgcttcagtccctcttagaaaggggaacacccttatagaagtagggagatgaggaacgagatgggtgcttccaggaggggaggagccaccaggaaaggggaaaatatttgaaatataaataaagaagaggccagcagaggcagcaagcagagcagccccaaactgagccctctcctgcctgcctgacctctgctcccctccacctgtccccatctctttctcccttccttctccacacccccctcctctgcccactagtggggggggggggcttggcttcctacccgccagtattgatccaccccacacataccccacccctggtctcctgcccttccccttcctgcctgctccccttttctcctcagtggacttgtgcctccagtgaccaaagacttgactactcaaagtccagctccctgtaactgctagacgtggacaccagtgtgattgaaggtttataaactgtcactctcgccatcaagctacttaagcatggaaaggaagttggcagtatcatacaaaagaaaggagaatctgttaagatgcactgcacgagaagactggtgcacttatcaacatctcagaaggaattgtcctgggaatattatcactttgtctcgacagactaatgtcacttcaaagccttgcaatgatcattgacaaactggaagaggacataagcagctctatgaccaatagcacagctgccagtagacccccggttaccttacatctggaggttcctgctagtcagtctctctctctctctctctctctctctctctctctctctctctctctgtctctctggtttttttgagacagtgtttctctgtgtgtcttgtgtggctctcttattggaaaaggtggttgcaagatcaaggaaataagaaataagagagagaacaggggctcaggtccaggtggcaggggatatgctccttaactcaagtgagcaggcaataactattgttggcatttcacaatccatcattgagtatgtgaaacagatctgcatggccatgttggagtccccctgaagggcgtgaccatccagtacaggcccaagccctccagttcttcagtcatctttgcaggtggtcaggcctataccattcaaggacagtgtaccattccacagccagatttgaccaagctgcaccagttggcaatgcaacagtctcatattcccatgacccatggcaacaccagattcagtgcaggtttcgatgcatctgctcaaactacttctcatgatctcaccattccaaatgatttgattggctgcataatcggatgtctgggggc

SEQ ID NO: 19798 - DNA, 1150 bp, Mus musculus
tacagtacactagcagagacagcttcaaggcctttgctaaggccctgggtgtcatggatgacctcaagtctggtgtccccagggctggctaccgtggcattgtcactttccagtttcggggccggcgtgtgcacctggcacccccacagacatggactggctatgatcctagctggaattagcagcacctgcctttccctcctgggtctccttgccgcgtgctgagccgaggcaggcctgcagggcctgggctacaccatcctgccagtgtctccctctcagtgtctccctcttggatctgtagatcttccctttgtgtcctggccagcccccaaatggcattctagtgcacaaatcataggatgagagttatactcctgttgtcaagggagtattgtgtggtatgttcggggcatattgaacaagaaaccactgtgtggtatggggagggttgggcctgttggggccaggtttgtaatgtctccaagggcatctgcagagagcttggcagctccagctctcctcagcaggcctctccaccctgatctggcccctgttagcccatgagccctctttatgtacccatcctccctttctgaaccttccctcagggtggggctggattatggaggaaggaatggatctttggtcagatgagactaacagagggactcactgtcagagttagcgtggattgctgctgccggggcactacctcctggcttctctccctgctgacgtggctcttgtcctggagcagagcagtgcgttgttgggagatggaaagtctatgcgtgggtaccctgtcttcttgcctgtggcccccctcctttctgaaagttagttctctccgcattctttaggaggattcaggggcggcctagtggaagacagtgggctccatgcctctttcccctggggtttgcttcaggggctcctccccgagggcttgctcctggtggcagcagctgagatcaggacatctgtggccctgagccggctctggtcctcggcctttcccagccttcccacatcttcccaggccaagatgcagggggcaggctgaagagaaatttgtgtgtccttgtttgttgcctgatcttagtttcatggaagaaaatggaatctacagaattattttcaaaaataa

SEQ ID NO: 19799 - DNA, 1757 bp, Mus musculus
ttgatcattgcctacaagcatttaatgccatgggattgcctaaacttattaagacagacaatgggccatcttattccagtaaaaactttatttcattctgtaaagaattcggtattaaacataaaactggaattccttacaaccccatgggacaaggaatagttgaacgtgctcatcgcaccttaaaaaattggctttttaagacaaaagagggtcagctatatcccccaaggtcaccaaaggcccaccttgccttcaccttatttgtcctaaatttcttgcacaccgatatcaagggccagtctgcagcggatcgccactggcatccagttacttctaattcttatgcattggtaaaatggaaggaccccctgactaatgaatggaagggtccagatccagttctaatttggggtaggggctcagtttgtgttttttcacgagatgaagatggagcgcggtggctgccagagagattaattcgtcagatgaacacagattctgactcttctggtaagtatcattctaaagactaaaattccttttgtgcttaaaattcagctgagagcaacagctctcaaagctgtttgtgtctccagctactctctgaaccagctcccgacaggaggccggagactagcctcagttttacaatttgcatttgaataaagtacctagacctcccggaaagaagttctgctttcctactttctcactgtctttcaagattttgtctttcaagcaggtaaatcaacattcccgaggcggaccagcggatgtgcatccccgcccccctagagcacacaggtggcagctgttacccccagtctcaagacatttccagcatgtggctttcagtctgagttaaaaatttaggtttacctagagggctagaagagtagatatttctatattaataaagattggtttttattttgatagacaggcttagccccttagctgacctctggcttttcacccttgctgttactgcaaggtgtccttaactcaataggctgtggaaaaaacaggaatgaagaggaacgacttccagctcctattttagccacaaatcgtggtgttactaacgacataattcttgcttaggctttgctaattctgaggttgataattctcctttaggagctgcacagcactcagaactgtgcatactggtttgtgattgtacaaattcagtatgggcaccgcttggtgcagagatacttactacaaggaaaggtccggcttgaccatttctgagtttcctgtgagataaacccggtttgaaagaggttggtaccaaattttggttaaaaataaaaaatattctccggctctacctcgcctccccaaaaggtaccaagagccacatgtgtgggttttacccacgagagaaatcgggtccatgtccacccaagccaaggttaaaagcccactcatctacggatgagaaaatcatttgatcacctcagttaagcgttgccttatttaacttaattaataggggggagagagattggagacgtactattgaaagggcaagcccttcactgcctcccacccaaataaaaaagccaattggccttgtactacaagagccggtcactccttctccctgtttcccacctatcttccaaaaatgcggaggaattcaacttagtgttattttcacatcgttcagtcaaacttagccagagttccaacgccctacttaaaattcaactagaaagttacctaccaagtactaattagcatta

SEQ ID NO: 19800 - DNA, 1172 bp, Mus musculus
catggtagaaggcgccaaagctgataggaggagacctggaagcagcgacagggccctgttcacgcggttcctgatgggcaaaggaagtgcacggcgagccccacttgtccaagaaggtaagaacctggcttccgcttgccagtgcatgtctggcccaggaaagtctctcgattggctttacccagggataacctagcctgaggccctcggtgccagggcttctatgggagaattgtaatgcactctccttcaggagaggaagacaccccagggggtaggaaatgaaattcatcttgggtatcacaggataaacagcaatgtattgcagacagggttggggaggagtacagagccagatagcaggtgcaaaagtgggtgccccggagagcatggaggtagcaggtataacgagggcacgtagtgtctgggggttcaggggcctggccgggagagctatggtcaggattgagttcacaaatgttaaaatttggagctgagatggaagatgaactctggcagagcctcctgagttcccctccttctgtgcagctgaggacctatggctgagcccactgaccatggaagaccttgtatgctacagcttccaagttgcccggggaatggagttcctggcttcccgcaaggtaggtcccttgaccccaccaggaccttttcagaggagaagggtacacctcccttgccatagatatgcacagttgtaattttactccacagtgaccttagtatcaattcaaatctgtcccattttggaggaaactcagcccaaagtgaggaattccctgccccacatctccacactaagaagtgaccatcgaatcagtctggctgagtccctaactcgctgcactgtcctcaatttcctgtgtcctccactaatctctctccaaatgagcaggatgcaggcaggggagggtataccctaggggacctcagagctgtaggctaagatgccaccctggaggttgaagctaaactcattgccacctccctctttccacctctagtgcattcacagagacctggctgctcggaacatcctactgtcagaaagtgacatagtgaagatctgcgactttggcctcgctcgggacatctacaaagaccccgactatgtccgaaagggcagtgtgagtgcaggccatgtgacacag

SEQ ID NO: 19801 - DNA, 2584 bp, Mus musculus
tgaaaatctgaatataggagagtaaggtatggccactagggatttttctcaatgatcatttgaattttcagtctggttatttgataaagggtatagtatgaaagccaggtgctagcaacagacaaattctgagcccagtgtactttatatactgctagacagggactggtgtgtttacaccttttaatttgttacaagtaattttcctgtttcttctctccaatgtgttttgtcatgccttgaaataggaagatgtgtgagcagtgtgctgtttgcacagaaatccacagcactgttttctgaggccagtagtaacatcagagaccgttcttccagactttactccctcttttttcagacttgtttgtaaaatgtagaatttgaatttagcctttatgattgtatatgatccacagaagacctgatttatgaagttttgtactaaaaaaaaaaaaaaagcaaaattgaaaacagttgtattgtaaactaaggctaattttttttaacctgtgtcctgtgttctgaaggccagctggtaacaaagctgcatccgactttctctgcagtgatttgcactgttggggttgttagcccttttgtactactttatttttaaattgagaacattactctttaaatgtaagtttgcttagaccttgggatattttcttggaccagaggcaacttatgtatgaattcctgaatttctatggaaactttctaccaggacagataagctgatctgtaggcatttaatggactgaagatgacagttgacatatgtacattctggtatttttaagtctttaagttttaactttttatgttaaaaaaattacagctgcttaggtacagcttctaagtcctttctgagacattttctgttctgtctccactgtgcctgcctaaatttgttctcaccgagcactgcctgtgcatgcagagaaaatctgtgcatcttttatatttttaaaaactaacatttgtgagaattttatggaaatgcttttgtatgagctgtggcttttccttcctcgttgtgaagcgttggatagcacattctggaacatgttcatgggtcctgggcttgctcaccagacccaagcactgcttcttggtgtccttgcacccagagtgccactatcatgtgtatttcttattctcttaatgtttaaaaaaaaatcattccttttttttaagaagagtaattttctgtttatgaagcagtataaattagatgcattttcaaaacagtttccctaagacaattgtttggatcatttttaaagtgactaaggaattttagtatgtcaaccaagataaaagttatactgtaccctatattttgcccatagtgccattagtagattagagattaaagtcacctttaactttacaaagttaacttgtatatgttctgttctcagtcgttagttctctcaaaatcaaatgaattcagagggaacttgtctggctgcttttgtttcaactgcaggcagtggagcagaaggacgccgtgtggcactaaagtgaactgttgagtgttaacagttttatacagagactgagccattttggatgactcaaaattttatgagaagacatttaattgcttatgctgtttttaagaggaaataaaattacatactgtttaaataaatgaattttttctttttaagaaattctctaaaggtcttgatatcttggaccttgtttttcctttaaggttttttgttttgtttgtttaatcgtaattgtaatgttgggtttgtttgttgtggatttttactttgtttaagttgtgctggcaccaaacacgtccagtttgtaatcaacaggttggtgtagaaccagtacataacttgcaatggctttttgtcctgtcttcccccacccccacccgtctctgtctctgtcttgtaaagtgtgaatatgagatgtactgactcgattttcttaaacactgtgttggtagtgtgcatcatgacaatttccagggaaggtggactgcagtgggtggactgatgggactgaggacccactttccctgtgacctgctaagggcagcacaggtctggagagtgtggtgccaggagaggggaggagcacttactcatctctgcatttgttagtggatgatgtattcctttcatggatactggaactagagtgcacttgttagatgctaaaggtttgagctttacacaaaacatttcatctgtatttgttactgtctacaatatatttgaatttgggggcagcctagtaagatataattgcctgttatgtcttgaaagtacttgttttgcctcttttaggcatactgcattctgtgggtcagtttgaacatctccaccttgtttagatagtgataagttgaacagagagtgtagatttacaagtataatcttcaaaagaaaaatattttgaatctatcaagaaatgttcacaccaaaatagactgatactttgttaagcaaggttttatgttttaaatgctttgtgtccaaaataatttccaagaaactatacttcttaaaatgcataaaactagtctgttttcataatgtagattatttttgaa

SEQ ID NO: 19802 - DNA, 1151 bp, Mus musculus
atttaaagataacacctagtgactgaggatcatgtcccaatgctagtatttgcagagtctacacaagatctgtgttcattctccagttctgaggaaataaacaggccaaagaatttataactggtaaaaagtacatatctaagagaatttagatttaatatgagagactggatttagtacttcaaaaaatagctggcatgagctgtctctatctaggtaggctttagtgctggaagtatcaaactaatgtagaaatcagttcttagctttgttgtgtatcagattcagtgattgggtaggaaattgttagatacgttagattatcttctgaagtttcagttgttttcagacactgtaagaagctgtagaccaatgagcaggttatgtctgttttatttttatctaatatagctggaaaaccacatctgggaacagaaaaacaacttattctcgtggctaatgctcatatgcattgggaccctgagtactcagacgtgaagttggtacaaactatgatgttcctctcagaagtgaagaatattattgataaagcctctcggagcctcaaatccagtgtattgggagaatgtggaactattcctcttgtgttatgtgcagatctgaattctttgccagactctggtgagaaaagtaatattttctatggaatggctactttttgatttacagattttttttttataaagaacctatgtgcatatctgtgcacaagtgcatgtgtgtgtccaggttttcataaggatcaaggaacagctttatgtagttaatcctgccatccaccacctcacgggctctgaaggtagaactcgggtgatcaggcttttgggacaagcaccttcacctgctgagccatctcagcagccctgttacgtattgtttgtttgtttgttttttgataattcagaatttagtctaaaggaaaattcattttgtagtggcagctgtgtacaggttttacaattttttttctataagatgggcaacagggaaaagaccattctgaagtagtagtatagaaacctgtggaagtgatgataggtgttgctcattctctctgtgatctccccttcctgattcctcactccccaccccaccccttttttttgaggctggtttttaaactcaagaaa

SEQ ID NO: 19803 - DNA, 1152 bp, Mus musculus
tacagcaaccctggaggaaactcctcccccaggatgctgccttagaagcacctcctctgtctccagccctagggtcggggcagctcagagagactggtcactggctctcactaaggagctagaggatatgacctcaggctcactagttccctgtcaaatttgcatggtattcaaaaggacccaataggccagtgagatgacttagtggatatatctctgccaacaagcctgaagacctgacgtccagccccagaacccacatgataagtaagaggagagaactcactcctgcaagttgtcctctgacctccacgcatctgccatggcacatacctgcccctcctccacattaaaagataaatgtaaacagaaggggacaggacagagtgtggtcacacccacagacagcagccagggatgacggccctggctgagatgggcacgtgtggtatggaacaggagagcagggacatcagtctcttggagagccctcacctggcgggcagtgacctgctgcagggcattctggcacttggcaaagcaaggatccttcatgatgaccatgatgactggcatctgcttgtcgacgagagcaaggggcccgtgcttcagctctccggctaggataccttctgaatgcatgtaggttatctccttaattttctagggagacacaagttgggatcagtgtcatgctggggaggtgggggctgcaacagagaagacagagagacagagggacagaaggaaactgggagagggggtactcagagggtaagagctgaaggtctcagggcagacaggggcatatatagatgggtcaacagcagccagggatgctccgggccaggagagaggatgggctgctgaccagagcatgaacaaacccagatagtaaccttgcagcccccaggcccaacagtggtgacagctctcttcagtccagtgcacagccacccatccaacccctttgcaagtcacatggtcttcctggttaccatagataatggtggcattgtattctgcttagatatgtccttgttcaattagctggttaaccattctcccaattttagatccttagtcacatctaaaacagttgcttagattgacctatctagtaaatccccatactgtgggctattatttgat

SEQ ID NO: 19804 - DNA, 1833 bp, Mus musculus
ggtttttcaagacagggtttctctgtatacaccctgggctgtcctggctctctagaccaggctggcctcaaacctcacatagaccaggctggcctcaaacctcacagaggtccatctgcttctgcctcctgagtgctgggattaaaggtgtgctccacctccactcatcgaagctttattcttaattgtatatatgtctgtgtggttttgtgtacatgagtacctgagtgcagaaacagcatggtactggcacctgtgagatactcaacaaattgctatgtggtagaggctggccttgaacttctaatcctccggctgtccaggtttgtatctctctgtgcctgctttatggggtgctggagatggaacccatggctctgcatgctaagcaaggacctcatgtgagcatcatcctttaccctcctgtctttctttttaggttgacttccccagaaacctagccaagtctgtcactgtggaatgagaacaggacttctatcacaagactgtcgtcacctgcagtctgattcaagacctgaaccaactgccaagatgccacacgggaaaggaagtgggcctccgtgggcccctcatgcttccagtagagcttgacagctttgacgtgccttgtacccaaagtgctttgcttacagcaaatgctgtttctctgtgtcctgacgtcactgagaagggattgtttacacatggggatcagagcagactttccactactgtgcaatagagataccgctctcttcagagtaactgtgaacctttttttaaccaacactagctagttttaaaagtcgaaatatttataatgacgattgtatagcttttaagttatttttctaatgtgtggctttctgtagccatggtaacgccctagcccatgcctctggactacccagagtgctgtctctggacacactcgtgcaggtgtcattcatctcggtttggggcactggcatgagccctttgtctcctttctctttgttctccctccacaagctgctcctgattcctgtcccctgaaatcaacgcgtcccctctcccctctccctatgtttcctttgagcccagttaaagtctctcctcctttcaatattctcagatggactcaaattccttagctctctgacttctgcttaatcagattatggtttttttcttaagcccaggcagcactttggtcccggctccctgttcatagtaaaccagcctgagatgccccacacaagagggcggtttcgtggggctgccctgctctatttaaaagcgtgcacaatcaatgtactatgcaattttacaataaagacagtgcaactttttttttccgacttgtttgaatttagttaacctccttttccttacatctgagggtctgagcagtgtctggagggggcattctcatcgttagtgatgcagtttagatagcagttggatgtgtctctcccctccacctccccccatggttcattagtgtgttgaatttaatcctcgttgggaggtattttccattgctctagaggctgagaaatccaagatcaagacactagctgttttgatatgtgggagagtttgctttttttgtccctaccagaaagcctttgtactttctcactgtggaagaggcaagtgagctcctagagcttcttttaaaaagcacggattccaccaggtgtggtggcacatgcacagatctctgagttcaaggccaacctggcctacaaaatgcattctagaacagctagacctacatagaaaaaccctgtcttgaaaaccaaccccccctcccactccccccccccactcccctccccccccaccaaa

SEQ ID NO: 19805 - DNA, 3361 bp, Mus musculus
acacttggatgctacgcagacctaaacctcttgtggtaattgtaagataaactcatccattttcttttaaggtctacttgaagtatatcttttaagtaatcaacatggtcttatgtgaccacagggtgtggggggagggtattgtagggaaagtccaagactgttttgaaactgaaccaaagaaggactcaaggaaaaatcctagaagctcaaagtatagttgagcagtcttggttctgttgatcattaggatcaggaaactgcaaggcacaaaatggagaggtagcctgaagccccatgcctggcgtgcaggatgcgtgcctcagattttattccatttggttttcttagcacagatgcagcagtaagtagcaaggctactccttctcagtcgtcatccatcaatgacatctcatccatgtccactgagcacaccctggcctcagacacagacagcagtctcgatgcctcaacaggacccctggaaggctgccggtgatatgtatgttggagacggcgcacttgtctgtgaaggaactctcacttccatggccccgagcgcgtgggagctgatggaaccaaatcgaaaaactccatgttctgcatgtaagaaacacgatgccttgccctgctcagttccagtaggattgcctgcttagactataaaatgaggcagactatgtctgaagaaaaagtacaaaccacactgttagaaattttgttcaagatcatttcaggtgagcaattagaatagctgagtttcttttccagttgtgtggtatctgtggtgacagctcatgtgtaactgtggggactcgtatgcatgtgaccacaaatgcttgcttgaacttgcccatgtagcactttgggaatcagcatttaaatgccaaataatcttgcaggtagttctgcttctagaataatctcttaatcctctttagtaatttggtgtctgtccacaaaaaaatagattatgtgtattaattggccaccgtcatatatcatatcttacccactttatggtatgatttattctatcttttgtatttcagaaggaatataattaaatttatttaataaataaaaatacagctattcttaaatttgtgatgttttaggctgagaattaccactgctctatgtagacactctgtgccctttaaactgcccactgtgggatactttatgtacagctttctgcatgacaaagttcccagttgtattccatgctgcttaagacatctgtcaccttaaatcctgcccacgaatttcctttttcttgttcctttggacatggatctagaatcctccacagaacttcaccttctttatcacaaagcaccccatctcaatagaatgaagcggcaggctcctgaacccactgcctaatgttggcatagagctgacagagtggcttccccagaatggtcattgaatggtgcctccttccctgaacccacccatcctttgctcccctctccttatttaaggtgaaaggtgatggggtctcacagccgttccctctgcagccttccctcctgacttttctttctcactgacagaagccaccccgtccagccagagcgcttggtctcctaggagactgagctcactcactgtgcctgttggctgctgtctttttccattttgtggaggcatttcctttttctaagggaattcctcagatgttctagaagcactcagaagaacacagaagaaatattctagagagtaggggttcattcttgaatattttctgatttaaaactgctcacctgaaattgatactttcagatcctgatctgtaaattactcaagatttgataagaggctgagttctctgtgttgctgcagaaatggagttgggacggtcataccgtggctacctgcgctcagagcattttctcccttgagcttattttgttaacgattcatatcttgtgttcagttactttgggagctatggagtgtgttctaggaggaaacttgatagcttttatgaaaagtaccatctaatatgtgattctgtctgcacccgttgcatcctaatggttggtctgatcattggaacctttaatggacaacattaatctgaaatctgaaataaggattagctttgtatcatatatggatactttcaggtacagagtggaaatgctagtgtgggtgggggctgagacacctgtctatggcttcaggttattgggccctgggagcctgaagtcccacagtgcatcagtcagcatcatgctgtgctcttcctgctgatgcacattctttaaatgacttcccggaaacttaaggaggaaatacagaaaggagctgtatcatctaccctacactgtaaggggagtgtgctatgatagaggctcaccctggtcccacgggcaggagacagctgtgagtggatccaggtgcccccaaagagcggctttctctctccccttactctgcatatccattgagtctgttgtggatggagtctgtgctggtgtgctcagggtcttgtgccaagaccctcttccatccaggcaagtgcacctatgaccggcctcagagccccaaagaaatacctcaccccagtttcagggtcctccctcctgagcctagatttgccagggtcctgggacaatgcgaatggttttgaactaacttctgtaggcaaatgctgatgttggatgaagaactgaaaaatgtgctcaactttttcatcttttctattttatttttgtaatttatattgtacaccctggaagtcactattttggacatgtatttttataaaccgggtaactaatgattatctggaatttgcactaggttagtttttgttgttgttggcttaattttcagccaaaagtggaatgactgccccttccaggtccgggtttccatttcaagcgcaggtctggagggcagacatgtccagccagggtaggagagcggcctcagaacacaggctgctcagtgcctcgagcattgggcctgcagacaaaaccaggctgtgctctcaactttagaacacaaagaccagacccccggtgtgagaaggagaaagccctccattggcccttgctgacagccggggcctgcatctaaagcaaaaaacccaaccctggtttcatctgggctgagtggtgtgtgagtctgtctgctgactcctctgatgtcccatgccgatagtcagtacaggtgtgacctttcagatcgcgtatctcaaaagtggctttgcctaatgttttataataaaatatgtcatgtgctttgattggtggaaaataatacaaactacattttaaaagagaaaatgtacagcatgtccaattcctgtgtgtttcaaagtgacagttgactgtatctc

SEQ ID NO: 19806 - DNA, 1146 bp, Mus musculus
gtgtgtgtgtgtgagagagagagagagagagagagagagagagagagagagagagagagtcagtccaatgtatgcattgtacttagaaataataggtactcagttttctttggtacaagctgacatcttaaggccagtacttaggttagctgggagctgggcgtggtggcgcaggtcttttaatcccagcactcgggaggcagaggcaggtggatttctgagttcgaggccagcctggtctacaaagtgagttccaggacagccagggatacacagagaaaccctgtctcaaacaaacaaacaaacaaacaaacaaaagcaacaacaaaacccccagctggactaaacctatatttctagcttcatggtgacgtttagctttttgcctttcttttccaaatttgatttaaaaaaaaaaatccttcatcatagctaaagagagcagatttcacaagttgaagtattagctctgtcagtttctttttgtgtttctttgcattgctttttaaagctatttgttagtttattgaaagtcattttagcttaaaaaatatgatataagtagttcatgccattttacaacactataataccttttattcagggcacctctcatgtatatggaaccatctaagatgaaaattcagaaaaagcaactaatgttgatagttaaattaaatgctgatagcaatttcttattaccaattactgaaacagtaacttttacaaattttgtaatatttagatgtacaaagtcaatatatcaaaagcaaaccaaaaaggcagttgtactttttgtatgctaggatcagttagacaatgaaaattttaaaataccatttaaaaacatagtattggtggtaaaaactacaaaccattttgtaagaaaggagatgaagtaaacaatgtttttcatattcatggattcagagacagtattctatttatttattaatgtttgttgttgtttttttttttaaagacaaggtttctctagtagtgactgttctgggaaggaagtgctatgtagaccagactagcctaaaactcacagaaatcaacctgcctctgcctcccaagtgctgggattaaaggtgtgcgccatcactgcctggcagcagagcagagagtattcttaatatagca

SEQ ID NO: 19807 - DNA, 1118 bp, Mus musculus
gatgtcctggcttagctgggagtgtgcaggcatgacagactgcagctttttaggtggtcagtgtctaggccccttcctgctcacatctcccagagcttcccaagagatggctcactcaatggtaggatgtcttctttatatgagaaatgtggtcatgggatttatcaggtcagggtaacggggtggggggttgtaagattgatttgttaaagggattggtggtggttatgcagaaagcagggtttgctgagcatcctgccaagctgaatgagcgctttctctgcttactttcaggactccactggcctgtttggaacagagcagcaaggcaccagccctgccctcagtactgcgaaccacaccagagagctcggttttcctaggtggaaactaccaagtcctgttacacaagttaatgccccatcttctaaatgggcacggtttctcctggcacctggaaatagtcctcaagtggatgagaaaccaagtcctctgcaggaggccaccatgctagctgacctggcacaagggactgttgagaacaagactccagtggaaggccacttcagcagagcccctgccattaggcctcctcaagccattcacactaccaccccacaactggacagacctgacaggaagacccgagagcagccaagggacatggggactcctcgagcagatggtaggcctttggctcaagggacccagaaggctccacccttgcaactgcacaacctctttacaaccggagaggactttgatgatgacctgtagccttcactgttctgtgtccctcaatgccagtcctccttgtcacagactggggtgctctggaacaaataacccaacaataaacgtgcctgtcaacagagtcctcttgctgctacactcgtacggatcacagggctggttaaagtgcatatgccattttattacaggttacttacaaaccaagtcagaggaagctacatgggggtcctgtgctttaagcattaacattagacacaaacactaaagagtggccattagaaagggggacagtataagataagatccttcattcggcttcacatgaattctccattccctaggagctgtaggcccctgcctgccac

SEQ ID NO: 19808 - DNA, 1647 bp, Mus musculus
ttttgagatggcgtctcactgttgcccacgatgttcctgcttccagctcttgagtgttgggattacaggcttgagctatcacatctgtcaataaaactttataggaaaacagctgcacttatttgtctacataccttctggctgttttgtacttcagtggcagaactgaacagttgtgaccaggactggagagtctgccaagcaagctgtctgatcctttagcctttgagggtccctataaggctaagcagaggggtggggtcttcctggcaggcaggagctgctctgctgggaatgcagcaggataccttactttcctgtcttgttttggcagaggctgatccccggctgattgagtccctctcccagatgctgtccatgggtttctcggatgaaggcggctggctcaccaggctcctacagaccaagaattacgacatcggggctgctctggacacgatccagtattcgaagcaccctccaccattgtgatagtgctgtggccaagccccaccccctttgtcttgtagttgcatcacgtagagcagcagggcttctatagataggcccagtgtcttggcattcttgtagaatcttcaggtgggaatgtgtgatgccttttcaggcaataggaaagtgcatgaggagagttttgaatgtgcatatgctgacgcctgagaacagacccaggtacccgtggctgagctgagcttcctctgctttccctaggcctggcctctgcagggaactgcagcacacactgcactcccacctgctcttgccgccagcattgcaccagcagtccagaattcctgcctgacaacccgtgtttcctttattaaaagtgattagtacaactgctagttattttcaacaaataaagccattatgttaagaggggactgtccatagtgagtgaaaggtggcaggcaggggcctacagctcctagggaatggagaattcatgtgaagccgaatgaaggatcttatcttatactgtccccctttctaatggccactctttagtgtttgtgtctaatgttaatgcttaaagcacaggacccccatgtagcttcctctgacttggtttgtaagtaacctgtaataaaatggcatatgcactttaaccagccctgtgatccgtacgagtgtagcagcaagaggactctgttgacaggcacgtttattgttgggttatttgttccagagcaccccagtctgtgacaaggaggactggcattgagggacacagaacagtgaaggctacaggtcatcatcaaagtcctctccggttgtaaagaggttgtgcagttgcaagggtggagccttctgggtcccttgagccaaaggcctaccatctgctcgaggagtccccatgtcccttggctgctctcgggtcttcctgtcaggtctgtccagttgtggggtggtagtgtgaatggcttgaggaggcctaatggcaggggctctgctgaagtggccttccactggagtcttgttctcaacagtcccttgtgccaggtcagctagcatggtggcctcctgcagaggacttggtttctcatccacttgaggactatttccaggtgccaggagaaaccgtgcccatttagaagatggggcattaacttgtgtaacaggacttgg

SEQ ID NO: 19809 - DNA, 1172 bp, Mus musculus
tcccagggaccccagccctgccctgtcttcttggtccacacgtgcccaaagtctgcccactgggtttgttgtgagacattccacagggtccccacagggctgaaggaacagggttagtggtactccccactcagagcccttccctgacttcctctctcagggaagatgttcaagtcactggatctgagcctgattgtggagttcatcctcatgttctaccgggacaagcccatagactggctcctggaccacatcctgtgggtgaaagtctgcaaccctgagaaggatgcggtgagcaggggacacttgaagtcagcacagggaaggaaggcaggtccccagctgccagctcacactgtgttcctggctgtgcctctatagcaaggagaggaaactgctggctgaggaaatccccccctcctccccggttatcttgagcccaaccttgagtgtgggctgagccgaaccctaaggcgccaatctgttcacagaaacattgtgatcggcagaaggccaaccttcggatccgcttcaagccgtcccttttccagcatgtgggcactcactcatcactggcgggcaaaatccagaaactgaaggtggggtgtggcgcggtgtggaccgaacgtggtggaggcaggactggagggtggcactcatgtctgttgtacctccccaggataaagactttggaaagcatgctctccggaaggagcacgtgaacccaccggcagaggtgagcacaagcctcaagacgtaccagcatttcaccctggagaaggcctacttgcgggaggatttcttctgggccttcacacctgccgcaggagactttatccggttccgcttcttccagccactgcgccttgagcggtcagtactccctgggaaagaggacagggtgaacaccaattagaggcctcagcatatagtcctgggtctttaggtactccttctataacccctgaggtaactatttgccccatcttaaccccccatgcctcggtttccttactgaacagcactacccataatagtacttcctaccttgtgtggacctaggcaggtagatctttaatacttaatgacacttgttaccacagtcacagggtaagaccctggcttccttgcactgcccatggactgtccaagatggcgcctcacctctccca

SEQ ID NO: 19810 - DNA, 1148 bp, Mus musculus
ctttgccctttagaacccccagtcagagaaggaggcccttcaggaaggccgctcagccactctccggtaccctaggagcccagatggatacctccagattggtgagtagggcgggcctgtgtgggctgggcttttgggtgttgctttcgtgtttacatctaggcaccgcgctcccacaggctccttctacaagggtgtagctgaaggagaagtggatcctgcctttggccccctggaagcactacgtctctccattcagactgactccccggtgtgggtcattttgagtgaggtaagatcagctgggatgggactaagcatctagaccataagaagtcccaagactcctgctcatcctaagcccgactcttccagatctttctgaaaaaggccgactagaaggcttccaagggtgctctgtggccggctctggagcccacggttccgagggtgtcgctgctactgctgctgctgccccagaggaccaggcatatccaccccacctggagggttctgcctggcaggcggctcgggctggcctggggttcaccgctggcccggaggccccagaagctggtgctgctcctgcccgccgggccgcgggagaggcaggcggccccccacactgtgcctgagggccggcctgctgccgcccaaaaagaactgaaccgaaccgtttgcccctggccggtggtcttgagccgggccgttagaagagctttttcttgggtgcccgccgtgtgcggcgcaaacactggaatgcatacactactttatgtgctgtgttttttattcttggatacatttgattttttcacgtaagttcgcatatacttctataagagcgtgacttgtaataaagggttaatgaagtatgtgtctcataggtgaatgttcccagttctagccaggcgtttgcatgttgcctgcctgtatttggcctatcattttgggttcccaaaacttgctggtggtggggatagggagggggaaggctggctcacctgtgctgcgagactattacccacaattggctggctcctggcaggttacttggtgaagatgactttgacctctgtcatgccaaggactaagtcccagaccctcctttaccatgtcaagtgtctgttggcatacctcaacgtaac

SEQ ID NO: 19811 - DNA, 1214 bp, Mus musculus
atctctttccatgggtcccctgtggccgatcgccgcctcccaccctttgagcggcgttggggagcgaccctcccctgcagtgctttcccggaagtccggccagagttacctgagttgcgctgagcgcgcgtatccctggaaatagcggaggcgcgcgaacaggtagaacagtccgcacagggctgcggctcctgcgagagtcgatgcaaggcgacgcggtgagcacgagctcccgccatccgggatcacccccacccccgaagtgtgcccccacgctgccccgcaccttcgtggaagaagatgccggcgacccagagtgtggcgaggaacagcggaaagtactcgctgcagtttaccctgcgaggggtaggctgggtgagcgcgtggttcaccttggctgacacccgaacccgcccggacccgccgcgctcactgggctcggaagacgcgctcgaactcgggagggccagaggtgagcggcggcgacacgtggaaagcccttcgtgcagagatcacctgtagggagaagtaggctgcggccgtgggggtgtgggagtcaggtgtggtgctccgcagatctggagcgggatccgtcccttagttcccctctccttgcctctcactgagcgactctcttctaatgcccttctcccacctgccccatcagtggtgttcaatggagaggccctgtaggcctgagggttgattgactagggtgatgcgcggctgaaacacctgccggtgggaggaaccttagaagactttactcctgaacgatttgacttgcaaagcacaggcaaatgcctacctcccgttctgcaggtctggaccccctgcgtaggcaatggaccagggcaaaattggctgtattctttaaggaacaaggaagcacacgttctgtggctaagggaccctggtttcccctctacagaatcagccagaagggactctgccacaagccagagtcagtctagcttgggtctcagtaccaccacacaatagcataaattcttgtctcagtttctgtttagacatcatggacccagccttaaatctggcagatactgtgctccagatgcgtggagttgggactctcccaacctaagcccatagctattccactagtcactgtattgcactcccaaacagataccagctcccaccacaaggcaggcacctcaagtggcccctcagcagggtggccatccttcacc

SEQ ID NO: 19812 - DNA, 1107 bp, Mus musculus
gaaagacaagagctatgcatagcacaaccaatggagtcccagattactaacctagttcctatgcttgctttccttgagggggagaagcagagctactttcaccacggtgctcaagaaacaaagacagggtgtgggagagcagcactctcttccagaggacccacattcaattctcaaacccacatcggagcttagaaccatctgtaactcttcttccagggtatatgatgctcttttctggtcatcaggcatacacatggtgcacagacacacatgcagataaaacacatatgaagaataaaataaaattaattatctttaaaaggaagcaaagatataggtagagttggggacctcttcaaggtcacattccactgatgtcacttcctcccactaggatcctcctcctccagttctgccacctcccagttgtaccgtacgctatcgaccaacctttagcataggctgggggggttgggggagggggaggatttacgatccaaacgttaacagtaattttgccttttgcattcaagcctgtagctcacaaggactttgcttatgtgtcaggttgaggttgcatttttcccccctaaattttgagcaaaggcttgtgggtggggtggggtggaagtggacacttggaatcgtttgtttagattgaatgtgtgtgaatgtttcagctgcatgtatgtatgtgcaccacacacatccttggcgcctgtggcctgagctgggagtcagatcccctgtaagtggacttgtagagatggtttagagatgctatgtaggtgctgggaatcaaatctgggtcttctgcaaggtcaccaaatgctcccagcagcagctggggctggacatggaacatcgtacatttcccgcaagtgctctaccctgacctgaacccccagcctacaaaagacttaaaaacataattctaagcttaaaatgtgtaagaacgtgacaaagaattgcagtctccctttaaccggagttcttatcttcctaccacagttgacacccaccctgtcccccatctccaggtatgttcttgcaaacatcccccccccctccccgaccattttaggataatttggaggcaaaatg

SEQ ID NO: 19813 - DNA, 1863 bp, Mus musculus
cttgtctgccactcactcttgaggacactgggcccccatggaatccctccatgccctagcatggctaaatgctgaaggtggaggttcagcatgtctgacaacccggatgtacaccgtagaagtgccattcagttgtacacacatctttcctcctccacatcatccccacgacccttctaactcctggcctcttccagccaaaacgggaaaagtggctgacttcactgcattagaagaggaaaagtccaactccttagggagtctgagcctggcacgggcttggggaaagaaggctgcaggcagcctgccgtctaggcatcactttattttttatcctccagacttctgctcctcccacagctgatgacttgcacttttaaagtggttttataacactaacccgtccttgctaaagattgaagtaggttctcttaaaaggtctattgatggacatgtctgagcagagaaaccgtggaatagaatatggtgcgtgggctgctaacagcaagagggagcacttgtcttcatcacaagcaagatgatgagcacagagtgagacctttaacaggatggcggagggaaaggtgtttgctggagtgacttccgtgcagagtggtctatagagaaactacagctctgcccattgtcctggggtcctggaacttcgtccagtgttaagaactgagccaaggagaagcacgagcagccttcgcacctggagggtcagaacgtgcacacactgctaactagtttgcaccggcagtgcctttttcactgagggcacctgtgctctcaggtccttgtccctcatagccatttctcctgccatgtccccccctcccccagcccccagaaactcagttcagctctcagagaagcaggtgaatcataaagtcagtgaagacgccgccctctgattctccccactgtagggggaaggaagggagtgacttcagtgggttctctaccaaaaacagggctaagggctggagatggatccccgttccttgtccagcctcctgctaccgctgcccacctcctgcctccattgcccaggccacactagttggccccagcactctaccttaggcccaggctggccacaggcagtgggcagctcacttgctgcagtgtcatagcaataaaatgtgattcttggggtctgcccagagctgcccatggctttatttatgagtgtggctttgaggagttgggaagaggtaacccacttctctcccatcttctccgagccatgactcaagaagaaaagggtgctcggactctcttatacacatgtgctttgtgtaaataaatgtttacaattttatattgaagatggaataagtgttagagcgtccaactgtatattttttacttttatagattttaaaactgatcctttatatgtgtttggagctatgataagttttatggcaagcagttggtattgttaactttttatgatcatcaaaagtacataaaagtcctattaatccccttactctgcttcccttagctctggtatacaccaaaaagaaatctttactttccttgtgttataaaaataataaaaatattttactagtatggaaatcacaagcatgtttgacttcagtgggacatttgacagctgtcaatttctctgattagcttcactctcttcctgcatgtcttgtgggggctcccttgctggtggcaatgaaggcagagagcaccactggcatgctacaaaagagcagtcctctcactgtggtcagacaagacagatggggaacaacacattctaggcctccaggaagtcaaagtgggactggagagctggggccgatacaaagcaatggtgcactggaaaaaaataattag

SEQ ID NO: 19814 - DNA, 2637 bp, Mus musculus
acatatgatggcccacagctatctgtaattccaatccctggggttctgatgccctcttctggctctgagctcatcaggcatgcacagggtagagatacagatccaggcaaatgcaaattaaataaaagtaaaatcctccaccacagtttttaaaaagttaataggtttagggaaagtacatgttttctgaaaagaaagactaaaatcgaatacctataattccagtacctttccaccaattgaatgacttagtttaaatggttgtggaatttggcaacatttgtttttttaaatacactaacttttatgacttctcttttcaactaataggaggatgaaattttgaacagatcgccaagaaacagaaagccacgaagagagtgaaacaatctttaagaacttgatctgtgatttcctctccctccccttcccctgcaaatgtggtcctaggagagggcctggtgtaccttaggtgggagctcaaaacctcaagatgtcaccatcaacaggttccagtgaatactagcctgtaattttaaacatctagcagtaaataattgcagttgtaatgtaaaggaccctgtttctgtagaaaggaaaacatttaacataatggttgtgaaatgtaacatgaagcaactaactagtgttttgttgtttttaaaattttccaggtttgtctttttttttttccttttccttttttttttttttttagatacaatgatagaatttttgccagtttaaaatcttggcttaatttaatatattcatttgttcatgcagaaataacaccaacattaggaatgctagggagaatgaattgccgtttttataataacttttttaagtttggtattaaagcattcatgtgtctgtcctaaaattgtaatcacgttcaagtgcagttatttgtggttataaatcttgttttgtgtgcttccattagttaattcctcttaaagacacaagagcgattggatggaagcccaaatttatatcaaagttccctttacattgtattgaatagacccaaaaagaactaaaaggagactttgacttggtcatttcacatcagatcataaagtgcagtgttctgttgccctagagactgctccattcacaagcacctttgaagagggaaggagctggcttcatgtagcagttcatactgtacttcccacataggaggtctgacagctcgggtcctctggagcacaaggctttttaaggaatgctggtggtgcctgggtagataattacatcacttgttccactgtgttgacactgttttcctcatggatctcctccattcctagctttctctgctatgcattttcttcacagcgcagcttgcggtccgttgctgaaaattataagctctgcatagtgttggctttactgtgatgacatgtttcttcttttttagctggcccacacctttctagggtccaactacaggatagattacagactttccattagtgtctatttcttttactctgtgtagactttagaaagtctaatcaatccagagatgggccaattcagaattgactataattgaacacctgctaaaagtatttatgggaggattgacacacagcatgagttatttgacttttgtaggatatttaaaatcttcatttgcagttcatgtaacagttgtgtcttaaaattcacataataaagcagtcctgttcaaaaaaaaaattttttttttgtggcttgtagaattttttaaaagtgtatttagggctttttgttttttgtttgtttttttgttttgtttttcatgtggaatgcagatgggtgctagaggagcctctcccacatcactatagtgtaatattattacaccacactgaaatgtattcagaaacagatgtttcaatttcattctttctccagaggtggtccagttgtaccaatgatactattccttgcactgaatatatataaacactcttcagtgtttatattggggaaatactgggaaagaaatatatttgttaaggatgaaggctgtatctgttgtctttataaacactggttcatttcttttgagggtggaatgcatttttcttcctgttcagtgctttatcaccatctgttgtttgtggtcacagtgaccatagctatgtagcggacgtttccaaatgtatagagtgaaataaacagttactagcaagaaatgaatacatgtctgcaggtttctccttgaagcaaacatggggatgattgcttttctagaaatcggtttatctgtttcatcattctacattgacattgttttgtgcctactttatattcacccaggctgtacaatgacaggtttatttatgtcactggtggtggtcattgcctttttgggtccctcttcctccctcaaggttccattgaagctccagcctccttaaatacctgactcgttagtaaatgatcagcagtcttcagctcttaaaaaaagcgtagagggcaggtattgtagctgagtaggtagaactgctaagcgtgtgcaaggttccgtgggtctgattcctggcactgaattaagatagataaaggcccttatattctgattttctatgctggactccttgttgtaaaatgtccatgccagtagtactcttctat

SEQ ID NO: 19815 - DNA, 1145 bp, Mus musculus
ttctattcttatttatctatgactccttccctgcctacactctctcaaacaaaacatcctcaaactgtgcttttaggttctacagcctcagtgtttttcttattcagaccttgtttcatgctgtctccactaacttaggattctatttaaattatttacactttgtcagatccaaagttgtctttctagctttaccctcactactcactgttggagtctatgagtcagcttgtcaagcttagcctgtgcctcctgaccaagtcctagtgcttgttctggttttcatgatacccctcccccttaacttccctctcaatctccctcccatggggcaaatgtgtagagttagaacaatgtctttcacatgtctgcataactgccctctacacaaccttggatagaattttgcctgtaaacattcaggaattgaggggtaatatatttgttacaacataatcatggctcctacacttggcaatatttcagaaacagtccaatgctatggagtacaagaagacggatgctccccagccagatgtgaaggatgaagaagggaaggaagaagagaagaacaagagggatgaagaggaagaagaggagaagcttggtgagcggagtctagaaacctgtcataaaccctgactaacaaaacaagctatagtagattgttcttaaatgatgatataattattgtcagaacttttatgtgaagatctgttcagtagatttattttctgtcttagaagagaaacagaagagtgatgctgaagaagatggtgttactggcagtcaagatgaggaagatagcaagcctaaagcagaggtaagggagggataataaatacttcaggcaacaaagctgacagcgtaaacagtcctgtgacacttatatctcctcactgtcccctcaaaggtatttcttgaataccactgcattttaaactatttttggtttttcaagacagggcttctctgtgtagcccatcgtggcctggaactcagaggtctgcatgcctttgcctcccaaactttttgagacaggctttcatgtagtctacactatcctttcattctgtgtagtcaagggtaatatttattgatcctgtaatctttctgcctccattcctagtatgtgctcatacagg

SEQ ID NO: 19816 - DNA, 1224 bp, Mus musculus
aacatttagctattcggttggccaccaccaattgtgttttgttgaggattagtattgagactgaatccagtgtctcatgcatattaggtgtaagtgctgtgtttctggcctacatccctagcccattttttaaaatcacttctggggaatgggaaatggctttactgactacattccaccatcacttgttgagggtggagtgagctacgcaggaccaggtgttggttcagaataagatcctgcagattggagactgaatttggtagaagtcaagaattcagtataaaaacattactagcatttattgttctgtgcttgtttaaatttggcagttaatgtttatcttctttgatcatataaaatgagtcttacatagattttctttttttgttattatctgaaatgatgttttgaaacttcttttgtctctgcctcacccccaacctactcccctctccaaatcacaaactagggaatctggaaaccaaggaaaataccaaatccagatttctttgaagacctagaaccttttaagatgactcctttcagtgctattggtttggagctctggtccatgacatccgacatcttttttgacaactttatcattagtggtgaccgaagagtagttgatgattgggccaatgatgggtggggcctgaagaaagctgctgatggggctgctgaggttagtgattgttcattaattgtggatttatatccacttttgggggagactgattactttataaaaagcagatttttagtgtttatctttttacttattcagtgtcaaaatatataattgttagactcctattctggctttccaatcctgttatatgtatgtgtatatttgtatctgtttatcattttattttattttattttgtcttcaagacagtttttctgtgtagccctagctgtcttagaacttgctctgtagactgggagggctcaaactcacagggacctacctgcctctgcctccagtgtttcaattaaagttatgtgttattgcacctggcttaagtatgttttaatgcactgaaaatgctgaatcttggttggaattgtgtggaattttcaaataactaatggtgttgttgagttgcgatttggatggccagaaaactggcagaaagataattcttctgtttcctgagtaaggaactttttgcagttattacaagccacagtttgcacctatgcaggtgaaacttc

SEQ ID NO: 19817 - DNA, 1201 bp, Mus musculus
taacttattttattattttttgatagcacttcacagttcagacaggcctttaattcagggttttcctgtctcagtcacccaagtactaactagtacaggtatgcaccagaatactcggtttacatggtatacttagatatgcttttgaatgttgcttttaagtgactgaatctaggaaaatcttttcatctcccagggttcactttcccttttgtataggttgaaaatgcatttgttgttgttgttctgtgatttgaaaccctgattaacaaggaacagactaaggttagtggttttatggaatttaaaatgggaaacagtacatttcacattccattctttatttttctttttctttttttggttttttgagacagggtttctctgtgcagtcctggctctcctggaactcactctgtagaccaggctggcctcgaactcagaaatcctgtgccttccaaatgctgggattacaggcatgcgccagcactgcccggcttcacattccattctttttgcagatagatcatggaagggaagtggttactgtgtttgctgctggtccttggaactgcagctgttgaggctcatgatggacatgatgatgacgcgattgatattgaagatgatcttgatgatgttattgaagaggtagaagattcaaaatctaaatcagatgccagcactcctccatctccaaaggtttgaagcagatcagtccttttctttttgcttttatgagacagggtatcttggctgtctttgaactcactatgtagaccaggctatcttggaactcaaagatctacctgctgggctagagaggtgactcagcgggtaagagtactgactgctcttccagaggtcctgggttcaattcccagcaaccacatgatggctcacaaccatctgtacagctatagtgtactcatatacataaaataaataaataaatctaaaaaaaaaaaaagatctacctgcttataccttctgagtgggggattaaaggtgtatgtaaccattctcagcttaaagtagatccttttatcttttggtttaaaaaaagaaaaattaagccagaggctggggatatatagttacttgcctatttcttaggcactcctccaccccaccccaaaaaggggattgtttttaaaggcaaagcagcttttaaaaaaaaatacttgctaagctttctgac

SEQ ID NO: 19818 - DNA, 1462 bp, Mus musculus
ctcctgagctcagggcgatgactccgcaggaaaggcggtgtctgctacccagagggatttcactcactgcgcaagcacaccgcccgacctctcaccatttgtgatgaaggccataggtcccaggcggggttgggacagagttcctaactcaatgggtcggaaagccgtcttctggatgtccaacacacccgccctgagggactagggcgacccacgcgagaacgcgtgccagatccgtccgccctccgcggcgcgcgcccgcccgtttggtgacggcccgccttcctccttcatacccaatcagcaaccacttcctgcctcgctattgaccaatcaccacgctccacgaagaatagccctagggggcgtatgggaaggcgcttcgagcgatggctgtatctaccaataaattcttagatcttgcgcaaaggggcgggatctgacgttcgttttagccactcaggaacgaggggcggacgcggggttgggcttcgtgcggtggggctcgctcgcgcggcggccgtagccgaggcctcttagttctgcggcacgtgacggtcgggccgcctctgccgctgtctccactgcagcacggggccgggtgtgcgggtgggagaaggtgagggagccgccagtggtccccgggaggctcgaggtgagacgggaagcgtgtgcggggatctcaggcccgggacgagccttgggggactgggcgagcggcgccgtggcggagggggtcgggcgtggctgtaggctcgacgactgaggggtcgggcgggctttcgaatggcgcaggcctgggcggacgcgcagggcagtgaggagagcggccgggttagagaggctagcctgggcagcgccgccggggtcgggaggcgtggcaggtgtcctggggtttcccttgacctctgagaaagctaacaacttcctacggctttgcttctagagctttcttaggccctggccaggcccacccagaggtgggctgagtaatccggtacaggtgtggtattagaattcggcctagtaggtagcccaaatagcagggaaaggtgaagtaaatccagagataagcgttacagattagaaaataacttgcccaaagggaagactggaccatagcatcctgatgagggagtagaatgtactagaacgtgtaccgcttgagaaacttaaggcttaactattaaagcacctgcctattcggtggtggatagatagtaatccagtgtgggtgttcacaggaccttaagagcaggagatacaagcgaaagttcagttagtgaggggaggaaactgaggcctagaagtttgaaatgactggcccaaggtcatacaggtagttctagtcatccagttgggattgtaactgagcactagaccgtttgggttaaaagtcctggttcaagcacctaactgcaattaatcgggggagtgggaatttgggagattttttttttct

SEQ ID NO: 19819 - DNA, 1192 bp, Mus musculus
tgcgcaggcgcccgcttatcatttctcctcagccacgccgaggctttttgtggaggtgagtgactttccgtcttcgactgctgcccgagctctccacggacacctctttgggtgacgattgcttgtcgctgagcttaggttctaacctgaggggccgtggcaggcgcaggctgcccctgggagccgcgagtgtctcgccggcgtggcagcgccgcctaggcctgcaggccgcgccgctttctattgtgtgagatgtctgaggaggcggagcggaagcggcggccgccatttcctcgtctcaaccgtggctgtgggccagggtcttattagcttggcgcctcggccctgggcgcactgggcggctttgggcatcgggtcgctagccgaggccgggttgcatgcttgagtctccggggcccaggcatcctgacgggcgggactcgcatggcggcgcccggtgcccgctgtgcgccgtgaagtgggagggccatttaaatgcctgttttctcagacgcgttcctgacccccacccccaccccgcagccccgcaatctgtgtggacgccaggaccaccgaagggacgatgatgctgggagcagaaggcggagagggcttcgtggtgaaggtccggggcttgccctggtcctgctccgcggatgaagtgcagcgctttttttctggtgagttgaggcgggagttgtcagtggggcccgcggctgggccgggccgggccgggttggggcggggcgggtctcccgggcgccccctagcgagtcgcggccaccagcggtttccccaggcggctcgcgctctgttggccgctgttacgcaatggtaattgcgaaatccgcaccccccccaacccccttggggatgctggtggccctgctgaatttgttttcttttaaaactttttctgtctctatgcatcaatctgtgcattctggagtagtctaagaaaaatttaagtagggaaagatgtgatttcttctcaagtcgtgtaaggttttgtaaaaaggtacttgtagtgttgaccttaccatctgaatttagctgtggtaacagaaaacgatctgtaaatcgagccccaagtatactgcaagcaattgcagggggccgttgccgtccgggtttgagttgaactgcagcttggagcctttagttgttaacattggtcccttttcggatgaat

SEQ ID NO: 19820 - DNA, 1291 bp, Mus musculus
ctttaaacttaaatttccacgttgatcctgaagaatccacttaatggtagcacaagagtctggcaagttggtactgcagagaaaagggtttaattgagatttgtttggagtcgggattccctttcccagacagcatctcaccacttggacagcagccatttgcactcgtatactttttaaattttttcttggaatgctattttattttactgattatttagcatcattcctaacttgtcaaatggatctctttacaggtagccaaggagcagtgaacagcagctactacagtaatggaagccgagcatctatgggcgtgaatggaatgggagggatgtctagcatgtctagtatgagtggtggatggggaatgtaattgattttgatcactgactcttggtcaaaaagaaattttttaaaaaacccctcagtttaacagattttgcaatccatccagccttgtggttttatgcctgctcttaagtgaacattggcgtcgctcaaagaaggctcaatgttgagcatagcagtcacctaggatgatagagcaaagctgagtgaactgtaactgttaaacttaattcctagcttttctctagttactgtaggatgtacgtaagcagtaagtgtatttaggttaaagcagttgaattatgttaaatgttgctcttatacatacattgaacactgttgatgcatgttgaaaaacatgcttttttgtaaaactataggagctgcgtctacaattaaagtgatacatttggcatgtttgttaattctaaatttatttgataacctgtaaggcacgtgagtttaaagctctttttttttatttttaagttaatggagaagttttgagagacaataccattattttttaggatttttggtcttagtgtttgtatgaaattctgaggccttgatttaagtctttcattgtattgtgatttctttttaggtgtattgcgctaagtgaaccttgtcaaataaatcttccttttaaaagctacactctgtctgtgctttagtgtcctgtgaacttgatgttttatttctgccaggtctacctttcttgctaggacaggctggctaggctagctaaagttgctgttcagatgtctttagacttccagtggggcccttgcagaagggttgttttggcctggctgatcatctgaatggtctataacatactctacatgtgcatgaggcttacaagtgccaacattcaacactggctccagcatgggtgaaacatgtgccagagcaaaggtgcaaggcagcttatctg

SEQ ID NO: 19821 - DNA, 1193 bp, Mus musculus
aaaacttcactaaactgttacaccgtttaactaaactgttacactgtgtaactcgttataacactctgttgagttatccacatgtggcagaaaatgcagtgtgagggatccaaagggagtctttcccaccagaaactgttgaactgttgtaaagaaacttaactaaattgttacacagtttaactaaactgttacaccgtttaactaaattgttacaccttgtaactccttatgaaactctgttgagttatccacatgtggtaagccacaagcctatcactaaagaggcagaagcaggaggatcacaagttcaagtcctgcctgaggtacatagtgagccactgttgcacagccatacagaatgtattggcctgatggcatccttcatctttcaggttattatagccctaagatccagcatgtttaaagagtagaaaattatccttttgttgttgttgttaagtttgtgacatgatttgaaatgtattgtcccaaggtcactttccaacagtgagtcgttcttggtgttcttgtttgattcagataacaaaacaggacaccaaggttgaactggagacttataagcagacccggcagggcctggatgaaatgtacagcgatgtgtggaaacagctgaaggaggagaagaaagtccgactggtgagccccagggccttaggaagagtctgtcaactgccctccagatgaaacctgtctacactccacatgcatgcgcacacctgctggcgctcctagaaagccggaaattgccctttttagcttaccctgcaattctgtcatcatttgtgttggtccccattgtctgagtcttccctagaggctgctgggaggccagctctggctccactgtcacaggctcgggcccccttgtctccacgatgtgcattgggagccacaggtccttttccaacctagttcttctgtgtgctttcttgagttgacttcctggaatgcattggggacactgtgtcctgaggtaccaggacagaaagagccatttcagaatcgtggtacctgttccatgatcaagtccaaagtattcagaaactgtagtcttattccctgaggtctcctggtactcagtcacaagctaagcgatcctgcaggccatgggttctgttttctagtttgagacgacctggcttctagaactcgaggctcatgttgccaag

SEQ ID NO: 19822 - DNA, 1194 bp, Mus musculus
cttctataactacttaaattctcaaagccagcgacagcccagatggaggtatcgctttggtatgtttccgtgtgtggttgcctttttattacacagcttttaatattttttttccttgtagtgctgacgactgaatccagggccttgtgcatgctcaggaggtgctctcccactgagctgtgtctgcagcccttaggatttcagtataaagttgcagatgaatattttatattagacaatctactcattaccttaatattttataactaccctagacctagttccttttatctttgacttatcccactggtttgtcactttagaattactccaggagcattaatcagacccttctgtctgagcaaaatattagaattaagcaggcattcagcacttaattgacttcttttgtctcatcagtagttgtatgtgtttaaatgtatttgcaggaaaaataagacttgaagggagcctctgagtgtcttcttgtccctagtgagcatgctcagtgcccagtgtttgattcacaaatgccatttgcctccagagggactcaggcctcctggaagaagtgaacagtggcacgtttgcagtgagaggggaaggcaagtgcacagagaggatagttctgtgttaggacatcattttagggttattgatatgagtagacacagggactaacttgaaggtgcatcctttgatcaaactttaagacacttcaaacaaaatactcatgacagggttggatataatattttctaaaggttatggggggaaaagctttttataacatttgaagaaaagcatcctttaaatatatacaaagcaataacaaaagccttttagcaactgtcattgtcattaaatctagcaaaaagttgattgatggtaaagcctatttcatgaaagacaattaaggaacatttcctcatcccgagagtacagctctgagtcgcaagagacacatctgctttcatcctgagatctggcaggcagaagtcccctcctgagcagcagccactgtagcttctcatgaggccgcagaagcacattttactatttatgacatactgccaaaaccagttagcgagcatctatggaaatctcttctctagacatacctttctgcttacaaagaattgagagtaacatgttagattatatggtaatctagagtttgagacattggagatg

SEQ ID NO: 19823 - DNA, 1160 bp, Mus musculus
gggaaatctgatttgggcatcacaaaattcacattgaatggacaatgtgatagtgattaactggacagccaaaaaatctgattcacccagttctaaccgcccatgagccctttatctagtaatgagagatttggaatatacaaagtctgtaggatctatattatccaaaatgcccaacacgaagattcagtgaatttttttttgctgttgtatttgctatggagatgcttttatttcatagtatttttggggtgttttaggttaaagttttctacctctgactcttactgtccttcaaatccctgaattactaactcttaaaatgtaagctagttgctactgggtggcagataaattgtgcatattttaatgccatagcatgctgttttgagttctcagctaatagtcattaaactgttgttaaataaatttactctatttagatgacaatgtgacttaaatataatctctaattatctaggaatcaaatacatatctttgtgtcttattggagagtcatagaaatttaaatacagatgaattgaacactaattgtgctggacagtattatgtcaacttgattgtcaactaaagtcatctaagaagagggaatctcaattaagaaaatgcctttataagattgggccataggcatacctacagggcattttcctaattagtgattgataggggaggatccagccatttgtgggtggtgccatcccttggctgatggtcctgagttctatacagaaagcaggctgagcaagcagcactcctcatggcatcagctcctgcctctaggttcctgccttgtttagttcctgtcctgactttctttggtgatgaaaagtgatatagacatgtaagccaaataaaccttttcctccacgagttgccttggtcatggtatttcctcacagcaatagaaaccctaagacactaatagacataggaattcacaaattaataaaacatttgcaattctaaacctactcagaaccaccactggaatagtttatacagcatgataatattaggattattaagcacctattgactgagtcctaagagataaatatgtgggaaaatccctgcaggctttctggatggcagggacggtttagtccaagaagagacaaggcatcattcataacgat

SEQ ID NO: 19824 - DNA, 1158 bp, Mus musculus
cagtcagttatgaaaggatctacctatgctttaaagaacatgctaatagacagaagagggacatgggctcttaagcccatgtggtggtttgaatgaaaatggcccccataggctcataggggttggtagtattgggaggtgtggccctgttggagtaggtctggccttagagcaagtgtgtcactcaggcatgggctttggggtttcagatgctcaagtcaggcccagtctctctcttcctgtgcctgggaaaccagatgtagaactctcagcctcctctccagcaccatgtctacttgtgtacaaccatgcttccttcccatcataatgattatggattaaacctctgaactgtaatccagctcaaattaaatattttcctttataagaattgccacagtcatggtatctcttcacagcaataaaaccctaactaagacacacagataaacttttcttcccctacactatatcaggactgtgcttattgccacattaaggtaactagcacactgaactggtgataagacacatggagtttgatgaaaattggttctaggtttgtggcaggaatgtggaagagtttgaaggttcatgttagagaagcctgagaatgtcatcaatgtctttctttatatataatttatttatttatgtatttaatatttattactttttttctgtgcattgctgttttgcctgtctgtatatttgtatgagggtgtcaggacccctggagctggagttacagatggttgtgaaccactatgtgggtgctggaatattaagcccaggtcctttggaagagtagttggttctcttaaccactgagtcacccccttgtcccccatcattaatgtcttaatgggacattctggtgaggatgcagaatactgtaattccagtagtcatctagacagtaagcactgtgctaatgagacgtcacatgagaacggagactctatataaactgggaagagaagccatgttgcattatgacaaagggcttgtgtatattctgcacgtgtcctgaaactttgatggaggtttccagttcaaaagccatgaagctgctggatgaacttcgaaggcaacgtagccttcaggctgtagcatggttaccgcagactacttttaaccaggttgacattgagaatt

SEQ ID NO: 19825 - DNA, 1236 bp, Mus musculus
tttttctcttgtaggaaacgcaagtatttccaccataaccagctagattgggacgagcatagttcagctgggagatatgttaggagacgctgcaagccgttaaaggtaaagaaaaaaagataaatgattaagtaacatcttcagccatgtcttcatttaacaaggccatccctcacctctaggaatttatgctgtgtcatgacgaagagcatgagaagctgtttgacctggttcgaagaatgttggagtatgacccagcgagaaggatcaccttggatgaagcattgcagcaccctttctttgacttattaaaaaggaaatgagtgggagtcaggggtcttctgtgtacttctctaggagcagttacttccagactgtgtcagtcaactaaaccttctaatatttttgtaaacattaaattattttgtacagttaagtgtaaatactgtatgttttgtatcaatagcataactaccttgttaagtatggtgttgataatgaatgcaatacaagagttacaatgaattttccttttgatgttaattgccactttaaaggcttttagaatgccctttgtgtccagtgataaacgtgattggtcccatcttttgtacatgaaggttgactctgaagtgatttttttttttcctcaagtaaaaggaaatcttgaccactttgtgattgagtattctttatacaccttagatgtagaacttttcatgacaaaggtgggtttgggttttttgtttttggattttttttgtaattgataattgaacagccagcattctgggtgggcagattttaaaacccaaaactcaaaaaaattagcttggtaaagtttcattaaattttaagttttctgttcttttgggtgatatccatgggccctcgtgaaaagacatcccattagtccatgacagagtttaatcaggcaaaaatcttaattttatattacacacagatttgagctgtatctgtctatatttcaaaccacaaattatgtggagctttcttctgcgtaacaagtagtaaagccaggctttcctcttgctgtcttagaggcagttttcccagtatagcaaggctaggaacttcctgaagactatatatatatagctgcatgtcctaagagttctacataaagaatatctagatgtctcatgcagttcacatgtcagcatatgccaccttcaggacaattggggtgtgagaacatttctgaaggcgctgttt

SEQ ID NO: 19826 - DNA, 1084 bp, Mus musculus
tttatgaactctgtttgtcttcctgggtcttcaacttagccaggtagcaagatacctagagagaactggtctagccctgtctccttgcctctagacaccaggcatgtcagtggtacatgggtaaacccccctcccaaatcttttgaaaagctaaacaagccaatggacaatggtttggggatttgacagtgttggcacatgccttcaatacctgcactcagaaaggagatgcttttggatctctgattttgaggccagcctggtctgcagatttaattcctgaatgacagctaaggctacacagagaaaccctgtcttaaaagggaaagaagtaggacctagtgaggggcaagcatttaatgtcggcaacattcaagaggcagaggcaggtggctggtccacataggtccagcccaaacagtttttagtgagaccctgtttcaaaatgtgtgtgtgcatatattccatatgggtgcagaaatgaaatgccaacctaaccttggatgtggatgttaacaggagacatccatcttggttttggggacaatctctcactaggacctcgggctatacttagagactatgctggctgtgtagcaagcccaggaacccagtcactgccttccttgttctgagattacaggcctgtgccacaaagcttggcttttttttgttttttttgtttttttaatatgggttcttggtcctcctgtttgcagggcaaactgctttatggactgaactctcttgtccttcatggatttgtttgattttgtcttttgtgtgtttgactgtgttaggaaggaggagaacaagatacaacctaagggatgtagcttagtggcagagtatttgggcgttagcactgccctgatgtattaagatgtttcttgtgattctgaaatcaaacaaaccaagggctttgtacttgctaaacatgtgctgtactactgagctacaatttgagcctacaaacatcattgtagacagataaatataaacatttccatgcattgaacaggatgttcagtgccctgaagttattcaactgtattgtaagtgcctcacagccaggttagtaaga

SEQ ID NO: 19827 - DNA, 2081 bp, Mus musculus
ggcaggttaggtagtgcaggggccattggcagcaggggctttggagtcagacaggcctggcacaggcactggagctactgaatgaagctctagcttagccttctcagtaaggtgtaagaagctggtgttgctgtgtagtgttaatttattctgaggatgtgtggcaagcgcctggcactgggtaaatgtatagttaaagtagtagccacaacgttgttcttattcctaggtcagggtagtacaaattacggaaagagccagcgacgtggtggtcatcagaataactacaagccatactgagaggcagcaggagcggccgagtgacgaccgcacacgctttgtttggacgcggagtgaacacaattatgtaccaaatttaacttggcaaacttttatggcctgtcccatgtgcatcttatttaaaatttcccccagaaatcactctcctgtttactattccagagctctagttgtaggcagcgtgtggcgtctcagaggccagagcggcactagggggctgattttattaccaggttaccctgttctagatcaggagggtctatttcctgttgccgctctgcagcctggacctgtggaccctggttgtaaagagtaaaactgtatcttaggaaaccagtgtcacctttttcaccttttaattttatattatttgtgtcatacatttccagtaatggaagtgttaattttactgtactttttggtaccttttgggaatctaatgtattgtaaggtattttacacgtgtcctgattttgccacgacctggatattgaagctatccaagcttttgaaataaaaatgaaaaacaaaacccccaagcctgggtaaatgtgggatgctctgtgagaccttgcccagtgttggagatgccaggtctcctgtagcaaagcagaggtcctttagttatcccatctgatctttttagctgcccttttgtgcccattgtctccatagcagagaccatcttgccatgtattatatatattccatgttcttagtttcagtcaagtacaagttgaaatgttggggatctgctgatggaggtggggccaagtctggcttacctggggggtgcttgatcctcagggtttcacaacttcttactttttcttccatgtctggaaaatgatcacagatcgtttctttttccccccaagacagggtttctctgtagccctggttaggttatcctggaactctgtagaccaggctggccttgaactcagaaatccacctggctctgcctcccaagtgctgggattaaaggcgtgcgccaccacgcctggcctaccctcagtttctaagatgcttgggatagtttagagattggcttatgtctcatcatttccctagcacagatggtccctttgtaagcccagtcaccactcactgttctgtacacatagaaccctctaagaaatgtatcaattccaaaacgcagtaggggtggctaacaagcaggaataggaagggatccttggtagcttgttttttgtctgttgggatctgagctttgtataacaaccactttggtgtatagtcatttctagttcggtagttttcttaaataaattgagggagaccttgggctgttcttgaccttgagtgatttaaaggttatggggaggatttgactctagccagccagccattttagccactcacatgtgagggtgcccctatcttgaagataaaatgaagctcctgtcattaacagtttcttttggttttttgagacaggatttctttgtttgatggcccttggctgtcttggaactttatagaccaggctgggattgaggatgtgtgccatcgctgctggggtgaacatgaaggcatcttgcattttaaaaaagataaggtgtaggtagcccaggattatcttgagcatgtgatctcccccattctacctaccaaattttgggatcataggtggtgatgcccatgtttagtcagtgcaagttgctactggttacaaaggccatcctttctgatctaatggatacttgttataagatccctggcgcatgctgggaggctctagttacacaagggctgat

SEQ ID NO: 19828 - DNA, 1104 bp, Mus musculus
acctaacctgcctcccctaggaggaagtagatagggcctccctctcctacttactgtagtcgtagccggggccgtagccgtaatagccatagggcgagtagtcgtagccgccatagcccggcccgtagccctgctggtagccgtagccctggttccagtagttgccgtagccctgattccaactctgactctgacctgtgggggggagcagggcacaggggcccatggaccatttagcacacgcaggagctaggatggaggaaatcctgccctttgggtggcggggttattactatggcaactcaaaagccaagaggctactgttctggtacagagggccctaggcccagccttataatccagaagggccaagatgccagttaacttcacttgtcaatacagaaagctttacactcactcaaatcaccctctgatcacctccgccctctgatcacttccaccctcccttggcagctttgccttgaaaaagatgcagttcaggctttggagttagaggggcctgggatggagggagctgagctaagcgcctggcacagctttgcctttctgcccacagctatgtgtgtaccaagactcaggacagccacaaagctaagcataacccagtgtcaccaccattctctcccagtgcaatgcaaatatcccattggcctggggcccccaagctgcacaaatgagaaagataaggctccttcattccatgaagccatgagccatagcagcacaagcatacagcctccacccaaggaaaccattccaaccccacttcacacccagccacccacccacacttcacagagcaccaaaggcaatccccaagacaggcacagaaagctctctgcaggcaggcaaagtcttcatccagctcccacttacctccaccactgcctcggttccctcgattgcgatttcctctgcccccagagccatactgctgttgctgatacacctctttgggctgggcaaccttgatttcacactaaaagccaagaggacactaggtcaagtcctgtggaacaagctcaggactggaagggtgggcaggaggccactaaggtgtttactcttcttttcacagaagat

SEQ ID NO: 19829 - DNA, 1224 bp, Mus musculus
aggatgccgaggtttaggagcaggctgtgctgaaggcctccgatgaccgcagcactccgtagattagagcactccaagattaggctcctttctccgggcgaccttggatttaggggacttcctccggctcattctcctcttttgggaggccggggttgctagtgtagaataggatgtagggataggatgacagactgccgtgtaccccgggcagctggggacattggacgtgctcgcccggtgaccggaaccgtagacagttctccgactcgcgcgcgttctaaaatgaggacaaagcccgcccggatctagagcgcgcgcgcagaagcagccaataagatgctaggacaatggtgagtggcggttcgctttgcccaatgagagtatccgttgttacgaggtggtgcccggcttcggcattataaagagctccacgagttggcattgtcaggcggtggcaccgcgcgggacggagttaaggtcttctttatcggcagtgtacggcggcggccgagcggagcgatagtcagtggctgcggacgagccctcgggggtgcgagcgtgaccgcggccaagcccgcgcgtcgccttctgcggcgagtagggcctcgcggcgtcatcggcggcgaggtgagcggcccggccgcgggcggtgggcgggagctcggggagcgccgcggggcctgacgcgctgtcgccgctcgttgcagtagccgctgcggcctggccgaccatgtcggacgcggctgaggagcagcccatggagacgacgggcgccaccgagaacggacacgaggccgcccccgaaggcgaggccccggtcgagcccagcgcggctgccgcggcccccgcggcctcggccgggtctgggggcgggaccacgaccgcaccgagcgggaaccagaacggcgcggagggcgaccagatcaacgccagcaagaacgaggaggacgcggggtaggtgcggccgcgggccgccgcctttgttctggggccgtcttttgttggcgccacgcggcggggggaggggcgggcggcccgcggagctgtgcctgcctggcgcgcttgccgcctggcccgggcgcggttacgcgcctcggagtttgcaggagtttgcggggtcgactgtgaggccgatctgggccgctcgcgcggtgcttgggctacttcgggcctcggggcgggcggccccggaagaggaaaagcggcggatcgcgaatcggg

SEQ ID NO: 19830 - DNA, 1101 bp, Mus musculus
aaggagttagaccataaggtgagatacaattattacctatacagtggcctacctgcatgcatgcctgcagaagagcaatagacattaggatagatggtcatgggccaccatgtggttgctgggaattgaacttaggacctctggaagagtgaccagtgctctgaactcctgagccatctttccagcctacaatatttaaaaaaataaaaattataaaaccaatcagtgatactatttgtgtgtgtgtgtgtgtgtgtgtgtgtgtgtgtgtgtgtgtgtgtgtgagagagagagagagagagagagagagagagagagagagagagagagagagggagggagatgcaccaggggttccaacctcactttatcaacactgctttaccactgactgacaactgttttcaaggtcagctttatatagagaccaggctcaaaaaaacgtgggggagagtgactggagaccttctgtgccaagcagagccatgcttgtgatgtagtcagaaggccagagcccaggaacagccgccttcccacctgcctccatgttcccaacagcctgtagatgccctcctctgcacattagagggcttggcagctctgtggctccttgaggaatggcccagagctctgccttccctcaactgtcatcccattgtcttgtagagatccaggtgatgatgggcagtctggtgtacctgcggctgggcttggagaagtcaccctactgccacctcttagacaacagccactgggcggagatctgtgagacctttactcgggatgcatgctccctcctgggactttcagtggagtccccacttagtgtcaggtacatcccagcctcctgaggtcagcataaggggacaggcagggagggcaacaagtgtgctgatccttccctgtgcttccacagacctaagctggctcaccatctttccttgagatagacactgcttgtctttacagtcagggcccatcttgcctgcacggttcccttgggaaactacactactcagtcatccagccaccctctcacaacctccctaagacagcattcccctgcatgaagagtgctgagtcactgcttcatctctgcac

SEQ ID NO: 19831 - DNA, 1177 bp, Mus musculus
catgcacccttatcactgggtcacttgtcctgtcttgtcactcccagaaaataacaagccctgagcacataggtgcccagtacagattctcccaaggtcttgaaggagttttggaaacgccatcctaacacagtacgcttgactatgctggctcctttgaattgaggcctggggacaggaagcaggagagcctttacccagtgaacagtctgggcagctctcgttttagtttttaacaccgggtcttgctctctagcctagattaatctggaagtcataatcctgcctctgcttctatagtgctgagattacagatcagatgtgcccccaccatgtctagcttctgtaaagatcaagacaatgtttaatctctatggagctcctccgttcaccttcccaaaatttgtcgcttagccatccttccatcccgggagcccagagcccatattcttttctatagcaccaacggttttgcaatgaaccacaggttttctctgtttgtttgtttgtttgtttgtttgtttgtttgtttgtttgtttgtttttgaggtagggtgtctctacatagccctggatatcctggatatcactatgtagacctgtttggcctcagactcagagattcacctgcctccacctccctagtgttgggactaaaggcttgcacaaccacacctggcaatttttcttcttttttgagatggaggtcccatgcacctcaggatggacttaaacatagcttgtggctaacagaagacctcaaacttctgatccttctgcagctacctctcgagtgctgggattaaagaggtttgccaccatgcccagccctggtaccggggattgagtccagagccttgtacatgcgcagcaagcactctactaactgagttacacctccagtttcttcctgtaagagaaatgctgtgtaggcgtgtgtgcctgattgtgtgtatgtgcctcatgtccatgcagtacccaagttagccagagttacaggcagctttaaatggcttgatgtgggtgctgggaaccaaactcagtttctctgtaagagcagcaggtgcttaatcgccgtgcacctctcccgccccagctttcctcatcttcatctgtctaaggatatcttaattagtagaccaacaaagatcttttaggagggcagagagagatgtct

SEQ ID NO: 19832 - DNA, 1281 bp, Mus musculus
tggacacgcaaactttatatgccccagtacaggggaacgccagggccataaaaggggagtgggtgggtaggggagagggggtgggtggctatgggggacttttggtatagcattgcaaatgtaaatgagcaaaatacctaataaaaaatggaaaaaaaaaaaaaaaaagagtggccagtcctttaaaccactgagccatctttacagcccctagacatagctggttatatgatcagaattaccctaagtatcacagtaaatcagtagcctatgaaaagaatctgaggtttattctactgcatctaacacacatgatcattgctgccttttatctctaagggaggagagtcttatgaaagcagccttccttcagagcttggtagaagacagaacagagtctgcactgtcatattatgaattcctcctgcacatacagcagcaagtgaacaagtgaggagtcgctggcggagttcctgaggatgcagtacctttctttcctccttaagattgtgaacaaatgtgatgatgattaagatgtttcactgtgatttcaactaactatagcaaagaaaggaccacagccgagagtcagatgtgcaactccaaaatactgtatttttcaaatcaaatagatgtctacacaattggaaacctttttttttccctttgctgccaactatgtttgagttgttatggattgagatgagacaatattgcagaggcaaagaacattttataaaataaagacttctgtgttctgcatttctatttctcatttttttatttttatgagtttttggctgctacatttaaaaacgtcacaagactaagtgttttagggacgtttcaagtctatcaataatgatcttttttaaattggaaaatccaaaagtcagtagactgtagaaaagctggaatccatccctttacatatctgtttttgccccgcccgcccccccccccacttcattttgtagggaaggaaaaggatcatgttaactgaaattggagtacactagctctggtcctgcttgggaagaatataaagtaaattgtcaagctttaacatctgtcagtattttctctacttgaacaaagtcactttaatttgaggtgaaaactaattaggtggttttctgctgttttattctgccgtgaataaaatttgagctgtcttcataaatatatcaggactggcaatgataataggagctggttctgttggttcgctgagtgggtttttgtttggtccatttctgctgtggttgatagagttaaagt

SEQ ID NO: 19833 - DNA, 1190 bp, Mus musculus
taaaactactgaactgtgtacattaaaatggtacattttatgctatgttggttatttcagctttttaaagggggggccaaatctccaaagaaaatgcctgggtgtgccatacatgtgcacatgcgtgtgttcatgcgtatgtgtgtgtactaaatatgaaatcaaaatgctggtctcagagagacagctcagccagcaaaggactagctgctatgcttgataacctaagttcaatccctggaacccacatgacagaggagagaaccaactccggtacattgtcctctgacctccacatgtgtgtgcattgtgtacacaggtgtccctctcccctcaaattaagtgaatatatgtaacaatgataaacttttaaagataaaataaaatgctggtatatactgccagtgtcctccaaaaagatttctgaaaatgtttctcactattacttaagagatgcccacttgcccctcagcatcactgagtgctctgtcttctctaagctgtttattctctgataaaggagtaggatgaaatagccataagtaagcacataacaatcatggtggtaattttctattctaggtctttccattcatactttccatgggaacttcttcgtccgttctacagacttactgtctcttcccaatgtcaacccagatgctgggtatgcggtccagatgtcagtagaagagagtctcactgacactcagctggtttccttccagtcagcactcttatatacatcaagcaaaggtaatggtttgtttgcatttattatcacaaaaaacatgacacctaccctcttgagtttttgatacaaaatttctatgttctgctctggctggcctggaactaactgtatagaccgggctagcctcagacccatagaaattcacctgcctgtacctcccaagtcctgagattaaaggcgtgcgccactacacccagctgagacctagcctctcaacagatgtgtagccctggtactgaaaccccacctacctctctcctgcccacctatgggctatgggcatccttactcaccagctggggctaacttggaggggtaaggtgacatagcatcacttgggtctacatgagaatttcctcagccctgggtacaaccaggactagtatttagcattacaatacatagcaacataccttacctcaaaaattctcctttt

SEQ ID NO: 19834 - DNA, 1099 bp, Mus musculus
ggtttgcttttggttttgaagtcttggaaccagatgtggggatgatccatgcctaacaaccccagcacgggaggctctgcagatgctcattagccagagcattggttgcctttacagaggccctaggctggctcatgagacacatcaggtagctcacaaccatcattccagcaccaagagatttgatgccctttctagtctctgggcactgcatgtatgtgcttcacaaacatacatgcaggcaaaacacccatacatataaaataaaataaatctttaaaaaaaagacaagccagtcattaggaggctgaggtagaaggatcctgagttcaaaattaatagttagactttgtctcaagagactggagaaagaaggctgagagtagagctgagctggcagtgttggcccatctaaagctctgggtctgtacctccagttccccagaaccgtaaaccaggcgtgacagcttgcactcaggaggtagtggcaagaggatcagccttcagggtcattgtcagccagttacatgagtatatctgtgctgtaagaggccctgtttcagacagacagacaggcaggcaggcagacagactaaagaactggagtgatgactccatggctaagagtgtgctgcttttacaaaggacctgagttcaagtcccagcacccacgtagttctcaaaactgctatagctctagcttcaggggatccaatgtctcctggtctctaccattgccacatacgtatggtgaacatacatgcactcataggcacacacacattcacataaataagtaaatcttaaaagttagattgtggggctggtgagatggctcagtgggtaagagcacccgactgcttttccgaaggtccgaagttcaaatcccagcaaccacatggtggctcacaaccacccgtaatgagatctgactccctcttctggagtgtctgaagacagctacagtgtacttacatataataaataaataaatctaaaaaaaaaaaaaaaaaaaaagttagattgttcacccctggcaatgggcaaagagacaccttgtttgtggtgttgatcttatatcagtcaggggcagagcaga

SEQ ID NO: 19835 - DNA, 1161 bp, Mus musculus
ttcttaactgctgagccagctctccagcccctattttgtttgttttttgtttttaaacagtctctctacacagctctggctgccctggaactatgttaaccaggtgagctccgcctcccaagagctgggattacaggcatgcactaccatacttgacctggctttttttattttttgagacagggtctcatgtaggccaggctgaccttaaacttgctgtagagctaagaattgcctgactttctggttctgctgcctttatctctcacatgttgggattgtaggtgtggtaaatttgggttctatttaggttttaatatagatttaagcacagacattaaagagggtcacttagggaaggacagcgcacatgcactcaggaattctagaattctcaagttgtatttcaagcatcttaataataactatgtgtaactttaagtcatgtcaaatataaagtaattttcatgttccatgtctgatgtcactctgactgattatagctcttattctgcaggattgtataaaaagtctggtaaactggtattccttggattggataatgccgggaaaacaactttgctacacatgctgaaagatgacaggctcgggcagcacgtcccaacgctacatcccagtaagtgtttcttccctgtgagtgatgctgagtcatagctcctgcctcaaagtgttttgattttggacttttgatggctaaggtgtgagattgtttatcctgttcctaaaatagctgggtaagtagtaattgacctggttcccagagcacaaattaagaactagaagcaatgctcagacctttctatccctgcacttagctataccatgagcccagcctatgctatagagtaagaaacgacagagccagtagcagaaagaaacacaaggttaatttttatatgtaatgtcacagtgaaaagattataaaccaggcagataacagcttaaaaataaagtcagccgaaggatgtgcgtggtggcacacacctttaaccccagcagttggaagaaaaggcaggtgggtctgtgtattcaaggccaccttggtcttcatagcaaagtctgtgtcagccaaggctccatggtgacatcccaacgagttgtcttctggcatacacatgtgcgtgcgtgtggcacgcacac

SEQ ID NO: 19836 - DNA, 1199 bp, Mus musculus
ttatcattgacaccctctgttctgaaggagaatctgcaatatgctgagagtagaacttttattccaggagacctcaacataacagctctcttctcttccagggtagtgtgtcactgaaggagctgaacgcccggcctctggaagtgttcatgtgcagtgtgctaaaaaggcagggctatggagaaggcttccgctggatggcgcagtacatcgattagcagcggccggcccacacacttccagccctcagagatccatcccccaacatgcataacttgaattcaatagacttttgttggtttcagaataggtgtttttagattattaatatatctacctgagtgggaattgcaaactgattcaagtttgaatatcacaatgttagctttctaattccacacagatagtttttacagtttctaaccccacatcaatccatcaccgtttataaagatcagcttcccatcagtacatttgaagcactttttaacgatgtgaaactacaaatataaaccatatttaaaagctcatcatgtgaaacttttatgtactttttggaaatagtttttcaattttagattgtctgcctatcttgtgtacagttaaaatccgcttatcagtgattgcatgatgccttacggtttccaagactactttttcttatgcaaacgtcatgcaataaaacaaactccaacatttgactcagtgttgggcagctgtttcctttgaatgtgtcttgtggctagtgtgctctgaaaatcgaggatttaatgttgtacatatgagagggtggttgatggacaagaggattccttcagagcgtctagaatggtgcggaaacccccagaggccttctgcttaccacacagcaggtgagttctgaagccgccattgtctttaccaatcatgcaacctgccattactaccatggccggacgctttctgtggcctgtcctctgtaggtccagcctttcgtaaaaacaaaacaaaacaaaacaaaaaccacagctgtagcctgtggtgcaggctttgtggtctgatgctgactttagcaactctgtgatactttgtcaaaagtagtgacaagtgaccagactgtccacattaagtcactcccagggctctttctatggagtgggactcccaaggggagctgtccagcttagagtcctgtgtgtcaggaggagagcagtagctcg

SEQ ID NO: 19837 - DNA, 2026 bp, Mus musculus
atggactccgagggcgtggggtgggctccaaggatcctgggcatccggatggcatcggctaccacatagacttagtctgcctgcccgtctcggtagtagtgacaactcagtcgacgtcggcatcccccgccccgtctcttgtttactgcctctgaacagaccttcctctcacctgtgctttgagtcacttcgggtcgcaatttcatctgctgaactgcctggtggtctgacctgtgggacacgaagggcatgggggcttaaagaacaatcaaacgctgcagggggagggagggaagcccagttgttgtctgtgaccccttcagtagaccgagcccacggcagtcttcatccagcagctgtctccactcctaagatgtccatcaggctgcagggaggatgcggatgtcccataacctctccctagttcctcccaggccacactgtctcgggtgtagatggttttgccacactatgaccaaggcaccttttccaggcctgaggcaatgcccactcttgccctcacccacaacccctctctagagagggagaaaggactctgtgactcgttctggctaacgtaccccttccacctcatttcctcatcacaggatacaggctaatgtgcaaggaaagtatttttctgtatcataagtgtattttgaaacaagtaaaagaaagatagaatgctcgtttactttattaaatgggctctgattttgtgaaaggcgagagagtgagttaagggcctcaggtttgttggagaagccaaccacccaggttcccgggcatgggtgtcggactgtgtgcgtgcgtgtagcagagtgctgtgcaggtgtatgtgcaatgcatgggtaccctatgaaacttgttggggtttctagagattcaactgcctgattctacaggaatatggcagcaggttagactttgggtttcctcaccgttgtcatgtaaggtcaccctttgcccatacctgaagctctgcataacaatccgtgatctctgtagtaagacccttgaggccactctcccgtgcccttggcccagctggccacattggccaaagagccagaagtgttggagtcggggacctttggttgttctttaagccgcttcctgctgccttctcccaaggatgcacgcttgtgctccatccaaatcatttggggatggtggtggggaaggtgatatgaatgtcacaggaggagacaccttctgtctttgtttcaaagaaagtgatgtgccatttgttaatatacaagagaaatattgaaaaaatatattgaaaagagcaattttaaattatttttggcttatgttgcaatatttattttcttgtattagagaagatttctttgtagagaaaaatgtatttttcattaccgcaaagacctatttctcctttttgtacattgtccttgttcgcgacccttaacgagcaatagaatgttcggtcacccctgcgtggccagtgcccactgtgccctgcatgattgtgttgctgctgctgctgctgcatagtttctggccccgtcccgtcctgctcactcactggggcatccggattgccggcccccaccagggtctgtgtctaaggagcccacagcactcctcatgtgttggcaaactcggttaataaagcaatgttctctgtgctggctgccatgacgttctgttgtgttaggtggctaagagacctagaaatcccatcgcgtgcctccgacagtatgctcggcaagagtcccgagttccagtggcgcttgcaaaccttcagcgcacaccactggctacaccttagagggagggaatgtcgtgatcttcagggttagcccctggcattcagggtcagcgaggagatggttacctgagatcaagcctccagtaaagtaccatatcaaaggtcgggtgcagagagaatggctctgagggagtggcaccattccttcctgtagtaggtagtaccttgaccacatactgctaaggtgctctacccacccaacctctcggtggaaactccaggaaccga

SEQ ID NO: 19838 - DNA, 2257 bp, Mus musculus
gaggctggcgggcggcaggcttagatagcacttaagtatttccgttatcattttaaattgtgaacacttatagacagcaagccacaagtcagggcagtaaggctctggcttccaaatggatcatgtggtcagtgtgtggctgcattttctgtatgtagtaaaatattaataatttctgagtagacttgccatctgggtcgcacataaatattccatcactgctttatttgaatgtgtgaagataaacttgattcatgggactcggtggctgtgtaactttttcttttctttttttttttcttcagcatcaaagctaaggcagatctccacatttccaccctggggacagacttagaaaggaggccagggtgaagatgactgaacattggcagctctcaagattcctggcatttgcagcatagaggcagctagactggaagaggacggggcccatagcttcaaagacatcttcattcttccaggattgctgtaaaatacaaatgcatatttatgtatttatacatggcgaactctcagaaatttcatcaggattgtccaagccaaactttgtttgaaatgccttttatgttgatataataatgacaggtgatacattttataatttgattctttttaaaacagagtacctgtaaatacagttcttgttttgccgtaccccacccatgtttgtcctgagccaaggcagatcctctgtgtccttatttctacctgaaccccctgtacacttgtacctcaccactgatggccaccaaaggaccgtgcactaaccagctgtgtcactggagcacccccactgctgggctcagggacctttgtgtaggaaatggtaatcatgtcgcaggcttgaagtagcagagctagcgcataggtaggaggcaatgtacaaaaaagcatccagcctcattttacagctcactgaggctagagatgtagctcagtgctagagtgcgtgcttagcgtgctcgaggtcctgggttgggtccctagtatttcaaagagaggaaaaaatagatttaaaaatcactggaagcatatatggttttgttcaaccaaccagatggtttctaggcactagatgcccatgtgccagcattgtttatttgtttgttttgtttctagaaggctttcacacttgaagaactaactgccttgcataccgcgtctggattgcagtgcggtcctgcattccacctgaccccgcttctggttccctgtatttagtcaccataagataactgagcagtgggcagctgtggagcagtgtacacagcaggactcatcaacggcaggcccattgtggccagaaagacagtggggtctgccttagcttcatctactggatacaggacacccagaagctggggccactggtgtttggcgtcagagcagtggggcacattgtttgtggcttgaaataaaagccacatttttatgtggattctgttccagtccccagtgaccattgattcgataccttggacaagcttctccaggcaatgagtgactgcctgtcagagggaagtggcaaggtggtgactggtgaagggcagagctctgggctcagtgagctagagccttgtcttctcagatgcggcctggccttcatccattctaatcatctgcagactcgtgaggcttaaaaacaaaatgcactttgcatggattgttgattttactttctgtctacaacccccaataaaacagcttttccattgaatgaagttaggttcaagttgtgtgatttcttcccgtaaacctccagtttacttattcatgttggtatttggacaactggaatccggaagtgaagctgcccgctgtcatggcatcatgggcccagcgtggctctgttctctgtcccctcagccttctcttcgttttttcattttcttcatttccttagctaagctgcctacctaccttctcatttttatagcctagtagctgactcagctgtgaagttagaattgtagtctttatgtatccctttcctagcctgaagtagagtgagatcaatcagagggacttgaaggcacctccaaggcatgtccaggagaggacttagaaaagcgtgtatcaggccacggggagtgagtacacgaggtccagagccgaagtgttcatgctggtgatgctctgcccagagagctgctctctgcaatattcctgagaggttaactgctcagaatacacatggatctttagagacaatagttccagaccttagaaaccacat

SEQ ID NO: 19839 - DNA, 1173 bp, Mus musculus
cctggtctgctcatccttcatcgttgttgtgtataatttacctcccagtagaaaggctagcaagttttaagtgccacgggttttaaggattctgcagagaaaaaaagaaaaagtccttcagtttagaacctacaaaagcttgtgtatcttgattaatgtactttttattgcatggtgtgaactaagttattgctgcataaatttgtaatatatcctgtttgtatttttttccaagtgtataatgttggtgtggagttttcatgacagaatatacacattttgtaaatctgtacttttttcaaatattgaatgccttatttttgaattctttagatttttaaattggagaaaagcacttaaagttttttatatatgaatattacgtgtaaagctgttaaaatacataacttcagtgcaagagactttgtcacttatttcctcacctgtgcaagagggactgcgaagtctctgccaggtgagagcctcatttccaactgcagaaggtcactcttctgtttatcaagaaagtctgcaaattcgattctaaaaccaattctgatctccggctttattttgaatgtacttctgtaagttcagttgagtaactatagacttactggtctggttctgtccagctctgtatttgggccacttgttaatgtgcgtttctcatgtaaactgtaccttttgtgacttcacaattggcacctccaccacgagcagagctgacttcctctgctgtgtggcagcaccttcacaggcttttgattaaaaagaaagtaaaaccatcaccatttaccaaacaccgtgccgcagtattagcaatggccggttgcgctggtttgagcaaggcagagatttggaaggaatcttggtgtaacttgaatatttgcaaactaccttttaatgcagctgcgcgctacctgtttattctggaactgttgagcaccagggcctgccgagttgcttctcacctcctcagttgtatccaagttgtactgcatcttagtttactggatagatttaaaacacagtattgtagaaagctaatacaaagctatcctatgccttcaaatagtatagaaaatggaaaatatacaagtaaattctgttgaaccacttgtgcagtctctctagtagttgaaacagcaattgcagtgagcctgagtttct

SEQ ID NO: 19840 - DNA, 1131 bp, Mus musculus
cacacccagcttgctccacactttaattagttgacatatgagatctaatccacagcttgcctttttggagggcagaggtctctttttgctcaggctgatccacagaagactgtctcttcccaaatgctgcagatccaggcatgttccaccatgcctattcacaacctgttttcttgtcatatgtccacattctcacaagtgagacttacttgtgcccatgtagtatcttggggagaagtaaagtgattgcttagaaaaccatagggacctccaggaactgccaggcaaagaccctgtacctgtgtcgttccattcaagaaagaggtgcagtaactgtgggttcatgtgtctagggaggctgacagagctgtactgatttgagaagagcaaaaaaaaaatgttaatgttgtccatctttgtgagtctttttgcctactgctccactcatctctggggaatgtcatactacatcactgaaccttgttcatatctgattctcactacttctctgtctatcctgctttccctctgtccatctgtccaatccctgtgtgtctctaatccccacccctgtcatagtccacttctgatcccatgtctcatgtatttaagataggatctacatatgagagtgaggtttttattttattttattttttaaacttaggaattattttttttcctttttaaggtttatttatttattatatgtaagtacactgtagctgtcatcacacactccaggcagaagaggacgtcagatctcattatggatggttgtgagccaccatgtggctgctgggatttgaactcaggacctttggaagagcagtcagtgctcttgaccactgagccatctctccagccccagaagagtgactgttaacccttagcttgctcattaccctgtattttccttcccacctcagaactttactcttttattccctccctgctaagcgtatgtgagtaaccacaggaataaggtttgggcctagcggcaggggacagtggttagtagtagaacacttatccagcatgcccaacttctgagcaccacaaaaacctgatgatagtggatctgggagctgggaagtggtggcgcacacttttaatcctagttgtaggaga

SEQ ID NO: 19841 - DNA, 1133 bp, Mus musculus
gtcatagagggcttctgcctagaggcagctgctgaaccacagcagtgaatggagacagagcattcataaagggagagctctgcagggataccaaggcaggcttgttcttgggtggacttcagaagcttgactgcagtcatcgtcatcagcattgccagcctgccttcaaactgccccacagcccaggtctttgtccttcaacttttctttcccttgcaaagccagatgtgtttcgcaatgcattgcctcgacctggcaccctagctcctttcccagtttcccttacagctttccttggtttcctacagatttccttggcaaatctcctgaattacgggttctcactttcgatccgtttatcagactatggaggccaatacattggtgccaagaaaaataaatgttaagctgggatctgagtctggctgacacaccttggggtggacagaatgaacatcattctgattgtcacatgagccataaatagatcctggcacaaactggagcttacaaagtatttcataaatgatgactgaagggtgttgtattagagaggaattctgtgttgggtgtgatcaagaggcctgcgaaagactgaaaggagaaagagaagatccacagagacagagctgacgccctcggaattctgctggcccttgccaagggacaagtgactgaaagctcttttgaagatttatgtgtgtgggtctgtgcatgcaggtgttattggaggcctgaagagggtgtcagaccccctcgttctggagttacaggtagttttaagccatccaacatgggtgctgggaactaaattcagggtccctgcaaagagtagcaggcttccttaagtgtcaaatcatctctccagttccagactcaaaggagttgaggccaaagccagtggccttggagttttatggaatctcagcagaacaccaaatagctgtacagtgttcggggtcggggtgggaggtgtaattgttagagttgtagaacttcagaggctctgaatgcccagcacaccagaggagggaaagcccagaactcagaaacacagaatggggacatctaggtggatgtatgcaaggatgctgatgcagcagctcttggtttctgtgggcttttgaaggagc

SEQ ID NO: 19842 - DNA, 1145 bp, Mus musculus
agcgccttagggttgcctttagtcatcaggctggcagagcccagaccacatctgagaggtatcacccagaggccttccagaaacaccaggtcacaaggaataaaaacctcgcctacacggactgctcatgcgccgagaccgcgcaggcgccctgcggagcctgggacgccaggattaaccagcactgcgcttgctcggactcgcttcttcccttcccccgccgccctcccagcgggaggaccacgccccaagagcgaagccacttccttcggcagccaactccgctgcgcttgcgccccggctccacggtgcgcagctctgggtcccggccccactccgtcgccctccccgcggctccctgacgctggcgtgacgtcaccacgccgggcggccgccattacagaaagccgagtcccgagctagggcgagcggaggaggaggcacagcggccggcggccgagcactgcggagcgagccagcgggccggcgccagcgcccagcagccgcctggggccgcagaaagcaccccgggagagcggcggcggcgtgtgcgtgtggcccgggtgcgggcggcggcgcgggagcagcgcggagcggcagccggttcgggcgggcggcatcatggacgagaagttgttcaccaaggagctggaccagtggatcgagcagctgaacgagtgcaagcagctctccgagtcccaggtcaagagcctctgcgagaaggtgagctgctctcggccgcgggtgcggcctctgcccgggcccgcctatcaggaggccgcggggacggtgcaacatggcggcacggaggccagacccccgaacctagcagcccggcgcccggcgctgcctgcggcgactcgcgagggacccggcgccccccgcctcccgcgcgctgattggatggcgccgccaccgcggcctaaaatggcgccgcgcgccggactccgggcttcggagcctccgggccgaacccggcccgaccctgggaagtggggcggccgggaccctcggtggcccggcgagggactggctgggctttgcgcccgggaacgggttccggactcatggagtcaaagcattgcgcttgcactcgggcttgcttcgtggagcgggcgctgcccacagggtcccccacagcaggg

SEQ ID NO: 19843 - DNA, 1163 bp, Mus musculus
tatttattagtttaaaaggctctttggcagtttccatagcagtagttaaaatattaaggacatgttagaatgtttttattatactttggcatagtcactgttgttgattgtagatacaaagcaagggcttggaatggttaagtggctgatatggagggctggagttaggttgcttggggtaatgacttctaatcccagcgtccccgtcttgctttcagagccctgttgaggtagtaatgatgaaaagcgcatgtgggttgggcagcatggactgtgttcttggtgattctgtaacctgaagcattgtcttcctgctgctgctgccaggtccattcaatccatctgatgatggagttgtcccactcttggaaacagtgattctttcattttcatgtggctaacttcatttgtccctcaaataagacaggtgtgatgaaaatggcaggtcattttgtcagtcacatagtataaatcataaggagagactaaattataaaacattctaataaaggtaggtgattttgttgttgttgccaggtatttataaaatgctgttcttttaatttctgaagcctccacacacctatgagtttgttctgtgtgcgcctggcatagagtgggattgcatcttggattaactgaatgagaagtatgttctcgtgctgattcctaggtcctccttttgttcttgtaattctctgcttaagtaaagctgaatgttgtgtagtggcaagaatgatgggccctggaaaccagacctgctagtgtatggagtctcagctatttagaggttgaggtagaaggattgattgcatgttcaaaactagccacatagttttgagactctgtctcaaaataaatgaatagaaagctagggatgtatagttcagccatataccacctgcctggcttgcacaaagcccagccacagaaagagggagtgacccatcctgtaggaatgagtgagacaacattcatttctatattcagtctggtaagtcaacatttgtcatgtcagagttaacagtgaagtgtctttttagtgtgtagaaaataagcaccaagttgagagttgagtcttaagggcgctaaggggaccagcactttgttgctactgtgactttctcttattatttcttcttcttcttcttcttcttcttctt

SEQ ID NO: 19844 - DNA, 1148 bp, Mus musculus
cataactaaatttagtaaaggtcagaaaaaagtatgatttttatttcacacaagatggtgcagggggtttggtcttaattgagatattggtaagcattttataaacctttaattaaaaatgcttataatcatcaggctgtggtagcccatgcctttaatctcagagctcaagaggcagaggcaggtggatctccttgagctgaagaacagccagggctacacagagaaacccacccttgagaaacagcaacagcagttttaaaaagtttatcatctaatttcagttcattgaagtttagagatgtgcactctcagcccctcctcctctcagttggaactctggatttacctatagaaagttgtatgaagtgtcttgctttttgttttttttggaaagagctggcatctgttgtcgttttctttaggttcgttaccgagagcgcatcaccatactccgagggaatcacgagagcagacagatcacacaggtttatgggttctacgacgagtgtttaaggaaatacggaaatgcaaatgtttggaaatacttcacagacctttttgactatcttcctctcactgccttggtggatgggcaggtgtgtgtaccataaaactcacttctgggtttcttcctgtttccaataattgttttcttggtgtttagcaggcagtgattttccatttggggatacattactaaatactgataagttcttttctaggtgctgaactgtcaggataagatcatggggtggaaaatgtaacctattcagctttgggggctctttgtagaggggtctgggagatggaaggcattgtttaccagtgtgagggggactgtcaggctctggagggactgtgggtaagctagaaaaacactctttagaaggaacctcagggatggtggttggtcaggaacaggaatagatactgtactctgtagttggtattaggtcgaacaatagccagttattcagggtccatcctcatcgaaacagagcctagaactgatgtagctaaatggtgtcagctcctgtctaatgtgtagtccaaagagttcagtttctcttaggtgtaattagcacttgtaatcaatctttttagatcttctgtctacacggtggtctgtcaccatccatagacac

SEQ ID NO: 19845 - DNA, 2381 bp, Mus musculus
gagtgaggccagcttggtctatatacagagtttcaggggctatatcaagaagccatgactcaaacaaaacaaagcagagagaagtgtgtgggcccttgcttgttgcttatgctcaattagctttcttcattcttaaacagatgaaggctctctgcctagggaatggtaacagccacggtgggcgtggtgttcttacatcaattaagatggtcttccacagacatgctcacaggtcaacctgatttatataagtctagtcctcagttagaactgttcccaggtaatggttctcttgtgtctggttaacagctaaaactaaccatgtgtttgtagcccaagctggtctagaactgtgattttcttgcctcagtttcccaagtggtaatgttagagctgtgccccaatatacctaggtctattaaagttgggttctattcttttaaaatgtactgaagttggatggggaagaaaatttgaaaatttggaagatgttagttttgttaactacatggtatcttctggagtagtaacactgagtcttccttgtttttcagcttgcagtttgacccagcacctcgtagaggcgagccacatgtcactcgtcgtaccccagactacttcctgtaatgaaaatgtaaacttgtacagtattgccatgaaccgtatattgacctaatggaaatgggaagagcaacagtaactccaaagtgtcagaaaatagttaacattcaaaaacttgttttcacacggaccaaaagatgtgccatataaaatacaaagcctcttgtcatcaacagccgtgaccactttagaatgaaccagttcattgcatgctgacgcgacattgttggtcaagaatccagtttctggcatagcgctatttgtagttacttttgctttcttgagagactgcagatataggattaaacattaacacccgtgagtccagttgacttcacttagctgtagcttactcagcatgactgtagatgaggatagcaaacaatcattggagcttaatgaacatttttaaataagtaccaaggcctcccctcttgttgtgtttctttcagggataccattaatttaattgtatgatttgtctgcactcagtttctccccttctcaaatctcagccccgcgttgttctttgttactgtcagaaaacctggtgagttgttttgaacagaactgtttccctcctgtaagatgatgttactgcacaagtcaccgcagtgttttcataataaacttgagaactgagaaagtcaggtttgaattgtatcagtgggcacgactggtgctgtttattaacaagataaatctattgatcaatttcagaatttgtagaatcccaggtaaagaaaaataaagatcaaggccactgtgtaacctctctggcaactccttggtgttcttcagaagaacttggggacctgtttgtctgacataccgcagtttgtcttgttgctggcctgcgcttgtgaaaggaaatctgtgctgttttagtgggacttggttgttaaaccatagaacttgagagttatgtttttaggattttacttaaaatggcatgttttcaggtagaacttaacaaactaaatgatgtgtctaattagtgtagtttctggttacaaatatattgctatgtatatttcatggactctttaaaatgattgacagaacggtaagttcttaaccaacatttgtatatttcttgtcaagtcatgtgatcttagagttagttaaacttgtctggataaggtgttagaaccttagcttgtgttccttacctggtaaagcagtgaagccgagtagaagcaatgctgatgtgggctgatgtttgcgccaggtccgagaatggtgcctgagtgccaagctcagcgagtaatgggtttcccttctattctttgacttggcttaaaaccgaagacagttcttcttgtggggactgaatatttgctattttaagctatctgggcaaacatgaggatgcttgatcattactgtgtgagtgtagtaaataaatgtttccttgctttgtactgtgttgaatttggaaccaacagtgaagttacagtattgccctgtataaaaaaaaaaaaaaaaaaaaaaaaaacaagccagtttgtgagttaattttctaaatcaaaaaaaaccctaggccaggtactggtggcgcacacctttaatcccagcacttgggaggcagaggcaggcgcatttctgagtttgaggccagcctggtctacagagtgagttccaggacagccagggctacacagagaaaccctgtctcaaaaaaccttagtttttctaggtgtcttctttttattctgagttcgaagaaacacattctccagcctgttatttgtgctact

SEQ ID NO: 19846 - DNA, 1148 bp, Mus musculus
gggtaactggcttttactgtgttcctggaaacagccaattttttgtttgtttgttttttgagacagggtttctctgtatagccctggctgtcctggagctcactttgtagaccaggctggcctcaaactcagaaatccgcctgtctctgcctcccgagtgctgggattgaaggcgtgcaccaccacacccagcgtaacagccaataatttataggcttaattttgaagtggattttattctcctgacctaaacctttttttttttccctataatctcataattctttgactgcttttacattttatagacttaaatcttttgggttaatttttccacaattgtgtctatgttaaaaataacctctgcaaggttgtaaatgtgtttgaccatgccccttgccagtctctatatggtagaactgtaaagataccgtgtcattgtgacattttcatacgtgtgtgtggtatactgtgatgcatcaccatttttctcatttccattctgtaccttgattgtatggattgcttttgttttgagacaggatcatcttttgtagcttggctgatctctgttcaaatcagccaagctacataatgagagaaaacaaaacttgagaaagagaaaacttgcctctgtccaagtgctgggattaaaggtgtgggccaccaccgtccagcaatcttacttgacagagtagaacttttaaagggttcgttttgctttctttcttatttctgtcttctggttgagctttacacgcctttggggtatataggtcagtcacatgttggagactgttcaaggtgcaacctttttaggacgtacctcgaagttgtcatgaagtgttgggttacgttgagggatcttgtacctagatccctctttgctgcttcaatgatgagtgtaccttgatatattgtgtactgtggggcagtgggccgtgaaaggtagcctggtggtcccctttgagctaaggctacctttgatagtccactgccccacggtgcatgcattggtgtttttcggtaggtctccctgtcctggagtttctgttgtggctataggatggatgccaagcagtgggtcttgagccccatgcccctttctactttctagccattcccacttggatcccagtcattgggtt

SEQ ID NO: 19847 - DNA, 2681 bp, Mus musculus
acgcgcagtgaggccttgtctcaaaataaagtaaaacctggggaaaaattgtgaatatttgaaaattcagtaatttatttttaagccaaaggaaaattttacattagtatttctaattgaatttaaataaaacaacttaaaatttaggataaagctaaagcagtgtataagaagaaagctagtgccgggcagtggtgccgcacacctgcctttaatcccagcactggggaggcagacgcaggtggatttctgagttcgaggacggccagggctacacagagaaaccctgtcttgaaacaacaacaaaaaacccaaaaaccaaagaagaaagctagtgaaaggtgaaactacattgaaaataatcagtattacagggcagagaatttcataagagttcattaaacggggtatcattttaagctcaatttgatgtaaattgttaaccttaaatattcagtacatatgactaaaaaacctgctattaattacaggctgcaaactacttagacatcaaaggtttgcttgatgtcacatgcaagactgtggccaatatgattaaggggaaaactcctgaggagattcgtaaaaccttcaatatcaaaaatgactttactgaagaggaagaggcccaggtaggtagcacacaacccatcttcaattgctttttaaaaagaaactggaacccaataccaagacaagaaaaaaagcccatcagaaagtcttggtcttgtgctgcttacccgagaacacctttaaaatttccttgataccagtggggcgtggtggcaaatgccctttatctcccagtacttgggaagctgaggtagattgtgagttccagggctacatagagaaacctgtcttagagaacaaaagaactaataacaacaaaagtcttgatacaaaggcataatgtgcatctgtctctggatctaagcagttaggtgagagagttcttgaagactttaattttaattcatgagtatgatcatggtgcccagaagagagcatcagatttcttgaagttggagctacaggtggttgtgagctgtgggtgggggtgggataggaattatgtcctccaggataacagttttaacctgagttatgttcagcttgctactgttcttttagaaacataagaaaaatggattttgaactaaagaggttcttcattatcagattctttttttttttaaacctgtgatatttgtataggttgtaaactgttggctttagaaatcagggcctgataatagaagagtggatgagttgggtgtgcttgccagcttagaaagtgggactagagctttcagttgacatctgctgttcaatgttagaaagttagtcatcaggtctgcttttacttagcctaatattttcccagctttccattttcctttctcatatgacataggctattgatgatacagtataggtagtgcttagccatctcaggaaagacaactcaaggtataccttctgtctcttctaggtacgcaaagagaaccaatggtgtgaagagaagtgaactgctgtgcctgtcactgtaacactagaagggttgttccaaatgctagttgcactgctctgtttataattgttaatattagagatcagtagacaaacatcgccttgtcttcactgcatgtgtagttccagtccagatcagacctgtggctgagtttcttctgtgagcagaagtttccttttccccccattactctgaataaaaccgaactatgggttctctgcggaaagtggcattttgggctttccctttctgtaaagtgatttctgcctctagttcattgtccagttaacttcagtgagcctttcaaagttgacattgtaaataaaacaacttaagaaaagtatgctgaaatagaattaacaaaacatgatacttgttcatgaatcggaaactggaatagggcagcttgaagttaaccatgtgggtgtcttccaacctctatgctgctggtaagcttgagtgcagctgggctctcttaattggatctgaggccttgttttttctttttttttttcttttttttttttttaatcttctcagctttgaatatgttgcctagagatttagtttactacccagtttgtggttttggagtgggaactgtaactcaacaatttgttagcttttcaattaaaaaagacacttacttcatgtggtatgtcatctttttatcatcattgttcccaggtggagaaacactacttgcatgtaaaaattaatttaaccttttaacattaaagtgtatggtaaaactcagaaaacagccatcctaagtgcaagatgcttttcaataaaaagtagtacaataggtagtaaacagttgcttttgtggatgtaaatgtgtttcttaatgaattaaggttttttttttttaaagatttgtttattatacataagaacactgtagctatcttcagacacaccagaagaaggcatcaggtctcattacagatggttgtgagcaactatgtggttgctgggatttgcactcatgatctcttaccctctgagccatctagccagcccatttggttattttttaattgtagagaatcttgctgaatggttgtagatagtacccacatcttttttaatcccagcacttgtaaggtcagcctggtttacaaaggaaattctagaaagccca

SEQ ID NO: 19848 - DNA, 1594 bp, Mus musculus
gctgtaggtcagatgggttggactgatctcttcagctgcctaccctacaaatgcttctcctgccctctgccacaccctccccatgccaatacttcttggaccaagaatacctggtttgtcacacaaaataactctgtggtcaaccagccacaagtctaaacaataatgcttctctcttaaaccgagaagttctgtttacaaaaaccagctgctgttcataagctgggccggaggaagcggctccctgtgttctcaggcgcttgcaagaggagggactaggatacgtttaggcctttcaaccttggcaccaactacctactggtgggcaatagtcagctttcatttcaatctttcccaagaagctcaccagcattaacaactagtcaatatagttggcctaaacccagtgtgcacccttcctatcaggctcttcccagttccatttccagctcatctgagtcagctcctgggcagctgtgagagggcaaaccccaaacccccaacagccagagcctatcagcattgagaaccggccagcttcagtttctctgtggggctgcaggaagaaatgttactactaaagcaaggaacccataaaacctctctgtggtggacatggttccttgccacattctagaaactctttttgagccaaacttaaccctgagccttgaaaaacaagttttttgtttgtttgttttaactttttttttttcattctcgctgtagatagcctgaatccaaagaaaaccaaaaggggttatccaagtattccacacaaaaacaaaacaaaaaaccctttagtgttcctactttagtcactcatttctcaatccaaagatcatgtttctaacgtagtgttgaaagtcttgagaaagtctggccaagtgtggtagtgtgcacctataaccccagcacttgcgagatagaggcagggggacctctgtgaattccaagacaaccagggctgtatagaagaccttttctcaaaaagaaaaactgttgtatccaaaatatttttgtattgtaatgcattaccatagaaaagcttttttaacaatgagaataaagaatctttttacttggtttttcaaagtctgactgagtagctgtttgagttaacggtgaggtggcctaacactgctgctcttgcagagaaccggagtttgttcccagcacctgcatggcagctctcagcagtgcctactaatgctcttctctctctcacaaaacctgaagtgtatcccttagtatgaacaaagattccaagactgccaatctgcaaaagccaaaaatcacaatcagtgtctctcgacagacaggggcttggtcctgacaccacagctgagctcacattccaagctctgcctttaatccggacagtacaatcacgcaggccagcctactccccaacacccttgggcaccaatgagctagcgagcagctgccattctgatactgaacagtccaacctcaagtgtactcaggatctactgtcctctaaggacagaaagaagaaaagcacttcaaacttatttaaagaaaaatacgcagtccagtcttaaaatttattgtcataaaagccctacacaaa

SEQ ID NO: 19849 - DNA, 1227 bp, Mus musculus
aagcaaaacaaaacagaaaacagaaaccaaaaacccacaactgcaaaccacctaaaaacaaacaaaaaacagtctctaaagagatgatgttaggctggggggtgtagctcagttggtaggacctagtcggcaggcacaaagccctgcctggggttaatccctgagttcaaggccagcttggggctacattagaccctgtctcaaaaacagttacaaacgtggtttgagtagttggcctcagactgaaaacctgtctttagcccgggtgggcccatcatctgttgtgtagtgtactctttgcttgtttttggtggtagtggggcttgagctatatccacaggcgctcctttctttccacactcacttggtgaagtcatgtggaagggcagtgctcttaactgctgcatcatctttcaacttgaacctaccctgtggcacctgcagctcttgagcacctcttgtttcagcctcctaagtagtagggactacaggcttgtgcgaccaaagcttaatagggtttgctcttgtcagaggtttgtacccatcgactgccgctgctccatttggtacccaggccctcaggctggaggacgtctgttacttgttgggggcctttgcctcagcagagctgggaagggtgtgagcttgggtccttcctgccagaaggctgctcttgtggcctgtcccacccatggagactgcctccctggactgcacccagattctgccttagagccagagccaaccgggtgacacagccttccctcgaggccctgactctacagccagaactccctggagatcagaggaagcagacacgctgtcaaataaatacgcttcctcctcaacccctctccccccattaaaacagccgcctccctctccaaggacagggaagctgtctgggccccacactgtctgtctgcttccagatgacgtgtgtatagcagagactccaggcctgggtgggcaggtccaggccctagggaacagtgggtgtgggctcaggatgttcatggggaggttgcccaaaccccactaagtgtgagcaggcctgggggccaatggtggtacatcactgccttcaagcaggctttcctgtaagggcagcgggttgtggtggcctgtcgacctctctgggtctcagtatcttctcgtcaatgggtgggaatcctggcccctgcaggattcttgaggttcagatagggatacattggaaaggtctgt

SEQ ID NO: 19850 - DNA, 1143 bp, Mus musculus
ttgtttttttgttttttgaaacagggtttctctgtatagccttggctgtcctggaacccactttgtaaaccaggctagcctcgaactcagaaatcctcttgcctctgcctcccaagcgctgggattaaaggcgtgcgccactgctgcctggctttttttttttttaattacttatttatctttattttttttgagacattgtctatccacatggccctggttgccctagaactcactctgtagactaggctggccttgaactcacagagctccacctgtctctacctgagtgctgagattaaaggtgtatggcaccacctatgtttgtaatgtttcattattatttaggaaacatttctggtgttgattgatacagatacaggtatctagcaattgttggagggaaggggtgtgttgctctgtcagtagtagctccctctgaggctggaggcaacatggaagctgggtggtttcctgttcagactttagggcccccaagggaagaaggaagctgtcttccaacaaagacctttccagtaggtttccttgggtagcagacctctcactcctctgtatttccagtatgtaattgaactgtagaagtagttctgcctggacacgttggggactctctgttgcttaagggcctggaccaagggcagactggactgtaggctaaggtctctatctctctctcctttaaggaatttaccagctcaggctctgccaacacggaaaccaccaaagtgaacggcagcctggaaaccaagtacagatggactgagtatgggctgacgtttacagagaagtggaacacagacaacaccctgggcactgagatcactgtggaagaccaggtaagagctccctgcctgctggaagtcctggctcctctagttcccattgagacatcctgggtcctgtctttggttaacctgtgccacctttctcttatttgcagcttgctcgtggactgaagctcacctttgattcgtcattctcgccgaacactgggtaaggttctccttacccacgaggatattctgagatgttatgggccctggaagtccattacagcaaaggatttttgggctgacatcatgccaaaggtagcctcttagctgggaggctggagggtggaag

SEQ ID NO: 19851 - DNA, 1749 bp, Mus musculus
agcagcggatggcacactcattgtaatgggactgcaggaggctggaagggagggggattcggaagtacgttccagcagggtctctgctctgtgtgccagtgatggccgttgcatgtgttgattcgaggatagcagcaggtcaggttgtattacagagcacaccttgaagggtcgcctcgcttggccactgctgactgcacctggaacagattctgaccttgattctgaccttgatgctaacctctcttctctttcctttgtctcttgcccctttctccctcctccgtcctctgtcacccctccctcccacacctctgtctcaactccccacaggtatcaaactgacgttgtcagccctgctcgatggcaagaacgtcaatgcgggtggccacaagcttggcctaggactggaatttcaagcataaatgaatattgtacaatcgtttaattttaaactattttgcagcatagctaccttcagaatttagtgtaccttttaatgttgtatgttggggatgcgagagttgataaataccacgttagacctccaggctaaggatgactcggctttaaggtgtttaccatttcagaggtacagcagaaaccccattccagaaagggtcctttttagctgtaggcgtgggttggggaggagcccctgtagagatgccaggctacaagtggaaagctgggaacatgtgggtcctttgtaaatctgtatccagtccccagatgaaattgtgacttcccgagcatcgaaccctggtgtccagatcctatctgctcggaagcatgtacacacctgcgtgaaagggatgtttttagactgatcctcacaccctgttcccatcgtgccctgttcccatcctagcccatcacttaacctgttttacaccaaaagtagtctttagggtgtggttagctatttcttttgtgccattttagggtggagagggtgggcgtgatggagccagtcattcaggacttaattcttccttgtgttgtggtgtggttttctttcttcttcttcttttttttttttaattccttctttcgccattgcaccagagtatgaaatagcttccgggttctccggctctgagctgggcggtgattgtggtcacaccctgacaacactagggatctcaactgactcctcttgtagcctcaccactattttttagcagtttaatgggtacattatagagtcttccattttgtgtggaattagctcctccccttcaaatgctgtaattaacatcacttaaaataaaacttgaataaaatactgaaacctcatcctcttgttgtttttgttaaaatacgaaatggccagggcattggtttggatttgtgctgtgctcctttgtggtgtctatcaataaatctaacctgatggtagaaaagaacacttgggaggctggagaggtgactcgggggtttatagtgtttcctgcgcctgtagacctgaagcgctcacaacttcctataactatgggtttggggtatctgattccctcttctggtctccttaggtacccacacacatgtgacgcacaaataaaaataaatcttaaaagcacttagggttgatgtagtggcacatctcagtaccttggagattagcacaatgagatcagtgaggaggaaggttgcggggttcaggagagcccacccttagttgaggcactgctggcattgatgactgttgggtgagagtcagttttctttgggggtgtatgcagctgc

SEQ ID NO: 19852 - DNA, 1736 bp, Mus musculus
gctgccccccagatgctgtttccggtcctttattctacgtctctagttgagatagggccccactcagtagtccgggctggcctcaaaccgccggtcttactgcctcagcttctcaagtgctggtaccacaggtgtggcagtgcacccacttccaaatctcatattttcaaacacattttttttgtgtgtatggtccccaattttaatgtacaaagatattgcaatacaatgctttgctttaaaataacatttcccccctctctttcaaagctgctttaaggacagtgaagtgggttcaattagtgaaggcacttgctgcctaccctgacagcctgagttcagcccccagggcctccgtggtagaaggcaataatcttagaggttgtcctctgacctccacatgtggaccatggcatctgtgcacctatgcacatgcttacacacatggtaaataaatgtagttaaaaagaacccacttggggtgttttaggcacttgacacacacagtgtaagatgatgtagttgctgcttcatggtcacggtaaacttgtgtagggattctggcaaaagagactgcagttcccagtgagcacaggtgaaatgttaggtagattccaggtttggtttggattactgaatgacgagtagggtagaagctggtagagtatttaacccatgaccagggactgtgtgtcagcacttgattttagcatgagctccaaggttcagacgacaagcagagtgtaagacaggtcagaggtttctcagtttgtttcttgatcacagtaagttggaggagactctagagcccattgtcacttgcgtgagactgtgtcttggtcctgcagttaaagcagtaattggggaaagttcacacagacctgtttaacagtgaccttcattcagacttgcctccctccagcccccagccactgggattatttgccgtatttcatggtagcctgccttttcagagttgatcagaatgtaaatgtgtgatttgaatcatgcttggctaccaagcttctttacaactttgcagaaagcatcgtctttactgcgagctcagtaaagcctgggcgggtaggcgggccggcagccacgctccctgtggacacggaagcagcagcgttgacttcccccgtcagggacagttgactgtccgagggaagggcactgtggtgaaataaacctgaactgttttattgcagtagtttttttcatatctgaaattgtattatttaatattttgaataagattttaagaaataaatggtaaaggtataaatctgcttctgttagtgtgttctttacaatgctgacttgagtgcttacagaagagctgtgctggccgggaggaagtgagcctcagccagttgttcctaggcctgctcagcctcggagctcggaagccacttacacttctgacttgtttttagaaccagtttgatactgggtcctgacatctgctatcattagcataccaggatggcaagaaagacttgtaggacatcaccgtgtactttccaggttggctccctgttatgtgtgagctgcccaaatcaggagggtcagccccggtgacctgggcctctcgctgacctcctgctgatggtgttcactgttgaaggtgctgccttaaatagcctcctacttgatcatacacagtcagaaaatgctgccagggtttagcaggcaccttagcagctgggcaagggggcccacaatccacattt

SEQ ID NO: 19853 - DNA, 1148 bp, Mus musculus
catgggaaatgaagttgttctcatattttaatcaaggacatgtgatctgtggtaggaagagcagcctcccgtataaattgtgtggtgggtcatcgctcattcatctacctttggagtgattcatggctctctaaggtaataaaatatctccctgaaatacaaagatctgtccaggcaaataaaaacctgacgtagttactgtatggtgttttctagggagctgtaactgtgatagccagctcaatgagaactaagtgggaaacccaaatacaggccaagctgccaagaagaggcgaatccccactgcgggagtttgtgccaggcactgcttggggctcataaactgtatggactgtccgtgtgaggggacttgaaatgggcaaacaggctggcttcttggcatggatacacaagacctgccaaacttcttctggccccagatcttccaatagccactgacctagtgccaggctctgtgaatatcctctctctctctctctctctctctctctctctctctctctctctctctctctctctccccctcatcttttgaggcaaggttttacaaatcccaggctaaccttgaactcctaatttccttgcctccacctctatctcccaagtatcagaattacacacataggctacctggctcagctggacatgtccctcacagaatcttttgattcttctggggaggtgaggtttgtttggggacaacatgagcatatgaccagttagcaagataaactaagaatcaaagaagagagagaagaggcaccaggtacccagtctgggtcaggactctaaccccgagtgtcctcctattgccattattcccttggggagggtggagacccctagctggccgctctcggcatccttgacagctagccgtttgatttatgttctggtctttccaatgtctgggaacccattgcttgtcccaggaagcctgtgggggcaattcctattggttgagttgagctttcagtcacagatataatcccgcccttggctcaggttccttaagtctggccaacagcctcctgggtatttgctcacagtacaccggtctcgcacctgatgcatgcacacagctcctcagctctctccatggtgagcaccccagctttattcagaag

SEQ ID NO: 19854 - DNA, 1170 bp, Mus musculus
tctgacctccatacaaatgctatggcatgtagtcccatccatacgtatgaatacacacacacacacacacacacacacacacacaccctctcctccctcttgtcttttccttggtatcccatcaacaagacttagtgtttgttgccgttctatctgtccccggcctagtctaataaacatttatattgtttccacaactgaaatctttctgtatatttccatctgacttcaggttttgtacttaattctatatttcttatgtgacctctgcagagaaaagtcatcgtagcaccacaacaaagcaacagcttggcttacagtgccatgccctctttcaatccaagagaaggggatcccactcagtggctaagggcatttgctagacttggtttccagcttccacaggccagttcacaactgcctgtaactctggttttagaggagctgatgccctcttctgatatccatagatgttgtacacatatgatacacatgcatgcactcaggcacatacataaactatatatacatatatatgtacatatatatatataatatatttttttcagagagggggtaggcattaaattattctataaatgagtgattataattgggataagagctgtgaagcagatgaacagggggtcctgggcacccaatagtcttaggaaatcagaaagattcttagctattaatgctcagggctgaaagctgaggcctggctgaccaggcagagccctggagaagagcagcaggggagttggccaagagctcaggcaggaggaagtggaaaggaaaagccaaccgcacaggcaggaggaggaaatatctgaaacaaggtaacacaggagatgtggcaaggactgcatgagtggctatggtctaggatagggggcttcgaatgagagaattgacaagcaggtttcaatcatggatatggctggaaagagtaggtgtgcagttctgtgtggtcattctattgtacagaatagggatagatgagtggctatgaggagctgagtcaggaggccaccactataatctagatgacccattctggaggattgggataagatagatggagaactgccggtcagtatctatgctcttctgtgtttgaggagcacgctgttgaaccccagtgcctcactggcaatggggaaagga

SEQ ID NO: 19855 - DNA, 2471 bp, Mus musculus
taggtattggggtttacttagcatgtcatataaaatttgtttcatttataagaaactatagttttctttaccattctaggagctgacaagtatttgcagtcctataatttcaaaacccaaacccaaagtggaacccccaaaggaggaaccaaaacatgctgagcagaatggaccagtggatggccaaggagacaacccaggctcccaggctgctgagcacggtgcagacacagctgtgccttctgatggcgacaagaagcttcctgagatggacattgattgattccaacacttgtttatattaaaacagactattataaagctttaagttgtcaactttgttctgaatatcaactagagcaagcaaatactggagatttcttagtcagtttttaggggacctcgggggtggggtatataggtaatatacagagcattttgacttctaaatagttagatccagagatgaagtgcactgttctctcttcattacggtcctgtttaagagcccagctagtctatctgagctctcgcctccatccttgttttaatcatgcttctacaaggtgaagtgtgtttggggaaactgagctctaacaaaagccgcgacagccaccaggcaggcttttccttatacatgacagaagttcgtattacgccttggaaggtctaggtggagatcaccaccagcattctctgcctgtggggttgtggggctggtgctttctccatttctgagggtcaggatggccaagcatggattaacactaggagagtgcagagcgcagcagagcctgctctcatccctctatccccagcccagtcttcctcctccatccttaagcagtataaatgctatgtgccctcttcacttagagcgagctttagtgtgtcaagggactctgctttcctgtacttcctaaaagtacattcactaatactgaagcatcaaagtgtagtttaaccttaaggttgggttgtaaataacacagttgggtgtaggcatggtaaatctgagcagtccatccttagtatggtggaaagatttgtaccctgacccgctcgagtggtggtagatgtatgtaaattagaagtttgaatgggacaggatgagagttcgaggctctttgtttggtatcttttgtgttaatgtgtcttgaatctgccaatctgtatgttaaaacagctgacagattgtaaagctattgcactgcgttgccctggacaagtctgaaattggtataaaagacaaggtgcccaaggtcacaagaacacctcattgccgactgaagccagtgtcagggcaccacatactcctggggccagtctacaggaaagagatgttctgcaaacaagggtggatgcctgcagtagaggtcagagctggttacctgccttagttacaagtgtcggttatgttctgggtctttgtaatcgctgatctctgtaacagagcctctgtttatttttgcttgttggaaatagggttcaaccatgcatagttagaatcactatgcatctgtctgtccacacaggaagtgctatagctctcaagtgctctagaggcagttggaaaggaaggaatgcatgcttatgtgagcagctggactcccgctcagtacaggcctggaaccccaggccaaatgtatgctctgcttccttgagtgctgtaagagttcccactggccttgctctgaggccaagagctttttcaaatgcaggctgcaggattaagccagctcttatgcaactgactgtccttaatgaagaactcataaacatttgtgtgtgggggtgggggtgggagggtttgggtgctgggatgggggtgaatttgaagtttaagattaaaagctagaaatcagatggtctgcttctgctatgtctgtagaccgattggatgtatgtggaggctggccagatggcaactgatgacttgtgtgcaaacaagtgtttatccgggttgcattatccaaactggtttgttaaaaactctaggtcacattcttacactaagaaaaacagttaacatgagacaaagtttaggaaaaactaataaaagaaacctgtcttaacttgaatggttttcttaattttcttaagtgggctgtttgtgtgtgtgtgtgtgtgtgtgtgtgtgtgtgtgtgtaggggacttacttgagtagttatatatgtgggtgggtgggtaggggcaggctgggggagactgtcaacagaataagctggcctgaatgcagtccatcatcctgccttagctgcttgcctgtgtgcttattttggagccctctgcccctgagaatagcaatccagtgttcttggtatagtaatcttctgcgaggctggcctttagatttgatggtagaaggtagatggcacagagtattaacataagtgccaggactgagtagggccagaatctgctaggaactgatgcctggctagttggggacatgccctgtggtgaggca

SEQ ID NO: 19856 - DNA, 1205 bp, Mus musculus
gtgtatgcatacatacaaagtcttaagaatgtaattttttttaagatttatttattattattattcattagtacactgtagctatcttcagatgcaccagaagagggtgtcagatctcattttgggtggttgtgagccaccatgtggtttctgggatttgaactcaggacctttggaagagcagtcaatgctcttaaccactgagccatctcgccagcccaagaatgtaatttttaaaaagaaagatgaagcagtgcatttgagtaggtacagagacgaggtgggtaggacacaggaacccaatccctaatgaccaccattatgcttaactcctgaatgtagtgttctacatataacagactcactctttagtttctagatatgatacgtatgagttacatcattagttaactaaggccaaatcagtttttgatatttgatctagtttaaaatattaagttagcctgtgtggttttgttcttcatagtttttgtttctttagacatctcaagctggatcaaaagataaaaagacggaccaaccacctcaagcaaagaaggcaaaagtgaagaccagcactgtggacctgcccattgagagccagctgctctggcagctggaccgggagatgctcggcctgtacacagagaatgaggtacgtttggactttaagtcagtgcttttaattcagttcctgatgttgtattgatctccaacagtaaactatttccttgctccttcattaactgtgattttgcttctgttaggaattggaatgtaaatatctgatatgcagggtgtctgatctgactcctgtaaaagggtttgatagtgctttagggtttctgccagtttggactattattggtaaaagcagatttaagttgtaagctatggctctttatgttcttttgtgtgtgatagtaacttgacgtctacattgctatctcttgtcaagtggctttttgttttgtttttgttttattttatttaagatagggtctctccttggctgacctagaactcactatgtaattcatgctggcctggccagagatctgtctgcctctgcctcccaagtgttgagattaaaggcgtgtgccactctgcctgacacagaactctgtcccccaaagtaataactaaccctttcccatgccccctccctttttttttttagtttgaaacaggccctccccccccac

SEQ ID NO: 19857 - DNA, 1133 bp, Mus musculus
ttgtgtattttagctgcatgtatggctgtgtaccatgtgtctgcctagtatatgaggagaccagaaagagaacattagttgtaagataacatgtgggtgttgggaatcaaacccatgtcatttagaagagcatccagtgctcttaacttccgagtcatctctctatgaacctgcaaataacagctgacaaggaggagaaactaggactgttgagtaattacaaacctaggatacatgtgtcaaaggtgttcagaatgtcataaatttttgtctgaggaaagcgcttgccatacaagccagaagacctgggttcagaccctcagccaatgtaaagctagggtgagatgggaggtggagggtcagggctccccagaagcttccaggctgaaagcctggactgggtagcagcaaaaagcagagattgctgtctcagatcagggggagttcctcttacctcagcacacttgagacaccccccccccaaataacaaagaaagattggaatattttaaaaagaaaaagagccttatgaagttttgtgttttttgtccttttcttcttcctagtgactgtgaagtcttccccaaaaaccatgctgctcctttctccaaagtcctcaccttctacagaaaggaacctttcactcttgaggcctactatagttctcctcaggatttgccctatccagatcctgctataggtgagtagaattgaactgaaatcataacaaaaattgcctgtacttagagcactaaagggaaaaaaaatagactattcagaaatgtaggcgcttgaggccacaaaagcaaacatcttctgccctttgtacttgctgtagaggcagtcggatggttatttaatggaggcttgacttttgcagcagtgttcctgggttgagtgcacattgtgggtcattgcttaaggtgattctgatgtcagttggattctaatatagggttacaagatttgcacagaaaccactagattgtttacagcatcagtttattgttgattttggaaccaagttgaccagtctttacaaatagagaacatttacaatttggaaataatatcacttgacagagaaaccaagagttgtaaagatctgtgcagtggatgaacagccaggagca

SEQ ID NO: 19858 - DNA, 1284 bp, Mus musculus
gatgccggtctggaactcagaggcttgtggcagttgtcttgcctcatcctttggaagttgagccatgccttttcagagtgtgttcgtggtgtttcctctcatccccccaaagaaagaaaaaagtttatttagtatattacctggacagtgatgaaaaggactgcctgtttcatagtgtagcgttagcaagtattaatgtgcagcatcctttttttcaccctgatgaacacattttctggcctttaggaaatagatgatggccaggtggtggtagcacatgcctttaatcccagcactctgtgagttctatgccaacctggtctacagggtaaattctaggacagctagggctacacagagaagccttatgtgaaaaaccaacaaaaataaaagtaataaaaataagagtgtatgtatcatggtaaattttacaattggttaattttttgattatcctctttttctttgaaggttttggccacagcttttgatacaacattgggaggcagaaaatttgatgaggtgttggtaaatcacttctgtgaagaatttggaaagaaatacaagctagacataaaatctaaaattcgtgctttattacgactgtctcaagagtgtgagaaactcaagaaattgatgagtgcgaatgcttcagacctccctttgagcattgagtgttttatgaatgatattgatgtgtccggaactatgaataggtaaccatgttcttaatgttaaatgagcaatgacctttattttgtttaactgattaatgaaaccatggtggttaacatgttaaaaattacaagccatttagaacccagttttcatttaaaagttgtatctagtggttctagtaatggagactgaaacttttattctggtaactttaatgtttctgaaagtcactagttaattcaaatatgtattagacacaaatgactgggaaaactagtgaactgttttaatgcagaaataggatgaatttaacttaggcaccaatttaaaaaatgttctttttgagtagttcaggatcatttgagggcagtatcccttttatacagcactgcaagaattctgggtaactgacatttaaggttatttcagaaacactcagtgttattgttgcctgattgtgttgcttggatgagggagtgagatgttcttttggctgtgaactcctggtggaattcaggcaagactaatgacttgtttggagaagtgtgcctgagtgacccttaaaaaatttgagatggtatttattgttgaccagtgttcaagtat

SEQ ID NO: 19859 - DNA, 1192 bp, Mus musculus
cttgtgtctcagttagggttggagggagatggttgctcagtcaagctcttcaaagttaagagaggttctgttttggatcttagctgctgggtggggctaagggtagaaggatgggttatccaaggcagagctttatcatgaaacatttcctgagacctggtcatcatttattctttaacccagtaaacatttattgtgactgtgtgggttctggggcaaaaccacctgtgtcctggttggggagacgtctaatgtgaacacagtgtacagtccacacagtatccgatggcgaggcagtctctcctagcagtcctgtttatggcaggagggatggtttgccttcggatcaggtcattgcctcaaggtttgctttacgttgtgattgtcttttgctaaatgtcatgtatattaaacaaaaaggtaacattcttcgtaaagataacgttcttcagtcccctcctgagatactgccccattgactaggacatgaagtggactaaaattggatccttttgttttgttgcaggttacatatatggaagaagagaggaattttaccacggaacaagtgactgccatgcttttgtcgaaactgaaggagacagcagagagtgttcttaagaagcctgtggtagactgtgttgtctcggtgagttgtggtagactgctgtgttgtctcggtgagttgggctcgagctgccttaagaactagagaggaaaactgtttttactgcaagtacaaattgttactgtgttgtgtggtcgtggtgttttgagacgttcctgctttgacacagtcttgctgtatagtccaggctgcctcagtagttaatgtttctgcttctgtctcccatgtgtttgggattgtagtatgataccatgctcagaaatctagttttcattttctttggttttcttcctttttctttttctagttttggagacaggatctcactgtgtagtgtgggctggcctgagcttgctgtgtagaccaacgtggtcttgcacttggctgccattcttctccctgtgcctcttgcctgtgctggaattccaggcatggctcagcttgcctggctgaaaggatcaccaccaccacgctgcccactcacccagtattttttcagtacctagtgtagtgcttagggacagggtagctacttgattgaatgaattgaatgttagatgtctg

SEQ ID NO: 19860 - DNA, 2525 bp, Mus musculus
ttcttttgcccctatcttcagatcaccacaactaacagtgtgcaccaccaccacccagctaaaacacgtatttgaaacaaatcaagagctgtgaatcacactactattcacttcataattttataaaaataataaattgggcttggttttgtttttttttttggttgtttgggttttttttttggttgtttggttgtttgttttttcgagacagggtttctctgtatagccctggctatcctggaactcactttgtagaccaggctggcctcgaactcagaaatctgtctgcctctgtctcccaagttgctgggattaaaggcgtgtgccaccacgcccggctttggactttttgttttttgttttttttgtttttttccgagacaaggtttctctgtatagccctggctgtcctggagctcactttgtagaccaggctggtctcgaactcagaaattcgcctgcctctgcctcccgagtgctgggattaaaggcatgcgccaccatgcccggctttggacttgtttttttaatgttgatgttttcagcaaatagctgtatatgtatcttgattctttcagctctacagattttcaaacaatctaataaatagtggtagttcagttagggttttttgttttgatttccttttttaagataacatcacccattttccaggcctaaaactcactatgtggccaggcatgaccttgaatttgtgatccttcctagtgcagagaataggttaccaagtcaatttatttgttgatgggggttgaacccaatccagggctacatgcatgccatttaagcactctagcatctgggcttcatccccagccctggttatttagtcttggttttgttttaatgcaatccttagactttcttttatattttagaatgttatcttcatatacatttttgtgggttttttaattttcatatacttttaattaataattttttttactatgagaaatgtatatgtggactgagagtatatgtggtagagtattcacccagtgtgtgagagatagtgctcacccagcgtgtaaacggttctagttttttgttggtgtgtgtgtgtatgtatatttagtgattacttgtggatgttaactttaatataaaaagtaagacttatctttaaaaatacctcttctgtctgaagattataaagtgagtttggaagatattttgtttcacattatactaattttatattttactttttcctttcctttttgttttttgtttgtagactagcaaagaagataagttatcaagtcggattcagagcatgcttggaaactacgatgaaatgaaggattacataggagacagatcgataccaaagcttgttgcaattcccaagcctgcagtaccaacgaccacagacgagaaagcaaacccaaatttttttgagcagagacatggaggatctcatcagagtagcaaatggactcctgtaggccccgcccccagcacctctcagtctcagaaacgctcctctgccctgcagagtggacacagcagccaacggagtggtgcaggagggagtggcgccagcagcagtggccagaggcatgaccgtgactcctacagcagtagcaggaaaaaaggccagcacggctcagagcactccaaatctcgatcctcaagccctggaaaaccccaggctgtttcttcattaagttctagtcattccaggtctcatgggaatgatcaccatagcaaggaacatcagcgctccaaatcacctcgggaccctgatgccaactgggattctccttcccgcggacctttttcaagtgggcaacattcaagtcagtctttcccaccttctttgatgtcaaaatctagttcaatgttacagaaacccactgcctatgtacggcccatggatggacaggagtctgtggaaccaaagctgtcctctgagcactacagcagccagtctcatggtaatagcatgactgagctgaagcccagcagcaaagcacatctcaccaagctgaaaattccttcccgacctttggatgtaagtctcacacttagtgttcagcattgtgtctgaaaaaaagtaattcatagaaatttcagtgagttgcacctgtctttttgctttaatagtaagaagtataaaaattttaaaagcttaagaagaaaaggtttaaataacaacttgggaattgaccatgaatccatattgctgtgcactttccttcttgtataataaagaaaatattcagtttctttttttttttaagatttatttatttatttgtttatttatttaatgtacactgttatactctcttcagacacaccagaagaggtcatcagatcccatttcagatggatgtgagccaccatgtggttgctgagaattgaactcaggatctctggaagagcagtcagtgctcttacccgctgagccatctttccagccccattcatagtttttcaagtattaaaatgaaaagtcaaattataggctaaaagtaagatttatcaatagc

SEQ ID NO: 19861 - DNA, 1115 bp, Mus musculus
ctttttttaaatgtatgtttgtgtgtatatacatttatgggtagatacacacacccattcatgtgtgtagagagtagagagagacagctaatgtcttcttcctctatggctttctgaattactcccggatgtaggctttctctgaatctcaaactcactctttttctgagaggctagtaggcagcaagcctcagtgatctgttgtcatcacagccatcctcctgtgtgtgtgtgtgtgtgtgtgtgtgtgtgtgtgtgtgtgtgtgtgtatgtgtgtgtgtgtgtgtgtgtttgtgtgtgtgtgtgtgtgtgtgtgtgcacgcgtgcactcgcgcacaatggagacagaactcaggcccatgaaaacaagctgtcttttctgttcttgagtatatcagtaagttttttttttctcctaggaagcttttaatgaaaatgccaaaatttctttatttagttgttgatgattatgtaagttatttccacttttaggctgttaaatatctataaatattattgtatatattgtagacttattttttttttctcccgggtaaatgctagtgatggtgaaaagaattgctgaattgtgtggtaaatatatattacacttggaagatactaagcactgttctttagagtaattgtaacactcttgctttaccccttcctaccactcaacagtgtgtggtagtcagtccacttgttctgtctgtgcctccagcttagaattgttgatctatttgtttttactcattttagcaggtgtattagaggtatgttattcttatcttaatttatacttcctttaagactggtcatattgaactatcttttttcttgtgtttattgggcattcctctatgggttacataattccatatgtttggagtcagaagtgtttcagactttaaattttaaaggtgctttaaaaattttgaaagacttccatataggatatgggcttcttgaactgaagtatgaacataacattgattaatgttttgtatagaccttatacatatatcttgaaggtaattttgtgcatctttattttattggcattttgactgtatccatcacataaggttaggtaactgtatatgtcatataag

SEQ ID NO: 19862 - DNA, 1104 bp, Mus musculus
agaaatcctgtctagaaaaacataaaaacaaaacagaaaaaaaaaaaaagtcaccaatgtgattaataacatgagactatgaaaacaaggactgaggccagtgaaatggcttattaggttaaggtgtttgctaccaagtttgataacctgagtttgattcctgggacctatatggtggaagaagaaaactgactcccaaaggttgtcctttttttagccctgcctgtcgtggatcttactatgtaatctggctttgaactcagagatctgcttgcttctgcctcccaagcactgggattaaaagtgtgcgccaccactgcctggctcacaaatcatcctttttttttttttaagatttatttattatttatttgtaagtacactgtagctgtcttcagacaccagtagagggtgcttggctgttttgtttgtttaaatagggcctcactacagagcccaggctgacctggaccacaatgtcctcctgcttctgctacctctgggattcaagtattaccatgcctccctccccaccccctgttatagaactcttaacttatagatgttttggcttgaataatctatatgtatgttattcttttcttgtacttgacatttattgagcttggaatttgatttatagtttctaccaagttagtaaaacctttgcagttatttgcagcgctcatattcttttctgttttcttccttcttcctgcttcaaggactggtattacataatgcagtcttttcttttgttgccccattttatattgttttattgctatactgtaaggttctgcagtatcttatatgctcttggtctcagttaatgtaatatgatctcagatatggttcacacttctaaatttctgtttttatttgtttaacatagtcaagttctattccaagcattaaatttgacagccattcttgttgatgacaacctttttcaaaaagtttttagtttgtttgcttgcgttttagacagggtcttcttactatgtaagaaatacacctgcatctgcgtcccaagtgctaggattagagatgataccacacctatccataaacctttttaatagagagctatagcaaaatgat

SEQ ID NO: 19863 - DNA, 2797 bp, Mus musculus
cttaatgaatgtttttaattttctagaattctttgctgaactggacaaagtgatgggccctctcatctttaatgcaagcatcatgacagatctggctcgttacacccggcagggactgcattggcttcggcaggatgccaagctgatatcttgaactgaacatactctcgttgcctctgatttttttccacaacactgtgtcacatcacaaaggaaaactgccataacacaccacctagtcgacactaagaatgaggaatggttttctcctctttggtttatgttgttgtttctataacccaaagctatcatatcaattgaccctttgaagagtcccaatgtgacaagtatttaaatgcttctaaaccttcagtacatcagcaagatggttttagtaattggaattccagttgcaattcataaataatcaagtaaaattctatttattttcattttttttcaagttcccagattggagcttgtttaaagcttagtatttctgcctataaatttattctgttaatatttagcataaacttaatgtaggcattttatttatatattttgggagctgtgttacttaatgtcttctaagataagagttggcttgtccaagacaggacttgttctctctacagctactcacctatgttctttcaagtcttactacagttttattattgtaggatttatgcttggtattaaggatgctcttccacatgtgaaaagtcatttaaacatgagaagacggcattctgcatgggtgcagaaatggagtgggtctggtttagtatgcattatttcaaaactgtgaatgtgtgttagtaacactagcaatcacaaggtgactacattgcatctaatgcattacaaaaaagcagatagatttgctggggaagcactgaatggcttcataaaggacaatcttaaactatgagtttgttaaaaccttatattcttttttgttttactcatttgacacttgattgaaacagagtaaattactcctaaaaacagtgatccagtttctgaaggctgcagcctgtattcattgctaatgtttgaaggttaaagtctgtggatttcccctatggtggagagattgtgatgctcagatctgacagttcaggaactggagcttgaaaggaggtgtcccaatgtctaatgtggagaaaattaatttctctttccaaagatcctcatcaatgatgtatgcttttgacaggatcagaaaactcacagtagcagctgagcatggttttgtatatctgtaatcccaacactggggagggatatcaggagggtcaggaggtcagaatcatcctcaagctacagaaagctagacagtgagtttggggctagcctgagctacacaatcccttgtcacattaaagaaagaaaatgtatactaggaaagtaccaaacttggctcattgtgagctttcttggaaagggggagatgatagagacagggcttaggaagccagctctgtaacagttccttatcaaactactgttcccgcaaggtgcgcatagcagtgaagggcgaggatgtctctcttcctctatacttctttttagtgaccccgtcatgtctggtgtgccttaaatcttaactttaaatgataactctatggattgtttacagataaagttttatgctgggaccagattagccatgcatggttggtcctctacaataataatttcaaatcctctttgattttaaatcttcttttagagtcacattaagactccttcagaaaagctagtactttggtacctgatttagtgtaatcaattgggtataatgctgcttcaaaaaatggcttttccttctcattccaaaaatccatccaattagggagaaaaatcccctgttagcagatgattgttgagacttgaatggaaaggaggaagaggggatagcaaccttcacgcagcagtgtcgcaaatcctctctgactccttcaccacctgtttctgaagatagtgaactttgtcctgcagtctcatatctacagagcttaactgctttgtgtctcattatttttacatagtgttgagggttgatacctatagcttatgctgaattgaacatttttcccttggagaaattgcctctgtaccttcctactttaatcgtagtgtatttacggaatgcttcttcagaggccatcggttcctctcttgtgctagtaacctccatggtctaacagctgtgtgtcctgtccttgcctcttctctctcactctggcttctccatttcagggaggccttagaagtagagcaagcaccctctccctgtgctttcagccccgctgctgcagttcggggctctgctttccagctctgggctgtgtgcagcgcattctagtgcgcctctgacgtcatgctaaagcagagtttcctacgtgttcatggtgctgctttaagatgttttccctttaaaactgtcagttcttggagaatgaaatggttgaacctttcattgtggaggattttcctcaccacatagaaatgggcaatggatcaaaatctgatcctaagcgattgcatttttgatgtcatagtgtgtgagaatacactctgtgtctcttctcagatgttttgtctcagtcatgtccagcacataccttggactcctttacaagtgaccatccctccctctcggtaggtgccctcagtgttttttagccatttaaagctgatttgacaagtggctacaaacttagtctgaaacttgtattcactctatagttagtaatagaaatagcaactattgttaatgctcagt

SEQ ID NO: 19864 - DNA, 2171 bp, Mus musculus
tttgtatttaacagctgaaactttggtacgttgacggttatcgagtgagcttgcattgtgtagccagggcctacagaggctcttgtcaggaatacaagcactgcctggagctggtgctcagaggagcttctagtgcaaccaggaatagctccgtggggtgatgcctagctcaattgagaagggggatgctgtacactcttctaggtatgagggtatgcgactttggatcttaaaattatgtacacatacacactttatatatatgtacgtatgtatgtatgaaaacatggaattagtttgtcaaaaatgtgtgtgtttagtattttagcttagtgcaactatttccacattatttattaaattgatctaagacactttgttcttggcaccttgaatattaacattcaaggatgcaatgtgtattcctttagattgttaaagcttaattactatgatttgtagtaaattaacttttgaaatatatttgagcccttctgtagtataatagggctcttacagggtgggaaagattttaattttccaatagctaattgaacaaaatggcttcattgtatattttgatttataggagtctgtaaggtgtctgggtcccaaggacatctactgaggatgactgttttaggtgggtggaatggtgtttagactataccttagtgacttggaaagccagagcacctagttcaaatccggactcctataactcattcctctaggatgtggaatacaaatcccatccagcttcacatttcaattagagaggcagacttcttttccagtaatattgtacacctagtgttgctatgagtaaaatcagtaggaaaaatactgagaaggtctgggaagacgcactgactaggccagcggtcacatttgtaaatgtacctttcccataccttccagtggaggcattcagctgcgacttttcagaccctaaaaccaagccagggaggaggaacacatgtttaaggttagagaaggccaggagtgcgggtgcataccctgaggcaaaggccatcctttgctagatagagaacctgagatgctgagacccattggtgaaccagtgtggtagtgcatgctttaattctagcacttggactgtcagtttgagaccagcatgctctacacagagagaccctgggagaaagcaaagtgtagtaagaggatgccattctgcagaactcgtgttaattacatgaaccccatggttaactaaaaagaacttactgttcccagagccagggaatagaaaagaagctacacttctcttgtaaatggtatttagaacaaggtgttcgggtaaagtctcaactagtcagaggtttcagcagcttaaattgctaatatttaagaagttgattttcaggaatgtctgcctgtgcctctctccttgctgccattgatcagctcagcaggaatcatcatctttaaacgtggagaaagctctcagatgagcgtggacaagctcccacccagaagtcctaatgatacttggttttgactgtgctgcttctgtgttaggtttcttctcagcttttagccactggggttttctgcctgttctgtacctctctagaagatgtcgacttggaagtgctgcctttcacaccagtgccatggtgtccatatagttgagcttgttgctgatccagaggtgtcccctttatgctcacacctggcacatcactgacatgagcattcaacagtacatgggtgagggtagaggtggggctagccaacagccctggctcaattggcagggcctgcaaaggccccacttgagggccagacactaggttggtaagcacagttagggaaatttctacctaacctccgttttgaatgattctgagaaattttatatatggaggatggaaatgcttatatatttattgaagatctttttatttgaaattaaaatcatttggtaaataatggtttgatatttggggagggttttggagggaagtaacatggttgataaattacaggcctgatgactcccctgaagggcgctgttgctgatggagagagaggcctttatcttgtacatgatccaatctttgtcttaggtttcttttatccaaaatatctaggcatctgacactttcaaccaaaatttcaattatatactgtgatttttatttgtt

SEQ ID NO: 19865 - DNA, 1174 bp, Mus musculus
gatccctgagttcatggacagccaggcttacacagagaaagaaaccctttctccaaaaccaaacaaacagttgaagctagggacagtagaaggacaggcagaattggttgaaagtcagaaaggaggacatggactgacagaggtgggtggatctcttgtttgaggtctgtctgtccactcaaggaggccatatcaaaaaaggaaaaaaaaaaaaaaaagccagagagctggggcactggtggttgtggtacaggtgcctgttcatgtaaatgacccagtgtggttcctcccagcacccacatggtggctcacagccatctatataactccagttccagggcacctaacatcttcttgcccccagggagctacatgcatatgtatgatcagacatgcatgtaaacccctcccccccccacacacacaataataataaaatagaaactttttaaaatgtctgtactcatggcttcctctcttgatccctacagcgtttgtagtggtctacctgatctacacatggggcaaccaggagtttgagcagtcgaaaaggaagaatccagccatgtatgaaaatgacaagtagacggcctgcacctgggtgacagtcccctgcctctgaaagacccttctctgggagaggaatccacactgtagtcttgaagacaataaactacttatggacttccctttgtgactttgtgtgcttagtttgagacaaggtctcactgtgtgtccctgactggcctgcgtctcctgagaaatctgcctgcctctgcctgctatgtcatggcgatcaccaccatgcccagcacaacgttgttttggcaatatgcaagttcatgacaatccctttctcagcacaagccctgcaggggctgtggtagctatgcatagcgtggaacctggagtgcagggtcccaaccctctgctcccatcacatccttaaggtctagggacaacactgtaatcagggtgtcaggtggacttgctagacacagatgaacttttaactcggcagcctttgaagtaagcattctaatccctttgctgatgaggaatcagagtttaagtactttgcccagaatcatatgactgagttggtagagccaggtaccagtgtgtgatcttaaaagcaagccatgctgccttccttaggtagggaaggccttcc

SEQ ID NO: 19866 - DNA, 1149 bp, Mus musculus
ggaccgcctcttggaacacccaggtgctcctaagccacgcccatcaccctaatccgcgccccatgcacctataggccccgccccgtgcacctctcgacgggggaccttacggacgtatccacctaagatccccagggtggctaataagccccgcccacttgcttggcacccctcccaccaagccaccattcctcttcaagccccgccccttggcaacatcaacctctcccgtgcgttcactacttaccgtaagcccacaagcacctctataagccccacccacgtgtcgctagaagcgcctctaagctccgcccagccctcttggtactggtcctttccggctacacgaaggtcaggccacgcccactcaggtcaactgacaattttttttttgagtctcccccttgagatcgaaagaaaatggtagttcccggaaatgacttcacgttctctaggctcggcttccgctcctcccggaagtgacgggcgaaagccggctcagagctctggaggtagaggtgaccgatcctgggggtcggtgttaggccgtgggaggtttttcgcgagactgagccacgcgtctatcttctgtcccagggccgccgtcaccatgggccgcgagtttgggaacctggcgcggatacggcacgtgatctcctacagcttgtcgccctttgagcagcgcgccttcccaagctatttcagcaaaggcatccccaacgtgctgcgccgcactcgcgagcgcatcctgcgcgtggcgccgcgtgagtgcggggcgggcggggtacagccgcgcacctctccttccgacgccctcgcggggcagacgtggaggagttcttatcatatcgaaatgactggcctaaggtcacttgggtgactccaacggctccctctgaggtcatcgctggccactatctgtgatgaaaggctgatgcaatcagtgtcttgtgttagatgtgcggccgattttgctgtcggtttcatggcattgtgaatatccgtgaaggtgcacttaaatttgatggagaggttgaggcccgatcttgctgtagaagccaggctggccttaaacttgagattttactgccctctcctcgggactgttggctggaattgtaggcatgcgccagcacaacagtacttttt

SEQ ID NO: 19867 - DNA, 3537 bp, Mus musculus
ggcccactgggatagggtgggccaggcatgcatttggggagtggatgcttttcatggccatttagtgaaatggctttggttggtttgtacccattctttaaattttaatcaatttttgcgaaattacttcccaatcagattttgaccctcagcccgggacgccacaaactgaagcgagttccctgctttgctcgtcacaaatgccaaactgactgctctttcccagtgcccagtgctgtcttttgcttctgtttgatttggtctgcgtatcttttaatgtgtctgttttgttttgtttgtttcgtttttatttttcagttaaagcacgcacagacatacatgtcgagagcggactttaggctttcatgtgttaaaccgcttgagttacaccttgtgacccttctcccataacatggtgtgaggacggactgggagccggtacagactccagtgtttacagctttgccatgtccccacctgctggcctcaggctgcctgggcctggccagctatccttctctatgcaaatgcgtcaaagccatgactgctggaacccaaaactgacaaggtttattttttccagagccggtggctggtcttccatttacagtgtcactattccttgatggagcagttatgtgcccgctctggtgatggccccagccagtgatgctaggcctaattgttcatcatcaagccggcgactcatgtggtgcctgccctaggcgtggcctgcggtctggcagatccgtgctacagaattcgcctggttcctctctattttaatttttctaacctagagcttaatttcaataactttttcaacagttctaaatttttatttttggcaccagtataaagacaaataatatctatcgctcccattattttcataagtaacacagattccctgatttttttttttaaaaaactaaaaagatctctaaaccttcttacatagaaagcatccctataatctatagggagaggcggggaataaagtgcctattctgccagtgtctgggacttctttatggacagaaggggaccctgatgagaccacgcccggcgtttttactgtgaatgtaaatggaacagcagccccagacccttgtctctgccctagaggtgctacctgtgacagggaccaagtgcatgtgtgttcagtgtttgactccaaaacagctgcctgctccctcagtgtgctcggtggggagagggccgtcacgtcaaggtcattgttactgcttccctggctgagtcacagggcagggaaataaagaagtctggagtgttaggacggtttgagagggaaggagagagagaagaaagacgaaccacttgagactgagactgtcccctccagctgtgctgtacttccaggtgcgcactttaaagaaagtggccaccaggtgtgatggtgcagtcctatagtaaccgagcttgcactcgggaggtaggaagccagaggccagcctcaaggtggccatgtcgaggtgaggccagcttgggctatccgagacgctgtcagccattttgctctgttcctggtagtgtgcagacctcggggttgagaacggggtgaagatgaatgtccttagtgttggtgcagcaccagcctgggctctgggctcctcaccgagactcagaggccacactgatttgtgctgcatccagacccccgtctccctccccaccaccattccttgcttcctgcccagcccgcttcacttctcccgggaccatcctgatatggcggttcattcagaatgacctggaggggaaggtgggtgggcgttctctaaggcacaacaccccaaaggccgactgtacccatgagaggtgcctcacagcaggagactaagatctgttgatgctctgaggaaaactcccccatgaccagggtggattctggcttcaaggctggacacctgaactatttacaaagacagttttaagaatatgaaattaagttcagggccccggaagcttcttgagcgacatagccagtccgcctctggtcatggcagaactgatgctggactttggtatctgaggcagaggtgaactgcaggccagtggctcctcttggggaaattgtgtatgtattcacttaggtcaaagcctgaccttcgagcaacctctcctagccaatatattattccagagaccaggatgacctagcaggcaggtccactggttgtataaaagacaggattgcaggctcacaatccatgcagagaactctgaagccagcaaattgtaccaccatcccccgctgctcaccaaacatgggcgtactggaaggctgttatactcagtgcccgcctttgacctaaagctggccagcatccctggggaaacctgacttgcaatttctagagtttaagatcttcccatcggctgtggcaagctcttcccctgtgtggaattttgttatctttatttagctgaggttaaattaatctctgttgtgcaagaaaaacatgaagcttgcccctcgagggatctactcctgtttttcccgtcatctgttggcttcaggaggactgccataaagtcccattgacatttactcttatgtctttctctggtcattctgttttgtggtacaatcaccgtgtaagttatggtctaaacctgtccttttgagagagaaaaagatactgttgataatcctgtcagctccttaggcacttcggaggctgaggcaggagaatcaaaaattcaaggccacttagcaagaccccatgtcaaaattatatatatatatataatgtatatatatacaatatgctggacatgtgactcatggctagagaatgtgtctagcatgatcggggactaagttctcaccccagcactaaataaataaaaccaagtcaacagccatcaagcagatatatcccaggccgcccaggatgtgtgtcctcccttgtggtgggaggcatgaattctgacccctgtgactgtgcagcctgaccccgcatatgttcctgtgtgtttgtgtggtctccccttgtttggggctcatactgggtaagaggcccaggatagccagcttgcttctctgttatgttaccatgcatttctaaaaccactccagctgttaatctgtttgcgcctccatccatggacttgtttctgttcttttccatccactttgtactcatttgttttcattaaattttgcatttattttgagtttttcatggtgtcatttttgggcagtagcttcgctgcttcaggtttcttgagcctattgatgtcctgtagccgtggcggcatgcagcctacttccgtggtgacctttgtggaggtagacctgccagaattctgtttcccactgaatcccgctgcagggacctgtgaatgcttgcgggctggagcaatcacaggaggaaaactgcagtctgtggctcttgagttatacggcccaagactgggacaaggtacacattacccccgaggagtttacagctttgttaaggaagcttggcttgagatagctctctatgtgttctcagctcttgtaat

SEQ ID NO: 19868 - DNA, 2355 bp, Mus musculus
tcaccactctagaatgccgtgcgtgttctcgtgcttgctctcggtgacctactctgaaaaaatgggtagcagtcaaactttgccatggtcaatcatgggcagtgttggtccattcgtggacccacgccacagaactgctgccagttcagtctcttgggaaaaatcactcaccttgcacttttttcttctcttaacagaaagcgttctgcaaagcctgagaccgtaattgattctttacttcagtaaatgtacagaattaaagttaaaataataaaaagagtgctgtcccatgcctggagagaactccttaattaagacacgaggacaactgtatggttcacataatggaagctgtaaagcatggagagagactggaaatagcaattttcctaatatcttttagactctttaagtgtctgtaacatgtaagtgcgccgcagctcatggtcgttgggcatggcgcactgtgtctgtcacactgctctgcaggaagtaagggttccgttgttgtacgtgaatgtgcgtttcttagctatgtattcaactaccgtggctctagacaagcagaatctcagactagaaccaagtctgtcttgtttgcacacaacatatagcagatcaccttgtcctgtgtcctgtgtcctgtgtcctgtgccagtctgggctgcccatctaagcagtgacttgattctgtacctgcctgacctgtctaaatgcagtccaactttacactcatcctgactgcatctaagtgtgcaatgactaccttgattgatctcctgtggaaaactataaaatctgacagctctgcaggcttacattctgaagatgcagtttgtgtgctcgcctgtgcaccctccacttctgtagctctgactccacattcagccattgttgttactaagttggctccccacttctcctgaagccagcattagccacttacccttgctcacacacacattctaaaacattccctggacatacagcttacaaacacttccttgtctgaattttaagtttgatggaaataactataaaaaatgagaccaggggttggggatttagctcagtggtaaagtgcttgcctagcaagcccaaggccctgggttcggtcctcagctccggaaaaaagaaaaaagaaaaaaaaaaaaataaaaaaaaaaaaataaaaaaaaaaaataaaaaatgagaccagtctcatttttcagaaaatgaaacaaagtaaaaaaaaaaaaaccttttaattttctttattgtatatataaattttatatataaaaatactcttctggatttcttgcattgattaatccagttagatggaattcctctacataaaaacgttaatactcactgtatagtagggtaacttgtaatagagaagttttggttttgttgtttacgtatataattttttgaaggtcatgtgcttcctaaacccaagtttgaagttatacaatcaactctgagctattgattccaaaagttttgagacttcccacgtgaggataaattaaattgctatgattttaacaagtttggataaatactgacttacagctacattgctctgtgtggctgcggatgactgatcagaggggcatccctggcgagaggtggaaaacatggccggacagttttaggctctcctgaattagagccctgagtatcctggatgtgcaggctgctggtgttagcatggcgtgcggcagcatcttctattgtgagtgtggcctgctgtgactcaatgagctctgtgtgtgtgtgtgtgtgtgtgtcttgcaaaggctcatgtgagctgagcatcttggtgacgtcaaatttcgcaatgatgtaaatttacatgttagtaattagaagaatctatatgccttcattttaaaagtccatgtttctatcatttagcagttcagttggcctagaaggaatatctgctgtgaattaagctaaaacatgagagaaattaaatctagttaaatcagtaacacaagtaactccataaaactaacaatttagaagcttctctaagcatcttgacttagtaattttatttgcttgcttgtttttttgagacagggtctctgtgttagcccaggctggcctgggactcgtcgtaatccttctgcctcagcctcccaggtgctgagaatgcagatgcatgttatcataccaagccatatgtttattaaagcattgatgttaaaactctaatcaggtggacattgttcattttctgaaaaaccaaattcgattctcaccaggtggggaggtctgttgaagaaggtaggaagcccacttctgccacagccatgctgtggctgcttctcatggactctgtcttcatctgcaaat

SEQ ID NO: 19869 - DNA, 1410 bp, Mus musculus
tgtgctgtcatttggagtttctggaggagtcgtgggctgagtcgttgtaagtttcagatgttcgttagatagttgagtgtgtttggatgcccagctgtccacaggctgctgggtcaatcagtttagaagagatctggactgcagacaaacactgccgagcatcagcatagaggctgctggagcaggagttctgggcctgctcacattcgagggcctgtccactgagccatctctccagccccttgttttctctgaggatgtagctctgagggtccacacagccatgttccccactaactgcataaagagtcatgcattcaggtagtatattgatgcacatcttatcatgtctcaggggctccttgtgggatcaagctcctactgcccactgtggggtctgggggtggggctggtttaccagttggctctcaccctggctgactgctttcatctgaagccagttcaggtttggaagagatctacctgttctccctgacattaaggagtctgagatcaatgactttttcctgggtgcatccctaaaagatggaaatcatgccagtgcagaagcagactcgggctggccagcagaccaggctcaaggcatttgtcgctattggggactacaatggtcatgttggtcttggtgttaagtgctccaaggaggttgtcactgtcatccaaggggccatcttggccaagctttccattgtccctgtgtggagaggctactgggggaacaagattggcaagccccacactgttccatgcaaggtgacaggccgctgtggctctgtgctggtgcgtctcatccctgcccccagaggcactggcattgtctctgctcttgtgcccaagaagctactgatgatggccggtatagatgactgctacacttcagtcagaggctgcactgccaccctgggcaacttggccaagagcacctttgatgccacctctaagacctacagctgcctgaccccaacctctggaaagagaccatgctcaccaagtctccttatcaggaattcactgatcatcttgtgaaaacccacaccagagtctatgttcagaggacccagactccagctgtgactaccacataagggtttttatacaagaaaaataaatgaactaagactttttaaaaaaaagttagactgagttatattgtgatattattgaggtcctaggaattaaaaaggaaaacgtcatagcttaatagtgttaactgacaaggtttattgtgctggttggtttgtgtgtgtgtttccaacacaacccagaattgtctatgaagagggaccttcagttgaggaacagcctccaacagactggcctgtgggcaagtcagtgaggcattttcttgattcatgatggatgctcaagaatccagctcactgtgggtgg

SEQ ID NO: 19870 - DNA, 1205 bp, Mus musculus
gtggatggacagcctgctgggcaactctgtgaggctgccgccctctattcaggccattccttgtgcaccatagtttgggtctctgacccgttcttgccctcctgagtgagttaggccttggcatcatggtggctgtgatacaaaaaaagctagactcctgtgggccccttgacacatggcaaagcatagtcccactgcaaacaggggaccatcctccttgggtcagtgggctctcagggcttaggaggcagagtctgagttttcttgtgaggtgaagctggccctgactcctaggaagatggattggggggtctgaggtgtaaggcagaggccatggacaggagtcatcttctagctttttaaaagccttgttgcatagagagggtcttatcgctgggctggccctgaggggaatagaccagcgcccacagaagagcatagcactggccctagagctggctctgtactaggagacaattgcactaaatgagtcctattcccaaagaactgctgcccttcccaaccgagccctgggatggttcccaagccagtgaaatgtgaagggaaaaaaaatggggtcctgtgaaggttggctcccttagcctcagagggaatctgcctcactacctgctccagctgtggggctcaggaaaaaaaaatggcactttctctgtggactttgccacatttctgatcagaggtgtacactaacatttctccccagtctaggcctttgcatttatttatatagtgccttgcctggtgcctgctgtctcctcaggccttggcagtcctcagcaggcccagggaaaaggggggttgtgagcgccttggcgtgactcttgactatctattagaaacgccacctaactgctaaatggtgtttggtcatgtggtggacctgtgtaaatatgtatatttgtctttttataaaaatttaagttgtttacagcgtgtggctttttatttagaaatcagaattggtcttactttttaaggaaacctcctgatgggagtcttttgctggctttctgcctgggcttcagctgagcattgacatgcgtcgatcacgaatctttccagttatggtcaagaagaagatggcaggaggagggggcgtcatgccacagggacatgctcatttatactcatttgccacggaagggagtttttattttaatttttcacttcatgtgcctgaatgt

SEQ ID NO: 19871 - DNA, 1152 bp, Mus musculus
tttggttccatgaaaatacattatcccaacatcaattttgtatgtaactattgtgctgatatgtggaaacatcttcaataaatgaagagatgtactttttgtacatctgtccttctgaaagataaccattaatccagatccttgggtaatccttagatggaggagggtggtagtggtgatggtggtggtggtggtggtggttgggtttctttattttttgttgggttttttgatccccaagagttagattgggggtcagaggaccacccagatgttgagagcattggcaggtcttgaagggcctgggttcaatttccagcagctacatagatgctcacaacctaaccccagttttaggggatctaatcccctcctctcgcctccaaggacaccaaacatgcatacagtgcccagacatatacccaggcaaagtacctgtacacataaaataaaatgaaatgaaaaaatgtaactcaaaaaaaagttagatgacttggctggtgacctttcaccttctcaacaggtaaatgtgctcgctgacaagcagaataaactgagttcattccactgtactcaactggctgatggaaagaatcagctcccgtaggttatcctctgatctctacatggatgcactccaataaataaaaatgaaagaaaatgtaaaacaaaaaagtcagaaatgtgaactggggtgttccgcaatagtagaacatgggcctagaactaggtttctggccctgataccacacaggaaagactcaggttgtccttcatggctgtgtcagccgatgacagtaataaaacagtgcacacacttactgggcatgtttgttaacacattgcaggtttggcccatttctttttttttttttttagtttgtttattttatttgtatgagtaagtacactgtagctgtcttcagacacactggaggagggcatcagatgcccattacagatggctgtgagccaccatgtggtggctgggaattgaattcaggacctctgaaagaacagtcagtgctcttaaccactgagccatctctccagcctggcccatttctttataaatattttgctcctgaatgttacctacatgtgactgttttatgttcatcaaaatacatgtgtgattgtatagagtatatg

SEQ ID NO: 19872 - DNA, 1131 bp, Mus musculus
tgggggataacaactggactgtaaaaaaaaaaaagattaaagataatttaaaaaaaaataaaaaagagcatacaccatgtaagggtgatttaacaacggtaaagcaataaacataatacagtaactgttgggggctgttgtggagctagaaggtctgagagataggccaagaagatggactttgcttgcttggttggccaaggagagatgcacagtgggtggtagagtggggtgagggttatgtttccatagccatggattgaaggtatttataggccaatgggaaagatcctgtggagagggggaggaggaggaggaggaggaggaggaggaggaggaggaggaggaggaggaggaggaggaccactccggacagagaagtgggcgggcatggggaggatctgaggatctgggcaaactgtactttctgtggcatagcagatgcagaaaggtttgtgcatggtttcaactgggctcttggctggtagctgccacagacacggacaagtggccaggtagtattttctgagttgtttctgtgtgtctgtctttcctagtctgggccgtctgcctggtccatgccattatagggaaatccacaccaaactccaggcacagtcccacaggccgggcatctccgttctgggctctgctccctgatgagattctcagactgcttcccctcattcatggagaagcaagcttacagggcaggcgtgggaacctgctcagctgccagagcatccttcagttcagatcgaggtcggttgcttccctgtcttcttgactgtgtgtgtctcagacagagctggttgaggtgtccaatctcattggcctgtgttataagccataggttggccctaggatgagatgctccaggctacgccaacttctcacatttacagaagagccgaagcctggctagcctgagcccctcagagaagcagttaggctttggagatgggtcatctggagagatgaggtgcgctgacatctcagacccttgtcttttccctccctccactcccctcccaggatactcaattcccgatcttagtgacgccagcctcctgcaatttgccggtggtaatggatgtgggggtggtgggaccacagagggctggagcaggc

SEQ ID NO: 19873 - DNA, 1213 bp, Mus musculus
taagaatgtgcccagtgcattttcctgtgaggtaactcagacaaaggttacgttcttgattggagattctatgtcacctgattcagatactgaacttcggagtcaggctgtggtggatcagattaacagacatcacagcgaaccactaaaggaagacagaggagtggctgataagcatcaagaaagtaaaataactaaggaccaatctgaagactctgacacacagaacatagtttctggagagtcctgtgagcttccttgttggagtcattcagatccagaaagcatgagcttgtttgatgaatattttaatgatgattcaattgaaaccaggactattgatgatgttccagttaaaacaagtacagatagtaaagagtattgctgtatgttggagtatccaaaaagattgtatacaaaaactaacaaacagaaaagtgaactttgtaaatgtatagaaacagttcatcaagattcatgtaatgcctgctttcctcagcaggaccagaggaattccctctccattcttgtcccccatggggataaagagagttcagacaaaaaaaatgctgtaggaactgaatgggacattccaagaaatgaaagttcagatagtgcccttggagatagtgagagtgaagacacaggcccggacataaggagacaagctggcggttactgtggaggggaccaggaagactggacagaagaggatgagataccttttcctgggtaagtagaaagctcccttctgaagcagccctgctaacgcatgcactagtctttgctttagccagtctctagagattggggcaactaactttaaaaagagcttagggctccaagatggctctgcagtaaaaagcctcatgatctgagtttgatccctgaaactcaaggtggagagagagaactgactcccaagggttgcccaaagtaatgattaataaaataattttaacgttattatactggctaaaatctcttttactcagaaggaggattaaagactattccccacatcgtcctttctggaggcatcaaagacattaaagaatagaagtgaatgccggggctgggggcagtggtgacgtacacctttaatcccaacacttgggaggcagaggcaggcggatttctgagttcgaggccagcctggtctacagagtgagttccaggacagcccgggctacacagagaaaccctgtctgga

SEQ ID NO: 19874 - DNA, 2862 bp, Mus musculus
aattgtacagcatgccctctttgaatcattgtggaatgatgtattttcaagacatttccattacttgtagcatatattatagaaacttttggttaaaagcttacacagactattattttattactagtaaattgtatttcttgcacatccgtccctagatgaataacaggtcaactgtggtgctttcctgtgtctgttccctggctgctttgcatttagaagcatccattcctttgagtctgtggtgctactgttggtgaaattttccaggtgttgttatctttagctccttgcccttttgcttttgtctaggataagcaccatagtgctgaggttcactggccatggaggagtgactattgcctctaagattcatagtttggatacagaaagcctcaactgagttgtcttttctttatttcaggattgaatccagtgaccttcctcttctggctgcggtagcaagcacccactctccatacgttgctcagatactcctttaacatgtctagaggctaactttgtttaaagttgaatagaaaccaaggagacaggcgctgtatctgtggagctgttgctgttctgtgatgtttgttttgtgcattacgctttaggtgaacgcatcaccctgcgctgcggtctgtgtagaccaaatgactttttatttttaactggacatctgagcagtggtagatttttcaactaagtgaaactaaatcaaaataattgggggtatgtagaggggtggaatttgcaaaagccaaagtgtaacttagaattttctgtgaatatacaggaatttcatacaaactctataaaatgtcacaactcatgaatagcaatagttgtctcatgatcaaatgtcagaaatcttcaattcactgatttttaatttttaattctatggtacagaaatctacaagaccttgatttgtttgttgttttgcaattcagatcaacttatttctagttatttaagtattttttttattaaaaacaactgttaattatgagaaactcagaatgagtgaagatgtcatgtgcccatcccaagtgtacatatgtatctatttttttaaaaaagcaggggtagaaatacaatattgataaaaatgcctttttaaaaaaatattttttcatctagtattgtatataatgttgaaatactaccttctgatgatttttctgtttcacgcattctaaaatgtatttaagccaatctttttgaggctcaaggttctagattccctaaggatactactttttaccatttgttttctaagaataagctaattcttatcaatatttacatattaatttaataaataaaaattaagattaaaaagtgcaccaaagcaatggcaaaaatactgtattttttaaatatgctcaggtggccacaaacttcagtatcgaccattataaacccatatgagcagaatatttcctaacaatcctcaatttacactagtagaagtaatatctttaaaaactgttctttctttaagtgttcctttctttcaaatgttgattgcttttcaaagctttccccttatctgtcattgtctttgtatatagtgcagattgttgcttgtaagaaaggctaataaggaaccaaactcttgtaagtaatgtaaataaaaaggtgggtagatcatgttttcaatatactctactacctcagtttacttgaatactgaattagagcttactctctgcttgtgtgggctaagatatacataatgctagaattaaagttggtttctgttttcattgactaattctaaattgtttagctcaaaaaaaaaaaagagagaaagaaaggaaaaaagaaagaaaagaagaaaggaaggaagaaagaaagaaagaaagaaaaacatacccccccccaaaaaaaatcctacccacgtgttcggttactgaataattttattataacatatccattcttgctatttaaatttttcagtaattaatgaaaaatttctgtggtttatagtcttcagaatcttgaatttatgtgtctggttacatttatcttgctctttatgtgtgttcaagagaattccaactagaaaagaataaatagaatgttttaatggaacataaaccccaaatttagggtatctacagttggccttggttctgtttgttggttccagttagtacctgggtctcccatggatgacttggtgccaaagggtttttttatagatgtggagattttgggggtttttgttttgtttttgatgtccttgtaacccatttgttagtggaattgctctgttgtattctgttgaaattcagtgagtagatttctgttagaatttagaatctgggaaagctacgggccattgtacattattttttgattgtggctcagaataatatgtatagcaggtagataatgttttgggatgttttcttgaacatggaacttttcatagttctatttgaaatctgtcattacttagaaattctagtctttaataagtgaatggcttgtgcacctaatattctcaaaactcagctttgctggaaaggtctatagtttcttaaaaactcgctagtccttataggattcctgagtttgtaatacttttatcatcatattctttacttactcaaagcccaaggaatgagctgctacttcactacagtgtggctgtgataaatgtgaaaagagttttggcctgtttaaaataatttttcaactacttaatggtacagacaaatatgtgctgcataataaaaatacctgtttattgttacaggaaattaaaaagggatcttttatattataggattaaaactaattttctgtatatgttaactaattgatttaattttaagtatcttgca

SEQ ID NO: 19875 - DNA, 1196 bp, Mus musculus
attaaactgtcttttaccttattatatacaatgactattttaaattttttaaacgtgttgtgatttttaaaagcttatatatagtttaaaatctttgctgctagattttcttttacattttgaatgagtgcatagtgctctattataacaatatgccacaattaactaatttggaactcagtatttgttcatgtgtactttttatagactatatcagtgtcctgtcatcacttgcatacagtatacactgatcaatccaaccttttatatatctccgtcaatactctccctaatctcttgttaatcacattttgcttagattgactgtctgtccatgtttctgcgtgggtatgtgaaggtacattcacctgtagtgtgtgtgccctatagaagctagaatccaaatttaagtatatccctctgatgagctataccttaacttttgagaaagtctttcagtgaacctataactcaccattttggttagattgactagccaacgaaacactgagatccaagtttctgtatatatgtatgtacctgtaccattattacctttatagtgatggggactctaactcggaacctatgcattctttgcctgctgaaccgtcaacactgccccaaattggttttttcttggcttcgccttgagagaatgcattgtctttctatatctgattgtacagttaatgtaattcagatccttccttcatgcttcatttgacaggattcgtctttatgtcagaataataactgcattttgaacatatactacattttgtctttgtccattcattggtgggttcatgcatcaactcgagtacaccaaggatgggagttgctctttagcatgtttcattttcttttagataggctgttactttattgccagggctgcctttgaatttgtgatacacacacaaggggaaggaagggagtagaagggcagaggtatcaccacatccaactatgctcagctttttataggtgtttttatactgtcttccataatagttcttctaattacaactcatctatagagggtgagagtgtcttttacctgtacatctttgtcagcattttgtggttttggtttgtctgtattttacagttgacttattggtggctatgatgatatcatattataattttgatttattgaataattatgctctatgtcttaagattatatt

SEQ ID NO: 19876 - DNA, 1210 bp, Mus musculus
gcaaatccctatcctgtctgtgaatctatccttctaaagctgctaataaaggcattgatgttttgccatgttctcaaggtcagccagaaccacttgctgaggcttagcctccaaagttctatcagagagatccacttctagagcctaagatccagtccatgaaaagtgcagagacaatacaagtaacacaagtactgtttggttcctttttaaagagtaaaagtgcatggtgaaatccgttcacccacttttcttctcctgacaaccaaacttcgacctgcttacagtaatttctagttctaggcagagaagcatgcctaatttgggtggagtataaaactaccttgtaactcagggaataatggtgctattagctgcaactcagaaactcattcattggcaagaaatatgagcaagtattgatgtctcagacctttacatacatcaaagacagccagcttggtacatcttcctagaacagagactactgagtacatgaacttgacccagggttattttattctgtagaattgcttgctgctgtgcctgttcattattctcatcttcccttttttcctaacagtgcgtatagtgctagaaagacagtactgaacaaaagtatatacttatttgctgccatcatcacaagtcacagccataaatatccctattgtaaatacagcttattttcctatggaaattcagcatttgtttattctgtcgtgtcattgttcttttttagcatctttcctgaagtaagcattgtcctggagatgtgagctcttcccttagataagacagaaggaggaagtgcttacatatgcatgtcatatgtacatatcttagctagaatgtatttgctattagcaaatcacagaacaaagattgaggtgtttaatcatatggacatttaaatacttttctctttaaaataaagttaatataaaactgagaaaataggctgcagaggagatgacatagtaggtgaaggaagtatttgttacacaagagtttaatacctagcatttgtatttacaaaaaattagtggctgctgctacactgcacagcagtcaccatctcaaggctggagaaatagagagtaggggttctcactggctactcagtttagtggaatcaaggagctccaggttcattgaaagactatatctcaaaagataggtggagaaccgttgaagatacctaactctg

SEQ ID NO: 19877 - DNA, 1213 bp, Mus musculus
aatggaggggacttcatcctggaaaggacatcctttgtgacctcctggacatggcactcttaactatataattcaaatcagtgactgcttactaaaaaaatgtacttttcacatttttacaaattaagtataacattttgtatatatatatttaaaggttttgatttgctttttaatgtaaaggcaaataagagttcataaacttctgtaattacaaaaaaagccaaagccattgaaagtgcactgaccatgacagctttgctacagagcagtcatgttaccaaccgccttttcaagtttgtacttttcccttacgctctcttcctgtttttctgtccaatcacttgagagtcagaacagttccaaatgtaacagtattgtgtcttcccacagaatgcctgtctctaggaagcataatggctgaagattcccctggggagacagtaacccggaagccttagacttgagcccaggtgccgagcagtgcagtgaggcgcagccttactggccctttgagtgtcagctgccactttacagccatgcttcactaatctggcctatgaactaactgtgctggtttctgattgtgaatctttttattcacctacttgcagattgttttcatgtccaaaacaaaagaaatatttttgctatatccacctttgtaatccaagtttgagtactcattgtcaccattttctatccattgctccagaaaaatgtgctgtctgcacagcttctgtctatccaccaggtcttcagacagatggacccttgcctgccttggtccttaaaggtgtacattaaatgtctttcacagagagttaagatctgtggctttgaacctgcattgtgtagctgccttgattttaatcaagctttatctgtgagtgttcagaccaactgatcacattgatcagaataaaaaccaaatgctttgtagtttgatgtgtatgagtccctgaaaaaaatcatgtctgcctttttttttactttgttaggtgactagagcaagggaagccttaaagcccatgattgctccagttctaagcccccatttgtccttgttctaagtgtgcaacattactaaacagactagtgcccagcacctgccaagactgtcaaagcaggagacttttagtgcagagttttgccaaataataaatttcaacaaaatctcagagtaaaccattaagagattagtgaatccagc

SEQ ID NO: 19878 - DNA, 2190 bp, Mus musculus
ttacagatattccaaatgggttctggtccgactagagcagtgaaaggaaagcctgcgttcagaggcggttgcttggctgtaaatgttcagtgtatttatttgagagtaaggacctgtgattgtgagcagatatagcctgtatctgagtgttgtgaagcccattcagtttctcagcatcttcgtcctgttagctcttctttacgtacctgttgctgttttctatttagtcatttggtgtcaaattgtttccactagctgtgtgttgaaattctggcctctgctaccagctgtgacttgcagagtccttggccttccagtgttccacttactgtggaggctgtggcagcttccaacagccacctgctgcctggctgattcacagtgatcagccctcacagtgacactctgtggttagtaagaggcctttgctcaggtcccattctgttcctcttccctgctgagtataggtagctggatcctgcggtccactttgcttactatctaactgcctttgattgattgattgattgattgattagcatttgtgcagaatatggatcttaactgagattagagtgctgaaggcatgtaggtccttgtctagagaagctgtgttcttttctgcctttgcctgcccctgtcctgagaatgctgactgaagagccactgaaggctgacgcaggcaaagctgaaagcatttctcctatatttcttctgaacataacttagcagtagggtggaacactggatgacctgattctttgattttgcaattcttaccgttcttaggtgtcaatcctgagcacagagaatttctctgtcaaggagaaccattttctcactgttgtctttcatttaccgtatggacactgcactctagagtctgtcattctgcttagccagggtgaggttcctgccagggcactgctgtgtgcagactctttctgtataacagacagggatttcttggcatcattggcactgatagatgggacagcacagggagacattgtcccctcccccatcactgtttgctgctccaaggccagtcattaataagccaaaggctcctgaagcccctgatggtcctggcagcctctgacctctcagcacagtgagacattgtacacagtgcaccgcctggtgccctggagggttccaataaggtcaagagaatgtacagagtaacctggtacatggtgtttatggaggcctaaggatgccggcaaaggtgcagggagacatacttcccacctccccacatgggattgtaaaccttgggaactcctttgttcccccagtcacacatctcatttttaaattggagctaataggattttgtacccagaatttattatatagttaatacttctctgaaatacatggtaacaactagtaagcaagagataccgcagattgcagcagtgtgctgggcacagcttctccagtgggcctggagagtttgtccattagcttccctgtggtcattaaatggagctgctagggtagagcagtggcctgatctgctcagtgacttgtgctcagcaccagaagacaagatggacgtatttttataatctaagcatactttttttgtacattgtgttcattcttgaataaagtgagctcactgttggcttgtagatattaaaaaaaggaaagtattgattttgattcaataaatgttttcttttagtctttgtttggatttttcttctaataaaatttcactcaccttatatagagaatcttctagcattctccactgacagcccatgggtgcagacaacttgtcactcttttgtttaaaagtttttttaagccgggcagtggtggctcacacctttgatcccagcacttaggaggcaggtgggtttctgagttcgaggccagcctggtctacagagtgaattccaggacagccagggctacacagagaaaccttttctcagagaacaaaacaaaaaaacaaacaaaaaaacccgttttttaaaaatgtaagctgggcaaagtggtacaggcctacctacagtctgagaggtcacaggattgtgtgttcatgtgtcatggcaaccttgaagactcagttacagcctggtgtgcagccagtgtggtggcacacacctttaatccaggcactcagaggcaggcggatctctgggtttgaggcagcctgtattacagagtgag

SEQ ID NO: 19879 - DNA, 1219 bp, Mus musculus
tgatctgttagttactgtgggtagtctgaaaacaaaggactcagtgactatcagcatgtctttatggaacttaagtatggcaatcataatgttttaattggtgatttttaaataaaatgcttttaaaccagtttatagttttagaatattccctgaaagcaagcatttttatttttcactattaaaacttgacccctcatggtcaagccataacttaaacaaaattgttaagtcactgagtttatgaaattttgacttgcagtaattgcctttagataacatcactcttacttcagatttcaaaggctgagcgactccaagaacactgcaggtgcctcattctcttctcctcctcttcctagacctgctgccgtctctgaaccaaagctgttctttccttcccactgacctggaaccagtgtctgtagaaacggaagcagagaaaagaaacaatcagacatccctttcaatcaacttgagacatttgactccagggacggaggcacggtgaaataaagttattttggcgacattcctcgctctgagggcgcacgttgtggagcttcctgtctgaagacttggagccctcggtggtgctcgctcaggcctcggactgagagcatgagtgaattctggttgtgtttcaactgctgtattgcagagcagcctcagcctgtaagtatctgtgggtcattggctctcaaactgagcatggggaccctggcagcaactgcagttctaggaccgtaagcatccatcaaaaagaacaacaacaacatcaaaaagcccagaaacaaacaaacactgggcttggtggcacccacctgtaatccagtacttgggcaggcagaagctggggtttgaatctgaggccagcctggtctacagagaaagtttagggctagccaatgctatatggaaagctcttgccttaaaaaaaaaaaaaaagcaaaacaaaggatagtgtatttcgaagataaactaggtttcaagaattgtgctaggagcctagtacggtgaatgcctttagtccagcacttgggaggcagaggcaggcagatcttagagtttgaagccagttccagagcagttagaggtacatggtaaggttgctcccacccatggtgggggattgttgtaagccccactgtgcatcacagaggagacagtagttcatagcactgactggtgcaggagggggcgggggggggggagctaa

SEQ ID NO: 19880 - DNA, 1105 bp, Mus musculus
agccagtgcctttacccactgtcttgtcagccttatctgtggccttttaattcagtttatttatttatttgcttatttacttatttatttatttatttatttatttatttattggtctttcaagacagggtttctctgtgtagctctggctgtcctggaactcactctgtaaaccaggctggcttcaaactcagaaatctgcctgcctctgcctcccaaatgctaggattaaaggcgtgcgccaccactgcctttttaaagtgtccattggatactatgaatttaactcattttctagtatattccttataccaagattgtacagaagaaataagtaaaagacttcctttgatctaattaaatctcaaaatattcttagtttcgacatctctatttctaatatctagacttggtcttacatccctgatcttaaggaaggctcccctttgtttctatgtcagcttgacaagggtttcttgggtaaatgaaggagtgtttgtttcaaggtctgtatttaaattatgccaaaactctgaatttcccttccccttagtcttgaatgtttgcctcctgcatgaactgtgaggtccaggattgtttgctctgcagctgatcaggttgtgagttgagcagtcatctccacagacattgtcttttcagaagtacctgcagtgccatcccagcaggactagagtcctcctagcatggaggaaatcaaagggaagaattttcaaaaatgttagcgtaaagaatacttaactcatgataaaaaataacacttttttgggggtggggcgggacttgggtttttttctgagacagggtttctctgtatagccctggctgtcctggaactcactctatagaccaggctggctttgaactcaagaaatccgctggcctctgcctcctaagtgctgggattaaaggcatgtgccaccacacccggcaaaatagcactttttaaagtagtaacactggtgagaataaaggagaattttgtgttacctttacataatttaattttagaagggcagggttttaatttgattagtttccagagttctattagctggcaagataatcatttatagatggcaaagtt

SEQ ID NO: 19881 - DNA, 1176 bp, Mus musculus
ttccacatgtattttactatttaaaagctaccaaagctgtcatagctatttattcaagagcagctatgttatagtctgagtataaaaaactatccttacaagttaatatttatttctgtgaattatatctaaaatatagttgttgctgcccatttttggtgaagtctaaatgttttcaaaacatggtgctagatttatcagatattttaaagataagatttgctgctgaagagactgcttaatagttaagagcactggctgtctttaagaggatcttggtgcaggttccagcacccacatggcagcatacaacattctgtaattcaaactccaagggatctgaggccttcttctggtttctgtgggtaccaggcatacgcagtgcacatgcatacatttaggtaaaacactcatacgcataaaataaaaataagtatctttaaaaagaacaagcaacattttaggtttatttttaataacgttaggttttaaattgccagattattttcatataaatttcctgtgattgttgattgttctagaatgcttttaggtaatacaatttgttaaacatatttttttaacactgacatagctgtaaaagctgtcattaagccgtaattccgtaacttcttggccacctgacattaggttatacctgggtttttgttttttatcctgttttaagaagtatttcagtgaagacttttaatgcacatgttttttttttttttttttttttcctttctcttgagttctttatagattactaattgtgaaaattcaggttgctttcataaaaacactgaaattcacatatatggcttgccagtgccttagttatgtttctgtttctgtgctgagacaccaccttcaaagcaacttacagaagagtttgtttggggcacatggcttcagaaggttagagtttaagacagggtcgtggatggaaaggaactggtggctggagcagcagctgacacacaacaggaggcagagggcaaactgggagtgacactagtcttttgaaaccttaaagcctgcccccattgacacacctccttgaacaaggtcacacctcttaatcctttccaaacagttccatcttcaggggaacaagtattcaaacttgagcctgtgggggctattctcatttcagtcccctcagacattttt

SEQ ID NO: 19882 - DNA, 1153 bp, Mus musculus
agatccatgacatccgctggaactttgagaagttcctggtggggccagatggcataccggttatgcgctggtaccaccggaccacagtcagcaacgtcaagatggacatcctgtcttacatgaggcggcaggcagccctgagcgccagggggaagtaactgatgcccccaccctacccctaccccctgcccatcatgcaagggccgaggaggggctcttcaggaaggaagccacattcccagtcattctacccccaccccagattctctttcttattacataaaagacaagcctggcacaactgtgtgtctgaaccactgtggacacgtgacaattgtcccagtgtgtgcatggctacacagccacgtatctgcctgcttgaaacccagggatggtccatctgtgtttacggcttggcacaacaccctcatatttttttcagctttctgttccaaatgagcccaaaggaaacacaagttctaggtccaatggttctgctcaaacctgaacatcattcttggggccagcatctcccacatgcccacactacacaccaccagcctccttcttccttcctgaaggaccctcctgagcccccaagcccatcccacagtgctcctgagaccagccaagacaactgtgagcgcgatggccgtgtaccccaggtcaggggtggtgtctctatgaaggaggggcccgaagcccttgtgggcgggcctcccctgagcccgtctgtggtgccagcccttagtgcattcaggcttaggctcccaggcagggacactacccccgcgcctctggaggacatgctatcctctcactctgtccactggtatctcaacacccccatctgcccagtaaaggtctttctgcagcagttcagcctacttggaattttctcaatggtagctcccttgcgaggtgggggactgtggctggagacaagggagggtgaaggaagggagggaggtacacagggtggacctctgcagtccacactgcagccctgctcagcttctagaatctgtgacccagttcccatcggctggtcctcacccaccttccccagggcattgagggctgagagagggtgtcgtttctgaaggatggcaactaaagcttacccaagtcctttgcccgggatcttcccacc

SEQ ID NO: 19883 - DNA, 1172 bp, Mus musculus
taaccttcagtgctgagaggatcgccctgtcaggatgctctgtgttttgtctcctgggaccatatgcatctcgtcctgttctgtccctgaggactgagacatgactgagagcaggcgaggttccctcgctcagaaaggtttcagcgcgcagtcatgggctgataacttaccttttccattaaagtctgtctacgccagctcaggagtacaccaactcctgctggaagcttgtaggctacttggagaaacctgagcacttgatacacctccagagatcagccctggccactcctagtcctttgtggtaggaaagggacgtgcaattggagactgattctgcttttttttttaattagaatgtgatgctgataggacacaggccgagcattcagttgcccagagctcactagcaggtcctagagccctgggttacagtgagaaaatcccagttgtaggcctggctctgccactctgccatgtactgactgggctgctatgagcaagttctctgtcaggatacatcattgtctcagcctgagggaaccgtagctccctgtggctctgctctctgattccctgaagtattggggtttgggaggaatctgctgggtgattccttgcctgaacttgggggttgtggttgggggtaggaagtgggtgggtgggtggggggaactgctgggtgagtctgtgaactattttagaggaggggatccggaggtgatgaagagtgtgaacatttggggtagatcaggatatatagaaatgaggtccacagaaccctggggtcttgcagggggccttgggcaggagaaggttgggaggcctagttaacgcctgtctatgagccaggattgaaaggtcccactgagatccttaggactgctgtgggtatgaccagggctgtggcttcagtagcagtgttctagagggaatggagagagcagtactgaactactctgcccaggctgttctctcttcgtttactaggttggggttctctgcagtattagagctgtgattcttagaaacatggtgtttggtcctctcccaggcacagccccctaaggagagcctccctgagctcaggaagcagtgcattacagttagagacaccctctctgccttccctcctgtcagttttgctgtgcaatgaaggacggaagtgatat

SEQ ID NO: 19884 - DNA, 1173 bp, Mus musculus
tgtggttctgacccttccagctctcctggaagtgggtcagggatgggggcgggggggaggggtccactctcctgccccaagcatactcctagctgctccccagccatagtgagttcaaaatcacagcatcccttcatctgcatgcttggtattgttggttgatcagtgagtgtaggtcgttttctgtcctcaaaccggacctctctagttccatcatgtagccccggatctagtccagggaaaggcatgaagagctgcttactctcagcagcccaaggcctgcttaggtctgctggctgtatgtctaccagtgtctgtctctgttttgggcaaggtgttggtgtctccctgtaggaaggtcccttgctgaatggtggcttctgtataggtggctgcctcctactgtgctcgggtgaatggagagtttgggggtttggtctgatggtgtgtatacaaatgctaaattctgacccccaagatctagctgttcccagatgagggaattctcacatacaccagcctttgttgtataaaccttgctccccaatttaaaactattggttaaataaaagtggctacagccaattactggggaaaatagaagtaggtggaacttctgttactgggcttggggtagcagggagggatggacagatggacagaatggaagaactgtggatagaatgggagaacagcagaagaggaggttgccataaggagatggagactcaagagtctaagttatgggacagtttggtcactttctgtgtgactttgtcagtaggtagaaactttagcgaagcagggaccaagcccacatttgtgccaggctccttcaagaagcagcaagggctgaggtccgatacacatccatgtcaaggcccagagcctgaagggagcctggcccctcccccacctcttgtcttcccccccaaggccatggtgggggtcattgccctgtccagtctcctatgaacccttgcttgttagtccctgcatgccagtgtgccacctggccttggctgggtgtctctgggagacagtagcagagatcttagaagtgtggggttagcactctggcaccgtgcacagcagtgatggctggtctggctgggtgctttaaacacagcctcttgggaggtaggttaagttcctctggctctgggccttgaa

SEQ ID NO: 19885 - DNA, 1201 bp, Mus musculus
ggaagcctcagggctggctgcacatgaggatatggggtggcagatggggtcttaactgcccccaaaggaaaggaagcactggtgcctagcagctcagcagggcctgaccctcaagggcagactcctggggggtcacaagtgtgtctggcgaggtctctctagccttgatacagcagctgtgtcggtgactgagatgccgagtgtcatgtctaggccgatggctgctaggatgctgggatgtttagatcggaatgattactttctcactctgctttctctctgccttgccagggtgacacctctggagacttcatgaaggctttgcttgctctgtgtggcggagaggactaaagctcctgacctcagagggccccctctaccaagcagtggccaactgcaccagctgccgccgtgacctgaccaagccattgctccagcttcaggatctaaggaagacgcaaggggtggggttggactgtccatccagctggggcactctctagccattgagggtcccaggcggtcccttctgttatccctcccgctcatggctaaggggctggtgaaccacggccatatactgcattcaactctgatccccttctacctactcctccgcccgccctggtttccatccctccacataaccctgcctgacttgagctttgtcacatctcaagacataccaaacctctgtctatgaaatgagtgatgtgtgtgctttaaagggcgggctgtggtgcctggtgccaggcaagcattctgggataatagagatgacagattaatttgactgacgggtgatcatccccggctgtcaccgtccaatctgataaaagtaccaagctaggaatttccacatccaggtttcattttgtatctatgacacccttggcctcagaccttgggcccaccccttcccttctctagactcagttttgttatctacaaaacaagacactaaaatagctttggctccccttctaacactgaccttctagactgagtgggcatctcagccccttgaaccgtattcattcttttaaaagggaagaaacagggctagggagatggtcacttaagcaagtcccgaataagcatgaggacctgagtttaatttccaaaacccatacaggccaggcatggtgacacacccctttaatctcgcactaaggaggcagggaggcaagcagatctctgc

SEQ ID NO: 19886 - DNA, 2169 bp, Mus musculus
ctagagctaccgagctggctgagcacaggcaactaccgcatccagagtatcttgagcagtggtgggaagcgcctgggctgcatcaagattgctgcctctctcaagggcagataacctggcagcagccaccacagaatgaaggggcaccagcacggcaggcctcttcttctgtgttccggtgcccaggcctgcctgcctctaactctatcctcctacggttctctaccctctctggaaatcattgcaacctgacctgagggaggatggaccaggcccaacatctgatgggctgtaagccatgctcctttgcacccctaccaactttctaagaatttctttcgtatccaaaacagtcaaggaatgggaaccaacatgtttgggaatcctaaggtcaaaactggcccaacctggacctcctggagttatgctcaccccacttctttgttttagtcaccaactttaaaaccaggataaccgtattaatttctcattccatcctgagcctctcttcctgcaaagaggtctaggtagtcagtcttgggtccctctattaacttctgtgattaactgcattctctttgcaacttaacttgtcaacactggggctgacagatcctgaagaggcagggtggtgtgtgacagaaacctgtgagagttattgttgggcatgctccagtaacccttggcaaagcacaggtacctgtagggccaagccgaagacctagggaggcacagcaatcacttctgggagcgatgcccatttttcctttttcctttttttttttttttttttttggtatgatgccttcaagaatgggatggcattccttatacctgacaagaaacaaccaaaaaaaccaatagcacatgtgctctggtgccaggtggccagggtctggaatggcatatctagttctaaagaggtgcagtcccctgcaagttccatgtaaggaatgttgccagatatttgcaacatttttcttccttaggccccaaacccagccgtttatatgaaattgtagaatttttaactattggaaacaaatggtttttttatatatacttactatgcaggccaaaggggccccacggactcacccagggacataatctggctcccaggtggctgcttttcctcacatctgttcatcttctcaatctcaagttatctggccgcatctcttcccccttcaaggtcaagtccttggtgcctggcctcaaagagggctcagcctgcactagagcaggtctacatggcttctgagagctgggcactgtgccaacttccgagccatcaccaccagagtagaggggttcacactggagtagatcccacctagcagccaccacgtggaacaggggtcctgtgaagagagtgggtcccacatcaggttgcaccatgacaacttcctgagcctcctcggacagcccaggttctggactagaagactggtctggcaataaatctttttaacttgctgtgtgggctccttttcttggctgtgtgcttcattgagcatggctgcatgtttgggagtctgtgatgggctgtggctgtggaagggctcagtgggtggtccaggggagtccaggcatctctggccatgggtgcttgtgttcatctcagcagcagccggggcttccgccttgctctgtttgggcctgaacgcccagggttgctttcagatcccttagcctagttttctgccattcaaccttaaagctttccactacatatttttttcttttggttttgtgtgcatgtgcatgcatgtgagagagaaagaggagagagaggaggctagaagacaaccttgggtatcattccttgggtgctttccattttttgtgttaagtcagggtctcattaacttggaactgctatgcaaaccatgctgtctggtcagagagtcctgggtatccacctgcccccacctcacatcccactattactgggattataaatgtgttcatggttctggggacccgaactctggtcctcaaatttgtaaggcaaatctgctactgagaggcagggtctcattctatctagtctaggctgacctcaaactcctctgtacataggacaagcatgaccatgtccttatgctttcaggattacaggcctgtaccaccacgcctagttctcttgatttgtagtctgcactc

SEQ ID NO: 19887 - DNA, 1100 bp, Mus musculus
cgcgcgcaaaggagatgggggccatctacaccgcatacaaggtgtagatagatggtcattaaaaacaaaagaaatgttggtcgttctctagttttccacactgtggagacctcacctgtggaaaccgccatcttgtttttgtcatttatctgctaatttcctgccttgagtggagctatgcaaaaagcaaccactaggcggcagcaatagccagcttttggcagaaggtagtctctgcccgctgaggctttggttatttccttttcctgaccatgatggggaacactgtgctcaaggcagcatcaagatggagggggccagggccagtcacaatgctcagataaaatgtcaccatctatgttacagataagtgtgttgaactttctaaaccactaagtcttagcccaactcagaaatccagcagtgaacaagaaaaacatagggtcatgcctatgggccaggggcagcagacagagacatcattggagtcgtttttttacttctgaattcttgcaatgaacatcttctgttacctgtcgggcaccaagcataatacagggctcttatataatagtttgggtaaaggtgttataaaaacaagagcttatataacattgtagctttgtgtacccaacagtagagtctacgggtcatctcctgagtcttgaccttgtaacttgccatggtcaacagtaaaagtgttacaaatggaaattcgatgatggcttccaccctgagactgccttctctttctgctttgtggagctgatttttctttaaagtgtgtgtgtgtgcatgtgtgtgcaccagagagaatgttaagtcccctggagctggagttacaggcagttgtaaaacacttagttcctcagcaagcactcttaaccactggggaatctctccagccctgctttccacatcatggatctgagaacaccaagtgaaatggagtgtgtgacatcgtgcccagtctcctggaggataggggaccatatggaatagaaacgactcatcatgatcgaatgccacaccaagatcaaccagcctgtttctagacacacgtgtgaagccatatggacaacgtccgcagtaaagttgac

SEQ ID NO: 19888 - DNA, 3335 bp, Mus musculus
tttccagacagggtctcatgtcaccagagttggctttgaacttgcttgctgtgtagtcaaggatgacgatgggctctcagttctcctaccgttgcctcaagtatggaggttactagcatgagctgccactcccagctggctcagagacctcaagcagatcatgtgagcatgcaccgcctctggaagccccatgcttctgtggacttccattcatgagactgactccatatgggcactcggaagtactcgtgtatacaaggctaaggacggggcgcagttcctcttcatagacactacgcacaagggtcattgtttacagttcctggggagagagcagaatccctgccttgccccaagctgcctctgtatcctgggcttccaaggaaccactaaacactaactgtggcccatacctgcccctattatgcctctcacagagtcacctggcttctaggtcagtcatcttagggtgtgcctttagaggccactgagagtccatgacttgccactgctcccctgttgatgtcaggattcccaaaggacagctgttggctctccatctctgggttatgtgtgtgtgtgtgtgtgtgtgtgtgtgtgtgtgtgtgtgtgtgtgtgatagtgaacacgtgtgcatgcacacatatgcacactacagagcggtttgtgtctcctctctggttaccaggctcttaactacagataggatttgccttgaaactcgagttagagaaagaagcaagaatttatcagagtgctgcttttgtgtttgacagaagctagtggcccaaccttgcagccaagccccttctcgctgttctgtccagagcctgctgcgtgacttctaggtcacaggatgggaaggatggtttctggctacagcagccactgtccttagcagcgttgctaggagtagccattgctgtcttggccccgaggagagcaatgcttttttccctttctggcatcagcatccccacaggtgcttatgtggcctggttccagctgggactcacagacgccttgctttctgaagtctcaggctggaaagtgaccaaagtaggtttagacgctggccagcaacccaactgtgggccaggctctctcttagaagccacctgagcttggcttcctgggtgggaagaaagtctattctgaacttttacaggcgctcctacccaggtctagacccattgtccaaggccagctactcttcagggcccctggcctgacacggtgtggtgtgccttctgtagcatttggctgagggcagcttccttggtaccttggtatggcccacatcttttgacctcttgctatactcctgaggtactgtcagtttggtgacctgactctttgagcaaggtcagggcctttctggatggacaccaggaagctgctaagcacatagtgccaggcgccacacacagcccaggcgcccacaggagccctgagtcagagccctcctgacccctcccactgtcagtttggagccagatggcccccggtgggaaaacagataaatgggagcttgggcagaacaatatagacaaggcttgtggaaactaagcctgaatccagatgccccagaggcagacatgccccatccttgccagcccattccttgtctgtacccaaagtcagaggccagttatcgaaaacttgaatgtgagcacttgctgggaagcatgtgatctagcccgagcaacccaccgtgcccttagctgtggcatcacttgtgctgctgtctgggtcgggagaggtagaggttagcttaggcccacctgtctcacctcactagccacacctatgggcaggtgctcctgtctgctctcttcccctggaagtcttgtgctaagtgtgatcagtggtctgaagctagatcccagagcctgtccttaggctgtctcatcctcagatttctccctcccgtcagtgtctgctctttggattccattgtttcacttgatccttccaggaagtgcagagctcagatcatgtttacagcactcactacccccttctaatgcccgcccgcccacctgcctgcccgacaagggctctggacaagggtttgctttccctgctagccagccccagccaccattcccactggcacactgaggctttctggggcctgatatgggaaccagacagagtggtcggacgtggcaatcaggagggtggcgccaagctggcttgagaatttaattttccaaagtacattacaaatcagataccattaggggaaagcgggccatgtggctcatctttgaaactgtggtcaatacttgaaggcactttagtcctgctggccgcgccagcttccgtctggccggtgtcttctttttctgtgtgtcccgagccattcactggtcagagacattaaaccgtgctcataagcagttatcaaaaaaaagcagcagaaaatgaggctggaaggagcctggtgtttaccctgttctttggtttaaatcaagccgatgttgaagaagctggaattttttttttatgaataataaaatcccacgtctatatcgtaaagctgtcagtatatgttgaaatcaaggaacgagagaactgccctacagagagtcttaacagccagacagtaccgtgtgctggcgcctacctggatgtgcattgcgtacacgcgtggggcatgtcagagcttcagatgtgcattgcgaacatgcatgggtcatgtcatagcttcagatgtgcattgtgtacatgtgtgggtcatgtcagagcttctaggtctcatttgggttgcacatatggatcttgtgttaaatttccacttcaataaatgaattttattttttatttttgagaggttgcaaactgtgtctttgttttcacacttcagggaaaaaaaatcactgagttaggacaatctgacaaagggacaggggtctgagaaagggaaagcaaccctgtttccctaaaccacttcgatattctcccgaaatcctgggtcgccttctgcatataccagtgggtagttttagggatcagcttggtttttcagtcaaatatgagcctgggtgtttgcaaatgttaacatttagagcagttgacaaagtaaagattacccttgctagtgtgggtggcttcatcacatccaaaagttcttaaaccgtggcctccctgaggaggaatcctatctccagaccacaagaccagcttctcagcttccacacttgagtggagaccagccctaggaactgtacacctgtcagccacagctaagctagttctcctttgaaatttgtttctatattctctctctctctctctctctctctctctctctctctcacacacacaca

SEQ ID NO: 19889 - DNA, 1918 bp, Mus musculus
ttccctgtcagatgggctaggaaactgaggctcagagtagggtcgtgtggtggtgtcttgggtctctcctgcaggaccatggcagagctgtgggtaaagccaggatcccagccctgggctcctactaccggcttcccatactggactgttgttctcccacactcacacccttccctactcttccctgccaggtacctgtcccacactgagctggccccactgcgcgctcccctcatccccatggaacattgcaccacacgtttctttgagacctgtgacctagacaacgacaagtacattgccctggaggaatgggccggctgctttggcatcaaggagcgtgagtgtttgggcttaagaatggaaagaagtgtccttgagggatgggatgttgtcccttcccctctggtggcccatttccctctcctgctcccactcccactgccccccttctcttcccgaccagcccccctcctgttttcaagtggtagagccttattttaaccacgccccttcttcctttgcagaggacatcaacaaggatctggtgatctaagttcacgcctcctgctgcagtcctgaactctctccctctgatgtgtcccccctcccattacccccttgtttaaaatgtttggatggttggctgttccgcctggggataaggtgctaacatagatttaactgaatacattaacggtgctaaaaaaaaaaaaaaaacaaagtaagaaagaaactagaacccaagtcacagcattttcccacataactctgaggccatggcccatccacagcctcctggtcccctgcactacccagtgtctcactggctgtgttggaaacggagttgcataagctcaccgtccacaagcacgaggagatatctctagctttcatttctgttttgcatttgactcttaacactcacccagactctgtgcttatttcattttgggggatgtgggctttttcccctggtggtttggagttaggcagagggaagttacagacacaggtacaaaatttgggtaaagatgctgtgagacctgaggacccaccagtcagaacccacatggcaagtcttagtagcctaggtcaaggaaagacagaataatccagagctgtggcacacatgacagactcccagcagcccgggaccttgctgtcttctcgactcttagggcgtttctttccatgtttggctgttggttttagttttggtgagccatgggtgggccagaacatcactcaactgcaattgggctttcaggttcttgccgggagctctaggcactgggaggctgtttcaggaaagtgagactcaagaggaagacagaaaaggttgtaacgtagaggaagtgagactggtgaattggtttgatttttttcacatctagatggctgtcataaagtttctagcatgttccccctcacctctccccaccccctgccacttgaaaccttctactaatcaagagaaacttccaagccaacggaatggtcagatctcacaggctgagaaattgttcccctccaagcatttcatgaaaaagctgcttctcattaaccatgcaaactctcacagcaatgtgaagagcttgacaagtctttcaaaataaaaagtaacaacttagaaacggctgtcctgtcccgggtgatggtatgtgtgtcttactctccggtgcttcgttttcaggtgtgcacaaacatggccatacttgtgcacagaagcaaacactccattgtgcttttatacacacacacatattcacacactcagacagggaagatatggctcctgtgagcactaatttaacacatgaagaagccagttcctgggctgggatgtagctcagttgataaagtgcttacccaatatgaacaaagcccaggttcgatcgtcagcgcaacctaagct

SEQ ID NO: 19890 - DNA, 1189 bp, Mus musculus
atagtgtcctcctcttcctctttctcctccccctcctactccccctctattctcactcttccagttctagtgtctataaaagaatcataccacttactggctttctgaagtaattaatatatataatatagtaatacaacaatatgtagtataacaatatatattatacttatgaggattcattttgttattatcgttaccaaacatcaccatagcccaggttggctgtaagtgaatacctagcccaggatgactcttaaactcatagcaatctttctgccttagcttctcaagggttgggtttgcagaagtgagctgccacacctggcttatggttttgttttgtggtgctaggtgttgaatccagggcctgtgtatacaatgtatgtgctctgtcactgagcctcaaacccaagacctaaagaaaggatcctggggtctagtggccctggcgagacacccagaaggtggagcagtttagggaatacccttgtgaagactggatcaccctgtcccttaagccaactctgtgtcatcatgtttagttgcacaatgtgtaggcagaggtagggagctctgagctggaacatcggcctcctggagcggacccctgacctctgacctctgtgctgtgaaagaagtcctttcctgccgtggtcctcagtttggagctcagataactgttgactttagctccttgagcagcaaaaaattatcctctgaaactccatttcagagcttcttctgagagtagcttgtggagctatgctaagatttgcctggagcaaagaaagcctctctcccctagggccttcacacccatgacctcatcaccttagtgaatcctgagcagaaggaaatgaatgcttctcttttcaagctagaaaaatactgcagaaaagggaacatgagggttgcaggatgggtcaggttgatggcctctgacatccctggcacacactcccacatgcaaataagtgaataattgtaatttacttgctacgtactatcttgtagctttaattttatttgtgtgtgtgtgtgtgtgtgtgtgtgtgtgtgtgtgcgcgcgcgcatgccacttgtgtacagagaccataagagagggcttcagattccctgagagtgggaattacagtggtaactgtaacatccaacatggttcgggaaactcaggtctctggaagag

SEQ ID NO: 19891 - DNA, 1096 bp, Mus musculus
gggaaaaaagagtccttggttaacttaactgccatgtatgtagtttctttggaaggttggcttctgtttgctgatttggtttggcccatttcaagaataagggataggtgaacttgtgcgtgctcacagaggccactaggctcattagaacctttgatgctggagttaaaggcagttgtgagctatcctgtgctggtgctgggatctgagtgagcactaagtgttcttgatcacagagccatctcccaacctgccccttgagtttgctgtttgggtgtgtgtattaaactgtatcactgtttcttaaagaatgaggtatgcttacttgtgtttgtactgttctttggaattagtcataagtatgtaggtgtgtttattgcagtatggagaattgaacccagggccttgttcatgctggttagacactctgccactgagccacaagcccagttcaaacactgttgcgataagttagttccatggatccctttggctattttcttagctaaggacaactatctatctggctttactttgcaggtattgaaaatggcgttgagacattttcctcagtactacatggtgctttttaaaacagttgacctgttttattaaaattgctttttagatctttttctgggtggtttcaaattcattctgcaacccagggtggccttgaactcaggatcctcctgctggggctcactcagaactgggattacaattgtgaacgtcttccgcctggatttctgtgttgacttcctgattattatacagagtatgactgttagtctggtaaaccgggccttagtcctgttattgtggtgtagtaagtgttggttttcagttttgggagtgatgcttttaaggtttttattttatttttattttattttcctttagtgtcctgtggtataagcaagctcagccagttcctcgttgatgttgccaatcttatattttacatagaaggcaacagttaagtctctttttgtcttatgctatggtgagttctttgtagatgggcccaggagagaattattctttccagactctgtcctcatagtccagcacccacctttgcttgttacttact

SEQ ID NO: 19892 - DNA, 1111 bp, Mus musculus
tatgttcaggtcttgccattgtaaagtcacatagttgttgtatctggtttataaattgtgactaatcttgggatcctgtataaacgtgctgctctttatcagttttgcataccataattctttttcatttgaggttcttggctgaatggtgacagatgggaatgtctgatactatccaccactcttgtgttcatttattggcattatcttataaggatccccttaccctaccattcatttctagtatatttactgagttatgattcattaataattgtttaacatatcctcatgtcctgggtcttgttagtgggaacccttcatgctggcctgttttggtgtgggcatggcatgcatggtttatgtccttgtgttgaccctggccctgatcaagccccactagctgatggttccattcatgatgcttgtctgtagttgggtttctgaaggtaccacaggtggatgatgagggatggcatctgctgtgccttctccagagagaagggcaagaaagctgcatagatacggaatcagctcatacgggcttcatctgaaaaattttatttaggatagtattttgtcttttttttcctccagagctgaggactgaacccagtgccttgcacttgctaggcaagtgctctaccactgagctaaatccccaagcccttaggatagtaaaatactatccctgtcttaaaaaaaaaacaagcccatttggatgtttctgttttgacatagaactgcattatgtagctcagattgtcctggacatcacagtgacgtcctgtgtcagtcatcctcattagtgctggaattgcaaatattctagcctcaccattgagggtgtaggcaggatttagagtaagattccagctttaaaaaatatgtgtatgtgtatattttgtctatgtgtatgggtattttgtctgcatgcatgtagtgccctccgagtctacaagagggcagtgggttccctggacctggacgtacagatggtagtgagtcgctgtgtgggtgttggaattgagccggtccccagcaaaaacagccagtgctctaaaccactaggccatctgtccagcctggtaattccaccttttgagaagct

SEQ ID NO: 19893 - DNA, 1111 bp, Mus musculus
ttaactcgagttgcaggaatcatgtttttggtgcactgtatactcttaaaaacatgtatacacttaaaaacatgtagacatataaaaatactatttttaagaggacagttttggcctacatgacaaaaacccttgtttaaaattttctcatgacctcaaataatgagtgtgatgttgtcttagttttttatgttcctgataggccactgagccacgattgttccagatgtcagtgctcagtgttcaatcaagtgtttatcaaggtgtggtcaaacctgttcatgctaggctgagagtgaagatgtgttttacggaagacctacttactgaggtcaggtatcaggagggagaacaaggccagggacagcgttccttggcagctggtatgggaatataaccactgttcttggtcataactgatgtcttctcttccagaactcctggtgcatggagtttgttaaagattgatttatctacgtgttatatgtatgtgggtgttctgtgtgcatgtgcttctgcacatcagaaaagggcattggatcacataggcagtcaggaccccagaaagaaagatcttagccactaagccacttctccagtccccttgtgtatttctatggggcttgtgtgtggttaaagccacagatgatgacatttactatattttgagactgacttgccttacttggcttgctgggcctgtgctaggcctcagagagtttgatctttctctagcccattcaatacaagggttttgtgatacatatattaataagctaattaacattaactgaaaaccacttgattctgttttgatcattatatttatcagaatttagccatcaacctcttgtcctgagactctctggagtcattagatggctcagagtatctgggtgagtcccagagacaggtcaaattttccattccatgacagcaatgacttggaggagcatttagaggagcctgtagtggaaccagaaccggagccagagccggagccggagccggaacctgtgtccgacattcaagaggacaagcctgaggctgcattggaagaagctgctcccgacgatgtgcagaagagcacttccccggccccggctgatgt

SEQ ID NO: 19894 - DNA, 2222 bp, Mus musculus
ttgcaggactctaggaattttgtttaagtcagtttcatggtgtttttacttgagaggtaccagtattttgcctaagtatgtgagaaggttttattctcaacgctgtggaggcatctgtatcatggtgtttcctgaagtttgctttggttattagtccagtgatactcatgcttcagggctgtttacatcagcacttttctgcttcttgcatggttcaccatatctgcatgcaccagtcacacagatgttttctgagctcagcactttgtgagaactagttggtggaaagctgcttgctcagtagggtgactttgctcacgtttgatagtcacggtcaggcgctgatctgagtgtctgctttccttggtcctcacacagcccatcatgttccgaggcgcggtccgcctgaatgtggaagagaagaagactcgagctgccagagaaggcgaccgcagggataaccgccttcggggacctggaggcccccgtggtgggccgagtggtgggatgagaggccctccccgcggaggcatggtgcagaaaccaggctttggcgtgggcagggggattacaactccaaggcagtgaattgcttggctctgatctccacacagcacacagccccggctcctgcagaatggtgaattcctttaaccagcgtttggtgtctcggaatagtctattataaactgcttgagtttgtacaattttcatttcgcttgtgttcatggtgtgtgctcccaaccccctttcctcccctgaccccttagtccttcattcccagttttccggaatgatactttaggaggaatagattgtaaagagggaagactgaccttcctgctcacgctgcgtatacagactggactttcacggccattccccagaggagcgcgtctcggcttcactgacagcggaggtttcgttattgggagacacaggatttgataaacattttggaagcaggaaaaatcaagtcacgactcctttctggtgtggaaaaattgccttttggcacctggcgctgggtccctgctggtgtggctaactgaataaaaggtggttgcagacctttgttcttttgacatgtgattaccaaacaactctaagcctccatttttaccattggattttaaattgtgatgtagcctgtcaatgtctagaacacagctaaggacttttgttgacctgttagaaatttttttttttttgaggtagagtttttcatgttttatttgtatttgtaaaaaaaagaaaaagaaaaaaaaagaaaaaagaaaaaaggacaaaaaattcccacaagaaaacaaacccccaaatctgataacaaaaaccaagcaaaactgtgccttctatttatctttgattccggtcggtcctggcaattgtttaaagaaaagtaataaagattctagatttgttttcagattcaaagtatgtgggggaactgtagaatttttttgatcacgtgtatgtgtcgtgttaacattgttctgccttatcctaaaatcacgccccagactgggatgctgctgaggaaggtgcttctgtgaggccggtgacctcagtggctctgtgcgccacgctctgctctgctgtctgtcagggttcctgctgggccagaagagaaatttggttgagtatcggacttggctaacgtgctctagggtctgcatttttttctttaaatcatagccatatggtaaattttctattttgttacggttctcttttactgatggacacgcagtgggtgtttcttggaaaaaggccaatttttattaaaatatttctggaagaaaacttcatctggcaatgtagactgctaaaactcacttcccagtgttgtgtgttgagtgctgtgtgtgacatgggtgaaggttttgttcacacgagcctctgtggacaagtccctattagtctgtagacaaccagagagtgtgtgtgtgtgtgtgtgtgtgtgtgtgtgtgtgtgtgtgtgtgtgtgtgtgtcttcatacatgggcgtaccacaagcatgcttgtgaaagtcaggacaatttgggagccaggccttatattccactgtttgaaacgggcccataagccacaaacttctatgggctcctgtgagtctccaagtgagtcttctatggcctctcgctgtaagggcacagggatttcaggcatgtgccaccatgtctggctttcctgtggcttctggcgattagtcaggtcttcat

SEQ ID NO: 19895 - DNA, 2432 bp, Mus musculus
cgaagcaagttccagtcccaccaaggttgcatagtgtgattgtcaaaaccccacattacttctgagaaaagtccaagtggtacccaatggcagaggcctgtatagtctcagacgctagaggcctcagtcacaggaagatctttcaagttctaggctagtctggcccataaaatattctctaaaagtctcagtaactcgggtaggtctaaaagtgattttcacaactgagtactaagttgtgcatttagaaaagaagttcttcttagtcaggagtattaacctgatgaggtgattaatatttgcagtgcaaggtgagggggtgtcatgggagcatggcaatgacccacattctcttgagaacaagggtaacaatgatctgagaaatagagcaacccgtgggtgggttgggatatgaaaggcccattctcttctacctcaaataaatgtgtagcagtacagctctgtgtgtgtgtgtgtgtgtgctctcgcgctcgtgcatgctcgggtgtgcatgtatagggatgtagcagtattgcttgtgactggttagggagttgcttcagccctgcttcccagcagcgagcagcactggggtgggagtgtgctttggaagggcacaggcctgaacttggcagcacattttgcactgctggaaatctggatgtcagtgacaccatgtgaaacctaaacctcagagcttaagaggcactcgtggccacacaagaaagcacaggctttttccagaagtgcctgaccctcaaccttctcatgtcaaattaagatgcgatttgtagggaagactcagtagatattaaattaagatttgatttgtagggaagactcagtagatggttgttaatgagcttaagacctaggacttgtgatgggtattttagccaagtgagtcttcgtgttttatgtgtacgtgtttgggtgaatgttggccatgtgtgtaggtgcctgaggatgcctgtggccccttggagctggagttacaggtgagtgagccctcctacacaggtgctgggaatcgaacttatgtcctggaagagcagcaagatactcttaggcaggagtccctgttgtcagacctgttggaagtaagtaaatcttaaccaagactttgatttgctgtcactgggaggtggcattcctgtgctttgccagctcagctgccgccttggagcagtggggactggagagttgaaacaagggcctgtggcgaatgtttagtcctggtgctcaggagaccaaggtgagaggactgaatccaaaaccagcctcgattacaaagcctggctcaaggacaatacagcaaaacaagtgaacccacttagttaggttttatgtctgccttgaattatgacccagtaataaggggaagagatggtgagaagcagttgagcaatcagggcttccaggagcaggcagggcctcgggcaatacctacggtattgagccaaggagcccatttcctgtccagtgcctagggtggaattgcccccccgaagacccaggtggcattcagaacatagtagcacccctgcttagtgagcttagttgccctctacagagctgccccccccccctcaggggatgagtttactgtcttagcaagctgcattttatgagctatggggaaggggacaggtggttctgtgtgtgtgcaggagctgtccaccatggttttttgcttttttttttttgagacgtctcactgtgtattcctaactgttctggaacttgctgcgtagcttaacctctttttaactcacagaggtttgccttcctctgcctgccaaatgctggtatttaaggcgtgtgccaccacaccaggctctaccttgattttttttttttttaataaggcttctcacctgttactctgattaagctgtgattaagtcagtgagctccagaaacccacccatctgcctccgtgtgacaccatgtgtgttctacagactgaattcgggtcctcactttacagagcagtttctccagagaccaggtttctgtgtgtcctggaacttgctctgtagacaaggctggcctcactctcagaggcccacctgtctctgcctggtgggattaaaggcatgcaccaacacctcttggctgctaatgtgatgttttaatacctaaaactgccactttctctgaggtcctttggcactctgtattctgtgcgttggtatttttgccccaggggcagtgttttgggtggaaacatgccctgttgccaggctatgtatgtgccatgtatgtattacgaactcactgttccttttcatttgactcacacttgtggaatgacgagtccccatgatactcccgggtgttctgagaccttagcttcacgtgccttctcctccttgcacatgtgcctgtgtgccccacctctctctcatgctgggttttgtcaagacctg

SEQ ID NO: 19896 - DNA, 1476 bp, Mus musculus
tattttctccttcctgtgattttaacgtttttctttttggtgacttctcaatctcgccaggcctcaaacagcgcctcttacattcaagatgccttccaactcctcctgcctgtgctgcagatctctctcatcgagagcaagacagagtcatccacgtgtgagccacagtccagagacctctgacagaaccctgaggagcagagaagagtcctactgagatggtgatagccaagaaatctgactttgctcagggagccctgcagccagagcgaggcatagtactacgtgtgtgaaaggccagcagggcgcaggctcacaggggtgcttgcttctctgcgtagctgatgcgctctgctgctcacactgctcttccagccttataagtaataaattattaaaaaaaaaaaaagaaagaaagaaagaagaaaaaccaaatgtatttcaggaaagtcagcaggatattctggcaaaaatgctggactttcttagctcagaaaacactatagactgttatggatgtcatttgcagccagtggtaaaattgttaagcaggagagaacaaaacctcagtttggtgtcctggggtttatgacattcgtcgtagcctgggctttctcctttccagaataaagcctgtggcttctagagaactgagactacattagccctaagtgagatggccggacagggctgtctagatgtttcgcatggagtagaaactcgtagccgtgtgtatgaaccacagggaaatgccctttggcttcaaatgcctctcttcccagtagaccatgcagtctgcaggtgctctgagtctcttcaggctgcattgtgcatgccctgcctgaggctgcactcatgcaggcacatctttcagctgccaactccagagcaggagggaggagtcttttggtgatggggttttgtggagtcctgtgaagatgttcacttacagcaggatgtagcctcccaagtcccctcattgttcctctgttgtcgtgtgtttgttactgtgcttggagaggagctcacctgccgtccgtactctcgagccctcctcgcagttttcagcagttcaaagctattttggtatccaggccttttgaaaatgttcattaactttgtgatttttagtggctccggcaactttggagagccctgttctttatctttgaaaaccattacaataaaatataattatacctactttataagcgtggtatttaatagcgtggtaaatacctaaatatctagaattaaaatattttacttcaataatgtccattttcataaaaggcttaaaaatgaagcatttgagaagcaagggtattctgagaataaggccctgactggtgtgtgagggaactttgaaaatgcgcacactgctatgactccagctgcagcccactcctcagacaccagtcttcttgttttctgctcagaagccttgctggttatttgtcgtcgggaggaatccca

SEQ ID NO: 19897 - DNA, 1198 bp, Mus musculus
agacaagctacagtaattttatgaaaaggcaaataaggtcttttctgtaatttttttcttcatttctgttggatttattaggtggaaaatggttggtttctgataacttcctaaatatcaccagcgtagcctttgatgaccgtgggctctatacatgtatcatcacttctccagctcgtgcctcctactccgtcaccctccgtgtgatcttcacctctggagacatgagtgtctactatatggttgtctgcctgatcgccttcacaatcacactcatcctgaacgtcactcggctgtgcctgatgagcacccacctccgcaagactgagaaggccatcaatgagttcttcaggaccgagggggctgagaaactccagaaggcctttgagattgccaagcgcatccccatcatcacctcagccaaaaccctcgagctggccaaggtcacacagtttaagaccatggagtttgcccgatatattgaggaactggccagaagtgtccctctcccgccccttattctgaactgccgggcctttgttgaggaaatgtttgaagctgtccgagtggatgaccctgatgacatgggagagagaattaaagagagacctgctttggacgctcaaagtggcatctatgtgattaacccagagctaggccgaagcaactctcctggtggagattcagatgatggttctctaagcgagcaagggcaggagatagcagtacaggtgtctgtccaccttcagtcagagaccaaaagcattgggacagattctcaagacagtagtcatttcagcccacccagtgaccctgcatctgcagagggcagcattcaccacagagtgagcatatgacaactgacagcttgcccagtgctcaggaaaagagcctgctatgagaatataacataaaatgaccagggtcttcccgttaaccttaaacacaccacagcatgaattgccaaagtcattgtgaaagggcagcatttttctgatatttggtcattttccttaaggttgctggagtgatgtgtgttaagattgaaaggtgcctgggcctgagtaagacttctctggtcacagtttttctttggctcatgtgtgacacattgaagcctgagtttccccatcagtagaatcagtgatttgttctccttgagttgggacttcaaccaaaacttcttacctactgcacc

SEQ ID NO: 19898 - DNA, 1146 bp, Mus musculus
gattttaagtgaggcaccacttagttacacagatctagaaagtaaaaatcactctcacggggtgtggtagcacacatctttaattccagcactagagagacaaagatgggcagatccctgagttccaggcgcaaatccaggagagccagagctacactgagaaaccctgtctcaaaaaaaaaaaaaaaaacaaaaaaagaggacgaggagaagaaaaccactctctccatgagaagtgtatgtattcttcttgggagtacatcctttttagcttaccaagacctttagtccatcgaggctggccttgatgttcccaggggaaaatgtaattggtgttttgtgaacaagaactgtgtcaagtcacctctctggaaattcatcagtttagatactttttaataatgtctcaggctctctctttttagacgtactaaattcccaggtgggctctgtgtaggtctcgaactgcagaatccgcttcagtgccccatgtccctcaacctggtgctaacggtgattcgcctcttcttgtcctgctgagactcagtgtcagtgttttgggtcttcggatgcatccttttgagtgagggctcttttgtagcctttctcgaagctcctacctgaaatcggatgagagcactgtgctcagtgcataattatattaaaacgggcaatccagacctaaggggggaaatgataaggggtggtgctgcccacctcatccgggtgcagtgagcactgaagctggccagcccttcctgctggctgagagtgacgtgacagattgtaaatagtcttaacaatcgtttcctccactgcaggaagctcgtgccatagatttttaacctcatggccgtggagctcattgtgatgcttcactgcatttggcttctgattgtgggagatctgcttgagctcgaaggtcctgagggaaatgtaaagtgtcaaacaaacagaggacagcaggagattcaaactgtaaccagtgagctcagtgcctgcctttgtcgggctcatcacctccactctagacaatgtgaacgaatcagtgtgcacttttatcaagtggcatatggataatatggtaatactgccttttctgtctctcaggctgtttccatggaaacttccagggccaaacaaaag

SEQ ID NO: 19899 - DNA, 4841 bp, Mus musculus
cacctggcagagtgagaaacaagtgagattctctggttttggtcgtctaggtagaagtggacgacggtgtttgtagacgatggggtgatggggttttctgaaatgcgcgcgtctgtatttgcagctgtccttttgggccgtaaggaccggaggactgtggtcggcagacgtgctaagaggaccacaggctgtggccctgggggacgccctgggaggtaaggagagtcagggacgcctggccgtctccggatcggtcagagggaccgagttctgttgaagcggaagcttccccctccaacatcgtctaattcttttgcctgcttgtggaggacaagaaagggtcgagtgtgtctagatttgttggtttctgttttatgtgtttttgtgtacgtgtttagagctatgtgaaaatctagagaaacaaaggtaattctcataggtgctttataccctgactagagatagtttacacctgagatgtgagaaaatgggttttgagaaaagcagtactctccgactatctggagataatttggtaataaaaaaataaaataaaataaaataaacagtattaattggtctttagaaccctgcacctgtagttaggaatctagtgtggctagagaagccctgctaggcactgattataaatgctgttcttatagggaccagcagcttctcaaagttctatggtaagggaacagatggctgtttttcctacaaaaattggattcatcaggtgacaaggtgctcctcttttgaaattacagctagaaaaattaagaattttgtttggtttaaatgagcaaatgtatatggccatttcatttttgtttctaaatagtttcaaaagtataaatatgttttatatgtcttggttatagattagtggctcataagttattggttatgattaaaaatttgtaacattggtaacaaaaagttgacttaaaactggtaactctgggttagagtaatttagaactacaacatgcaacatgagacaacccatgggaacaggtctctaaagatacgcctgaattgggtaatattctgtgtaattcttatcctagaaatctgatttataaaagataagatttagggtagtgtctttgagatatattggcggctacaccttcttgtgtttgtgtgcaggaacagacagccaaactttgtagcaagtaatgtttttagagttcatttttaaagaaaatagattgtttacactgttaaaattgagttttgcttctcaaaattgtggttgtgctctcatgttacaagagaaattgaaggcttctcctaaattggagcaaccagctaaatcggctcctctaaaatctataaagcctcctgagtggcctagtccataaccttccccttatccacagcctcgaccccagccgccaagggaaccccaaacccctcggggcgttgagaggcggaccgctgtgagtacatggatccacagggacctgcagagcagagtccgggcggactctggtggacccactcaaactttaaacccttcagtactggtcattttcctctgctggtatttataactagaaaactaaccaccccctttctcaggatccccaacgcctcacagggttggcggagttccttatgttctctcatcagcctacttgggattactgtcaacagcggttacagatgcctttaacaaccgaagagcaagagagaattctgttagaggctagaaaaatagcctgggagccaacgggcggtctacacagctacaaaatgagatcgacatgggattccctttgactcgccccagttgaaactgcaacatggctaaaggtagggagagcttaaaaatctattaccaggctccggtctccaaggtgcctcaaaacgggcccactaatttggctaaggtaagaggtaatgcaggggccgatcgaaccttcctctgtgttccttgaaaggcttatggaagccttcaggcggttcactccctttgatcttacctcggaagcccaaaaggcctcagtggccatggcctttcataaggcagtcagctcccgatatcagaaagaaacttcagagattaaaaggtgtattacaaaaaggagacagttatgcgatctagtaaaagaggcagagaaagtgtgtgtgtgagagagagagaggcaggaggcaaaagaaagagaaaacaggagggatagtagacaagaaaaaaatttgccacagtggtaggagaaaaaaaaaaaaaaaaaaagacaggatctagacagaaaacctgggcaactaaagaccgagcctcagctaaagaggctcagctgtgtcagactgaagtgacttatttgggatacacccttcgaggtggaaagcagtggctaaaagaagccagaaaaagactgtaactcagatccccaccccaactacaccaaggcaagtaagagaattcttgggtactgctggcttctacagactctaaatacctgggttggcgaccgtagctgcccagttgtaccccctaaccaaaaaagggaggtgtttgtgtggaccccagatcaccagaaagcctttaaagagattaaaaaggccctactgatggccagcctatgcctgacctaaccaagcctttcactctttatgtaaaagagagagcaggggtcaccagaggagtccttactcagactttgggactttgaaaaaggccagtgacttacctatccaagaagttacaccctgttgccagcgggtggttttcttgcctgaaagctattgctgccataatctgcttgtcaaggatgctgataagctcactctgagacagcaaataactgtagtggcatcccacactcttgaaagcattaccaacgctcctgtgacacatcagagctttttgttgtctaaatgagtgatcttcgcttcattccacctgctgtcccactgcgtgagactgcacctactcatcactgcgctgacattctggcaaaagaaatgatctgaaggatcagatcagccttggtctgaggacagtagcctcgaggttaaaggtaagcagaaggcggggacagcagtatggtggtgaacagaaagcaagtgatctaggccagcagccttcctgagggatgtcggcccagaaagctgaacttgtgactttaagacaagctctataaatggcaaagaaaagtctacactgacaacaggtatgcttttgccactgtacggggcaatatacaaagagggctgttgacatctacagaaaaagacctaagatgctgtggctaaaaaaattcaggtggcagatctaaccgccaatcaggaggcccaaggagcagtgatcctggcagtcaaggagccctaaagattattatgacatcagagagaccagctttagatacgtcgctgagcactatcaagttatggacagtatttgacttggcctgggggccaaaaaaattcaaaggtgtggttaggtcctttgactgctatgttacaggactctgacttggcagaggaaatagtcaaaagcttcaaggactgtgctatgatgaggtagaatttctaaaagaaatcttcccaaggtaatagacctgcctttgttgcccaggtaaatcagggactggccaagatattagagatcggttaaaagttacattgtgcacgcaggccccaaagctcaggacaggtaaaaaaaattaatagaaccattaagggatccttaccaaattgacagcggagactggcgctatgattagatagctctcctaccctttatgctcttcagggatagaaacacccctggacagtttagactgacccccctataaattactctacagggggcccccctccactggtaaaaatagcctctgtgcatagtgctgacatgctgctttcccagcctttgttctctaggctcaaggtgctccagtgagtgagacagcgagcgaaaaagcagctccaggaggcctactcaaaaaaagaagacctgctacattagacgtctccacgcagaaaaccttgagactccggtggaaaggcccttatcttgtactcttgacgaccctactttctacctttatgggaccccttttgattttgcttctgcttttaattataggtccatgtgtgttaaatagacaagtcacctttattaaaacagaaattagtgcagtgtggcttttagttttaagacaacagtaccatgccctaaagtaaaggatcaagtatgtcaaaaaaaaaattgtgtctagttctaagattagaactactaacaagtagaaggggggaatgaaagtataacaacataaaaacagaattctaggcctttaggcccaggcttgggaatgtggcctttgtaaaggtatgctaatcataaaagagatagcgacattcctctacccacccgcttcctgggttcaaagagtgctcattcaaagaaagtcaccctggccattaccagaacctgcaatgcaaatgtgctattgttaggggctcttagaagctgtcttgagagttaacaattaccaggtattccttgtgactcttgtaactttacacttccttgtgactcttaactggtatctttggtatcttccaacaaagccctccccacttccttgagtttcggtttcttcctttaaatacccccttacccagctactcggggcgccacagtcctctacccctgcgtggtgtatgaccgtgggcccgagagcgctcttaaataaaaatcctcttgcaatttgcaacaagaccgttttctcgttggtgattttggggtgtcgcctctcctgagtcagaacgtgggggagtcctcacgttgtgggtctttcattagaaccttactagttaacttcggc

SEQ ID NO: 19900 - DNA, 1102 bp, Mus musculus
gaagaggcacctggttttcagagagcctgaatccggcctccgttggtggttttcggtggctagaccgcaagacaacccgattccacataagcgagaaacttccttggtttttaactcgtgaacggaacctggatgactgccttgttctatatagtatcgacccatggaagaaatcctccactggcctccggagaagggtgcaccctccgcctgccccgggtggccatgctttaattataagaacattaccttttacctcctggtcaatttgtttccctcgtgtgctcagatcagaggcttagtgggaagcttgcccataaaataccaccccaacaagtattgaccgggtcaggggcaggatgataaatagattagccctcctggagagctcatagcctcagttccctcctcccctcctcctctgcttccctcctcccctctctcaatctaccccccacccccttgcaccttgtctgtcctgctcccacctcctggagagattggagagattccaggacagcctgtctcctgataacctctgcccccccccccccccacacgatgtcgatgtcgggggtaacatgctagccctgttgcctccctgtgtttatgttggggctggactgtgtgtgtgtgtgaaatctgaggctgggggatgggagcctctggctcccttctctgtggaattgtcatcaaagtctgttaggtctctctcagcggccatccctagcccctgctgtgcatgtcccctcctctctcagggtagaaaatgggatggtggagaaggtggagagggctcccccacccccaccttgcctctgaatgaggcaacatcagtaaaggggaacaaacagggtgataaactttgacctctgtccatgagggctcagcagctaggtgggcccggtctccatcttgaccctgtcactgtcaaggaatgggaggctggacagtttaagaatcctcagtgcatctctctgtaatggagatgatagtttccagcttcacgggcttctgaggataagtggggccgtgtctggcaggctggacagctcagaacccagtgttctgagacccttctctcttgcaggcatgctgttca

SEQ ID NO: 19901 - DNA, 1193 bp, Mus musculus
cattcatcatgaggtgacaggagacgctgggccttgcttccttgttgctgtcatggctcctgtgttcccccactgacaaccttcctgttctgtaggacaagacgctgtaccaccctgtgagcggcagctgcatggactgcagcgagagtgaccacagggtcttcatgaacacctgcaatccctcctccctcacccagcagtggctctttgaacacaccaactcgacggtcttagagaatttcaacaagaactgagtccttagaccttgacaaacccctcaggttcctgtggagctcataaaccttcctcctgtgggagaagaggcatcggtgggcaccaaggtgctgggttcttgaaggactgacatggtggggccacggggagaacagaccataccaatggctctccaagaaggcggagcctgctcacatcatagcagagctcaccagcctgtcagcatgttccctaagtgttaggaatcgcctgggcagccttgagccatgaggttgcccttgcagacaggacagtgccctagaaaggaaggtggtatcggccttgggacagcttaaacctgtgtgccagctgctggcaaggaagtctgcctgttcttgagggaactgctagaattgcccagcttctgtgttggtccagggcaatgagaggccattgggacttccgagtgctccatagctagcactggccagcaaccaggcgaggggccccttcctctgcagccagatgtaaaggatgtctcccctggctctctgggtatttcagatgcccgttctagtttcagggctacctgggcaccaggtcgtcagggctagttcagccggctaagtagacctccagaccgaacagctcccagccaatgcttccaaagccctttctccgtgcttttccttggcggctccctgccttggagaggaaccggtgctgtgagggatcacctccagagtctcctggggggtggcttcccccagataatgactgctgtggttccaacctcacagaaccctggagtttctggaaagttctgtggttctgttgaaagcatagatgagccatggcacgtgtgggcatataacgcaagcagccaggtgtcaggcaacccctgacccaagcagaggcggtagggcaccagaagcttcggtccaacccaatgccgtcacagccacagcctcgtgaggtgt

SEQ ID NO: 19902 - DNA, 1176 bp, Mus musculus
ggtgagttccaggacaagaaggactatgtagagagaagctgtctcagaaaataaaaacaaacaacaaaaatcaaacaaccccaccccccaccaagcccgaacaacagtaacaaagtaaccccctttcctatgatttaaggttacatggatagtgggatgtcagaaggggaattgtagtgaatcacccttctatccaatcaactgacaacacagcaatgatcccacatcatcccagcccgagaaaaactcagggttggtgccggtgctgagcagctactggccaggaggtatttctgtcttcttccttcctgtttggagggctggagttattttcagtgattctgcctttggggacagatggaaaattagtatagatcttgagtgtcaggttgcttattatgagtaccatagctgtgggcatctgatgggtcaggcctttggctcagacattggtgggagtgggagtgtggccatcagaacctagacgctgtaatggttactctttcctgtctcctcagctggatgtcagatccctgggaggatatgagaggatgtttccagaaacaccgaactaaaaaggaacgtccaaccctgaatgtggaggacatcctcctctgggctgggctcccagactgagtaagaagaaaataagttgagctcgccccccccccccccagcgctgtagatacagtgtgaccagttaccagccaaccccctgttgcggtgcctttttctttttctttttttttcttccctaccactatgaactgttcactcttaagctgagagctaaaataaactcttccttttgtccagcatcttgtctcagtgattagcaacaaatacagaggggctggggaggggagggggctgggggacctgcaggagtggaagcctgcctagttagtgtgctgctcagagtctggtggtagagctggtcagtggggtgtgtaagaagctgagagaggatggctggatgctggggaacaggcgctgttttggagtttaaggcttctggggccagctgtgtggtcagttcttattggatgagtggctagatggatgagggtaatgacccgacctctgtaaccaagagggagtgcggtccggtcctgtggcttggattactgactctagattcagtctggggtgggatcctggcttcgcctctcagcc

SEQ ID NO: 19903 - DNA, 1145 bp, Mus musculus
tccctggcctcccatctccctgcctagtcatggccaagaacccactgccttcaagaaaggcccaagcctggcttagggagcagcagggattattgagagagtagtgcttatctaggctgcttgtattttcatatcaccggccatgcctgcctccctcacacatgcatgcgcgtgcgcacacacgcgcgcacacacacacactcatctgtgatggctcagcatggtctctctacttggtgcttcttgacagaactggaatttcaagcccagaagtggtatggcttcctgtctctgatccagcctggtgtggttcttcaatacaccctgaaggggtcacatggagacacccttagcctgccattcatttggggcttgaaaatttttacaacacaaatgatcagaattctctcatctcatggaactaactgagagagagagagagagagagagagagagagagagagagagagagagagagagagagagagagagagagaaatggtaaaccaaaattccaggtggggattgtgactctgtgaaggaacttggcttctgtgtcctgcatgtttctgccataagtagctatactcataatagcctctcatagagcaaagctttaatgtgcatgcgtgtgtttgtgtgtgtgtgtgtttgcacacttcctgttaatattttaccaagtgactgcctggtttgtggtggcaggatagcttgtccactgcagcaggtggtccctggcatagtcccaaagaagttgcctcattgataccatctgaaagctctctgtggtccaagggatccaaaggttgcaaagagtcttgagtcctcccgtccagcttctccattggtgctgacattctgcctatacccatcccagccaagaagcagtctgcacctggtcacctccaaggacagagagctcactacctcctagggaagactgttctgttgttagcttctggcttttccaggctctctaagttggggggccatgtgggcagagtctctcaatgggcaaaggacccagtcttagcattgtctcacacattgtatcctttttgcaaaagggaacagctggatacaatgtgttttcacgccccctgacccctcagtatgggtctattggtcttggttccatgttggaa

SEQ ID NO: 19904 - DNA, 1365 bp, Mus musculus
cccgagccgccccgggccgggggcggggggacgcaggcggcggaccgaggtccgccaggccggctaggcgcgccggagccttctgcccggcgcgccactcagcgtcagcccgtccgcgccgctccgcgtccgcgcggcccgggctccggcgccccgccagcggcctcgagcggggcccgcggcgcgcccggcccctccgcgcagatggccactcaagtggagccgctgctgccggcgggcgccccgctgctgcaggccgaggagcacggcctggcgaggaagaagccggcgcccgacgcccaggccgagtcgggcccgggtgacggcggcggagagcccgacggcggcgtccgcaggccgcggcccgcctgcgccaggcctggccgcgacggcgcggagcgcgagagcccgcggccacccgcagctgcggaagccccagcggggagcgacggcgaggacggcggccggcgtgacttcgtggaggcaccgccgcccaaggtgaacccgtggacgaagcacgcgccgccgccggccgcggtgaacggacagccgcctccaggtgggtctgcgcggcgcggcactggcccgcgcagtgacgcgggcgtttccctcggagcggggctaccggggccgcagcggttggtggcaacggcatgcctcgggcctagcttggcggactgggccgggcggggccgctcgtgtgccctgtgctccctatgcgtctcggcgcctcgagagtgcgtgttcagagaacatgtgtcatggctccgagctgggcctggctttgaactttgcaactttgcgcttcggggagccgggtgaagcgtggggagcgcgggcccctgcgtgcccgggagccggttgcggcccgcggcgacgcgaggggcgtgtgtggcggcgagggagtggccgcgccggtgcggggcgggcgggtgacagttgggcgccatgcgccgtgccaggactgttcgcagcgctcgccggccggagctgcgcgcggggctcccctcccccgctgagtccgggtgggaggtggctcgggaatcctagccgggcgcgatcggcgtgggcatctagtggcgcaccactcgggcacagcctccgcttgggtactcctgggtgtttgatagtgagcatggcccttgagtttgatcgtcggagtcctggtacttttaactttaaaaaatgaaaaaaaaaaaaaaaaccaaaaccaaaaacttgctatggagcttaggtgtggttgcctaacctaagctgggcaccgaggaagtcggagctagccgctttcaggttccagagtgctggaaagtgtaggcctagccctgggggaaaccagcacgttggttgccctttcgatttctctta

SEQ ID NO: 19905 - DNA, 1099 bp, Mus musculus
catacaggcttcgctgtaatcccaacacctgggaggcagaggcaggcggatttctttgaatttgaggctagctaagacagccagaactatgttagagaccctgtctcaaaagacccaccctcagaaaaaaagtctataaactagctctctaagcgtaggggtatccaactttgcttttaaaaaactaaaaggacagtgtgtaaagctatgctgaattaattgcctctgatactgggtgagggccatggtctgcactactggctgtctacttgcaacccactgctaggccctgtaggccctcacatttgcatccttcatgaggcttcctcccagcatgaggcctgtgagtccagatactgtgcttcaccataaaaaggaagggaagccaaggagtagccttgtagacacttgagaggagagcaagtgtggtgaagacctgatactaagagcattgtggcctgcggccctggagcaaagctgaggatgaacttgccaaggaaattgttgtgttagtcaggctccaggtagcctttccatttctgtcccctccgctggactgggtatataaatagcatcattggtttcagtctgttaaagccccctgttatcttgtaggcgtgaggaggactatacagggttaactctcacaatggaaaggggaaagaaagatcctgagtagaagccttgtaaagtgtgatcctgtttagggaagggagccaaggctccttgggaatttctctggacagaggctcctcctggcagtgctgttctgtcctccctgtagtagggaaggtaggaaatgatgtaggggaattgaaagatcagctgctagctcagctgtgcatctcactgaaagacttgagcgactttactgaatttccccacttcctttcctgcttcctgtgaatggaagtggttgagtcacaaggtctttcaagactttcccattaggattaagtttgctatatcaattgaatcagaagttaagaccctggttgttgagatcttatttagagactcagatgggaccagctttcttcttcagagctacactaagtaaggcagtgggactcttagggatgtgtgtatgtgtgtgtgg

SEQ ID NO: 19906 - DNA, 4463 bp, Mus musculus
tgcatggtggggtgcacatggtagtgccttaggctctgaacagctgattgtttttctttgttcccacagaaccttctgctccagccaaggtggtgagggcagctgctcctaaaccgcgtaagggcagcaaggtaaggatgggggggggggggtcttctgtgcctgcctgtgggtgattcttgttcttgttctagtaagcacttctagcccttctgtaaagagcatggaagcattttatgagtgccagtacatggtgtctgagtgtacacactgatgtggccccaatctctaaaaggaactagagcttgggtgtggagcgaaacggcaggcagagtaaccctgcggccttcatagactataccttgcaggttggtgattttggagatgcagtcaactggcctacacctggagagatagcccacaaaagtgtgcaggtgagtgtgagaagggaggggttggcagggtcaggtattctttatacaaactttgtccaagagccataaacctcaactttcttgatttttgaaaaggacaatagtatacttctgaagtcccatctattcaaaagaaggttaaagaaggatgactatgcttattccaagagttcaaggccatcctgtgtaacgtaggacaccaacttccttcaattctgaacaaacaaatgaaggctatttatataagatgggtggcagtaaaataattaggaattaccattatgtgagcctttgcctggtttcagtggtggctcagtgggtttaggaaacagctgtgttacagttttccaaagcccatatttttctattactgtgtcaagtttgtctatgagtaattgaaaaaaaagatattagttgaggcaccgactccagtttgggggagtgtgtttagctcccttagactccatcagaagagactcttgatcagttctgttcctctcagcacttttgttctgagctagtaggtcccttatggtagaccaacatcttttctatctcatagatttaggtagctagagaaatcagttgttcgtccttgatggctggtattgtcatgtcttgtggtagtatcatttgagtatgaaagttaggccttagggtatatctagtgtagcctgccctcataccttcccagtgaccgcatgtgtccttgcctcctgtagccacagtcccacaagcctcagcctgctcgtaagttgccacctaagaaggacatgaaggagcaagagaaaggagatggaagtgatagtaaggagagcccaaaaacaaagtcggatgaatcgggggaggaaaagaatggggatgaggactgccagcgaggcgggcagaagaagaaaggtaagtggcatggtcaggaccggggaagtatgcctttcagaactttgaaatgacctaagtttgagctgttggaggatctgcaggccaggtgtagctgtgtgctcagccttagtgtgtcttctcttaagcaggcttttatattgctgtttctaaaacctgctgaaatgacacaggcctgactgctttctctcagacagacctactctgtctgctgactaggcttgaagtggcagttctaaactcattcagctgcagcctctgcagcctagatggttccctgcttcctctcactccacctagaacggccccacaaaattgtcacaggcagtgatgtggcacatgtgtgaagggagcctggaaagttagtttttattcagggctccagaaagtgagtcttacacctagaaccgctggcctccttattttcgagatttaaacaataaaacagaggtctggtgtttggaaagatgtgcctatggctaccaaatgagtagttaagcaagaatttggagggaaggaaaaagccatgtctgaggggcctgctatgcctcactgacatgcttatgccgtccctcagggagcaaacacaagtgggttccattgcaaatagacatgaagcccgaagtacccagagagaaattggcctcccgtcccactcgcccacaggaaccaagacatacacccgctgtccgtggggagatgaaaggtatgcacggtctgctatggagggtctggatgaggaggatactctgaggatttaccttgtgttcctccttactataggatctgaacctgccacctacatgcctgtatctgtggccccacccaccccagcctggcaaccagagaccaaagtggagcctgcctggcacgaccaggatgagacatcgagtgtgaagagtgatggggctggtggggctcgggcttccttccgtggccgtggacgggggcgtggtcgtggacggggccgtggacggggtggcactcgaagtacgtgaggctcctttgggctccgggatgtccaagggagtgcggcatggggagtaggcgaaattcttctctccctctaatgatgcccgtatctcctgtagcccactttgactaccagtttggctaccgaaagtttgatggtacagaggggccccgcacccacaagtatatgaacaacatcacttactactttgacaatgtcagcagcaatgagatttacagtatggaccaggagctgctcaaggattatatcaaacgccagatgtgagtgtgcaagcttttctgggggccatgctggaatggggcccagagcagggtctaatgcatgaccattggagtagccctgttgaagtgaaagatggctttctgtactttcacagaattctgttcattaccacttaggaaagtagagactaccactaacaggcaagcaccctggctcccttctgtgttcccatggtcacgaagcagcgtgtcagcagcatggtgaatgctgtcaagcatctcctttaaccatcactgtagccaggctttttcctgtttgtaggccttgttcttatctcatgactgttgcaggcctgacatagatgacttggatttcctgtccctattttataggagaacaagcagtccagtaattcatccaaagtcaccgctagtgagtcacaaagcacaggcttaatgctgtttctgtctggctattattttttgctcttattcatactgaagtgctggctcgcagaccaaaggagaacccatataaagaagcaggtagtagagtaagagggttagtgttttagtagcagaatagtgttggacctgagtttcaaaagaggattagtttgttgggctcacctgtgatagctgaaagactgggtgatttgactcaaagcaatagtacatcatttcttttcagcctttaagccagtgattttcaaactttctaatgctgggactctttaatacagttcttccttgtgttatggtgacctccaaccataaaattattcttgttgctactttataactgtagttttgctactgttatgaatcataatgtaaatatttatgttctctagtggtcttaggtgacccgtgtgtaagggacacaccccaggtgtcacaacccacaggttgaaagacagctgccttaagctgtccagcaggagaagagtgaagtcaggaatgtgaggttgtggggacggagagggagcagggaaggcccatagcccctcagtgatgccttttttcccctccacttagtgaatattacttcagcgtggacaatttagagcgagacttcttcctgagacggaaaatggatgctgatggcttccttcccatcacccttattgcttcctttcaccgtgtacaggccctaaccactgacatttcactcatctttgcggtatgtctcttcctggggatgatggtgggaaaataagatcctcattgtgagtcctgagttgatgggtaaaccctgacagagttcccactaactgtttctactgagtcccaaggtgccaccatgttacatacagcaagcacctcaccaacttcagcaagagtcagctatagctgatctgcctgtgtacccttcatctgcttttcctaggtcttcctagagacaatctagctagcctttagtagctacaacatcattatcacttctacaaatagaacaggtctataacatcatcagttaccccctttcagattctcctcaactcctgctaaatgttgttaaaaaggggttttaaagattagagtccagggctggagaggtggctcagtggttaagagcatggactgctcttccagaggtcctgagttcagttcccagcaactacatggtggctcacagccgtctgtaatgagatctgatgccctcttctgatgtgtctaaagacagctatggtgtgttcatataaataaataaataaataaataaataaataaataaataaataaataaataaataaataaataaatcttttaagtgctttggaaaaaaaattagagtccagatcagatctgtgtattgtcttgtatttccggctatccttttattcttccttgctaatcatttgtagggtagactaggtcatgtatcctatacatgcctacatgtctcatgggac

SEQ ID NO: 19907 - DNA, 1261 bp, Mus musculus
cctggctctccccgtgcagtcaccccagtgccaacaaaaacagaggaggtcagcaacctgaagacccttcccaagggcctgtctgccagcctcccagatctggattctgagagctggattgaagtgaagaaaaggcctcgaccctcaccagcacgccccaaggtaggtgaggcatggcttagtcctgagggtctaagctgaaaacctaggtggtcctgggttttctagtgtagggatgctaatgtcgtctcttttctattctttgggaaccattctcaggatacccaagtcagttcgtgtgtggcttttccacaagataaggccatggggctttgtaggtgtttgatttttcaggtcctttcccggactctgggtagtggagaggggtacaagttttctgtaatggtggcaagtggctttgggaagttggcaaggtgtcagtttgtctcaagatgaatgtgggaaggagtatgcgttttgactaatggtaggatcaccactcttgaggttctttgacctcaaagtgaaatcactggctcctttctggaccacattaataccttctacctctgtagactcagctccctcctcagagacctttggtctgggccttgtagagccttgtagagcggcctcagcgcttaccttggtgcttgtgttctgtataattctgtgcttctgtaggtgttttacccatatgactggctctcccatctcctttccttcctgtgtctgctcattcccagaatatgttcactgttcttggcctcagccaagagaaatgtagcaccttccaaggcccaggcatgcaattaactgcacaagctctgggaaagatgggagggagtcaagggagccccattcctcctgtatggtgtatcttgaaccttaaaagaaacgatttgacgtttctgtaggatatgaccagtccatcagaggattgcctcttggatgtgggagacatacttctggtgtcaggcttatttggtgtgtcaccactaaaatgtttcaaaaataagtgaaaggcttttggaacaagttgtcttttttgcctagaccactctgctcttgcctttatcctttagtgacctgttctagcaggcttttcctaacatatccaactcagcacagcaccatttttgtgtgttccctagacctatttagagcctttgttgaaccacactacagatggctgctgttcattttctccttctgagctgtgaagtttcttaagtactgggtcattcaggctttcatacag

SEQ ID NO: 19908 - DNA, 2028 bp, Mus musculus
tggcaagagaaaatgtatttgtatacagtgtaaagagcatgtgggatgactgactgacctatctaaccactcatgtttgtcacacagttggctagagccttgtggaagataaaataaagattgcactattatctttaaaaaggtcttaagaacccttcttagtggaaaatggagaaaaaagaggcacttcgggagacatttcttgtcagtttttggagtagctgtgtttggtgctgggtgggcctaaaggtgaacatgtgcaacgaacaagcagcagtgtaggaaaaaactcaggatgggcagtctgcagcaagttccttggtggttgttgcccaaatggtcccctgccagggaagaggagcatggtcagcactaagtgagatcagtacctgggctgagagatggtagtggagactagaatcctgtgtgtttggatggggaagctattctcaccagtttcctgccagtcttgattcctgagcagccagagcatcttgctgactaacagcttcccactacctcacatctgcagcaagaagtggaaaacttcaagaaagtgaatatgattagtcgggaacagtttgacactctgacccctgagccccctgtggatcctaaccaggaggttcctcctgggccacctcggttccaacaaggtgaggggacgggcacctacaacccagtgtgggtgagaggtattaagctctagccaaaaatttccctgcacattgaccctactctgcctctgcagttcctactgatgccctggccaacaagctgtttggtgctcccgagccatctaccattgcccgttctctaccaaccactgtcccagagtctccaaactaccgaaatgccaggactccccgcacaccccggaccccccagctcaaagactctagtcagacaccacggttttaccctgtggtgaaagaaggacggaccctagatgccaaggtgaggtggtcagctgggtggagtcttgcatattttactgcctggtctgagccaacaaagggccaggatcccctcaggcagcatccttaggctgagagctcataaagtagacttgagtataggcatggcctacagaggctgaaggagtgcagaccagatgagagacctcaggcacattttcctgcttctccgtctcacctgtgagataattggaaatttctttcatcaggttgggggtgtaatattagtggtattgcccttgtctagtgcacaaagccttgtgttcaacctccagttgtacccaaataagaaaatgcctttgtaaaatgggatgtaccatttgcatactaagggcggcttgatatacatcagcataatagatgtataagataactaattctggtttcatctttacagatgcctcgaaaaagaaagacaaggcacagctcgaacccccccttggaaagtcatgtgggctgggtgatggattctcgggagcacaggcccaggactgcttctattaggtactgtggccagggcattcaggctgcctgtggcacatgacacttaccacctgaatctaaatccatacaacagtgtgggaagcgtagcctaaggtctgggaactggaggcttcttgtgttttgttctttttcttttatttttagaaaggtgacctggagctgttatgtagaccagcctcccttgaacacacagagattcatctgctcactagtctctctagtgctgagagtaaagcatggctaccatacctggctgtccatagattcccaccatgtctggctgtaaagacatgcagtcatagccacacagaacccaatttgaggttacttgggcagtgaaactctgctagttagaccctgtggactcaggtgctcagtggtagttgcacatctgccaagactgggttctgaccccagcaccatagctcactgactcaactactaactgtgggactcagatacttcttacatttaattttgccaaatctactttaaaacacgtcaccagtctgtgaactcagcttcccacaaagatggcagatattag

SEQ ID NO: 19909 - DNA, 3562 bp, Mus musculus
accacaagcgacacccagtggtagcaggaggcagcggagagggcaggaagcggtgcccttcccagtcttccagcaggcctgccactgggatcagccaaccccctacgacacctactggccaggccactcgagaagatgccaaatggacaagccagcactcggacacactgactttgcgaaagtgaatggcctgaagccccctggggtttgtgatagaggggtggggtggttgaggatctgtggggtgcccagaagagcgaacaagagaagggacagacctagagtactaagaatgggcctttgcgctaagtagcagtgtataccatttgggctattagcggtgctcctgggcaggagcctccaagtaccccatccctcctgtcaccatgacttccatcataacttctaaggggggaggggaaggggggagattttatatatatatatatatatatatacatatatatatatcaagttttaaattattgatagtttgtctggattaccaaaatcactctttagcccttcctgcggctattatgccgacctgtctcccctgcctcttcccgcttccctcaagccaactatgcagcccaccagaaggctctggcggtgcccatgggccccagaagcaccagccccttgatcacctggggtttgccatcaccgtgtccctgctgttccacatgcccttctgccacctctgggggaaggaaaccaaaggatctcagtgggggtgggagcttcagcctctcccctcgccccctcgccccaccccagagacgctgctcacaccagaagagactattgaaagatgattcattttattttttctctgacctttccatccttgggaaaacagaaaaacaaaacaaaaaaacaaaaaaaaaacaaaaacgaaaataaaaaagaaagaaagaagaaagaaaaaaaaaagacaaaatcgaccactttaaaaaaaaaaaaaagacaaaaaaccagagcccacctactccatagaaagtgatgtctttccccctccttggaatttttcttctgttctgtttttggaaataatatttttttaaaagttgccttattgtggagcgggaacctgaactaatgcccaaatgcctgttttccttgagcctccggaagagctccacctgcccgggatgtccctggacttggactgactagaactttcctcgagactgagttgcatgtacggggcctcctacctggaggcaagagttggggcagttctatcagagctgtgcccaggacacccctgctgttgcattgtctgaagccaatgtcctgtgtctgcacactgttgccactgtccttgttgtgcttgctgtcgcctctccaggcccactcagctctgctccgccccgccccgcccagccaagccctgggaaaccccaaggccaagtttgcttcagactgttgtaaacataattggtcttgcctggtacacacttgtcctcagtgtgcacatctccccaactccagaacaaggggttgaacacccactgatgtccacagcttaggtctgtgtctaaccttaacgacctttgacctcaaggaggtggagaaaaggtaccattctctaagggtctggtgttgtctttccatcttattaccaccaccccctgcaagccatctctgcccaccctctcattggccctgcctgggatcaagggggtgagaggaaccaagggctggggaatcctaccgtttggtgaagccccatggcaggaaggtatatgtggacatagagtatacctgacttctcttcaaaagccagactgcctgagctgcacttgagatgccagaggagtggctggaggctgctgtcaccaggagctgaggagggtaatgaaggactgagcacacaggctgggagacttcatgctaaccctacacttggacctaggtggcacaagggggtgtggtctttttgctagcttaactgaaatttgtgtgaccctcctcatcgcccagttcctctattgtcccaaaagttgggactgggacacagcatcccaggctgacaagagcttgccttctgtctttgggcaccttgttactttgagctcatgccttgccccactctgtcctcccggtgcttaggatgtgggaatcccttgtcagctcctgtgactcacttgtcgcaaacaaataagggaacaggatcatctgctgctgggatctgaggccttctcctaagtctggtacctgccctatggtgcaccttcaccaaacagtgggctccctgcttccctttctcctctcctctcctcactcagccctctactgtatatccagcaccacagaacctcagggcttgaggcccagcatcagggaaggtggtttccatctaggctatccagactagggttgccattctctcccagatcctcccagaccctctgagggaagaagcccctctggggtgggaaggcaaggctatcatctcaacacaggctgaggaggggtgggagtgtgtgtgtgtgtgtgtgtgtgtgtgtgtgtgtgtgtattttttgtgacatgttaagagttgatgttgcggagtagtttacatcttcaccttctgaagacacttgaatttaggaccgatgtatctgtgacaagtatgccaggagtgggggtggggcaccagagcaagccacttccccatcaccatcttcccatggaatccaagacctaagacagacagcctgccaaatggaaccgccttcatcctctgcctgtgcagggttagacatccacctggccccagcaaggggcagatggtggtttgcaaacctgtgagcctcagagcagatttgctactcggagggaaggctgcctggccctgctccagcctggaccgcaggttcagacaggtgctgagccccgggtcaagttgttcaatgtttttgttctgtagctccttcccactcctttttgatgacatttacaaaagaaggcaagctgcttggaaggtctggacatgagggaaagggcattgaggacaaggctaatggtggggagtgctagaggcttgggttcccctgtcccctggatgggaccccagagtctcttgtcacagggcccctaggttttccccagctcccaccctctcctccagccatggttacggcagaggcagaagaaaactttgagcccagttctcacaggaaaggaaaactctcatgggctttgcagagaaggttccacctacgctcatatattgtctttaccatgtgctaggatatcacatcaacaggacaagaaaaatgtaaaatacttgaatgagcttgtattataacattaatattattgagagtgtctgcttcccaggctgaagtgattcattcattattctggtcctgctctagtcctttgtaattggtggtaattattatgcttttctttttaatacaaaaaaaatgtataaaaataaaaacttgaaaaggcaaaacactggctggtctcccatctgggacactactgttgggtgtgacagagaagcctggtgtgtatccccagatggaggttcccaccccctacatgagcatgactagagtac

SEQ ID NO: 19910 - DNA, 2093 bp, Mus musculus
gaggtggcacttgtggccagggctgtgctcagcatcttgtgattgcactggacagctcctgcccagatagtaaggttgagttgcttgctgagtgcttggtcccctcctgcctcagcttctcgggtgctggattatgtgtgtgccagcacacctggctttcaggacttcatgactgaggaaccatgatggaatggagctgaagtgacttggcaagcctgagtccttagtcactcactcccttgcttggcagggtggtgactccacacagcagcagcccaaggcttcagcactgacaagtcataagaatgccaagtctgtttaggatgcagagccgggatgtgtacaatggagcagaaaacgtctgaggggatgtttggtatctttgttgagttactgtccagtgtgctgtgtcagggcatgagaagctgggagctggcatgactcctggctccattctcagatggttttgtcctgttctgcagctattctttgaggacagtattgacgatgccaagtattgtgggcgcctctatggcctgggcacaggggtggcccagaagcagaatgaggatgtggactgtgcccaggagaagatgagcatcttggccatgatcaacaacatgcagcagtgatggtgcgtgcaccgtgcggtccgtgcaccatgccgcctgtgacctgcatctgctccaagcagagactttggctttttgtttaaagatgcctttattttagatccaggaggggtttgctctgaatttgtaaacaagtcttcctcgtcctcatgcccccacccctctgctgcctcctgccaccagcatccatggccccatggacacttttttaaatctccaggatgtctgaaacaaaccagtaaaatgtctatgactcttacatgttgtcattcttcttcttttggctttgctgctctgatgaagttgctcagatgagctgtggctgccagagaacaaggtgtatgttcttgggaagcaggtctatgccagtgggctgttttgccttgtttgtgcttcttcaggacagagcagtcctgatgatacagtaattgatggcagacagttctgtctccttcccagttgttaggctgcccccctgagcctcaccttgttcaccttggttttccgatgatgagcttccctagacagatcatgctccacgtccacggtgttctcagcaccgtgatctgtcagctgtgctctcttagcctccagcctgagctctcaagaggtggtagagctaagctctggaggtggagtcttaggaagacccaggagtgactgagcaggacagtaaagggattctcctcagaacccattgagtcctccaccccacagttgtgcttggaagcctgttgactgtgcttaaggttaggcatttaggaagcacactgctttttaaacgaccacagaaagaaaggacaattgtaagaagtaaaaacttatttggaaggcagagacagacggcagcagctcacttaggcaggaatggtcttaccttttaaaagcttgtgggaaactgaatttgaaatgacaaaatgtcaagtattaaagctggtatttaagatgcttgtaaatattatttatgtttttaattttgtaaaataaagattgctttttaaccattggcatgaagtgtggtctttgctagctagaatctgactgacgtctggcaggattggttcacctaagagccctggaaggtattgagggagcacacatgtaattcacaactaactattcacttcacaccctgctggctgttgggccttacgaggacagtagagcagctctaatcgtattctccctggctactcacatatagtgcattatagtcagtgggattctgcaggaaacactgaacttaagacttcctgatttagcttccccacccgccttttctgctggcacaaaaatgtaagtcatgggacccttctagagtttgagtcagggtcttgttccctaggccagccctgacctccaagccatcctcctgaatggcaagcagtgtaggcctctaccaccacactcaacaaatctagaattctggttggcagcagagtggttctcagtaaaggtgcc

SEQ ID NO: 19911 - DNA, 1133 bp, Mus musculus
atctttgggcagcaagagattttcccaactggaaatcctcgggacatacatcttgagatacttgtatatatctagctttgggatttaaaaaatgctaagtcccccaaaagaaaatactgtccagatgagggtgaaacttgaatccactcacacaatagagcctgcctggtgcctcccaagtggcttcctgtgatggagggaaaagccagcagggtcactagacccctgccaagactgtctcaagccttacatgtgaactcaaggaagatgcattggtctgaaaggcaagagtcttgacaaagctgtgagtgggcatgactatatggaagactggatagctccaagtagcttcatctatagagatggggaacgttggttccctccacttaaagagcattggtaaactacaaactcatctttgtggtttgctgaaacaagtacctgttgggagtaatcctgcacactgcatgcctctttcttctgaggaagactcagaggcaggagggattcaaattcaagtccagcctaggcagtgaagcgagatcttccctcaaaatagtcaataatctaagagactagagagagggcttgggttaagagcactggttgcatttccacaggatctgggtggttttaaccccacaagaaacctaaagtaaaactatccaataggagaattaaaatggcaactgttttcttcttatgtgctcttttctttatcaacttgctagtacttgaatattatcatttctgtatccctaattataagaaccacaagaccctgaaaagcaaaggcattcactcaaggttctagcaggaagtgtgtattactcctttgtgtgtgtgtgtgtgtgggggggggggggggggaggggtggtattatccctttctaaggtgatttggtctagacctccattccagtacccacaccagcacctcgcagcactatccactcttactggctgcctcatgccctggctctgttctcagcatctccctacccctccctccgacagtgactgcattccttgcctgtcactgccttatcccatgtggattctggcccggctgctgccaccttaactgacttactcattccttaaccgcagctgaatttttttttttaccaaaa

SEQ ID NO: 19912 - DNA, 1158 bp, Mus musculus
gggctccactaaaacagtttcttccttcaagagggaaaatatcagggcacagccacaatcaaaagcaaaagtcaatctccaaccgtccaatgtcagggtccaacttaagatcttctgggctcctccaagggcttgggtcacttctccagccatgccctttgtagcacacgcgtcatcctctaggctccagacagcagacactgtcaggataccctcattatatgcttaaaataaccacaagaaagcatgtactgactcccaggtaccccatgaagagtgggaagacatgagtagaatggatgggctcccagggttgagctctggtggaggatgcagctgtcttcaggtgcagtgcaggaaggtgtgtgagcctgtcagaagagtgctgtgggctccagacgagctcaccaggatgcttctgattcacagtgtattttatctatttttaattttattgtgttctttgtagggaaaaaatgtattgaactagagaaaaaacgactctctcaatttaagccaaagcttaaaaagaagaaaaaacctaccttgcgactgcctgtaaagcaggattcatccgttggcaatgaagatgagagtgtaaaggagaactctggacctgctgagaacggcttgtcggaccaggatggtgaggaggaagcccaggagccagagctgcctccctctcctgtaggtaggtgcttaggaaacactgtccgtgctggtgtcttcatacagcaagtccttcctcagttgtgtagcctctgtgtcaaatgaacctttgcaaactgtgttagcgttgtttaaagggagtgtggttggtgttgatttttaagatttatttttgtttcatgtgtatgagtgttgcctgaatctatatctgtgtaccacaagagtgcagtacccacagaagccaggagagagcattgggtcccttagaagtggaattatggacaggtgtgagctgccacatgggtgctaggaactgaacccaggttctttgtaaaaggaaccagtgcttttaacttctgagccatctctccatctctttaaaaggttaaagctctaaacgcctctttgacgtgttacaggtgtagtggatggttgttctcttagtgaaaacctaagaaggatgtcttagtcactgttctgttgccatga

SEQ ID NO: 19913 - DNA, 1227 bp, Mus musculus
cgaggttttctttcataggaggggaaggagacaggccttccctcaccttgtacagctgtggaggggaaggcgttgtgctacagcataacccctggaagctcagtggagaggccttcgacatcaacaaactcgtgagggacaccaactccattagagtaagtcccagtggttgaagtctactcagcctctggttttctgtgttactcactcaaggccatctgtaatgaagcctgtcatgcttggccaggcttctcagttgcttaggttattggtgagtctgtgggttgcctgctatcccttacaagtcattttcactgagtaaagcaaaggactaagtgaaggagagcagctaaactgcaatagaaatgataaaaatcttccatagcctcactgtaggcgtcttctttgttttgtttttagatgtttctttttgagacagggttcactatatgtagtcatggatggcatggaactcactatgtagaccagctggcctcaaaatcagagctgcacctgcctttgcttcctaagggctgggagtaaagataagccttggaagctgagcactcggctgactgtgactatgtggttgtgctcgggcctcgtctgctcttttcttttgaagcccaggctggcttcaaattcctgatcctcctcagcctcccaagtgctgggattacagggctgggcgtacactcaatcacacatgtccgcccatacactcaatcacacatgtccacccatgcagaaactcttgggtcttctgcctagatcacaccaaatcacgttttaactttgtgtcagtggatttgtacgactcaactaggtttgttctttctccccgcgcccccaggatctaatgtaactcagactagcttcaaatttggttcctagctccacatcccaaatgctacgattattagagttgtacaccacgatgcctggcgtctacaactgtccttaagttagatcataaatgttgagggtttgtaggttttgaggtttttgattgtttgttttgagattttatttattttattaagtatgtgagtacactgtagctgtcttcagacacaccagaagagggcatgggatcccattacagatggttatgagccaccatgtggttgctgggaattgaacttaggacctctgttaagtgctcttaaccgctgagccatctttttaaccccacattgagatttctttacccttgaaaatgatcag

SEQ ID NO: 19914 - DNA, 1163 bp, Mus musculus
gctgagggaaagataccctaggctgaggtagatagagctcagtcatagtgcagttgtctagcatgtgcaaagcagcacatacagccactgtagagggaaaggcccgtgcttcacagttagtaaggccttctgacctcaagtatagggagggccagggggatggtacagtgtaggtggtcagggtagacctaagaagagcatagcagctcagatttgagcaggatgcaggagccatcctgtgccacccacaatccatggtgtgaccaggtcccataagaaggacttattcattgggaagtccaggtaggagctccagctgccaggtagtgcagctcagtggtggaacacttgtctattatatgctgggtcctgggtcagggccccaaactgaagaaaatagaaaacaaacaaacaaacaaacaaacaagaaaccccctaagaaccctttttcctcaacaggaaaatgaggcctgtgtatttccaaagcagatttaggagaaaatcccacattctatgcattcatagcggtagcaagagactgtagcacatatgaatgtgggtcatcatgctcacatcaaccatattctgtcctgacagacaaggttggataaatgacaagtgttaattggagtggcattttgtacagggaactctgtggacattgcaacgatggtgtgcaaggaagtgagtgggtgggcatccagaggggacaggtgaggcagttaatggtcagggtggtaggacagctgtgcttcttagggcataggtgaggatgaggccagaacggtggcccggacggggaaaacaagggtggatgagaaacccgcctgctcacccagttccagtcagtctccctgggaaggcatccatgcttttgcctcttttgtctctcttgtcacccactttctagcaccacaagaagtaccagcatatccaccagaagtcgttctgctgccctgagccagcttgtgggaagtccttcaactttaaaaagcacctgaaggagcatgtgaaactccacagcggtgagtgtgggacccccccgcccccttcagctgtcctggggaggactcaaatcccttggtccttgtgtgccttataagcccttgtctgcttgagtttgtaactaggtccttggtagcctgaccctagtgaaatgccta

SEQ ID NO: 19915 - DNA, 2605 bp, Mus musculus
gcaaaggtaaatgagaagggtgggaggttggaatgggggaaaccagccagctggggaggaagagtggagagagaggggggagccagaggggtgaagacctgggaggagggctcgctggggctcaggtcaggagggacattcagaggacagtagggctggagagagtattgcagttcagaggtgctgaaggtgtccaggggctctggggtaggaagtctaacctcagggacaagtgctgagtgggtcagaagacatctcatagcttacctatttttttctgcaggagcacaaggccaaggtgacagaactggagcagcaggtggcgcaggccaagacccgctactcggtggccctgcgtaatctggagcagatcagtgagcagattcatgccaggcgccggggtttgcccccgcaccccctgggcccacggcgatcctcccctgttggggctgaagctggacctgagggcattgaggatggggacagtgggattgaaggggcagagggcgggggcctagaggagggcagcagccttgggcctggcccaggcccagatacggacacgctaagcttattgagtctgcgcactgtggcctctgacctgcagaagtgtgactcagtggagcacctgcgtggcctctcggaccatgccagtctagatggccaagagctgggagcccagagccggggacgccggggaagtgacatcggagttcgagggggtcggcaccagcgcagtgtcagcctgtagctctgtggccagagctagcttgatttctaccatgggcaatcagggcccacaggccttccctcctcaagtcctgtctgccccagatcctggtctgcagccttccttgggcaggatcagctgtctcagtcctgtgtccccagctttctcaccgttccttctctcaggaggcagctctctctttgccttacccacctagaaggcttgctctctggccctgtctcttctccccgtgctggcactcgagtctctgatgctctcttgatttcctattctgacctgacttctatctgtctggctttttccctcagggaacttggtctagaagacgcaggaggtcatgtgagaacatgagcatcctagcccaagtggttggacaggctttcacccgttgattcctggccctgtcttcccagaaggcgtgccctagatatgctgctgagtccccggcagcctgtgctcttgtcctgtcccagcttgcctgtgagcaatgtgtacaatgtccatgtgcctctggaagacaccaccttctgtcagtgcacctcttgtgaccttagccgctgtgctgtgtgtccttcattcagtgtcaggtgggggagttgaaccctgttatcaacacaggcatttgggccaactccaaatggcccctgcctgtgtgatgtgtctccagttgggctgagcccttacaattgccaaggtgctagtgggtcccaatggggtctatgctggagggttagagatgggagattctcaaggctgagaccttgccatccctccttctccatgtgtggcgctgggcttgctttttcttggtagaggttgaactggagcttggcaccctcctacagggtggcattagagaacttggtgctcaattgctctctattgctcttcctcacaccagatggtacctacgccaggaacctttggagagcgcttaagcatgggtgcaaagcctcctttcttttatgagaggaattgacttgaagtgaggggttccagcctcaaagagcagctctgggtgctggtgttcctgggctgtgtgaagggaaaccacacctgatctgggtgccttggaggagttgacctcctgtcccatcaggaggatgaggagagcgcgtgcccagggctgggagaagagtgcccgttgtctcgcatgggatctcccaattttcaggttttaggatggtcacaatgaaaacctgtgggtttgaggtggctgttcaggcagcacagaaacgaggaggacatgactgtgcgagtgcatgtgctggtgcgtgtgggaaagggtcagtcctggttttatttaaataaaatagtttatgtaacagtgatgtttactgtctgttaaaagagacatgggggtgagatagggagctcttcagaccatgcagtcaaggaatcaagatagtacacaccaactgagaagaggggagagaggtgccagcttttggtggtcacacccaagctaagtggacaaggctggggagccagtgcccagaaggctgtgttctacagtaatgaatgccaggggtggccctgctgcagagggcctgcagggtggagtggccacggttaggacacatagtatcctgggtgtgtctgcacataaactttaagaaaggagagggatcaaagtagggacacttggttattaaaaacagtgtgatgctgaaccttgaatttccagtagacagtggtttctgtccactgcagtatcaggacatagtcacagagagtgactcccgagttggagcacatctggttataggtgtgagaggccagagtctatttagacacggatgggagacacctgtgaaacatccagtaaatcaggttcccggaagccctagaggt

SEQ ID NO: 19916 - DNA, 1978 bp, Mus musculus
tcatctcattccccgagtcttggaccaacaccagaggcaacctgcttggaagtcagcctgagcttgtaatggggcatcggctgccacctgtaactgaggtattcccttcccacatacccatcagctgtttggggcctatacaacctcagagacacaggctttggacccctcttagatgggttgtcaagtcaccttggctctgtgtgcattgtacgcaggatagcagcactctgtcttactgtctatacctgtgtatctcccttcattttctcttgtctccctgtctttcccctttgtctgtttgtcccttctctgcagtgatgatgctggcccagcaggctggccccctggagcacgaggcagaaggaaccaccttctacagctggcctgcagcacccctacctacatccctcaggcctctgcctggcaccacccttcatcctggacagatccccatctccatcaacacttgacagcctgggatgaagcatcagaggtgccccgctggccatgcacatagttccattgttcagcagtgtttttcattttctttggggcatgaatgtgctcgggcttgtacctgttccaaatagagacctaccagtcctgggattcctttcccagtgtgtgccagccctgcctgggaccacttggcagctcggaagcccctgcttcttgttttgccatggctcagcttagtgtggcattcgttctagtatccaggaaccaagcctcacacctttcccattggtgcccgtgacagggttggctcactagacatccctcagcaaggttctgaggcgcaccagttacagtcagcctgtgtgtgttagtgccagagaatagggatgcaggaggtcctggggtttggctgggacctgagtgttaatgcagtattcctcacccaccagaggacctctttcctcactttgggtctcactgtgccaggtcctgggagccgccttctgcttcgcttcccagcctctcttcctcccagcttgtgcccctttgggtgtcgctggcatccccaaagtgatttctcctccttcccacctctgatggaagggacctccttccctgcagaagagcagcagggtggcatccccaggccgccgggtgcttcacttcgctgtagttttggcttttgctcacctcatattttctccaataggtgaatttcacaaaacttgtgacgtagcggtagtgtggttgcctgcagcatcgtgtgtgtagataactagtccaagaaacaaaacccggcagagtggacagacacaggtcaggggccaaagacatagatgtatttaggtttcgggtaacaatgttctgtccccagaaggccccagccttggatgtagtgaccggcctcaacttgactcgcaggtgggctgggttttcagtgctgaataaagtggtttgctccagcctctctgtttccatacctcctagtctttgtctacacagctgcttcccccttccctgaccaggttccaaggactttgatacctttgaaagcaagataaggagactgtcactaagatattccaggatggggtgtgggtgtgggtgtgtgtcatcccaaacccagcgttggctgtgggcattgcatctgggaagcaggatccatggatggatagaaggaccaagaggagacatcgtggtgagaggactctggcttagcccaccagacagggtctgcagagggctggccagctgcgcagatgcacccagggtggaaggtaacagactggtcacattcatacccagggtgactgggtgcccaggctgtagcatccttgatccttgagtcatgcagatggcaggcagcgagagcagccctgagtagtgtgctcctcagtgacagaacgtggtctctgttggggaccagaatgaacattaaactgatagactagcaggtgtggagaaggtctaggccacctggtggtagctcagaaacaagcaataggtttgtccctca

SEQ ID NO: 19917 - DNA, 1102 bp, Mus musculus
gaaacttccctctgctttacacatgtgtgtgtattttccaaactaagcagttctccatcaggcccagtcccccaagactgacctacttcagatgctacttgtgagccccagggaatgcccctatctctgtctccttgctcttactccagtcctcacaacccctatctagttaatgttatgtgatttgctgggtggctcacaaaacccaggaatccttttgcttagttttaacagttaaagaagctgcagttaaggaagagatggtgggtaaggctgcaggaaggcatgaagccctcctgcactcgctgcgaggactgtcccttcagctcactgtcccttggacctgacctttgaggaacttttagggatgttctgttctgtgggcatagtatgtcagatgcttgtctgcaaacttgccccctgactcctgtcttctccctggagccaatgaatgaggctgaagttccttctgtcgcacagctggtttatggtggccagcaccatcctgaagcgatcaacaagaccccacctgagccaccttagaaacataagttcaagtgtgatgtcaggggactcttaggattggcaaagcagatttttaggtcttctctggagccaggaatgaactctgctgttaagtcttggttgtccaggggctgctgcccttgcttctagacagaggtcgactgtatgtggaccatgccaggcccagaggtaggtagaccagaaatcagccgggactgtggtctgggaggaaacagcacccttcctcctgagcagctctgtgttaccctgggagccaccagaatgctgtggggcctagggtacagctgcaacccaaacccacagtcttctgctggagattgaaagaaagagcagatgtggggagtggtcatggtgggggcagaagatgatccggggctacatgagacccttcaagaaggtaaatgaaaatgcagtcagagccctgagaccagaagcagagatgcagggctgctttctagagttaagatagagctaggggttctctcccagggaagggaagttctccactaggggtacttacttaagcctgaggctccaacagccacgtggactgcca

SEQ ID NO: 19918 - DNA, 1301 bp, Mus musculus
gaggggaagcaagagtactgtccagccctggccatcctaccacagtgacggcaacagtagccatagccagatagcaggttgttaacagtggggcaagcccagcaggggccgaagtcccagtgttcctgaatctgtctcttgcctcaccccaggcaaggagcctggcttgtttgacctggtgatcatcaatgacgacctggataaagcctatgcaaccctgaagcaggcgctctctgaggtaggcccttcccatctaccctgtcttggggaagtcccctgcacaagccatcctgtgaacgcagcaaaccctgtgttgccggggctcacaccctgctgtgttgtaagcagccctggctttgccagttgccagaatggtcaagtacaggtgcaaagccggagtccctgggaacccagggaggatatgagccctagccctccctggttccctgcctctcctgactttctgtttcccttcttccttggcaggaaatcaagaaagcacagggaactggccacgcctgaaggcctgcttcattccacagagtgatgtctgtggtctaaatttgcctggaggtgggggaaactttgccagggcaccaaggacttgtagtagacttccactgtggagtagaaggagctaccctttgtctgaccacaaggtggctctgcaccgtgggctgactcactggctgaatgactccaaagagtacccatatctaatctccctggactatttgtgttcctttccttgttccttctgctggagcgggactgacctcttaataaagtaattactgaattatagtgtcacagccctccatactgggcttatggcctctggctttctgcccctccatggtcagcccagatgaaggctgctaagggggctctgcataggtgtctagtggcccttgtccctgcccgcatccagggtccactagtcatcagaatgctggctagggttgctcgtgttcacttcttcccctgggagtcaggcaactgggacaatcagtatgggctggaatcgtctcagccctagacaacctagtgctgctgtctctttgaggtatttctgagccatttggggactcagagggacagataccacttgccaggaacaaaagtgcccagctgcaggggaagagctaaggtcataatgctggccctggagctgtgggtgctgtgtgttcttggccttgggtataggcagccaacccaaggaagggcaggtgagccctgtgagggctgcaggcaggcagagtcctgggccttctgtaaagatcgcaaattttgagctctag

SEQ ID NO: 19919 - DNA, 1235 bp, Mus musculus
tgtcacccagagcatggaagagtgaatccatgtttctttggtgactttatctgtccctctgttccgtgaaggtttgccattatttaacttagtttcaacagtgacccgggacctttggagttagcattcttggctttccagaaagcaaggggccggcccctcctggtgtcactaaggttttgtagtgtccccttccaccgagattccttcacacgagagttatcaggtgggatagcacagccgcctttttgaggagctattgcgcaggcgcacgtggcactaggatgaaggatgcgccagagaagccctgaacgccctttagaaagaggatcttgattgataaggccctcggatacgcagtgcgcaggcgcacgggcacgttagcgagagcgcaggcgcgcgcgggggcgcgagagtgacgtcacggcgtgcgtccggagtgctgcgggaagtccgactagagaccgcgggtactgaaggctgtgcagtggctccagcgccatgttcggctccaatcgcggtggcgtgcgtggcggacaagaccagttcaattgggaggacgtgaagactgacaagcagagggagaactacttgggcaactcgctgatggcgccagtaggccgctggcagaagggccgcgacctcacctggtacgcgaaggaccgcgcgccgtgtaccggcccgagccgtgaggaagagctggcagccgtgcgcgaggcggagcgtgaggcgctgctggccgcactgtaagtgcctggtctgcggggcgaccgcaagccccgagggcgggatctgggtggccctggggcggggctggatgtgggcggggcacaggaaagaaggggaccgaggggccagacccttgatgagcattcctgacctttgctcgcagtggttacaagaacgtgaggaaacagcccaccggcctgagcaaggaggtgagtctgagatatgggttcgaggtccgcggggtggttgggggggggtgggggggtccgtctgtctcggcctagaacctcctatcttaccctgctttcgcaggacttcgtggagatctgcaaacgggaaggaggagaccccgaggagaagggcgtggaccggctcctgggcttgggcagcgccaggttaggctagttggggagtccagggtaggcctgggcggtgattgagaactgtcctcaaatgctctgtcccctgcagtggctccgcgggccgtgtggcgctatcccgagaag

SEQ ID NO: 19920 - DNA, 1668 bp, Mus musculus
gttctcttggtgtttgccaacaagcaggtaggcaccagcaaggtccttccctgaaggaaaacctgtatcagggaagaaagaggaggggtgaaaggctacccagggttattggctgtttgtggtccctgccactaattcttccttttcctcaggacctccccaatgccatgaatgcggccgaaatcacagacaagctggggctgcactctctacgccacaggaactggtacattcaggccacctgtgccaccagcggggacgggctctatgaaggactagattggctgtctaatcagctccggaaccagaagtgaaccagacccctccctccccctcacttcctcttctccgccctcagctttcctctcatgtggcaaacgtgcgactctgtggtcctgagtgccagaagctgtctccatgggttggtcacagtgtgcatcgcaccgtgctgtacatgtgcagacgcagcctgcagccaggtttttatttaatgtaaatagtttctgtttccactgaggcagtttctggtactcctatgcaatattacttagcttttttattgtaaaaagagaatcaactcaactgtcagtactgagaagggatttgggtgtaggggcacctggcctccgggagccattgggctgtagactggtgtcggtatccatttggtggttggtttttaacccaaactcagtgcattttttaaaaatagttaaaaatacaggacaagaacacttgaacacacagaacggagactatgcctagtgtaggttttgcagttaatggcctgaatgctagatatcagatcacctgtttcgctgtgggaacaggagagaaggtgatgaacaaaccaccatccgctgcatggtcacagtagagcccccgtgactcgcctgtctttgggtcacctgcattccatagcattgtgcttgtacttgtgctcacacggttacctagggtaggctgggagccattgtggggtgcagggcctggcttgtacttggtgtgtgcaaggcccaatggcagcctgcatacccagcctactcttgggcccacttggacgcgctggcaggaggcctgggtctcaccagcaggagtgcgtgcaaggtgggagggtcggtccattacagacccacatcctggagcacccccatctccatgtgtgaagtagcttcctccctcagcctgcaagggtccgatttgccatcgaaagacgacctctacttttttcttttgtattttgataaacactgaagaagctggagctgttaaatttatcttggggaaatctcagaactggtttatttggtgtcgtggaacctcttaccgctttcaatacacaattagtaatcaactgttttgtatacttgttttcagttttcatttcgacaagcactgtaattatagctgttagaataaagtctcttaactatttgatgggcttgtgtgtcagtgccaccactgccaggcttcttcctgagattgagagcccttttcatgctataggaaacagggaaacaggtgccctttaagccctagtgtaatctggtaagatctggatgtcttgacgtgcttctttcctttcctttctgtgacagactggggcagctggccttggagtgcttatctctgggtaggtgtgaccactagaagatccaaagtttatca

SEQ ID NO: 19921 - DNA, 1158 bp, Mus musculus
ctgaaagacctgagtaggatcagagggtggggactttgaacccagccctcagcttctagggctaaaggttgagtgggtcatcagtggtcagtgtctcatcagtcatgtccacagcatccctagaagacccattcagaggatcctatgtgcttagggaggtgagggctggttcttcttagaagttggtggttttctgagtaatacgagcttctaggggaactccaaaccaaggaggacctctggaaccctgctttctaggtgctggccatcagagtggtactacaacctgggcttgcatctgcaccaatgtagggacatcttgggagacagaaccccacccttgggacctaatatgatcttgaggcagacatttgtcagagctgaactgaattaaggacattcttcctctggtgttcactgataaggacccttttagggtcccagaatcctgtactgactaggacatgagagtagaggtaaaatatgtagtttgttttgttttctgggaaagtatgaaacccagttaggaattacttctttgcttgagtatctaagaccattgtccacgagcaagaaagaggtcagggccagcaggtaggtatatatgctctcaagagctctggggcagcgtagcctgtggcactgtaatgggaacatgagcccttgtgccctgtgtagttagtgctgtaatcctggtcttcacatgatagctggcctctgggtgttagtaacagagccgattatgtgaggcctggcgagaggcccgaaacccaggtgtgtgcccatgaagttgcctctcctacctccagctgggaagtgctggtgatgcacatccccagcccacacagacctatggaaactgcgcatcctgggcagagccaccccagaagaaaacaggaaaggattggaattggcaccctggggaggggaggggaggtggaaacactgcacagtctcatttctctctctgaatttctagagcataccctgcagcaaggctgtggtgtttgctcgaaacatcctcagacagcatgcctgagcctcccagggtggggatgggaacttctgagggagtggaaagagggtctgctacagagcaggagggcaggtaatggaaaaagccagtcttgccgcccccgctcggacacactgccccac

SEQ ID NO: 19922 - DNA, 1160 bp, Mus musculus
tactggaaggactacatccaagggagttactcctcttcgcggggctgcctctacctcaaggactggcatctgtgcaggtaataagacaggacggcgcatggccattgggcacttaccctaagcagctagtgcagccagtccaggtggagcacgcccactgcactcagaggggctacctctacagcagagttctaatgtgtatcacagaactgatgcgaagatgtggggagatcaacatagcgagccaggtagactattatggggaaggtaagtctttcgtacatcttgtatgggtacaggcggcctggtgtctccttcctcttctgtatttttgagctggtatctcagatcctctggggctgtcctctctgcaaccccactgagaggacgcttgttccttctacgattgctctggggattcttgccatcccctgggccattctaagctctctaaagggacaagtgacctttccgcaaccactcttgtcccactttggaaacccctttactctttaaagacacattcaatactctcccttatcagcttccacttttctcacacagcatcttgtgacagctttacttaggagatttttgacgtcttgctggagcaagaatgcattgcagtcagtagaaactacttcaaaatttgaattatggtgtcttcccaggctagctatatatggtctgttcatctcccacccttctctctcaatgatggacagggtcaagaagccataacctccatctaaacccccggatctactaaaatgatcacacctttacagtgtgctctgttgctgtgctaagctacggtagtcatgcacttaggcacactgttgtgttttccttttggaactgggaatgctaaggttgtgagcatataaacacatactgttagtatgttttgacatttatggtattttcagcttggacatgtcagtacgtaaggccatcataagccgaggcgctccctacatctcaggagtttgggctgtccctaagacccagctcacgtgatgctctctttgggaagagcattacccttttccatggtgaccctgcgactgtgtgttttcctctacctgacgtccctttcacaagtacagaccattgtactcagacccccagcaaaaggcacagtgtaacattgagtgaac

SEQ ID NO: 19923 - DNA, 1186 bp, Mus musculus
tcctttggtgatgaacaacagtgtggaaatgtaagctgaataagccctttcctccccaacttgcttcttggtcatgatgtttgtgcaggagtagaaaccttgactaagacatagacccatataccatccttaaggtggttttctgtttagctggtgaagaaaaaaaagccattgagacatggagaaataaatatgcagaagtctatgatccctagtcatcagggctgatgctgaagatgcggaaggaaagtagagcagaacatacaaagtatatgctatataaattatatagattagtatataaaaaataagccagtgatagaaacaaacaggggcaatggggggagggggagggggaccagggaaagcccacccccaactgaaactgaatcacctacaagagcacactgtacaaataacatacagaccccaatttgctggctagtggaaacattgagcctctgacttttctacccatctatggcccacctcccttcttggaagtattctttcatattaacctgtctctgtagccctagacatgtgtcagtgtacaattccttgtagggtgcctcgagactctaaactttgcctagaactgagcacagtctgtgtgcattcatctttgcttcataagcagtgtgcatgcacatcctgatagttcaaagcacaacagttcataaaagcagttgtacaattatgtagttaacacaggcatccacatgtgttcacaggaattacaggctggtgcagtggtaggtgttccggcagcatctaccattacgtgttctacaggatactggcaactatccctggcctcaccccaggacaagcataggtgatgccataggccatgatcctttacaactgtgagaacttcttccctgggacccaagcatgcaggtacatgggattgtaggaacagtggctcaagttttgatgtcacaggatgccatggaaccctcaccaggtcctgtgaaatgaggccctggtgtgtgacatgggtaagcccagaatatctaagttttgaaacataaacggtaccttccttaaataagagctgaagaaggtatcagggcatatagcattctgtgtctgtgtctgtgtgtgtgtgtgtgtgtgtatggcttttcaagacagggtttctctgtgtagtcctggctgtcctggaactcactttgtagac

SEQ ID NO: 19924 - DNA, 1208 bp, Mus musculus
tccactggcaagtctcagagattctggacaggtacaggtctaattctgctcagctgcttgttgaggctcgagttcaacctaatccatccaaacatgtccccacagcccatccccctcaccactgtgcagtgtgtatgcaatttgtgtggaaggaaaacctgctctctctggcctgccaacatcagttttgccaaagctgttgggagcagcattgctcagtgcttgtcaaagatggtgttagtgtaggaatctcatgtatggctcaggattgtccacttcgaacaccagaggactttgtatttcccttgcttcccaatgaagaattgagagataaatacaggcgctacctctttaaggactatgtggagagccattgccaactccagctgtgccccggtgcagactgccccatggttatccgggtacaggagcctagagcccgccgagtgcagtgcaatcggtgcaacgaggtcttctgtttcaagtgtcgacagatgtatcatgcccccacagactgcaccacaatctggaaatggctcaccaagtgtgcagacaactccgaaacagctaactacactagtgctcacactaaagactgtcccaagtgcaacatctgcatcgagaagaatggaggctgtaatcacatgcaatgctccaagtgtaagcacgacttctgctggatgtgtctaggagactggaagacgcatggtagtgagtactatgaatgtagtcggtacaaggagaatcctgacactgtcaaccagagtcagcaagcacaggccagggaggccctcaagaagtacttgttctattttgagaggtgggaaaatcacaacaaaagcttgcagctggaggcacaaacataccagcggattcatgagaagattcaggagagggttatgaacaacctgggaacttggattgactggcagtacctacagaatgccgccaagctcttagccaagtgtcgatataccctgcagtacacctatccatatgcatactacatggaatccggtcccaggaagaagctgtttgaataccagcaggctcagctggaagctgagatcgaaaacctttcatggaaagttgagcgtgcagacagctacgacagaggggacttagaaaaccagatgcacatagcagagcagcagagaagaaccctgctaaaggattttcaagacacctaaactgggctgtggctgtgc

SEQ ID NO: 19925 - DNA, 1721 bp, Mus musculus
agggatggggtgaatacagtagggagctggccaaaagcctgcactgacgtctcctcagaagtcagcctgggtttagtcagggtgtcagccaggggagcatcccacagatccaccgacggccaggccactggccatcaggaggtcacattttgaaagttaatgaatttatccccacatcttctttgtgccccaagacccttcagaaatgtgtgctggaagttgcctgtcaccactcacattccttcccgtcctgtctaggagctgagagccaggccctcaaggctcttctgggcaagccctgccctggaacagaagcttctgtgaagtcgtccttcatgggtagagattccaaggcatttatttagcttcctagcgctgtcgtcactagtactaaacataggctcttctaacagcacacagcattgtcacagttatggaatttgcaaagctaggtccggtgtcagtgggctggttctttccgaggctagaagggggaatgaatcattctgggcctgatggtcactgacacttgtctgtccccggggacttgtacaaccatctctccatctttgccttcatctccgctgtgtcagtctccaagcttaccttttatacaaggatcccagtcttgggttggggctcaccctgtctactgtagcagagccccaccttcatctggagtggccatttccaaatacagtcacatcctgaggtactaggagtcaggacctcaacactggggtttgagtggacatagccacaactccagttaatcccatggtgctgttgctgttcctgcctcagatgaaccaatgcaaccttgaggcagccattcctttgaatgttgagctcagttgtctgctttcagggctgctgtcctctgccagggagaatcttcatccatggcctttaagttcagagcctgagagtctgggagttgttgttgctaggaaacctcaagcaaccaaacacgtggtcccacactgccctggcacactggtgttggccaggctcagtgtggctgtgactggacctgagagctgcaggcagccagtgggctgtaacggctctcagcagataggaggtttgggaaatgagttcaaggcctctggtgctctctgtcctgattttcacatgaagaagcctctagtccagacccaatcaaagactcttaagactttggaacagagtttctttttctgctcagtgcatcacccagaaatagtaaatgcaataaaaccatttggtcacaccttggagaagaaataaactgtggaagctcttagtttctaaatagttttcttctatccttgtgtctggagagggaggcgttgggtctctgtggtcaagggagggaagccttgctcacggagaccagggttttctatttatcctgtcgcctgagcttcagttacccagggagggacatggtgctcttcacctgtgtacttgtcagctaataaccaaacttgcaagggttaataaaggaggtgtccgaagcatgcaccagatacggtcagggagccctcactgctgaccagagcccgccagggcatcaccataactggaatgtcatttctacctatgctagcagcccggtagaagctcaaatcctaggtttcttcctctcaggagtaagtaggagttacctgttttgaggaacagtggcaaacctccactaaacgtcctgtccttactgggtcaccttagtgttcatctcc

SEQ ID NO: 19926 - DNA, 1200 bp, Mus musculus
ggccaggcagtgagcggccctgcctgggcttttccggaatcccgagagcccaactcggtgactccgtttaccttttctccgagtgttccaaagtgtgggtcaagtggagagaccgtgatatactgtgcccctggtgtgtttgctggattgtgtatgtgatagtcgggctgaaagcctggcggtgactgcctcctctctcatgaccaggaagggccacaatgtcactatgtgtaccactgccttaaggagaatctggagaaaacaagggataggctcagacggaacactagtagcttttttttttttagccacatttttaggtactaaaatataattacataactacccccttcccttccctccagccccttttactcacacacacacacacacacacacttatgcacgcacctgcacacttaactatataacaagaacttaaaaattttttttgagatttaaatttttaataacatgtatacctgtgtagatatctttgtgtgagtctatgcccttgggtgcggtgcccatggaggctcgaagagggtgtgggaaacacttacaggactttgtggacagagggaaaagtagtgtgtactctcaaccaaccactcagctgcttctgcagcccctgtgttggaccaggtgcgtgtaaggcttgtcataaagcactgtatggggaagaggcacagtcttagctgcaactctgacactgagctgtacccccaggcctagcattggtggttttaaatacaagtcttactttaacgctctgagttccttctgtacctgggagtttttgtccttgccagcacagagtgaaagtttctgtccctggcagagtgacattgttccacggtggtcttgcataacttcccttgcatatttttttttcctccagttcaatttgtgaagacctcaagaacagagacggtgacttcgactccaaagcttcaagattgtggcctgctggggctattatcctccaggaggacctgtccatcaaaggtatcacaaaccttggttacacatagatgcctgtggcctccttgttctcctggggtactgggaatgccagtgtcctgttgaatcgccaccacttttctcccaaatgccctgccttctttactgccacatgttaggggactcctcatggagtgatggcttgtgggaagggtcatctttctttcggttcccatg

SEQ ID NO: 19927 - DNA, 2075 bp, Mus musculus
gtaatgtgttgatagctctatctggtggtctgttggggattccccttgtcttaaagcagtaagttcataaagacaaaggaatgagacatgcacattccatatataggaagaatgataggtgcccaggtttccagtcctccacccaagtgtttcgtggttttgtctgaagaaccaaccctaagctagaactgagctatgacacatggtcttgtttctctttattattttcccctttctcacccaagtacatttttacaggaaaaagcaaatcccagtcacactacttctccagggattctctcagggcttctgccctcgcatgcccactaatctcaggatccctcgcctgcacctgctactgaagcccactacgcctgctgcaccaacacctaactgctccttcctctctgtctccaccagagtctgaaggaaggcctgacggtgcaggagcgcttgaagctctttgaatccagggacttgaagaaagattagctgcatccattccactgacacatccttcccagctggtggcagcacaagccaagcgtggttttcatcttcacctgtgcatctcattgttgctgtcattaactgtggggatggatgcatgagagactgctgtggggtgcttgctccagtccctccctgtcaattccaacttcctgttgtctttatcacagcttttttcccatggtattctcagattagtcacgcgcaagcagtagagtgggacggtttccccgctgatacctgagcagcccccttgtcctcccagcacactcactgtcagtattaaggcacagcagcctgttaataagctagccctgcctcagagtgcacatgtggggacctgccagtggctctgctctgccgcacacagcggagcaccacccttgatggtcagagcagagccaccgaatgttgtaggctggcctgatttctgaggggcctaggaaagtgtccagcctggcccacttccttttgatgtgggagggggacagcattttgtacctggccactgatgcagcttagaaccatacccagataatccggcaaatccttcacaacctggaaaatgttgaaagcaaccattcctattttggttttttattaaatcttgcacaaaagccccggcccctctcattccttcctccgctcgtgcctcccttgctgtgctaatcctggtcttctggtggcccggaagagtgacttgcagcctgaagcttcagacttgtcaagtgtgatgggtcctcaaagtcctctggaggggaacattgctggggtttaatctgtctgaaaagaagctgccatgctgcttggcagggtgaggagaagcccgtgtgcaaagacagactgtcaggactggtgatagcagcagtgtgtgctcaggaccctcgttagtctgggctctggaagggtcccttgaattgtctgcttctcatggagccattgacagggagcctgtgctaactctgcttttctagctgaacaggacctgaaactacccaaagcagtctgcagcattttctttaaaaaacaaaccaacaaaaacatttttctctattctcataagaaaacattcatactgtaagatgcagcacacaggagtccccatgtcagatgggagaggcaatagcctcatagctagatatgcgatctggcttcttagtcctggcttgttagtgttaagtgggtcagatggatggtctctgagcgtacaaattcaactcatgagtcccctaaaggttctacatgagttgacgtacaaggtctagctggcctaatagacaggcaggtcgaaacttcaagataacggatttgttacataccaaagtgtgccactgaccagcaggcaagccctgggctccccttttcacacgtttttaagttccactctggcacatgctcagtggtcatttatgttttcagcattatgggcaagtcagacctgttaaaacaagctttgagctcagagtgggctagccttcaggagcctggggttgtgcgttgaggactcctgttctctcatacggtttccttgcagctatcctgctgcccttgggaccctctggccc

SEQ ID NO: 19928 - DNA, 1178 bp, Mus musculus
caagggggtgaacacccactgggagtccaaggagccaagtggggcgagggggaaatacacggaaccctctggatcagcagaaccattctgtgaggcattgctagactgctgccaagagagcagagcgggagaatcttggaaggtggggtggcagtaaggctcggtgggagccatccctgaagaggccctcttctccaccctttgtattcaggtgtttgaggcagagcagtttggatgtccacagcgtgcccagaggatgaacactgccttcacgcccttcctgcaccagaggaacggcaacgctgcccgctctctgacctccttgaccagtgatgacaacttgtgggcgtgtctgcacacttcctttgcctggtaatgaattctaggtcttgacacctgtgagccattagaacaacccaaagtcacccatctgcctcccagtggggcgggcctgagtgcctctgtaggtctgctccaacgcagagagttctcttgtctgtctcctcaccggatggagacacttcgaggtagagctcagttcgcactgacacaaagaccatttctgtgtgaagaccatcaagtctcctctctgaagatggcagcaggcctctcccgagccggtagctggtgctttgggctcaggtctgggaggttttgctggggggcagccgtcagctggtgtctggagtgaaggtctggtgtgcgggtgcgctatgaacaaggagctcctgttcctctgactgatgggtcttaggaaatagaacctgcagcgcctcagccccgaacctgcagcgcctcagcccctagtgtagcagggatgtattgcaccttctagagtttgctgttgcctatgaaccacatttgtcagctgatgagcatctaggctgggtccgttccttggccattgggaatagagctgcagtaaatgggtatttaaggatctctgctgtggtgccttggagtccttcaggaaatgcccgggaatggtgtagtgggtatggatttggaggaacctccccactggtttccaaggtggctgtaccagctgacgtgctcccccctgccccccaacagtacatacgtccctgtttactttgtcctcgccagcacctgttgttcttggttttcaatttattatactttatgtgtatgagtgctttgcctatatgtatgtatgt

SEQ ID NO: 19929 - DNA, 1173 bp, Mus musculus
ggctttttcagaaatgttaactaaagagggaagactgatcctgaatatggtggtactgtcagtgtactgggggtccgggtggagaataagaggggaaaggagctgagcaacagcctgcgcctctctccttcctgactgcggaccgtgtcgccagccttatgttcctgccgccatggaccacatgggtcgtgatggatcacatccccttgaaagtgagccgaagtaaactgcatcttccttgagttgcttggtcatgggatgtaacgatcacaggcacacatgggcacgtgcagaatgggggagagactggtgggtgcttagagcccggggtgggggagcagaagggcaaagattctgatgagcttatgaaaagttccaaaatttacctgttgtctacatgaaggatgttgacacacacgtctatgtcatttcttttctcccagagctcagctttgacccagagctctaggcttgcaaagaatgttctctgaccatgagccgagtcctctcagcctcaagtacgcactttaagcaagacagtgacacggtttgggaatcgtcacacatcgctgttctggtgtggtggtacaggcatgtaattatctcagtttcttgaatggctgaggcaggaggattgtttaaataaaacaattgcaagatggctcagcaggtagaaacacttgctgccaagattgacaaacctgaggttgactactggcattcacattgaaaagagaatcaactactgcaagtttccctctggtctctatagtcatatatatattattttatctttctagtgttttgttttgttttgttttgttttttgagacaggctttccctgttatgtggctctggctgtcctggaacttgcaatctggcaccaaactcacagagatctacctgtctctgcctcccaaatgctgagattaaaggtgtatatttataataaataaatatctttaaaaagggcttctgatctcccatgtggctccacccctctcccgtccttcagatggccccacccaacccctgacagccaaagcagctgtgtccctgggatgcatgcacagatcggcaggactgcagaaagcctgcggtcgggagccagggagctgtgcatcagcagtccagtcttcgtctgactgttttcctctatgcctgtggttctc

SEQ ID NO: 19930 - DNA, 1199 bp, Mus musculus
tagaagttaaccccacccttgtctttgcccccaggtgtccttgccagttaaatgggtaggctgccagggtcactaggtggcataacagccagtcagccagcatactctgattaatgaggtagtagaaacctggagggaggtctctattggttcatctcaagaccctgtcctggctgtccagggaacattgtgcagctcatgtcaccctttgagttgacttcttgaatctgaagctcttggtgctttatagcttgttaccagcttgaggcggatcctgctaatatctctggcacataggaccactgaagctattggggagaagcagaatgcccagagccacttgacaggacagctgacagtccatcagaatggagttcagatccaggcctgtagtttctcctaaactagggttctggaggtgggatgtatcaggtgctcaataaatgcacatggctacctggatgactagggtagtgagcagtgcactttccttcccagcttcctattgcaggaattggatagccaataaacaaactcagactcaggtcttccaggcagagaagagttccctgcagactggggaggatccaattcgcctccatataccatgtaccatggaggtactgtgagatagggctggtttctgatcaagcccataaacatgtaaagaactgtttgattgtatgcttgtaacaattggagagggaacatgcctcttaacttttataatatggaggctcagctgcaactcagaaagcatgagctgtgcttctagggctcagtgatagggacagagattgctatgactccagtctttgctgggcacatactattcatgttagaggcatataagtgctaggattttggtcacacccccattttacaggttgaaagccattaagatcatggggttgggtcttagagttttcttaatacattttatttatttattgtatgtgtacatgtatgtatgtatctatctatgtatgcatgtgtgtggaggtctgaggacagcctgtgagggttggttctctcttcttttttttgtttttgttttttgtttttttgtttttcaagacagggtttcttgtatagccctggctgtcctggaactcactttgtagaccaggctggccttgaactcagaaattcgcctgcctctgcctcccgagtgctggaattaaagtcatgtgccacca

SEQ ID NO: 19931 - DNA, 1113 bp, Mus musculus
aaggattgcagtgtacccatgtctgagcttctgggagtatcccagaagtacaagtgtgtggggagtactgactattccctacttagcaatctccagatcccctcgcccagcaccttaccttgcccacaggacctagctttatgtgttgcagggagagcagagcttggctgtgtggacaaaggtgacatagccaggcttgcttctacccaagggagagtaaacacctcatcttagtgcatgcagatacgatactaaatagactattctcacctttctaatttcctaaaccccaaagcgctgtgattgagcttcttaacagttggcactgagcagctacaggttgctagtcttgttgatttgtactgtctctggattgagagagtgcttccacttctcggcatccccagaatgtaagacccctaggaaaatcgggaaaggtttacagtaggtatagatacatcttagatgtttgtatagttggtggacacatttccatgctgttctgagccaaggttctaaagggtggtgtggttctactatacatcaaatagtttttatcatgctgtgtgtgtaggctgtggttcttaaagtcaggacatggtgtaggggcctctcatccttactatcccttcctgccccacaccctcctacattcctgtctcaggcaagattctctagcccagtggttctcagccttcctaatgctgtaaccctttcatacagttcctcatgtggtgactccaaccataaaattatttttcttgctacataactaatttttttactgttatgagttgtaatgttaatatctgatatgcagaatatctgatacataacccctgtgaaagggttgtttactcccaaagggcttgcaaactatacattcttagttcctgggacaagaggacccagcagatggccgagaggtctccaggagccagagagacaagggaaggagaagcctgtacaatctctttccaggacatcttggaggaaatgggtctcagttccttcagcgtgtgagccaaggcgggaggctttgccttggtgcttccagacaggagctggaatggttccagagccaggatgtctctagagacaacatggagagca

SEQ ID NO: 19932 - DNA, 1099 bp, Mus musculus
ttcgttctctgctcttaaataccttcccatttcatggctgttcagagagtaatcagccagcttcccacttgggctcaggaagtttgtccaggcggcccctaaattagcagggtctgccagctccccctgtctgagggtggtgcttctcttgtgtcagagcagccaccagcatggcacagatggacgctctcctgtaatgacagcagccacagatccagcacttctccaactcaagaacccggaaaatcaaaatcagagcactgcacaggaacatctaagcctcgatgagtttgtagcttccttcccacaacagccatgcatatttggaagagtgctgtaggatgagattcagtctacaggtgaataaaagatctgtagaatccactcatgccaagaagtcctgacagagtggcttggccatgcaacacttctctccccagaagaccagtgttctgaaatttcatgcccagtgcacctgtttctaccttcaggaaccactctgtgtccccagccggaagcccagcttgcagcacagccctcggggctcccaaagactgaaatctggaacagcctttctgttatttggagccatttccagaagtggaaatgagaagagaccttggaagggtagttcaagaagtaacacctctggtggctccaggtctcttcaaacaataccagtttctggtggggaacaaggttcaatagtaaaatgggaagaactttccagatctgagggaggcatagcccaatgtgtaccattcccctagtaccttgtttctgctgaggtaccagtcctcttcttgctcctaacctaccttggctcccaggcccctcccatctagagccccctgggatatcaacctctgtctgtttcttccaggtgctctggcctgctaggcctctttacttacctgcgtgctactgctggcctcctgaggcctctctcctgaggacgaacccaaccaaaagcccagcccctcaaaagctgggatttttttgttttgttttgtctagctgacttaagcctcaagagattggtctcagccttcctagtgtggggaccctttaatacccttcatgttgtggcgtttccctg

SEQ ID NO: 19933 - DNA, 1236 bp, Mus musculus
gtttcaggctagcggggagctggagccgcctcgcaccgccactccgcgcagggtgggagggagcgagggaggcgaggggacgagcgccggctccccgcccccatcccacccggttccgatatttagctgaaaggcacgcggctcctaatcggccctttccaggctgagatgtagcggcgctctgcccgcgcaagggcgggggccgggcccggggaggcgcagagtccggagcctgcgagcgaggtgaggagcccgcgtcctcggctgctggagcgggcgggcgggcgcgcatcgccgaggcagatatagaaaggggggcaggttaaaaataaccctcttcggctgggaagctcgcgcgcactctctcgcctcgttcggtgccagaggactccaggggaggtggcgttggggagggcagcgcgggattcccctcctccgccgccgggcggggtgctgcctgcacgccgcggctgcacgtgtgcggggccgcgcgcccaagcccctcggtccggcccgcggcgatctccccagcctcacgcttctggctgccgcccctcccgcacccagagcggctgtaggaagcgctcctttattcattatttacgagcgttaataggtttggggcgcgcggactgggggcggaggcgaggacgccgcggggaccccagcgttcggggaagggtgcggacctgcgggaaggtctacggggcgggggtggggagagctcacacgcaatttcgccggcgcgcacttagccgaacggggcgaagggactataggcccccactttcctccctgcacggcccttgcagccgcgtccctgacgcagctctggcctcatttatcatcatctttggtcaagtggagtgtgcaaggaacagctgcttcactcggctgacttccgagggcggctacagcgggaatcaggaaaatgaatgatggaggctggggggccgcccccaggtccgggtgcaggcgggagggaggcggggagcatcttggctgcctttgcctcgtggcaagcgcagcgcccccttcctctctgggcgcccacagtccctgcggatctgtggcttaggacgggcgggtgtgccggaggtcgccgtgaccttgctggggtcagtgggttgggctgcggaggaggcgtcgcggcgtctttggtggccctctccggattggcggaaggccgggagacaaggagggggaggggaataccaatggaaggtgaaattttac

SEQ ID NO: 19934 - DNA, 1123 bp, Mus musculus
gacttcagcccggggctgtttgaagacccctctgtggcctttgccaccactgacccgaagaaaacaagcagtcccctgtccttcggcaccaagcctttgctagggactgccactcctgaccccaccacagcagcatttgactgctttccagatacacccactgccagctcggtggatggtgccaacccctttgcctggccagaggagaacctgggcgatgcttgtcctcgttggggcctccaccctggtgagcttaccaagggcttggaacagggtgcaaaagcctcggacggcgtgggcaaggcagatgcacacgaggcctctgcttgcatgggcttccaggaggatcatgccatcgggaagccagcagccgcactgtccggggacttcaaacagcaggaggcagagggggtgaaagaggaggtgggtgggttgctgcagtgccccgaggtggccaaggccaaccagtggctggaggagagccgccattgctgttcctccactgacttcggggacctgccactgttgccgccccctggcaggaaggaggacctggaagctgaagaggagtactcttctctgtgtgaactgctggggagccctgagcagaggcccagcctgcaggacccgttgtccccaaaggccccgctgatgtgcaccaaggaggaggcagaggaggcgctggacaccaaggctggctgggtctctccatgtcacctctctggggagcctgctgtcctactgggcccctctgtgggtgcccaatcaaaggttcagagctggtttgaatcttctctgtcacacatgaagccgggagaagaagggccagagatggagagggctccaggtagttccggcacctcacaaggctccttggccccgaagcctaacaagcctgctgtacctgaggggcccattgctaagaaagagcctgtgccacggggtaagagcttacggagccggcgagtacaccgggggctgcctgaggcggaagactctccgtgcagggtgccagcacttcccaaagacctcttgctcccagagtcttgcacagggcctccacagggacaggccgagggggctggagccccaggccgggggctgtcagaagggctccccagaa

SEQ ID NO: 19935 - DNA, 1103 bp, Mus musculus
ccttgtctgctgcctctgccaaaacccggccaatttcaaggaccttggggacctctgtggcccctactaccctgaacactgcctccccaaaaagaagccaaaactcaaggagaaggcgcggctggagggcaccttggaggaggcctctctgcctctcgagagaacactcaaaggcctggaatgttcggccagcaccacggctgccgcccctaccacagccactatcactacccccacggccctggggagactgtccaggcccgatggcccagctgaccctgccaagcagggccccctgcgcaccagtgcccggggcctgtcacggcggctgcagagttgctattgctgtgatggtcagggggacgggggtgaggaggtggcccaggctgacaagagccgcaaacatgaatgcagcaaagaggcccctacagaacctggtggggacacccaggaacactgggtccatgaggcctgtgctgtgtggaccagcggggtgtacctggtggccgggaagctctttgggctgcaggaggccatgaaggtagctgtggacatggtaagaggctagagcagctggggtgggctagggcagtgtgaagtaccaacaggctggcagaagtgtctccagggctctattgtgggctacttgtgcccatagccaaagagtacagcctccagccctggggtctcttgggggagtatggaggcaagttgaagcacacccggggctacagcagagcacattcatccatcttgccccaaggtatgtgctacagtttctatgttccactgggcccagtggagcatactgctcacacatactaccccacaccggagttgctgggtcccagcaagacagaggccttccagagttgaatgccaagatggcctggtctcccctgaactgggacatagggggtagcttctaaacaacatgtggctaaagtgtgggacactggtcctgggcaaccctggcttacctggccaccggagccctgaagcgcagacctccagttttaagtcatcccttcagagaactgcagcatgtactgcccccagccttgctcctgcctcccctgtggggcaaggtcacaggacctagc

SEQ ID NO: 19936 - DNA, 1239 bp, Mus musculus
ggggatgacagtttttgaggcagtcataggaaagaagctgagcccccctgtgtgcccagcccaagtggagaaagcagccagactgggagttccacgtggaagagctcagctactttgtcctgcacatggggtgtgggctcggccagacctaagcctccctccctttgatgtgatctgtgcaggcactacagctgagctggagccacggcccacatggcgggagcacaccgaggccctgctgttggcatcctgctatctgccccctgccttcctgtcggctcctgggcagcgaatgagcatgctggccgaggcggcacgcaccgtagagaagcttggcgatcaccggctactgctggactgccagcagatgctcctgcgcctgggcggcggaaccaccgtcacttccagctagaccccaaagctttcccttgaggacctttgtcattggctgtggtcttccagagggtgagcctgacaagcaatcaggaccatgccgacctctagtggcagatctggaaattgcagaggctgcactggcccgatggcaccctcttgctctgtaggcaccttagtggcttttccctagctgaggctcaccctgggagacctgtacatagtgtagatccggctgggcctggctccagggcaggcccatgtactactttgacttttgcaaactttattttcataggttgagaaattttgtacagaatattaaaaaatgaaattatttataacttcagttttgtttatctgggtaggcagatgtctgcctcagctgattgctatctttcctggcttgtcctttgggaagccggacttcccatctgttgtaaggtgtatttgctggcttggtgatgctatgttgagccaccttggccctctgatctcatggctcataacccttgaggggccttgatggtctcagttgttcctttgccttccagccctccaccaggtaataaccccgtatatccagaaacacacacagttccctagtcatctctgtgcaccagcataggcgaaggatcagggcccattagtgagtagactgggaaccctgtttgtgtcccccggccccttccctctactcccaaccccttagggaatctggtcggcatccacaggccgcacacttccaaaacaatcgtggtatctttattgacttttttttttctgaatgcaatgactgttttttttttttttaactcttaaggaaaataaacatcttttagaaac

SEQ ID NO: 19937 - DNA, 1196 bp, Mus musculus
gcttggcctcccagcagccgctgccagcctcagcagcccctagaacaaacactgtgacctcacaggtccagcaggtcccagtgagtgggtctgaccaggaaggtggggggtggggacgcctggcttggatgctgctcgcttacagcttggcccctcccatccaggttgtactgcagccacacttcatcaaggcagactcactgctgctgacagctgtgaagacagatgcaggagccaccgtgaagactgcaggcatcagcaccctggctcctggcacagccgtgcaggcaggtcccctgcaggtagatggctcaggcacaagggagactatggggggggggggagggttggctgcgcatgtgtctgtccacctggtgagatgcatctgaccccacagaccctggtgagtggagggaccatcttggccacagtacctttggttgtggacacagacaaactgcccatccaccgactcgcagctggcagcaaggccctaggctcagctcagagccgtggtgagaagcgcacagcccacaatgccattgagaagcgctaccggtcttctatcaatgacaagattgtggagctcaaagacctggtggtgggcactgaagcaaaggtacggccaaaggcctgcgagactcaggtcagggtgaccagggaagaaatggggcacatcagccagccggggatgggattaggtcagtcctcgtcacttagtcatatgcatcaacttgtctgggtctaggcagtcccgtttgcggagttaggtcttatcaagggcagcctggataaagaaagctggtctatgcattgagggggcgtggtgatgaagcacagaaatcctgtcctggaggaactgactccctaggggagtagtgggaattgcagcggctggctcccatgttcggggaagaaaccaggaccagtgaaagttgtggttgtgaactgggtggtcaaggaaggtctcaccgtagagagctgagggtgtagggaatgtgaggtggagacagcaggggccgcagctgggagacaccgttgtgagtattcacagggtgacttttatctctgccctgtggagtgggtactgtcaggagacagcagcataggagagttgtagtcagaaggaaccgtcccgtccagaggccccgaggcagctgtgacgcagagcggctcttacctgctctcgtacctgt

SEQ ID NO: 19938 - DNA, 1197 bp, Mus musculus
ttgttctgtgtcccctctgccctactgcctgttaggacctgttcctctactgagaactggacctcctgagtgtgtgaggcatgcccttgttttacagattgagaaatggaagctcaactggggcagagcagggctgtccacgttgtagactgagtatgtgttcttttaacaagccatcctggtggagagggagcagcaagggcgggagaggtgtcttggatggcctcctgccttcgagcaagtgctcagagttcaccatgcagtacagagggcacctgcatggttgcaggactgagcagcggatgcctcaggacggtgggattaaaggttcccttcgtccatggcaggaattcagcccagaaatggaggttgctcatttgatagagacctgaatttgatccctaaaatactaggtgcaatggggctcacttgcagtgcctgcattccccaggttgtctgtcagtctccagggtcatgagggggtgggttggggaagtactgcatacgtatggacacgtgtgttcacattaaacaaacgggacaggccaaggtagagagttcagtggtggagtatgtgctgatcatgtgcattctctgctccactctggcacacacaaaaacccaccaacccacggatataaaacacactaagagaggggccattgagcattctcagggaagatcttggttcttgggtgggatttgaattttccttccttgtgaggtaaggttccatcagactgctcagctggacgcttacccttcttttgttttgtttttgtttgttttttgaaaggatctcactctgtagccctggctgacttggaactcactgtatagaccagactggccttgaacttacagagatccacttgcccctgcctcccaagtactgggattaaagttgtgtgtcacaagccgtctggctggacttggattctcgaggatagtctccctagtagctgagaccccagcgttgctaggcatagcatagcatagacaaagtttttgtctgttctgttctttgattccaagccttagggagaagggggcccaggaagaaggccttgcctggtgtaggcacttggtacacgctgagtaggtgaatgagtgaacgcacaaatgtggccctgctgtgtgctatgctggggatgttaggagatgttggtgagaggcaagagccttgaagaggacagt

SEQ ID NO: 19939 - DNA, 1973 bp, Mus musculus
cccaacatggatagcctacacttatggagtacttggtgttaggttgagaattgcattgaatccttccgacaggcccagctggaagacatacttttatcttacaagtaagagaccaaaaacagagggtaaatgacatgtccaagtcttgcagccacagcaagacagaactcagacccaggctgttggctcaagagcctggacctctggctcccaaggctggacgaagaggtgagattgaggcaggggctggggagccatgtagctgtctccttcaacccagagcagcattggacataagactggaaagtggcaaggagagccagtcccactggccatctccagcctgcttttctcaccctctgtcatatgactcctctgtgagcttgccacctttatatctgaagatgatgctgtgcccagagcatcaagtcctgctctggctgtgacctcagagaagatccagaggagctgtcttctccttgctcctggtgtccggtcactggaggctggcaaagggagcctgtgatagggaccactgtgcattgagggcagagaaggcaaatggaggtagtgctgctctgagactggctggtcactctaggagccctggggagcccaaggcctgtgacagccagctccccaacagtctgttggctcaaggtgtatacatagcttaggtccagcgtggcttactaggaagctctcctgggttccaattccccctctctgtcctggtcttacactgtatctgtttatgttccagtattgtgtgactctccccagggagaggtgtctacgaatctgatagggcgctgttacagagtgaagaaacgattccattcaagttgagcttcatgaaccaatgaatgtattggtgtcttaatcagtgttctgttgctgtgaagagacagtatgactacagcaactcttataaaggaaagctttgaactggggctggcttacaatttcagaggtttaggccattgttaccatgactggaatgtgtggcggcacacaggcagacatggtgctggagaagtggctgagagctctccatccagatccataggtggagaaagggagacacttagctttcgaagtcctagagcccagtctcagtgacacatacacttcttccaaccaagccacacccccagtccctctcaagtagcgccactttccaacgaccaatcattcagtggggttgtgcagactcccaaacagctgtgtcactgccaggtcttaactccagcgtagtgacaacctttggaaagttgcatctagagccctaaccccacacacccacccaggaatacaccttctgcctcctgtatactctgacctcccaaggttccacgcagctgagtggcgaggggacacagtggttagaatctctggtcaaaggttctatagccctccccctcctgccaagagaagccgttgctatctttatagacctagttatcacttagttatcgctgcttttcagcttgctttgttgcactctgggacagcattctgtagggcaggatcatggaggcaggagctgatgcagaggccacggaagggtgctgcttactggcgtgctaacccctccctggcttgcttagcctgctttcttatagaacccaggactgtcagcccagggatggcccaccccacccacaacgggctggaccctccctcacatcaatcactaagcaaatgctctacccgcttgcccatctagggaggcattttctcagtcaaggttccctcctctagcttgtgtcaagttgacacaaaactagccagcacagtcgagtaacccttcttgcttggtccccatgtccagagcccctcagggataaagagtaagagcacactgggagacatagcgtcctcacgtccaccctgtctaatgggcagtggagagctctccgttgtgctgtcgctcttagggaaattacctcaccctctctgaaatacagttt

SEQ ID NO: 19940 - DNA, 1197 bp, Mus musculus
aggactctcccctgtaatgacacagacaagcaggaaagaaccttcgcttcatctggctgggtgcacttgcacccatccatacttaccggatccccctgatctgagcacggggcgaccagatgtgaagcgctgaatgcagcagtatattcatcagggtggatattaatgccctgggcttccgtttccatttcttaacaaagatagaagtaaaactgttcttatagtagagtggttagtacggacatgcatttgctttgggatgagaagtcatgttgaatgacccgtgttgggcagcccgattactctgaaagcagctctctctcttattctttaaagctctaaggacaaagagtctctgccttcctttttgccccttggcttttgttacaaatgatgtaggacagggagctgacaaggacatcatgggaggtcagagcaattctgactcctcacagtagggggcaactttagacaaaatggaagatttgaggagttgagacccccacctgactcctatttatttacttatatttttaagatggggtttcccttgtagctctggctgtcctggaacttgctctgtagaccaggctggctcaaactcagagatctgcctgcctctgtctccccacttgtgtgccaccaccacctgggtggactctttttttttgagacaaggtttcactgtgtagcctgtagccctgataacctatatatatgagatatatatatgagagatagtatatatgttttgaatatatatgtttgaatatatatgttttattctttgggaatttcatatatatatatatatgtatatatatatatatatatatatatatatatatatatatatatatatacatacacacacacacatgcacaaacacacacatatatatgtgtgtgtgtcacaaactgtcacagtccagtttgtgctgcccatacagtcatgggtgtggacagtcatgggtgtggacagtcatggatgtggggccatccactggaacactgagaaaaggccacacccttagaagaagtgactctccctctcactgccattctctgtcagtagctcttcagccaggggtgggggcttgttgggagcacccccatggtgaaaagttgtgcatgtcttatgcaagcagctgtgactactgtgtttgtgggtgcagctgccatgccatgagcagaaga

SEQ ID NO: 19941 - DNA, 1177 bp, Mus musculus
gaaatcacctcacgtgcgggttgggcctctgccaataagtggtgtcatctcaaaggtggactgggcatccttgtcacgaggcctctgcctgacgctggtgccacctcaccctacaaggaggctcccccgaggtgccgattggacttagagaggtccccggcatccctgcccatcagggcccagcctttcaagtctctccccagaagtagtgtccatgctagtctgcttacccttgcgtattgggagatgtcactgcgagtactcttccccaggtatctcgctgcctttgctcccagggcctctgtctcccggagcctttgtggaatggaactctttcttccgtccttgtccctgctcattggtaccaatggctctgaggctgggcactttcccagaaaatgccccatgctgcacgacttctaatttgagctgcaactcagtcaggctgtaggagggactgggatgggggaggccctcggggaaagtgactggcttggcagggggatggcgtggcggcagaatctcctaggcctcctaggaaagaagggaggcagggctgctttgttgataagcagtccattggatcccggaaacttggactccagtagtgactttgccagggacgctcctcctgaccttgtgcgctttatattttgacgttctcttgtctgccacacggggtatttggagataagatgtggtgggactcttcaagttctaaagttctgaatcttccttgttgatattaagcgtctccttacattgcctcttgctctcccactacataaagtggtagtagagtaatcagagcagctgtcagtagtgtaaggagttagaggcgggccgcatgctgcataaggaatggcactggccgctgtgaagtttccttacagaagaaaacactggcagaccagggaatagtccagtggtagagcattaacttagcacacacaaaatcctggatttgatctaggatccagcactgcaagtaatgaataataaagcaatttggcctttcatccaaggtgggagcttatgccaacagatcagtcaaaagtgctgactagctttaaaaacaaacaaacttggggctggagaactggctcaccggttaaagacattggctgttaatccagattcaggccctggcactgcatagtggctcacaactggctgt

SEQ ID NO: 19942 - DNA, 1241 bp, Mus musculus
aacagcgtaacttgtattctgctttgactgtagagaattcagagtttacttgtagtagacaatactggtaagagacccgaacatagccagtgaggtcaaagagaagttttttcctctggcaaagtcttcaaaaccctagagcctcttcactatctaagcagctaaattcaggtttatgtccatagcctgttgacagatcagtagatctaacagttgttttgttgtgttgattttgtcaaagtattagaaaaacgtatagcaagattggttacctctgagaggtgaaaataggcaggaagcaagagagcaatcacacctttgggaagcctgaggtcctaggttccattagcaggaccaaggtaaaatgctcactcagtgtctctgtggagcttagtgggagggaaatcactcaacatgtgtggagccctgggttcagagccaggcatactaccaacaaacaacaaacaaaccagaaatgcacgtttaatgtcttgttgcttttgctataggaatatccaacccttacaaccttctttgaaggagaaataataagcaaaaaacaccctttcttaactcggaagtgggacgcagatgaagacgtggatcggaaacactgggtgagtaaggctgtgtgctctgccctggcagtagaagacatctggagatggcaggcctgaaccccgggccttgtccccaggaggagttactcagaacttattcctacacaagccatagttgctccaggtctagcaacccttttcttaacttatcaggtaataagaacaatccttcagttcctcacagttttgtgtggctgttagaacccaggcaatctcccctgttctgcccatcttttatctactgttcctttctagtcagctctgtatagtggaaccccatggagcaggtagcagttgcccctcgtgtctggatggtctgcagtagagctgtggttgatgaacccctgcaaaggcaaagtgtgttgcatctttctgttcatcccagtagactgagggtaggccttacctattccatccagaccctcctgagaaattcagattcctgtcctgagtgctccatgtgcagtttcctcattctcaacactgagtatgtcaaaataactcagttactgccctggggtcttttccctggtttatgttttggtctttacccaagtcttacatcttcacagtttcggtttttttgtcctgtcacaccagcctttgacttagattgtgggg

SEQ ID NO: 19943 - DNA, 1239 bp, Mus musculus
caaaaaaaaaaaaaaaagaaagaaagaaaagaaaaaaggaaagtcacatactcccttgtccaacaccattttgttttgtaagctatgtattctaggctggcgttgaatccctgtgtagctgaacataacactgtgctcttgatcctcctatctccagccttcccagtgctgggacttaccttgacagtcctcgcccatccgtatttttgttttgttgtgtttgagacagggtctcattatgtagttctggctggcctggaactatgtagacaaggtaggccttgaactcagagagatctctacttcctgaggtttgggattaaaggtgtgtgccaccatgcccagcgccactctatatttctttgctgaagtcccactagtccatttttactttatatgttctgatggggtactctagaactgtgcccattctcaccctttagaccttatccactggctgtgtttactgggcacacaatcaagtagctctttgtccatctagctgtcctctcatgagctcagacacccacctttccttgtatggatcactgagactcttctttctgttgtttttagggcaagtttctggctttttatcagtatgcaaaatcatttaattcagacgactttgattatgaagaactgaaaaatggggattatgtcttcatgaggtggaaggtaagattctgcccaggccatctcccgaaacacccatatgccagattctagagcacccacacacacttcttcttgcaggttatgccctccccacagggaccctccatgctggttgcttaatgccgtgtcttcatgacagggtacctacatacttgtaagcaccagtggtgtggtagctgcagagcacaccttagtaaactggttatgctgtttagtgggcagcaggcatatttatgccagtaggcaccgctgaccagtatcctcttttttcacccaagaatcctgtgagcctccaggctgagtcatccaagtgttctggggactcagggaaactgcttgaacctagtcatcactgcgtcctgttcctgccaggagcttaaatgtcatcagaatgactgctctccaaccacatcctctaccaagggcttctgcttcccacagctcaggaaatgaggagccaggagtggagcatgagcccttgactccctctagggtttcaatggattggtctttgcctgagagtcctatgcctctcgtggcaatatgctgtctacaaccaca

SEQ ID NO: 19944 - DNA, 3741 bp, Mus musculus
tctatctatctcatgcatgcacaaaataaaaagaaaacaaaaatttagcaaaattgaggtttgatgccacatatgtttaatcctagcactgaggtgtcagaagtagatggatcacagtgagtctgaggccagcctggtctacatggggaattccaggccagctacagctacatagtaggaccgtccctttatgtaactggaaatggtttagcacctcaatctgaatataattggcggggactctaggtagagttctccagttgcctttgttcaggattcctaagaaaactcttctattctgtctctcctctattacaggtatcagtccctcaacctgacccatgttcctgaacacagtgcacccatctatgagttccggtgacagaggttcagaacagtggccaaataaaactgaacttggcaacaaagagctttgcgaggaaattatgtacctgccagaaccaggagaggtgtgttcctgtttgttcacgagcagacttcatcagaaagcatgaatgttaacctacaggatccaaggagcatggccaacctgcaggcaggcagagggagctgttcacctcccaccctccttcctctcagtggcattgtggtcaccatctgtttctgaacaaccttaaatgcactttccttcctgcacagctaacttctgcatcactgaaatgccatctttcctcggcctgcctctagccaagtggaaggtcagctcctgggtcaccttagccttggtgctcagtggtctccacccaggccctactccttcctcagttgcttgtttggtagcccaaggaaagggagagcccagcatcttgtgccccagagctctatgtgagttgcctgggcccagcatataccaccaatgagatgagatggggtccctggtgggcctcattgacctttgattccagttgatgtcttgtagggccctgtgtgttaacaatgcaagactagcacatggctgtcgggttttctgggcctgctgttggggatcactaaatttaaggcttccagatccctggtaggagtagatcccaaactgctttctcagtacatttgctccaaacttctgaacttgagggcaatactaaataaaagagttttttattacaaaattattatttttatggtacctttaacaaggaccctatggcaaatgcacaattattccgaattacatttatcgttttcacattgaaaacagcaaatgttgacgtagtgacttttatatctatgtctatatgtatatttaatcaaccagcagttttgaaacaggtcatcctggtacagaagttttgcagcattgcttaaatcacagtgctaaacacaggaactgtttccgggccggctgagcatttgcgcctcctccttttgctactcaaaacatcagtgtgtcatgacaaccttttccaaaggcagagggggcccccattctccggaaaggatgactgaaatgttgtcatggcgtgggcaggaagaaatgcactcaaataactcgaggctcatgtgccaaagtgtgagagaggggagtggtttggtttggtttggtttggtttttctaaatgtttaaaaagcttaatagattggcatcagttgtagtccacaatattgtcaggactttggggaattctggtggtttacaggtccaaacacaaggggaaaagctttaaaataaatacagcatcagggctgggagtgcagctgaccaagcactagcttgtcacatatgaggaaggacctggcttccatttccagtgctggaaaaagggaacaccaaggggtagcaggttggctgctgttgtattgtgctgtgtgttactaatactgaatatctgggaaccttaagagagcagaagtggggaaagaaaccagcaggtacttggcaatatccatagccccaaaacttacccagtcagtaaagctggggctcagaaaccataacaatacatcatcccaagacttaggtagaagaaaagaatccacatccatcgctagggctgaatcagtggttccttacccttgagaagcagcctgggtacggcagtgcacctcgaggcccagctgctcagaagcctgagcccaggagaaagggtcagtctaaggtgaacctaaacttcatctgacatcaaaactcaactgaatatgagatggccggctctggtcagaagcacctggcttacaccacaggccaccatcgcttcacttaagctgaggggcagcactggagagtgaaggaggcagaaagactgactgctggcttttccctgcagcacctgctcctctggctttccaccatgctattgaaccattgtgtgctgggcaggtatcattcagcagtggatggagtcaccctgaagctagggctcgtgtgtagctctagtagcacgtcagtgaacagcctctcctctaaactgggcaggccaggtcggagcataggggttccccctacaccccccttttgttcctttgatctctttgtcttcagggtctcactttgtaactctagctggcctggagctcactttgtagatcaggctgaccttgaactcactgagatccacctgactactcagagcgagtactaggactaaaggtgtgagccaccacaccctgctttttttttttttttttttcttagctagggaagtgttccagctctacttagaaagatgagggaaggatgcctttagcagacagacttcagacctacctgaagacttgctgcttagaagtctgcccctgaacactgggcaggaataaacatgttccacttcttagtaactcctagctggtggacagtgacttcttttccttttctgtccctggaggacctctgggacttgtctccattggtagctctttaaccagctgctcagtggcttgcatgcctctggtcctgtgtgcaatatctttgcctggcacttgtatctaacattgaaaaataggtgcagactgcaaatgtcctactgttctctactccaacgagccaacccccaggcagggactagaggtctggctgctcttctcttaccctccactcagaaggctccactgctgtggccagctgtggccctctcgttccctgctttaccagtctacccacctatctcctttaagatggcctagcatgtcagctgcagtccaaaagtaagtagacaaagcctcatgttaagtagacagtcagggtggactggccctgttagcagtgttggagtcagattccagtggaacaaaggggtttctcaatgtcttttgctttcagaagcagggaattcatattccctttaaggccttgaatggattttttttcctcataaaatagtcactgataagctaatttttaaaaagaaatgccattacgtatgttacattgtggtttaaaattactaacaagttctgggaaagaaaatacttgattttgaatcttaaatgttttttaaaaattagatttgaatgggcgcaaagtacaaatattttgtttctttatggaagacctgtggaaagggtttgaagatttgcaatgggagaattattttgcagagctatcaatgtctaaataatttttgaaaaaaaaaaaccaataaaggtatttaagcagtgtgtgtccaatttgtaagtcaaaacattccactaggagaaatctgttcctttgtgactggagcaggaaccagcaggtcaagcctaggtttaatcaggtgaatggctgggccgtgtgctgcttcagca

SEQ ID NO: 19945 - DNA, 1574 bp, Mus musculus
gaggaggaagccccgctgtagctggtgctgcatgaccgaccgcggctgaggttcgaccccttcccggcccctctacgcctacccctttggtcccttgagccacgcatgggggcctggcactgaggaccctcgcttccctttcgggtccctttcgggtcccctgagagccatgccggaccgccgcggaggaccctagagttgagttggcgggggccatggcggccgccagcggctacaccgacctgcgggagaagctcaagtccatgacgtcccgggacaactacaaggcgggcagtcgggaggccgccgccgctgcggccgccgccgtggctgccgctgccgctgccgcggccgccgctgagccttacccggcgtccgggaccaccaagcggaaataccaggaggactcggaccccgagcgcagcgactacgaggagcatcagttgcagaaggaggaagaggcgcgcaaggtgaagagcggcatccggcagatccggctcttcagtcaggatgagtgctccaagatcgaggcccgcatcgatgaggtggtgtcccgcgccgagaagggcctgtacaacgagcacacggtggaccgggcccccctgcgcaacaagtacttcttcggcgagggctacacgtacggggcccagctgcagaagcgcgggccgggccaggagcgcctctacccgccgggcgacgtcgacgagatcccggactgggtgcatcagctggtgatccagaagctggtggagcaccgcgtcatccccgagggcttcgtcaacagcgcggtcatcaacgactaccagcccggcggctgcatcgtgtcccacgttgaccccatccacatcttcgagcgccccatcgtgtccgtgtctttcttcagcgactcggcactttgcttcggctgcaagttccagttcaagcccatccgggtgtcggaacctgtgctttctctgccggtgcgcagggggagcgtgactgtgctcaggtaacacacctgggaggaggggctggccctgcaccctgccgcctaaaagtgtccacccggttccggggaagccacagctggcgggagccggttcttattatggttctgactcgccttttttctttttgcgtgcaaaccataggaagcttgtgtctgaaactcatagcaggataagactaatgtggaattgtgtacctgcaggcaggtttgaagtggccatagtagcttatctgagaattcatctgaaagcatctttctgaagactagcataggagttcgagttctatgaatgtggtctccttgtcttgcattttgttttatcgttttgggggtggggatggggtgagggtctcaggtcgcccaggctagccttcaaccttctacacaaaggaggatgatcttgaatgtctgattctcctgtcttggcctcccaggtgctgagattacagatgtgcactggccagttttttttgttgttgttgttgttgttgttgttgttgttgtttttttttttttttttttttttttttggtggtgcctagagaatgaacacaaggcttcatgttttccttttggtttaaagcaa

SEQ ID NO: 19946 - DNA, 4893 bp, Mus musculus
gacagggactggcccctgtcacttagtgggcaggccccactgttatcagtgcatcttgattgagatctactgagtcaagcagcccaattcaaggatggggcttctgaagtcccctttagtgactgtaagactagaaccctccttctggcttctcaagtaacagcttgtccctcttgtttgcaggccccggatcctggaaatggacaaagaagaaaaccggcggtctgtgctcctgcccacacaccggcggagggggagttttagctctgagaactattggcgcaaatcctatgagtcctcggaagattgcccagaggcagccagcagccccacccgcaaggtgaagatgaggagacactgaggctctgtgccctcttgggactctggctaatcctgatgtagctaccccatcttctgttccgtttgagtgttttttttctttgttattttggtcctatatacgttttccttgctttgttgaccattaaggctaaagagcgaattggtaaaagacctgggttcttttgttcttggctttcctccttgatggaaaaagctgttggcttctgtagagaattgttcacaccagagtagccagtagagacaatggggacagctgtcttcaagtggaagtttattgaaacacacaaaatgttttggttatgaaattctagtttgggctttaaaatgtaaatctttgtagtgttttaaacaaaaactattcttttgccagccttttcttccactgatgctcatgcttggatgaggtctcttggagccatacaggtcctgcattgggtctgctgtgcccatacatctcacctgctgtccaggctctggaatctcatgcaaataccctgttccccactgttcaagtttgctgcgtatggggcttaaacagtgccatccccccgccatcccatttctgagtccccaggttttctgcatgccctctggcttgctctgcccaccaatcctggatggtcaaggaactagcacaatggttctgacctcttttgctaagagcatgcctgtttgctgggttgctcctgttaggcatatgtgtgtgattgtatggaactgttagacttgctgcagtgggtcatttgtaggaattgtttctagctagaggaactgattggcttccaatctagcatttgggttatgggaacttggggtgtgtggtagggcttcatttcttttgttctgaggtgtttctcctccctttagtctctttctcctcatttgaccatcttgggcctcttttcccatatcatctccctaagaagatgtgcctgctctgtccacatatagcatatatccaaggccagaagtcagacctgcatattggattaatactttctcagtcttggggccgggcctgggggctgggaaaggaacttctaaaaataatagaaaaaaaaatacaaaggtaaagtctttgagagtttctgcctatttagatcctggaaggtggggttcattaggattgactttggcagccaggccaggactgagcctgctgaaaacagaggccttctaagcagccatgccaccaccactctaagtacacaaaggtctggctctcgggcctcagtggctgcagaggtgtgggagcacccagtcatcaggaagtctctttggggtcagatcctttgccagtgtggagccctcaagttgagactgcataactaaagcagtcacagatcttctgtggtttggggtttttgttttgttttgttttcttgttttttactgctcttttccaaaaaatgatttgtagttgtgtgtgcagcactttgccctaatatgtgtgtgctctacaataaaaaccaaatctaatatattttgaaacagttgtctgatgctgtggtgagagaaagcctgactttggtttttcccttaatttattttcttgaccttccaactggatttggagaaagctaatttattgcccaccagtcctctgaagattggtcactgacaccccttgattgatggctaaaggtggacttgtgtttgcccactgccctctccccttcaaggagggtggccagggatacacctcatggaattctagaagatacagtctctccctggcttggtagagaagctgcaggccagtacaaacacaggtggagctggagcagggacagaggagctcaggtagaggacgtggccattcttgtactcagcagctaggctcttggcctccctgggtgtagaacattggtagataaagcaggtaggataggatgagattgggactcagtgggctcctccagtccactggggtccctaatgtggatcccagggtattgccaactgtcagcagctctccagctctgctccagtgatctgagccaatttgctcaaattgccactgtgaatcttggtcaagccatttcattgcccatagaatgactggccaacagtttgaaaagcagtggtaggtctagaagggtcagggcctctgtatgaactgtgcagtggactgggatgacactagaactgagaggaagcaccaaatgtcatcccagctgtgatgttgcagaagggcagatcccaatccatgcttgggtggctcttcctagggacaagggatggaagagattttgataccagtgatctaggcttcagtctgtcctgggatagtgcccccagtccttatgaagtaatagccttaagcaagtctctcagagtcccacacctgactctgaatctttcttgttctagccatggcactgggcctagagctttgtttggcccctgactcagtcttcatgtttataaagtagttttctaacagcaactggatgtaccagccctacccacctaagatctcattccattcctttaaccttgttgtgtgaagagtgttctgtaggccaggctcaggatgggaaacagacctgtatatgacatgcttacatgcatgtaaaggtgttctataatgtataggaaggcagtagagcccattaactgtaagtgtaaataacatgtacagtgtgcttgtaaatctctgtagttagttgttgcccacagaacattttaattggctttctgtttaagtgtggaattcattatctacctgtggttataattcacacaccatgtgagggagatgcattttaccagtttctcttagttttctatggctgccaaaacattaccacaaacttgagagcttaaagcaaaagaaatttgctaggtatggtggtgcgtgcctctaattccagcacaggctgaggcagaaggatcaaaagtttaaggcctgcctgggccttgtctcaaaaagcaaagcagccaggcatggtgcttgtctgtaatgccagcaggagtgtcgcaggtttgaggccagtttagtctacatagggagcttgaggacagcctaggctacattgtgagaccctgtctcaacaacaaagatatagactgttttgtgctctccttaagactttggtaggaagcctattcctgcctcttgcggcttggtatggctctaaccactctagttgcaagtactctagattcatagtcacatggcctctttttgtatgctacatttcagtgcctctctgcaccccaccgtgtgtgtgtgtgtgtgtgtgtgtgtgtgtgtgtgtgtgtgtgtgtgtgtgtgtgtgtatagaaaggatagaaagggtctcactctagctcaggccatccttgaaatagcaatcttgccactgcatccagccttttctgtctgtcttagttgggcatttgtctttggatatagggactcccatatactccacagctgcatagctccacttcctttttttttttttttttttttttttttttttttttttttttgacagtgctagggatggaacccagcgcctctccagtgttaagcaaggactctaccactgatccacaccctaactcccacctactccttataaaaataaagtatatgccttccagaaactagaacctgagaaccttgggggccgacatgcagcttacgatgctgctctttcttcagaaattgttactaaatctgtggcctattgattcctcaaagaaattgtattaatttcgattgaaatttcttagcctcagcactattttaaaatttaatctggatgatgataattactccattgcttgcttgtatttttttctgtagtgctggggattaggtgagggccttgtgcattctaggccttgtaaatgttacctatgccccagcagctcattgctttcttaagtttaaacctatgctgtccaatctggaaccactggactccggcttttgagcacttgaaatatggctagtttcaattgagatatgctttatacaccagaatttgaagttagtattaaaaagaatgtaaaatatataattgataactttatattgattacatgttgaaatactattttggacatactgagttaaataaaatacattatttaaattaatttcacctgtttgagttttttttttttttttttttttttttaacttgactgtggtctgtctggtgtgggctcatgcacatgcaggcaggtgcctgaggacccagaagagagaatagcaccccagggagctaggattaacagactaagctgtcccatgtggttgctggagatcattaaaactcttgtttctgtttggaatctggcttttcagttattgtttgtctgctgggaatcgcataggattggatagatagcttacctaacgtgtgttcaatcccagcaccatccacacagacaacgcagaccctaggtaacaataaatacactggtaatgcccgcactgggaaaacatgcagaagagcacgggttctgggtgaaaagaacagtaaatgcggtgaacaacaaaaagccttactttggaatatcagtaccttt

SEQ ID NO: 19947 - DNA, 1623 bp, Mus musculus
gggatgtcaccgtggaatatgtgaaggattttctggggtgaggccagctgctctcccaagccgccatccccagggcaactaggggtcttcttaccccagcccttctgattactgccctccccagctctcctgaggactctgagaagaacctgcggaacctggaggcagatgatgcttgtcgggcctacacccttctgattaaatgaggtgctgtggggcagcctggccttaccacacagcagctgccatccctcactccagctggaaccctgcaggcttctctaatggtgtcattcctcgaagcctagctgccttcctctggctgtcaggcataggggatccacagtcatgaaagggcctggcctggcagcactgaaatcctgtgcatttagaaggccacctctgaccctgtgggtgtaggagttgatgcttatccagtccacagagcccatttcacaggagagtcactgaggctgataggtcctgcctattgagccagcacatggaccttatgtgcccctaccgtatcttgctatggacccagcctagctggagactggagctctctggaccttagtagctagtgcctctgcagcctacattgggcatagataactaaccataccctcttctacttggtaccctcctagctccccagcaagcccatcttgggccatcactgaaaggggctgcctaccccgcaggcaggcatgacctgggtttgctccccttagtcgtcaccatctgtcggtcttgccttgccccttaacacggacccgctgactgatgctgggccctgaacacatcccagcctcaagctcagccggaggggtgcgagcatccttttgcactccatactgtacttcctttctcctcaagcagagtatttttctaacgcctggactgagctggccagtcatttctaaagcagttttggtacttgctcctggcctgtgtgtattgtgtgctcctgtgactagagactgctgggcgtcatgactgaagtcagtcagaggtgtgtgtgtgcgtgtgtgtgcacgtgtgtgtgcggcagtgaggatgggcttccctgtagatgccaccttcggcttttctgtctttttttaaaaactagttgttttaatattaaaagtactgattttttaatattgaaaataaaagcatttaatatcttttaaactacatctgcacacatgtggacacactggtggggcttggggctgtgtgctgcttgcaggctgtggctagctgaagcaggtacgaggagtcctcctcttcctcactggagtctgaggtcataggtactgcttaggctggggcttggcggaacgtgctccaggcgtggaagcagcgggtgaaggcgcgctgctcattacctttgcggaccaggcgcaggcgacgtggccgctcatgttctttagagcgtgtgtgctggatgtatacctggtaagaaaaacaatgggcctgggtagtcctctaaggcctgctggactgaccactgtgccccttcctcaacgtctatccaggatgagggagggacaagtggctcctgaaaccgtcaggctggcttcagtaatctcttacctggcaagccttcagactcagtttgatctccacttggct

SEQ ID NO: 19948 - DNA, 1631 bp, Mus musculus
ggctgctgctgcagctggtgagtggaatgcgctctcgcccaggagcaagggcacttctctgcttccccctctgcacactgggtaccagggtggggttgccctcgggctgtatgtccagtagccaacccagtggctcagatgattgcattccctgaagtagggagcgggtccaaggaccccttggctcgcaagatgcggctacggaggcgcaaggactcagcacaggatgtccaggccaagcaagtgctaaagggcatgtcagatgttgcccaggagaaaaacaaaaaccaagaggtaagtcaggtcagggctgggctggactctcagaaggaagaggggccctgagcagagaatggctaatgcaaaggccctgtggtgagggcaggaagaggccagtcttagtgtctcagtagagtcactgctcctctgtccccaggaaagcatagatgcccgggcaccagggggaaaggtacgacgctgggaccagggcctggagaagccacgccttgactactcggagttctttacggaggatgtgggccagctgcctggtttgaccatctggcaaattgagaactttgtgcctgttctggtggaagaagccttccatggcaagttctacgaggctgactgctacattgtgctcaaggtggggctggctcctagtgttctgcatggtgtgacgcagtgaggctgggggatgggagttgatgcagctgtggctgtgcatgtagcctggaaggccagcaaagccctcatggctgattacttggtctcctcagaccttcctggatgacagcggctccctgaactgggagatctactactggattggtggggaggccacacttgacaagaaagcctgttccgccattcatgcagtcaatctgcgcaactacctgggtgctgagtgccgtactgttcgagaggagatgggtgacgagagtgaggagttcctgcaggtgcagccagagatacacacagaagggaactcgggccacatgtacagaggtggggcagggggctaaggccaaaggtagtataacaagagacctcagacagcaaggtgaggtctggagagcctaaggtggtcagagctgagcgggagggagtggcaggttgctttaaaggagatagacaggttaaggaatgtagctgtgagatagggctgggaccaatagctgttagagtaattactggctcggggttataggcagagccaaacctaaaaataaaccacaaaaccagtcggcaaactgacttacctctgctaccagctgggctccctttagagagatagcaggcagctggagcgtttactttaggcctcccccccaccccccaggtttgcaagcttccataaacactgtccagactgtccttcatttgggacagttttgtgcagccctgtgctccagtatatacctcatcctgtttagaataactgtaggtttgcacacacgcttcagctgtataaactaccaagtctggcaggtacttggtggaggagggaacaactcaatgatgaaccatcctcacacacataggtgtttgacaatgacatctcctacattgaaggcggaacagccagtggcttctatactgtggaagatacacactatgttaccagg

SEQ ID NO: 19949 - DNA, 1207 bp, Mus musculus
ctttattttagccagagtggagggggagtgacatcacctaagcccacacgtgggcatgtgcctgggtgatggtgatcaagagtctcaaacccagagactctgggttgctgacatctgagtgtggctggcctcccctggctgaccgctttcagtgccagccacattaatggcccttagccgtctggggttcatttagggacttgggctcaggccaccatcaccagcaatgaactcacaaagaataagatgtggcttttgatttcctaggcttcacctaggccaagactgttttttttgtttttttgtttttttttttttttcaaaaaaaagaaaatgttcttgggtgggtaacagccccaggtctcctggaggcactccgagggggtcagctggaggacagctgcttagctgctgaaggacagtggcttcctgatggtggtgcatttgtttttctgattgggtcctcaggccttgaagctgaagttgactccctcgagggctccctgccttataccccagggaaggaaggtctcgttctcttctgcttggttttctctatgggccacgaattacctctgggagaacaacttcctcactggggggctgaactctgtgctgtctatgcaaggcaatcccatagaggctgctcctagacctcactgcagggtagaggatacgctcctctcagaggcctgtgtgcagacctgtcctctgcagcgtgccaaaatattcatgatagatgtgtgtcctcaccttgcaccctggtccaggtggcatggctggaggagggagactgtctcccctacaaggggggctttctattttaggtaccacccccttaaacacactgaaacaaagccatgccttgaagatgtgaataaaaggagaaagaactgtgtatatgtgtaattcttgctggcaggagatggtcttggttgtaggtcattgcttggagcttcacacgtcttgtggctggatgtgaggtttgagagtcctcttggaaatgtaaaataatattttcaagctgatgagatgactgtaccctcatctgcttccagctataaacagggccgagacctcctgccattcgcacttgggaaaacagttgttgggtctcagcctgagaggccatcatgtgtagcctcagtaacaactgaggcctcacctaccatacaccagccaattgagggacactgcccagtctttt

SEQ ID NO: 19950 - DNA, 1170 bp, Mus musculus
gtgtcaatcgaagagaaaggtttgaacattagagagcctcaaaggatgtttccagtgtcgaggagaaatttttgagagttgagtcgtgttctccaagtgtgggtctcagattttagcatcattctcttgtcaggctacttgttaaagacacagattttagttaggggtggtagtacgtgtctgtgatcctagctattaagaagctgatgctagaatttgaggctagcctggcctacatacaaagctcttgtctggaaaaaatatactatctcagcatggtgctctgaaccagctaacttcctggacaaggatcagctgcgcattatcttgtaccactcactggcttccttcggaagctagagttatggaagctggtgatcgcagcattgggaatgtagaggcaggagtgtcacgaattcaaggacagcctggactatatgaggctatgtctcaaaccaaaggaaaatatattatttatgtttttgtagttttttgagacaagattttgctatgtagccctggctggtctggaactcacatggatgaggctgacctggaccacagatctttacagagatctcacagcgatcttcctgtctctgcctttcacacaccttgtgctcctgttcgtttccttcttttggttgtttttggtttgttttgatttgatttaaaatactttctacataacaactccactacttgagatccacctggcagacccaggaaccctcccttgggcagtgtctccctcgtgacttgatgtctgtagctgaagagacagggccacacccgcctgaagatgaattaggagcttgtgttgttctctgactcacaagaagcttcatccttctgtctctgttgacaggagctagagaaactggcatctcggaaattgagaataaatgccaaagaaaccatgaggatcgcggaaaagctctatacacaagggtaaatataagagctcacagagcaatctgaaccactccctcccctgtcctccctgctaggagcgcagtccaaggcttgcacacagtaggcttgcacacagtagcacactaccattgtgctaaaccctactcttgactgctcagcaattctcccgcaggcagcacatttagggtttttgttgcctgtcggaatcctacgtctgtggtcagtgagtaccta

SEQ ID NO: 19951 - DNA, 3523 bp, Mus musculus
cctggtcccctggtggccatcatcatgacctccctgggattcctgttgcagctgctcgtgtgcatggaatgcttcttgtaatcttgaaaatgtgagaccttttaaaaaaaactttcctccctaaacaagagaggagttctggttggtactgctgcttttaaatttgctccaaaaagctgcagtaaattagacctggatcagcagcctggtgtatgcatcagttagatgctgtgtccctgccctcaggtctgtcagcaggtcacactactgaggtctcagaaggaacctgtggaagccaagtaaccaaagatggctggcagcatgtcactcttgggtcacattccttgcctaggactttgacacaaagttgcagcctgttggtcctggtcaagagggtatgggattttgcttctgagcctgtgacaaaaccagaaagatggcactgccttcactagtttgtgtctgttacatgcattacagacacctttgtggctgtagtttctcctcatgggctccctcatctgctattgcttcttagtgttctagatgctaccgttgactggttggctaagttccctttcctcaggtctccaaggatgaatgtgctagagtttaagagccaggtagggaggtgatcagttgctgggactactgcctaacatggtgaatactgtgtgcccctgtattgagaaaggcagcagccatgcctggccttctggatactgaaagtatacacacacacatcttggcattcagccacagagtggctcagaagacaaagtcaagactggtggggagtgggcagaacagttttgtgtggcagaaatggtgaacaggttcctctcttgaatggctccttactaagactgacaagggtttgaactccatttacagttttgggtttttttttttaaacaggatctcatataaccctgaactcttgacccttctgccttgacattgcaactgctagaattatagttgtttgccactagaaccagtgtctagatttagactttggttttaaaattttgttgtgttgatttaaaaggattaattaatgctgaaaccatgcttccccttagaggttaccaatccttggggctgagttcagatagaggcagttaattctctgttcctttgttttagaggactggaatcttctaaaagtagtacatgtgtacaccttgatgttgtagagacttatgcagcaggactcaagttttcagttggtcatggggcatagtggcacacacctttaatcccagtacttaagagaagaggcaggtagatgtctgcaaccttgaggccaccctgatctgcatgatgaacctcaggccagccaagactatgatactgtctcaaaaaagaagcttccatttgaagtgtttctcaagtacgaggctagtaaagatttttgttgttctgttgagacagtctcatatagcccaagccgacactgaactctgtgtgtagctaaggatggctttgaacttctgatcctcctgcctccacgtgctgaggttgcatgcctgccatgagttttacagatcaatccagggcttcatacacactaggcagacactaaaccacctgagctctatccctagcctggctaatttagtaaaataactattaaggctaccccacagatgacagagctcctcactactatcattttgagccctggcactaaaactggtaagctgttggtttaaactggactgccaagcagttgttactgcagtagctaaagttgctctgaaatttggaactggactgtggttgtgacctgtccatcctgatctggcctttgtttttagatcaggtacaatatttaaaatacaaatgatttcaactttatctaaattagttaccatttcataaccctggaaggccaggagacctcccttctcctttgccaagaatcaaagccagcagttgagctctgtggtcctggaggcatagcttctagaacatcttgtatgcatcttggccatccatctgctacgttaagtccatgccattcccccagcctgaatattgcatattggaccagtgtcctgtgccaccgccatggtttgtctgagatagttgggtggtgttagctctcctaatgatggatgatgtatcagacattcgaggcctttggaggaatcaaatcctcatggcagtgaggccatccaagctactttttacttccctagaaagctcttaagaaagtgccttggcttgaactttaaaactaagccagctttctggcttcactctaacactgttatcaaactggaatctttaagggaggcattgcagaaaggagagggaattgggtttcttttgctcagaaagcaaagcttcccttgagtttaacatactgtttctctaagtccttggcccactaagatctggttctgttaaagctttgggaaggaagaaagaggaacaaagatgtagcagtggaaaaagagcatctcacagggccctaactggggccagctgtctttaggtaggcaggaagcacagtggccccacagagatgaggggaccaatatcctaaccacaccacaagcaaactgacaccatggcaacagtaataacaatgggccagctcccagggagccctggccaaattctcttatgctggacagctggagctacaagctggacagagcacacagcagttgcagtacagacagtctgttaacttgttttctaagaagctattttattactgcatgttcccaccgtctgtaaatctgtcccagccgtgctgcagtcacagtactggaactagagcactgcggatgtgatcatgtcccacaggcattgtgcgcaaaagcttagaataaatgccaaataaataatatgaggagtgtactttttaagatattaatttatttgagttcagatatttttaaaatataaaaactggttgtattttttaaaaatataattcttgtagacattctgtgggtaaaaatttgattgtccatattaaaaagttactgatggtttgcaattcagcaatgtacaaataaagactctttcagaaggtggcatctgggttcctaattgtaggaaggagctgcttatctcaggcaggtggaatataaagcctttggcctctgctgattcttaaaccaggaggggattcatacccatggagacagccaattgtacaagacttttttgtctttgtgtcctaggcatgaacccagggcgtcacaaatacggaatatgtatattatctctaagtgacactccctagcccttctattacattaagttgctgactgtaattttttttctttaaaacaaaattctctgtgtatcaccattctgcctgatgtatgcctgtacttcatgtgtgcccggtgtcctcagaacccagaagagggcattgattctctggaactgaagttacaggtggttgtgattcaccatgcgactgagaatcaagccgaggtcctaagccaagtgcagagacgtcatcccagccctaacactaacttcttgcttatac

SEQ ID NO: 19952 - DNA, 2393 bp, Mus musculus
gcctgaaactcccagctggcctcaaatccacttgcctctgcctgcctagtgctgggattgattaaaatcatgtgataccacgcctgtcccagaggagcctcttaaaatcggcttcagaagggcctgagaatgtggctcagtggtagaacatttacctaggtcatttgttaacagaataggaaaaactgagtgctcttccacctgtgtgggcctctgtcatgtcatggtccaggcagtctgagctccagaagctgctggatgcttaaagaagccaagggatttgtagaccagagtggctttgttgtcctatccccagctctgaccaatggctgggtcttaggtactaaacacaggtatacatgcctttgtttacaccctctgctgtttataagagctcctgccctcttccaggttagatttggaacatgtctgctgacctctcttcatagcagcaggttctttccctgtgtggccaacctccagtactccattctgttcatctgtttccaggtggctctgataatcacttgatcctaatggatctgcgttctaagggtactgatggtggaagggctgagaaggtactagaagcctgttctatcgcctgcaacaagaatacctgcccaggtgagactcctccgtgcttttcccttccacagtcatcctgtctgcatttctgttagccactgttggagttgatgaaagtattcagcttaggagacagacagacagaccatggtaggggaagaacagaaaaggctattgagtggcactgctggtaagagaggcagaggctctttaaaaacaagtagcatttcttatatcaggccctgacagatgttaggacgctgaagaacccagggccacaccacaaaggactacttataggttaatacagtggcccatccacttctttatcctcaatccttagtttttaaggcagttgcctccttagtagatcaaactaggatccacagaccaggatctgtgaccaactgttcttttaaaatactgtgtgcatatggtggtgtattaggcacagctcagagctttgtctgtcttgaaggtgacaagagcgcgttacggcccagtggactgcgactggggactccagcattgacatcccgaggacttttggaagaagacttccaaaaagtagcacactttatccacaggggtaaggatgagatgttgcaagttcactatcttgcttaagtatgtatggagtttctgatgtgttttagtacctaagacccagccattggtcagagctgggggataggactacaaagccactctggtctacaaatccctcttttatgaggtttataaataatgtcactgccaagggacacatcccagaatcacctgaggggaccattgacacctatgagttatggcaggatatatgaaggatatgtgaaagaagtcccacatgacactgtcttttgcacagggatagagttgacactgcagattcagagccacatggccacgaaggccacactgaaagagttcaaagagaagctggcaggagatgagaagatccagagtgctgtggcaactctccgggaagaagtggagaactttgcttccaacttctcactacctggccttcctgacttctgacaggaacagcctgtgtttgccaagagggtaggattgttccgggaccctgtgaaccctgtgccctcttgaggctgagaagtggaccactgagctgtaccatgctttctttggtgggtgtttctgtttacctgttttcaaatattttgggaacaggttattaaggacttgaaatttgaaacgttatgtagccattagatctcctcgctcatgcatgtgaggcaaagctattaaagattccagaattgtcctttctgcttactcggtgggtcctgtagcaggtaagcaaatgttcacttcacccttgtgtttcccactcttccttttctgttgcccagataccagaggagcattgagttttctgtcttaagtttgaggttagaaactaggtaagtgtataagcaagaagttagtgttagggctgggatgacgtctctgcacttggcttaggacctcggcttgattctcagtcgcatggtgaatcacaaccacctgtaacttcagttccagagaatcaatgccctcttctgggttctgaggacaccgggcacacatgaagtacaggcatacatcaggcagaatggtgatacacagagaattttgttttaaagaaaaaaaattacagtcagcaacttaatgtaatagaagggctagggagtgtcacttagagataatatacatattccgtatttgtgacgccctgggttcatgcctaggacacaaagacaaaaaagtcttgtacaattggctgtctccatgggtatgaa

SEQ ID NO: 19953 - DNA, 1170 bp, Mus musculus
agggctagacagaaaaaccctgtctcaaaaaaccaaaaaaaaaaaaaaaaaaaaagatctatttatgtcaggcatggtagcacatacttttaatcctagaactctggaggcagatcccctggacacttgtgcattagttactggaaactgaacccgaaccaggctcgatccccaatcctatccaggtcttctggatcacaaaacactcctacaatcagcaatactgcccaaaagtcccaggtcccaaggtaaggaaccgcccagtcccctcctccttcccaccccctccagttcagagctctttttttttttttttttttccgtcaggctttgccctgctctgagcgcgggcgaatcgcgcgtgggcagctgggggcgggctctacctggatgctcccactgattgggccgctgtaggggcggggcgggaccaggctgcgctggggagagtttagtggagctccggcctctgcgcgccaagtttgggtttcccccggacgtggtgtgtcacgtggtggggaggctggttcccggagcacgtgctgggctgttaggacagcccgctgcggggttccggctggaggtgttgctgtggtcactttccgcgcgctctccaggaattcggcgatccacttgcctctgcctccctagtgctgggattaaaggcgtgcgccaccacaacgcgtttagtccctttcataaagaccggaggaacagacgtttacggccagctcccgaaaccaagtgaactggaggccaccctgcaccaagggttggaaccttttcacaaaatccacgctcctaatacaaggtatgtaatttctaatctttgcgattgtttctttttgttttgtttgaggtgtgagtgtcacacatgctgtcctcgaacttgatgtgtagccaaggatgaccttgaacttctaatggttctgcctccacctcaccagtaagagctatcgctctcggttcatgtggtgctgggatggaaccccttggtttatacatgttaacgaagcttccgaggtttgtctgtaatcactgcttttgatttactagtacaaccctgattatctgcagtgcgttactctatctaggggacaggttggcttgtagcgttcttagcccagtgcctctatttcaaggtctggaagttaggtgacctttggttag

SEQ ID NO: 19954 - DNA, 1577 bp, Mus musculus
agtttgggatgggggctggagagatggctcagtggttaagagcactgactgctcttccaaagtcctgagtttcaattcccagcaaccacatggtggctcacacccatctgtaatgggatttgatgccctcttctggtgtgtctgaaggcagctatagtgtacctatatacataaaataatctttaaaaagaagaaggagaagaagaagaagaagaagaagaagaagaaggagaagaagaagaagaagaagaagaagaagaagaagaagaagaagaagaagaagaagaagaagaagaagaagaagaaggagaagaagaagaaatagagaaatagtagaatagtttgggacggtaaacattgtcccctaaacttggaagttacacaaaaatcccagacccaagcacctggaacctcaacccggatgtctcctcctatgtatacttctgtgcaaaggagactgtgcatggggtggagtttgacttcatacctgacgtcaagggagcagtgctggtctgtgtgacatgtcctcaaacttctcatccaagccagtgggtgtttccaagtttggtgtgattttcgctggtgctcagaagaatgttggctctgccggggtgacagtggtgattgtctgggatgacctgctgggactctccctcagagagtgcccttcagtccatgactacaaagtacaggctgggaacaactctttgtataacacacctccgtgtttcagcatctgcgtcatgggcatggtcctggaatggatcaagaacaatggtggggcagcagccatggagaagctcagctgcatcaaatcccaaatgatttatgaaatcattgataattcttagggattttatgtatgtccagtggaacgccagaatagaagcaggatgaacataacatttctcattggcaacaccaaaggagatgaaacgatttcttgatcaggcagtagaactcaacatgatctccttgaagggcacaggtcagtgggaggcatccgtgcctctctgtataacgctgtcacaaccgaagacggtgagaagctggctgcctccatgaagaattttttggagatgcatcagctgtgaacatgaccagccacgctctgcctgtgagcagcacacagcatttagagtaacttgggattgactacagaaacttaacagacacggatttttttccaaatacatgcttattacagattcctttctcaaagaataatgactaaacattggggcccttcagagctgaggaaactcccagctaatggccaccttcattctcaagtgacctggtaacattttgaaagcttttctgttgctcttctaatgaattcagcctgtcggccatctttgctgcccccttctctaggtggattgaaggacttgcttggactttctcctgctggttccaactggttattattaggagcatagcacaaggaggttgagaggccctatgggctggatcgacagcagtgagtttgctgggttctgcagctgttggttaaagtcaacagcgactctcgagcgttttggatctgtatactgctattcccataaagagatagg

SEQ ID NO: 19955 - DNA, 1111 bp, Mus musculus
ttacgtcatcagctggcatgagaagcaaaggtcatggccagagtgtctgagtatgcaggtcacatgaatccttggtcccctcacttttagagtgaggcctcagtagctcttaagttgcctatcagtgtctccccaaaccagcctcaacggtttgatgttctctcctgggatgactgagtgtgctgttgcatggcttatcattttattcagtggagagggaagaatggtagctggacgtgacccttctcaaagtgccagccaacgggtgtcagggtagggggcagtatgcgtatggctgttcactaggaacatgctgggggctttgtaactttatgccaccagggactaggctgcagccctgggatagttattgctggcaatgactgattcccccctggcaatgtgatctactatgaacactaaagggtccttcctcctccctggcaggagggtagatggtatctgtggaagatgagaggtcacccatgatctgtatccacatttcacccacagttcttgagccatctaggacaaggtgtgggccatggtaaataagtcacccggtctggtcacatactcaccttctttctcccaaggaacttaaaagcctacaacactgaccttaggctattgcagcgatttttaagcacctatcatggtctagagagaagtacaaggcattggagagatggctcagtggttagagagtcctggctgctcttgtaggggatgcagattcaattcccagcactcacatggcagtttagaactgcctatgacttcagtcctagaaaatctgatgccctctcctggcctccacgggcatcagacatgtcacatggtaatagcaggcatgtacacagacagaacccatacatataaaacaggaaaaggggaaagtatccttatttgcaaatgattcttctacatgactagacttcaccagaaaaataaaacttgacattctcagcaaggggacgggataaagaccttgacaaagaaaactttagaacattcaagaaagacaccaaagacactcgaagatgggaagacctccattcttaggggctggaagaattaatattgtgaaaatagcaatcttgggatgggt

SEQ ID NO: 19956 - DNA, 1181 bp, Mus musculus
cctgcctcttcaccccattggcactgcccctggattactcccactacatctccctgcccgctggtgtgctgagcctggcctgctgtaccctctatgggatctcctggcagtttgacccttgctgcaagtaccaggtggagtatgatgcctataaactgtcccgcctgcctctgcacacgctcacctcctccacaccagtggtgctggttcggaaggacgacctgcacagaaagagactgcacaacacaatagccctggctgccctggtgtactgtgtaaagaaggtttatgagctctacgccgtatgactgcaggagagggggacgagaagcagaaccacgaggcccacaggactcagatcccgacagcagcactgggttttctctgtgaagcagcagcgcctgggaaagtgtttggtttaatacttgttatttttttaagcaaaaataacagatcatgggtgtgccaggggtttcttcagctcattacactaagatgtctatttccataacccaggagtggctcccaggctgtggaagtctgactgagcagtggagtatggataggagccaatgctactttctgaggggtgtgaacttgctgtgggggtgtcttaagtgtattgtttaactataccattcagaagccaaccggaagctattgaccattaaaattatgagaatttcaacttctgttctcttttctgcctgtacctgtagccgctgctgtgtgtgagatgggcaagtgctgcagacacaccctgctgtgcctccttgcagcagagtggctctagagctaacatcctgccagaaagaatgcataataggaatagctaccctggcttctggcctgctagtctagcccagtcatgttcccccttagccatgctgtttgttaccactggtgatgatgatgcactgtttaagatatagcaggataaggtggccttggtttccctgtggctcacctgggagcatcacacccagaagcccttctccaaagactgacagagagcacagaaatctctgctgttactatgtagccctgagttcatcccagtaccccaggctgtgggaggcgcctctgcccagggcaatgaatcttacaaggtttggttttgagaggactttcttgctgtactggaacttgctgtgtagaacaggcacaggcctggaactcag

SEQ ID NO: 19957 - DNA, 1864 bp, Mus musculus
atctggaccagaaagccatgcatcctggctgggaggtcttaagttcagaacccttgggcctcactcaccactgcagtcatgggcacagacccttatggtccccacactcagcatctccctacctcctgcacctctggctcttacccggttcttgatgctcctcttccagcctcctagagttctaggataacccagcatactcctcactactgcctccctcctctgccaccccattctgtctgacagggactcttcggggtccagagaaacccctgggcctctaggaagacattgctgactgctctgacagctgcggtggcagtgtgtccacaatacagtacttgaatgagggccctgagtcatgtggacccaagaagagtggctgggcttcctccgtgggcttgtctcaagttcctgcagggtggcctgagcattcctcactgccttggcagccttaaagtcccactgactgtgccccggaggcttcatagccttgcggtgtagcaataactatatctctgcctcttcctcctggccaatactgcccaactgggccactctggtgctatcccatctgcctccccctacccctcaacacctgttccacgtcctgagtcactccaagagcctggttaggcactggcactctagacatcatgttccttcaataggtctgtgcagtgctcagacctcaccctaggctttctcttccttgcccagtctacacaggcagtaactcatgtgcctttcctactctgaacctgccaccagtagtatctgggccaaggctggtcttgggacctgcatcccctcacttttctgacttttgaatacattgcatgatcctgttggtcactgacaaaagactaaggcacagtgaggtcaggggcccccagagcgaagaaatagggcaagataggttgtgtaggaagtggttctccctggtgcccagcctatttgttggtcctccaatgcctgcatagttggacagctccactgcggggagtctaggctccaaaggctgccagagcctgactgaggtctcctagcacaacagtgccaacaagcttcgggatcccagcccaggtctggggaactttgccatctgtatccctccatactacctgaacctcagagttttaccctagaggccacactcctcattgctgggcaacagctttacagggattcctagaagtcatggtgccatactagcctctgattcgtgagctgctctttgccctcaagttggtcattcagggttcctgacagaactgttggtaagcacaggagcagtgcaagtgttccaagatgggagcacgtggaatctgctcatgcagtcctccttacacgggacctaacccacaagggccagggtagctagtggaccgagtgcaaggcacagcagtcaggctctgtggtctcaccccctccttaattctcatgcaattcccaagagacaccacttactgggcctgtcctgcagttgaagggacagggtcagattaagtgggtcaccagcctgcaacccacacaactagacagcccaggatctaaacccagtccctgacccctcggtagtccccagcttgtgtattgtggtcagatgtctacttgggaaacaaatgacctcagtaatacatagataacatttctagaagtttccttactcctttgaagggctgaaatgaggatctgtcttgagttgcaaggtacacatggccagcattcagaagtctggcttatgaacaggagcactcccctggagcacctggccactcacctgttgttcctcagatcaggacttgggctggttcgagtcctcccacatgtccttttactagtctcagggtcctgcttccag

SEQ ID NO: 19958 - DNA, 1189 bp, Mus musculus
gccgtggccgtacaccctgtgtgctgcaggtccacggcttcatggcagcctttctcttctccattgagacacagaccaccattggctacgggctacgctgtgtgactgaagagtgcccggtggctgtcttcatggtggtggcgcagtccattgtgggctgcatcattgactccttcatgattggtgccatcatggccaagatggcacggcccaagaagcgcgcacagactctgcttttcagccataatgccgtggtggctctgcgtgacggcaagctctgcctcatgtggcgcgtgggcaacctgcgtaagagtcacatcgtggaggcccatgtgcgggcccagctcatcaagcccagggtcacagaggagggtgagtacatcccactggaccagattgacatcgatgtcggctttgacaagggcctagaccgtatcttcctggtatcacccatcaccatcttgcacgagattgatgaggccagcccactgtttggcattagccgtcaggaccttgagacagacgactttgagattgtggtcatcctggagggcatggtagaggccacagccatgaccacacaggctcgcagttcctacctggctaacgagatcctgtggggccaccgctttgagccagtgctcttcgaagagaagaaccagtacaagattgactattcacacttccacaagacctacgaggtgccatctacaccccgctgcagcgccaaggacctggtggagaacaagttcctcctgcccagcgccaactctttctgctatgagaacgagctggccttcctgagcagagatgaggaggacgaggtggctaccgaccgggatggccgcagccctcagcccgagcatgactttgacagactgcaggccagcagcgctgcccttgaacggccctacagacgggagtcggagatttgaatgcccttggcttagatgcagcaccaccctgaccacaataggtcccatgtcccttgggggcctgcgtttgagcagagcaggccgaaagcctcgggtcacagactcagtagcatcttagtctttttcatgttttttcgcagtagcttgggaaagttggcgggagcgtggatggccaaaatgactggctcacggcctcggaggctgatgtatacccatgggcaaggaggtgacttcttggggtagggttgctcagg

SEQ ID NO: 19959 - DNA, 2337 bp, Mus musculus
accctgccatcccacctgcctccttgaaaatgagcccgtcaaagctgtagagtgggcagagatgatgccagagggcagagtgcttgcagcagcagccctctggcatgaagggcagagggtatgtctcttctttctaaaattgtaagatagccccaggcccaggttgaggccacccacaggctacaaatacatctgtcctacagataacttagcatcaactgcatgtggaaacatcggctcagacgttccctttgttttctagaaataggtgtcgtcttacctctaccccatttgctctttttccacggtggtgagtttcctaaacgtgatagtagtgaagtgaatgattatcaagttatacggaattctagatgattctctcccctctgagagcgtgtcttgctcttttgatcagtgttgtttccttgccctgtgccctgccttccttctcaaacggctggtggccaggcagatatcagagtccctggtatcttgatctttgcagtagattccttggtggctccattgacccaatcctcccatgtttcttcttggtctttttgcctgcccagggaggtttagtgactgtgtgagatttgaagctgaggtccagttggagactgcattgcatagtgtcacccgcttgcctccattctgtgttcactatagtttcagttacagccagaataggaaggctccattaccagttctcctggcagggtcattcatgaagtttattgtaagatattttgcatgtatctctggacaagcctaggctgtccacttctgagcaactggaatctagggtcttggtgtttctcctcataccactgcctttccagtggtgcttacccaggagcctgttggcacccacccaggagttgcccatcagaacaggcaactatttcctaagagccaggctctgagccgtagacccatagcaggtaacacgtgcatcgtgtttgcataacaagtacggctgtgatttaaattacatataattatgtgtacagatactttttttttttttttttttactatttgaaaataagattttgttttttcacttacaggctataaaagagcagtacagggcccagcccagctccttagctagcgaattgcgatggaatgacatagctgtggcaaaactaagcggccgctgctcaatcggtgtgaaaatcactcgaggtcaggggcagcagaaactttgtcacgtggtaacagttgccctgttcttctctagtgtgtttctatttctgcatttaagtaaagaacagacttgaagcatgttttagaaaaatcctcttttgagtacagctgagcctagattctcagacatggaccatgtttgtgggactctactgtggagatgccccagggtcagcatgttgtatttgtgaacaagtccacatgaaaaacttcactgcagttgccacgggaaccagagctccaagcttcctgaaggtctgcctccttgacactccagtgaatggggcatccagaacaggggagatgagcaggtgtgctggccaggcctgcctcctctgtccccacagaacacgacccatttcttcctatatttggggcactaaggaggacagcagctgttttctgtcaatgtgactttaaccttttatatccgaaagcattctccttcaccatggttttaacattctaaacacttcactctgtacctgtagcaaggtctgccaactctatggctgccgcacatgcatctggccctccctctctgtcctggggtcctcagcgtgctgtctccactggacaggcatgtgtggatggctaaggaacagtttatttgagcaatgggcttggttctttcagttgcccctctggatagcaaggcaggaaaagggttcctcatcctagaaccacctagtatatgtgctcagatggtcacagaagtgcatctcaccacagggctgcattgcctacccctctcttccatacactgctggcgccagcttgacaggagactaaagtcctcttcaaatggcctcagtgagagagtagggcattgggatggattctgcagttcctctctttaccccagaagtcccctcaagctgggcactacctgagtgtcctacaccatgtgaacctgagtgctgttgtattcggctcagtgtgtatgcttttccttgtgtaaaatcattgttctttttgacaagtggtttgtttcatttattatagctttgaaataaaaaatcgtgagggaaaaaaaatccaatgattgtactgtggttaggagttttattaccaagacatttatgtcacttttctttcccttgtcattttgaggggctatttgac

SEQ ID NO: 19960 - DNA, 1465 bp, Mus musculus
ttccagctgacctctgttatcttgagagctgaggctaggtcctcccagctactgttaggcattgaggtactaaaactgcaggtgggtatgtccatctcatccattgtggcttgagaccggccttcaggagtccgctctccatttaaacatcctttcttattcatagcgcaccacccaaagtctgtgtgtttgtgacagtctgtggggactgtcccagtgcctttgtgatgacctaaactgcactgagtctcttgccaagaagcaatgctttttttgtgaaggccactcagagcatcttgcagtcacagctgttcctgagcctgaggccagaagattccctaacccaggactttgaagccaacctaggcaacatgatggggaccctccccattcttcataaaaatcccctcaagatcctcaagttgaatgttttgtagatcttcaaggataagccttctgcttattctcctagcacaatgcaaggaaattttactttttaaatcttagagagattcctacagatctataaagcatggagccattcctgtagtgaagggggggttattataccccagggcttcagaactcacaggacagggattgctggagaacactgcgagctgtggagcacacttaagggatgggatggtcagaggcgctcccgagcaagcggggcatcattctcccttagatcctagtgtggctaagcagggatgtggcagagagatctgtgtggatctggcttcctgctgctggggcctggctgggcccaaagctccaagcctcactgccttcctggggtcctaattaactcggcctactcaatgagaacgtaacatgcttattgaatgtatagccgtgtttgctgagtaacctgtcccaccgttgaggctatctgaagtgtattgtatgaaggaagtatcaagaacaaatcattggcccgttatagcaaatagttgcttaagtagcagttgtcatagactaatcataaaatattttgcacaaaatttcaatgttgaacttgcacttactgttgttatagtaaattataaatcacagcttctagctaggccaaaatacttactctactgatcttcaaaataaatgtatttcataaattattgtgtgttaattttgacctcagaaatggagatatgatgcaaagttcctttgtaaatccatttttcctttctatccctcaaggatgtcgtttgctaacattggttgtcatgcttttttatttgaaattttctcagacctcacattctgttctgtgagtatgtgatggtcattgtgccatgtgtcaccactgagcctagagctgtgtccaccagtcacaggcccgaaaacaaccgagaatttggatcagcgccatctgccatcctgaggctgtgtgaccagacaagctgggctttacagctctgctcacaccgtagcaccgctgtaaaggagagcaccacagagc

SEQ ID NO: 19961 - DNA, 1179 bp, Mus musculus
acaacttttttcttgaattaactttctcctagcaacaatcacaaataataaccaccaccatctgtacatatgaaagtaagaatcctttcaagctactcactaagaccccttttccccacagtgtgtcctgagagccatggagaaattatgatgacggatcttgaaaaaaaagacgagactcagttggaccagccgatgaaccagcaacaagctttgcctatccgtccaaaggacagcaataaactgtctgggaaacagttggccttacggagaggactcctgctcctaggggtagtcttagtcttggtgggtgggattttagtgagagtctatatcagaattgaataatgtgggaatgccatcaatccagcaacttgggtgctcctcagtctgtgaagttaatgctgaacaaatccaccccacattgaaacatcagggctggggatactgcagacagcaatatgttcagcatgttctgggccctctaacataagttctctctctctctctctctctctctctctgtatgtgtctctctttgggtgtgtgtttgagagagacagagagagggagacacccccccaagagatataaacagaaagacaaagagacatagatgagacagaggcagaggagatgctctggagtggacaatgcctgcaatatacttacctaccaaataccagtattcgaaacattgtaccaaccggaatgttgattttgcacccctgggattgcagggagtcacctggagactctagctcactgccactgtccccatgtttccaaaggatagtgtcacacattgtgaacccaggaaaagctccccgttcaaaaacagtctcttctgaatgcgtgtcacttttgcatcaatgttaaagttgagcccctggaaagtgaatcactgtttaagtctgggcccacgtgcagttttgaacatagagacaattcagagccagtcattatagttaacagaattcaactgtgcccatgggaattatgaactgagaattcaaaaattttgtttctctaataaataaggtaaacaccatatagtgcaatgtgggggagactatgggggagtattaattcatctgccactgtcaaacatgcactgctgtctactgtcttcattccgggctggaattcctatttcttctgcctattgttttctatgct

SEQ ID NO: 19962 - DNA, 1223 bp, Mus musculus
ccagctcttcccaggcaaaaactacgtgcaccagttacagctgatcatgatggtgttgggaactccgtcaccagctgtgattcaggctgtgggggctgaaagggtgcgagcctatatccagagcctgccaccaaggcaacctgtgccttgggagacagtatacccaggtgctgaccgccaggccctctccctgctgggacgcatgttgcgatttgaacccagtgcccgaatctcagctgctgctgcccttcgccaccccttcctggctaagtaccatgaccctgatgatgagcctgattgcgccccaccttttgactttgcttttgaccgtgaagcccttaccagggagcgcattaaggaggccattgtggctgagattgaggacttccatgcacgacgggagggcatccgccaacaaatccgcttccagccttctctgcagcctgtggctagtgagcctgtgtgtccagatgttgagatgcccagtccctgggctccaagtggagactgtgccatggagtcgcctcctccagcactgccaccatgctctgatcctgcacctgacaccgttgatctgactctgcagcctgccccgccggccagtgagcttgctccaccaaaaagagagggtgccatctccgacaataccaaagcagccctcaaagctgccctgctcaagtccctaaggagcaggctcagaggtggtgtgtgggcccagcagctgagtgggtagtggagtggtagacagggattctgggacagatctgtaagccattacctttcccttgtccaacttttctgcagatgggcccagtgcacccttggaggcgcctgagcctcgaaagcccgtgacagctcaggaacgccagcgagaacgagaagagaagcgcaggaggcgacaagagagagccaaggagcgggagaagcgacgacaagagagagaacgcaaggagaggggggctggtaccttggggggcccctctactgaccctctggctggactggtgctcagtgacaatgaccgaagcctgctagagcggtggactcgcatggctaggcctcctgcccctgcccctgccccagcgccagcaccagcgccagcaccgtcctctgcccagcccactagtactcctactggccccgtatctcagtctactggtcctctacagcctgcaggctctattccgggtcctgcctcccagcctgtttgcccaccccctggc

SEQ ID NO: 19963 - DNA, 1099 bp, Mus musculus
tgaaagagtggttgttacaatccagaccttcaggctgtgggtagggtggcctcactgtcctagtcgggcccctgtgtctcttcctaagtgctcagcactactgaggtctggaaaggaggtgttaccagtgttgctcaagattctgggatgctgtctagcccagaacttggacagtcacattgtgtgtgccccacccccagttatcttcagggtgtggacaaggtaaagctctggccccacttgacactgactgttgggaagtggttgtgcattttttattttcctttgactcaatgtgagtccaaggtgaacactcctaccagtgtggagctttaagctgactgagcgcaaccctgccctgtggctctgtgcttgtgcacgtttgcacagtttgttgagtacagtttcatatttgagtttgcaaaattatctaatagtctttttttggctaatatttttataacgtggttcttatttaactgtctagttttgatagaattgaccaagtctggctgaattaaggtcttggcatgtattattttagtggtctaatttctcttatttatggttttaactgtaagaaaactttaaaagaagagatatttggatgacaaaaatatgccttatggaaaactaagcaaattctttataggaaaaaaaaaaacggaatttgattacacaaaaaagaattttattaaaacaaaacaaaaacttccaacaataacaaaccccgcagcctctagttgcctttttcctttcttcaactcttttgatgaattatcagtcagttgactctgcagcatttttgccgagattggagaggctttttgctactagtatattggcatcttaaggttaaaaggaaaaacaacgcatgattgtgacttgccagtttttatcaactaatccctttttgtacctggaatgcagggattgccagggacttccatttactgcaggccagaaatgtggctggctgccccaccatcatgctcaggttaatgagattgtgtgaaaatgggggtgattctatacatgtgggctcagaggtcatcagggatggtcccctagctgagtcatggcagagactggcccagat

SEQ ID NO: 19964 - DNA, 1178 bp, Mus musculus
ccatcccctatcccccttactttgctaggttatgacatagaggtgaccaggatgtggctctactttggacaaacttaccaggccaggcatactagttgtatcacctgatgtggtgccacagggccctgatgatagatgttgccgtcatgagactagggagggtggggagccagaaagagacaaagagacagaaagagccagccccctctccctcctttaggttgggtactgagtgctgctagccaggaaaccaaaggcaggtaaagagggatgatgatgagtaatcatggtctgggccaatgccagagctattctgagagagtttgggagccctgagaactcttaaaacttgtgggcatgtgacaaaaggaccttggtgtagtggatccctggcttctctgggaagcggggatgttagtggagctttgggattggagcagctcaatttccaagttattcaggagttagcccagaaggcctgtgctgtggtgagaactaatattatgcttagtatgtggatatttgctttgactgtaaccaagtgaaaccattccttctctttgtcttaacagccaggctcccactcccagcagactaccttgttggatttaatggatgccctccccagctcaggccctgttacacagaaaactgagccctggagtgcaggagcctctgctaaccagaccaacccctggggtggaacagtggctccttcgaacattactgacccgtggccatcgtttggtaaatagattgcttttttttttcctgggcttgcctgtttgatggggagaggtgctttctttctcttagctggctcatttcttactgcctcatcccatgtgtcagaaacaacctgttcctgttgtaggcagcatgtcagttcttggaattgcacccagctcaagctcaagaagtcataatacatacacagagaaaaacctaaagacatgagctggacatgagatgtgcttaccactactaccactactagtgaagagaggacatatttgctgctattcttattacttaaaataataagtctagtgagttttatttctgagttttgcttattggtaaatgtgagagaattttttgtctgatttaaaacaggaacttggcagaattaatctattgtgggtgattttcctggcacatgaaatttcttaattgct

SEQ ID NO: 19965 - DNA, 1157 bp, Mus musculus
acctcagccacccctggtggccgtgttcctgtcaggattattctgctgcgtcctcccttcccagaagactggaagggtctgactagaaagagacaggagtgtgagaataggccctggtgctgcctccactgtaggattggatcggacctggctcttccctagaccctggccgttctgtctgtgaaatgggtacaggcgttgaagtctgggaagggtcccctgggtcctgccccctgctgtctagatcctagattcacctggacagggaacagtggggtcccatcatactctcttggttgtgtgatgctgagcttatgctccctgtactgctggccaatcttagctcccctctgaggcagcccctgtctgccctctcccaaccctcccccaaccttaggctgggaggagcctcccctgggctccagctgcataccagaggcctgtagcatcacgcctgggagggatgagagcaagtgtggcctccagagggtgaggctgggtggggttgggcctcagtcagaggatcttccagcagatcctcgtgcccaccctgacaaggactaacccctgacaagtcccaggggcatcatgtatcataccttcccaagttactattggaggacacagaggaagctgaggtgtcaggtgctggccctgaactaggtctacatttatgtcttccagccagggcttacaaatggagacccagagaagttatgtttcttgcccagggccacacagcaagaagaaagaggagccaagtttcatgatgcccgattgaccccacatctttcttgtcagatccctgccttcacactctggagtccgggcctaccacttggctcctggagaataaaggcagcttaatgaggcatttattaaataccaactatatgccaagcgctgaacaggcactttacctgctctgtgtaatccttgctacagctccataaagtaggtgtggcctccattgtccgcagaaggaatccaaggtttggtggggctcggagagggtgagcaacttgcccaaagcctcggaaccgagaactagaggatctgggctgcaggctctaactgcatcccatagtggacccactaggtctcgctccctgcttgcttcgctcaggcagtgaaagcatgctcacaggcttctggac

SEQ ID NO: 19966 - DNA, 1189 bp, Mus musculus
tcccatgaggacgctttgccctaagtgaagtttggaggcacaaggggcctagaagaagctactgtgggtgttggaaactgtgggctggtatcagtacctggcaaggctgaagactacagcctcttgaggaacagctaccaaattgtcctttcatagactctatagacatagcaggatgctccagccagcttatacaggctccactggactgtgagcagagctctagggtgcataatagcaggtgcttcagcaagggcatcagaaaggacaggttttgataacttatccaccaccccatttcatagatgtggaaagtgaggggcctaagatgggaggtggctagtaccaggccttgaacactgcaggagtttcagggccacagctcctgtctcccaggtagatgaaattccctgagaattgtgaaatcacaacactccttgttgagctctcagggtcacagatgaaccaggccatccaaacggaattaattagttggttgtgaggcatggtgcttctgggtcctctcttgtgctgattgcagcatttgtgaggatataggggtaatggcactgatgttaggaattgtgaaccgtagacatcccaggccggggagagtctgtttcagcctctgtcaactgactgcctctacattcctgtctacaaagccaatataacctaaggtctcaggagctctcaaggaacctttgtgacctgaccatggataggccgagatgtgaggtgctgggcaatggtgggaaatctcccagcattaccgcacataccaaagcactgtgcacaccaccatttccaatgtcatctcagactctaggagcaccaggcggctctcctctccaatattagctgatagctgtttagtctttctttcaccatcctagggacagcatccaacgccagagtcagccatgggaccctgtcagggatccaccttggggcatgggccctaacaagtccaccttggcagcctgtgacttctgggccaggtccctgtcctgctggggcacatctcaatctgccatggtgcccacagcttggaaccagccgtgacggatctggggtgcaatgggctggagagcctccagggatccgtgtgccagccaggtcaggcttctttccagcacagtgcatgaagctgtttgcctgcctaggagtggcctaaccaaggggatgt

SEQ ID NO: 19967 - DNA, 1210 bp, Mus musculus
acacctagcctccatgtgcacctacattcattcacattgcacatacaggggtgtgtgtgtgtgtatgttatttaaaatgtgtgtgtgtgtagtttaaaatgaaaacactttgtagctgaaataaacactcaacaaagacttggcccttcagactggtatagctctaagtgatagccaccaaaactcagcctgatacccagatttttctttttcttcttttggcaaagagcagcctttgttccttctacttaactgctagtttggtgagtgtttagtctaagtactatttatgattccatggtagatgagaaaataagattaacatgtagaaacccttggagttgcatctaaaacatgctgggctcaggtgtctttcagtggtagagtgcatgcttagcacacatggggctctaggttttacctcagcaccagtaaatcaaatatgaactagtttttttgtggtcttttttgttatttaacttgggtccttttggacccatgattcaactcctctaccaccaagagccctactgggcatcaccactcttccataccttcctaatttctccactctctgaggattagccactgtaccaccccactcacctgctatgagtttgggcgtttggtcacgtgttgaacaaggtgtgcacagcttgtctgatcagcaaggctgtttctgaacagcacaaaaatagagtgcagggttgttcttggcctcagggtgctttgcagaactttgggacatgttaattcttagaggctagaaacgggaagagttatgtaagtctatcacatgcacgtgataggaaattatgactttggaaaagcctagctgagaatcgaactactccatgaagtggtggactttatgaatctctcttattgataataataaccagtataattgatcacttaggatgtgctaagcactgtctctgattcttatgacttaaaaggtgagtactcgtttcttttttatgttaataagtgacactgaagctggaagaacagaggactgtaggatcacacagccagggacaagccagtagcttaagttttcttaaccctttgacatctgctatactactcagtagtgagtcctggcatccattatagcagtatggaaacactggcagacacttggcttatttatcaccttttggtacaacaataagctacgccatatgcaaagactgtgtatgaggaa

SEQ ID NO: 19968 - DNA, 1141 bp, Mus musculus
attaatcacctctgtccttggggaaagtcttgaatgaacagaaaatttatttcattgcaatattgattgtacagaggcacactgttcaacagaagaagcaaaaaggctgtgtataagtttttggtactatgtaccatctctgttattctgaagtattcatgtacttaaaccatattctatttaattgtgtttgattttaaatatatatatatatgaattatatttaaaatggtgtcaacttcctgctttcagggcatttctggctctcctgttgaagtatattgacccttcctaatatttccacttgttttacaaaactccagaacataatccccaattggacatagccttgtgtttgggtgtagacatagacatgaggttttaattagtgtatgtgctgttgtggctcttctgttcctttaacaaagcatttctctccatttcatatcgcttcaaactttaagtgaaaagcaacataaagacatagagtcaaacgtgattctgagtgtcctctgcctttgcatgcttcagggtaaaaaatctgtaatgctctcggctgtttaaactagtgggtttgttaaaatactttctagtgatttctttgtgcattttgtgcttctgaggtcaagatgtcagtatttgtaagctatgtctaaggggaaagagtaaacctgagattggttttgttttctgctctgcctgctctgagatacaggagcagaagaatccaaatcaataagaccaattgtatgttagatccttgtacttacttaaaattagcacaagattcacctaacattgatcacctacctacccacgtgctacaggctctgtgcaatgtatccacaaaatgattccctgacagggtttttaagtctaaggaagcagttggacttcattcttattattccattgttgtcagctagcagattgttaacagtcaacctactaaggagaaaatgacagcattgtaattggcttgtcttcatcattcctacctgaaaagcaggtgtcagccacatccagtgaagtgcactgaaaggcaacagacttctctagtttgattccagtacctgttggggcttttttgagatgtaaattgtttagagtactagagcttttgttttcagctgtttgagac

SEQ ID NO: 19969 - DNA, 1134 bp, Mus musculus
tccttgtaatttttaaaatatttctttttagtttcatgtctgtgtttgggttgtatacctgggtgaagatgccgatcgaggctggaggtgttctatctccctggagcttgagctacagggagttgtgagccacctgacgtgggttctgcgaaccaaactcaggtctgagccatctcttcagcccacatgccttattatttatcttagggaagtcaattcagaattaaaatcagtatgtggtaaagactaccaacctgtcactatgtaatgtccatgaaaagtgtgggcgggcaacaacacttgattttagtggcagcgaaaactgtacaaaaggctagaagtgtaacagagagaagtagaagtgatggtgatgttgctattagtgataggcttgtaggtaaagctattcaaagaaattttactagatgtatttgattttcgtctttaaaatgttgttcctctttcaggtctttttgcctggttttctgtccagcaatctttattacaaatatttgaatgatctcatccattcagttcgaggagatgaatttcttggagggaatgtttccctggctgctcacggctctgtctgccttcctgaggagtctcactcaggtggttccgatggctccactgctcaggtattagccaatgtcactctatcaatgggatgggaggcatagagagcctctcctccaaatgccagcagtagatcccattcgtatgttttaagtagtagatagaagaaaataaaatcagcttatttgtaaactctagtcagactgtaaatagtaattaggcttctactatattgtaaagtattatgttctgtcataaaagctgttcatctgttggacaacatgcctttttgttttagtgacaaagtatgtgtgtgtacatgctcaaaagtgcagaggacaggtcagccttggatgttactcctcagacattattcaccttggtttttgacatagggtctctcactggccctgacttaacattaggttaggttggctgaccagcaaggcctaggaatctgccagcctctacctccccagttgacactcttgcatggcttttggattgacctgactgtgttgacagtgacgtatacggagaagctgggtcagatgg

SEQ ID NO: 19970 - DNA, 1214 bp, Mus musculus
tgacacttaataagattgcacacaaacacacacaaagataactcagtagtactcaaggagatacaaagcaaaatagcaagttagaatattaaaatatattcagcgtttgctaatttgaacatcaagttgggcagagggaaatggccagtcctcgttgtaaatggtgtgaatgagtgaagcctgttgtggacagcagtcagtttagaagttctgtctgattctatgttagaaatgctggtagactgtgtgtagatagaacattattaccaaatgtctgactcatttccttctgttgtttaggcagatcctgtctggactatcagactcaagagaccaaatccagtctttcaaagacccttgaacaagtcttgcgtgacactgttgtccttccatatttccttcagtttatggaacttcggagaatggagcacctggtgaaattttggttagaggctgaaagttttcactctacaacgtggtcccgaataagagcacacagtctaaacacagtgaaacagagttcactggctgagcctgtctctccatctaaaagacatgagactccagcatcttctgtaactgaggctcttgacaggaggttgggggattctagctcagccccactgcttgtgactcaatcagaaggaactgacctgagtagtagaactcagaaccctcagaaccacttgctgctttcccaggaaggccacagtgcccgttctctccatcgtgaggtggccagaacaggaagtcatcagattcccaccgactcccaggactcctcctccagacttgcagtaggcagtagaaacagttgctcttctccactgagagaactgtcagaaaaactaatgaaaagtaagtgatgtctcccaacgctgtcaggaccgtaggtggtccccctggtttacacatctaggaggatttgagggttgagtgagtcagggtgtgaaaagggagcaggaaggagagcttgggtgtcgttgttgcagtgtgtaaccagctgaccagagcggcagggcagtcagtgtgctgcttttttgtacgtttggaagggaagctgttgaccaaggggagtctccaggtctcggtcctcggaactgtctaactgcacctcgtaggttaatttgtttttcattttatttttttagattgccattagatatcatttattgagttctgtactaagtatatatttggatttcatttgtcat

SEQ ID NO: 19971 - DNA, 1135 bp, Mus musculus
tctggggctcaccaattagttttgctacctacccaaatcagtgagctgtaagtgagagacactgtcttaaaaataagatgtgtggtgtcaggagggaactgagtccccagggttttcctctgacctccacatccatgccatgacacacatatgagtaaataaacacacacacacacacacacacacacacacacacacacacacacacacacacacacagtgtaaatggaaaagaaatgtatccaagttgaagttctagagcaaaataatatgtacagaattgttgttttctacaaagttgtcttttcacacaagcctaccgtgtgggtctaggtcatttggatccaggatccttacgggttcttaagccatagtggcaggtcattgtcccactggagctctaattctggaagactgtgttgacatcactgtgaactcaccctcgagaaatgacatctgaaccaccattctgtcagggatgtgtgaagacgaaggtggacacatgcaggctgaaccttaagatgctatgctaagtgaagtcagccagtcacagaaggacacatactgtatagcagacaggatgagtagaaggtagaacgagcatcgattcagaagaatgcataaaaatgtattacatatggagcaacgagtcaggatagttattacagcagcacttagaacagaaaggcctggcagcaacaggagcagctctgagcattcttagtgagccgtcttgtgctgtcacaggagaatgaagtgcactctggggagggaagagcgaaggtcagttgtttgtcaggtgatgggtactgttctgagcgtgttatctgttgcaggtacatttactcttgattacagtcctgtgttttacatactgtaatccttttatgttactatggtaaaatgcctgataagaagcaacttaaaggagaaagggttggcttgggctcacagtttgagaagatacagtcagtccattgtgatgtccacagccacaggcagctcacagtggtgggaatatgtagctagggtcccttacctcctcacacctctatggagtgagaattcagaggaatgggcatgccgctgcctagctgacactctctctctctctctctctctctctctctctctc

SEQ ID NO: 19972 - DNA, 3011 bp, Mus musculus
ctaaaagttctgggtatttgccacattctaagagctgtatttatgatttccactggaaagtcactagcatggctaagcttctctgattacagcttaatgttcagtagttccctacttgaattctccaaggagacatgtgctatgacatcacagacttatcacccctacccaaggcatcagcagaccgttttactaaagcagcatcctgtcttgttccatcctgtaaagactgcattgaatgctaacgacagtgaaaacctcatttttcttttgtcaggttctactcagttcccttacaaccctctgaccatacggatgctcagcagtacaccacctacacagatcgcatgcgccccatctgccatcacccaagcagctccacatcaacagaaccgcatctgggagagggagcctgccccgctcctctcagcgcagtatgagacactgtctgatagtgacgactgagctgtgcgtgggagagcgctctggctttggtttttattgaagatttaaaaaaaaaaaaagaaaattattctgccctcccatgatttgtgcccagagacttctcaggagagccagggccatggatgaggaagaaatgatggaaattcatttggaaaatcaaatgggaaaaaacaaacaaaaaaactgcctctaatacaggcacttcaatggattataacagtggcgggttgaagtgtagagtttttttaaagtggacaattcttgttcttacatctgtttgtaaagaaaaccatgatgtctttaaatcaatcttctgtaaatagatgacttttttgcagtgtatccccttgctgtagtatctggtgtacttaaatttaaatcagcgaatcaactggggagaatttttaaaattctttgtgtatctttttaaccccagcctctaaacctcacacagcccagttccacagtgctggctgtcatgggcattgtacttttgtttcctctaaattcagctttcccagtgatgtttaaatcttgtggaaatatttaggtttttaacacataccctgtcataaagcctgtatgaggtcagaagacaggagcaacacaactgtcatattgtgagttccagtgcaggcttggctttcattggtagcactgaaaaaaattactgcatgggtatgttatagttcagttttaaagtttaaaggcttttttgaggcatacctcaatgtttatgcacactggtaatttaaccacgccccctaagtattctgcatttgatgcagcccaacaaagcttctttctgttctgaaataaattttgactatcctgtccatagctacagtacatcatttgtgacgtaaagagtcttcgtttctcaggtttcaaacaattagtatacatgcttttctttagatacagaattggcggagttaaaaagagaacactgtatagaactttctgtcttccaggcttgtttttatgctgcatcgtgaactgaccgttgagcacagtcctctgcatcagtgcccattctctgctcctagggaacagattcttaaggtgcaagtaatttaaagactgaattttaaactaattatggcactgtaggatcacctttattcattaagaattgcttgctgtgattcagatttgttctcctatggcttccttccactgcataaagatgcttagtagtgtgtgtgtgtgtgtgtggggggggggggtaatgccactaagaactagaagggagagggagggcttcaggaggtctgagtctctagaaccactgcccaagcacctcttagcatctatctacaccacaggtttctgatcacttttttatagatgaaggtgcaggctaggcatttgtccatataactcagcaagtaagaaagacagacatttgagatcttaaactttagctatgcatcatagcacacacctttaatcccagcactcaggaggcagaggcaggcggatcactaagagtacaaggctagtctggattacaagatgagttctggaccagccagaacaggattcttatcacttgtaaagtcattacctttacaatagtcacaaacataatgaagactaagtgttctgattagatttactgctgaaagtgtccccctgccaagttatagtcacataagtctagatcttattagtaagtcactttgtcaactagcccaaaaaatgatgatgatgatgattggccctgtcttactgtgtcagtcaatcgagcttggtcacctactcttgtagctcctcctgcagactgcttgtgctatctgtgttcacgacaacacaacatgaagtccagaatcgtttcttacttcagaacagaacagaaccccacagtttacctagagaggtggaggccggcttaccgacgcgggcagcagcaagtactgagtctgcgacctcagctgcaaatcaaggcgggccagcactatatctgtaacacatgcacatgcaactaaatcaaggtcttccagcagaggtaatattctgacaattttccagtctacttagtgagaaattttatactacactttaaattttcatatgctgtgattgtcttacaaacacttaagccctgaaaaccctagtaacatggtctagtttaaaactttaatatgaaattaaatgtaaattgtttaaagttgtaatcagtaaaaggagatgagtccctttgtctcactgccttttttataatagtgcaaacgaatgctgctgggaacatacacagactgtgtccccagccacaggacatgaggtcagtcaccatggaacattaaaaagcctaacagctaacttgggtaactctggaattgtgaaaaagtaaaaaacattttcaaagcaaaggtaactgaactcttacctggttattcatggttagcgggaagatcacatgtggttaggaagtgaatggtaaatgaactcaaacagaatgtggggctctccccacacaacacagactctgcggtagctcttagctctgaggacttggaccttagtatgtctgtctagtaact

SEQ ID NO: 19973 - DNA, 1142 bp, Mus musculus
acttaaaccctacatccatgaatctgaaagatgatggttaatttttttcattgctcttagtgaaattattttatttatcatctaaaatatttacataatgaggctaggcaaatggcctaccactaatccatactcagggagccctgtagttttagaatagaatgtgcatcatgagccatatgaaaatggctgataattggggaaaagaggtaggaagatatgtgtgcttatttttacatttaaaaaatacatatgtatggttggagtgtacgtaaactaaaggttatgccaaaaaggacaagacctgaagataaattaggccttttctcatgcatgtgggtgttgatggataggtgattgaaggttcacaactactactattttaagaatggtagaattgattggggtaggaaataccatcatttataagattataagttaaatgcagatgttaagtcagaggtggcctcagaccgagtacaacctaaaatgttgcattttctaccccagcaggcctggaaaatctccagagaggagtcatatcccatcagagccctatgagcccatctccccaccccaaggccctgctgtgcatgagaagcaggacagcatgttgctcttgtcacagaggggagtggaccctgctgagcaaaggtaagcaggatgcacacatgtctttgccccaactccttttaggtgcagactgtgcctgaggctttgcctaaatcactgcctctcttctctttttggctcttataaaggataagactcggggaagactaggagtactttttcccctgcacacagagcacagtgccttccttgtatattttctttttaccacgttgacctgaattacagagcagtcctcatttgtccccagagttagctgagacacaatgtgcagaacacagttgctagcgtggcatttgcattccttcagggccaggcttacaaagcttcatttcctgctgtctctcccttacgttatattctctgttgtcttttctctcagttcattttcttcaaaagaacagttttcttggtatttaatacactagagacaggatttgatggtggccaaaccttgtacagagaggaaagtccagttttaagccaggtctgactctgctggtgaattt

SEQ ID NO: 19974 - DNA, 1190 bp, Mus musculus
aataaggctgctatgaacatagtggagcatgtgtctttcttactagttggaacatcttctggatatatgcccaggagaggtattgcggtatcctcctgtagtactatgtccaattttctgaggaaccgccagactgatttccagagtggttgtaccatcagcttttcttgtacacacagtttgaggtgactaatttgggagtgtgtgtattggagggttcatgggctcagattgatgtccccacagcagagtataattgccatgaggcagacaaaacaccttagaaggaacagtatctatacgacgttgctaccatgtattgtttgtttcctcttagggcacaccaataaaatttgacaacaactcaggtcaatcagctatcaaacacaatgtgaagtccttaatcacagggcctagcaaactaccccgtggaatgctggaaattgtaccagagaacataaaagtagtagaacggggaaaatatgaggatgtgaaagcaggcgagccagtgcgagcccggcacacgtcagtggtgagctctggcccctccgttctcaggtctacacttcacgaagctcccaaagcacagctgagcccgggactctatgatgacagcagcgctcgcaggactcctgtgagctaccagaacaccatatccagaggctcccccatgatgaacagaacttctgatggtatggcttttgttaccaactctgattactttgtaacagtttttacctccaacaaatacaaaatagcaaattattagctctagatgtctcaagatgcacagggtgtatggatgaactagggaagcaacccagttagtgaagggcagtctccagaagccatgtgtctaagttggctcgggctgagcatggtgatgtctgcatgtgatcccagcacgggggaggggaagtgggtgagttctctggggctcagtatgtacattttgagatcttaccagttagaccagtgttttcaaccatgggctatgactccaccgtggaatacaaatcatttaccctgaatagcagatgtttacattataattcacaatatggtagtaaaatcacaactataaagtaggcaccacaatgtgaggaactgtattaaagggtaacagcattaggaagggtgagaagcctgaggctgtgtggtgaagagttgaatggttaggaggagtgcac

SEQ ID NO: 19975 - DNA, 1224 bp, Mus musculus
acctttagagcatgttggcttggccagaagctgctcttacttccctgatgtcaccacaggagtcaagttcatcgtaacaagtgctttcaagcatggtttctgtcagcacctgaaacctgttcattatcagatttttatgctgtatcattatctttaaggtgctgaaaatagttctgatacagaaagtgctccctctccttcaccagttgaagctgccaagtccagtgaagacagcagtgaaaatgctgcttctcgaggaaacaccgagcctgtggctgagcttgaggccaccactgaccctgcaccctgtgcatctccctcttcagcagttccaaccacaaaaccagcagaaagggaaagcgtggaggcccaggtgaccgacagcgccagtgctgagaccgcagagccgatggacgtagaccatgaggagtgcggtgccgagggcagttctgttcttgatccaccagcccctaccaaagccgactccgtggacccagaaatgcaggtaccagaaaatactgcgtctaaaggtgaaggggatgccaaggaaagagacttggagagcaccagtgagaagacagaggctagagatgaagacgtggtagtggctgaacagatcgagaggcctgagccacagtcagacgacgactccagtgccacttgcagtgcggatgagggtgtggatggagagccagagaggcagaggtgagactgaccttgtttcttctctactgttctctggctctgtcagaacagttctgtccacagaggtgcctgtaagagactggcaagctcctagcagtccatggttttaatattgagcaattgtgtggctttggtgtttgttgtttttaaatgacacaaatgataaatatcttctatatctgtattgttacatatagtctgtgatagggagggggcaggctgatattcagccaacagagttaggaataacaccacaaacaaattgtggatcctaacatttggcagcagtggtggatggtgaagaggtagaaatgaagagccttggctttaactctgggtttgtctaagttggttggacttccaaagatagtttgtctagcccactgttatatattaaagagaatgctccaaggataaatgttggtgttaaaatgttttgaaaatgttattatttggggagtttgggggacaggcatttgttatgagatcagattgggcttgaacttgataattagccca

SEQ ID NO: 19976 - DNA, 1183 bp, Mus musculus
tggtacttaaaattgctgtaataagtacatttttatgtattatctcactaaactaaaatataagaaagagattctagttgttactattttatgaaactaaggcacaggaaggtacagggccatagtgctgtgggtagcagaactagtggttcttgttccagagcctttcctctgttcattgagtcaagttacgtttttataggccctcttttttggtttttcgagacaggcttttacaggcccctcttataagctagtaacaagtagtagttttaagtgaattctctgtaattcatgtaattcagtgtaaatatcttagaaataattataaaagacatgctatgatgtatgacattgtcattaagttgcagatttttttacctgttaaagtctatatctccttaaaattttagtttgaatattatcccaactaaactgcatttattttttgcagaataatgagaagcaaatgcgtcagctttctgtgattccacctatgatgtttgatgcagaacaaagaagggtcaaattcatcaatatgaatgggctgatggaggatccaatgaaggtttataaagacagacagtttatgaatgtttggactgaccatgaaaaggagatctttaaggacaagtaattttaactgttaaattattgttttatagaagttattaaaagtgtttggcttttacttgagagtgaactctttccacaaagctttcattccagtttggccttggagtaaatgctgtgagtaatagataaacttatcttcctttaagcttggaggtaggataatggttaacagaaatgggcatctggaatcattttaggaaagattccttaacttgggtgcagtacaggttaattttgggaggctcgttataggacagatttctgtgccttacaataaccatggattcaggtaggtagtttcctttaaacatttagcaataaaagaatgtggtggtgtgtgcatttaattccagcccttcagagacagaggcaggcagttctatgattttgaggccagtctacacagtgagctctaggacagtcagggttacatagtaagaccctgtttcaaaaaacaaaccaaaccaaaaaaaaaacaaaatttaaaaactatcctttaaaaactcggccatttaaaaattctttctatcagaggctggagagatgg

SEQ ID NO: 19977 - DNA, 1225 bp, Mus musculus
atgtagttcataattaaagtcatctatttaagaattttttctgtgagatattgccatggtcttgagaccctttaagaggacattaggctgaactcataaaatacattttgatttagaactacttagctgtttaatgtttttaaaaggaggataccagatataatttcgttggctattttcagtgatttacccccaaagcttcagtttgtgttttgtcttctcccctcaatgtaagctgggaagctgcactgtttgatgattttctgtcctccacattgcttgtgttagactgtgctgagatgggttactgactagctgacttcacttaagttcttagtaaacattgaacattttatttactaggtgacatttatttttgagtagcatataattgcaataagaataaattggcagctgggcatggtggcgcacacctttaatcccagcacttgggaggcagaggcaggcggatttctgagttcgaggccagcctggtctacagagtgagttccaggacagccagggcttcagagaaaccctgtctcaaaaaacaaaacaaaaccaaaaaaacaaaaacaaacaaaacaaaaaaggaagaagaataaattggcatgtggtgacggtcctactgtatgttacatttgaaatactcagatgcacacattttcaaaaagctttcagtagctagtcaccaatctttgctttgtatgaaataccaagtgtgccttttaaaaattctgtctcttgactgctttgtcatactgccagctactgattgtctatgcatatttgagtgaagccagtgttgtcgttagtcctgagtgacagataatccatgaatttatttctactttcattgactttgtatttatgtctgaataatcaacttacagttatttctggaagtaggtggggtataaatatttatatatttgaaacctgcatgatgttgttttagaagatcacagtgcttccaacttaaaaagtggtgatgttacattaagacatgtgagaaaatcttctgtcttgtcagattgttgctccatagagtctgttgtatcatatctgtggaagagaaatcttctgttttgagcagaagtcacctctttgtaaatatgttggtgtgcattctcctttcacgagggaagtacctgctaaaggtttcttttcccttttacttccctttctcagtatattcaaagatgcttgtatcatcagaattctt

SEQ ID NO: 19978 - DNA, 1209 bp, Mus musculus
gaaaagtcaaaactcagaaagagaaaagaggtacaagtccatagacaaaacaaaattcttagaactcatcataaaaccaagatttatgaataaacatttatctaaaaaatatgcatatatacccattaagcacatgcaaaaacactcaacattatcattaaggagaatattactaaggaaatgcaaactaaaatcacagcatgacattagtgctaagagagctattaaaaaaagaaactagccaggcactggtggtgctcgcctttaatcccagcaatcgggaggcagaggcaggcggatttctgagtttgaggccagcctggtctacagagctagttctaggacagccagggctacacagagaaccctgtctctaacctttccaccccttcttccccacaaaaagctgacttctgcaagttgttctctgacctccacccgtgacatgtgctttatgtgatcagagcaggcaaacacacatacgaataaacattaaaaagttttcattcctgtttttctattgctttatgtttttaaaacaatgtttttattttattactgatttttttttttttttaatttggctttttgagacagggcttctctgtcctggactccctttgtagacttaggttgaccttgaactcacagagatctgctggcctcttgctcccttgtgctgggattaaaggtgtgtgccatcatgcctagctattatttgattttatcctaagtttttgtagaaaatcttttttttttttttttttttttgtagaatcttccttggtagcccaaactgccctcacactgctggtacccttgtcttagccttctagctattggaatttgtgctgtgagccattatgcctgattgcaaatattttagtaataaaggaattttgagttgagttttattcacaaagaaatgtttgttagtcttgtagtttttcctccttttaatctgttagttttaaaaggcccacgcacccctaggtttagctttatttgtgccacattatttattttcttaaaaaataaatttaattcaacagtacttatatgcggatttaagtttgtgaaagcaataagttataattttttttttcgagacaggctcatgtatataactcagactagctttgaagctcagttcctcagaccagtggttctcagccttcctaacgctgtggttctttaaatacagttcct

SEQ ID NO: 19979 - DNA, 1237 bp, Mus musculus
ggtggctcagtggttgagagcacttgctcttgcagaggacccaggtttggtttccagcttgcacgtccttgctcatagctatgattgactccagttctggggatcgactctgtcttctggattcttcagggaccaggcatgcatgtgatgcacttacatgtatatgcaggcaagcactcatccacataaaataaaaatattttaaaaatccaacctatgtgtgtatgttgacactggagtgggcaagtagccagctgtatataggttctggggatctgaactcaggcccttgtgcttgcatggcaagtgacagccctttaacatggactttttggatctctttttgtaacttagttttacaaataaaaatcttgtattaagcttttcatttctgtattagtctttctcttcatcccaaagagatactctgttagaaatgttaatactattcgggtgacattcaggtgtgtctaaccttttgacattgtacatgactttgttatctacaaatgtgttgtgcttcatgcgtggctatcctgggatgcatattgtgggcatgctgaatattgttctggaataggtagagtgggcagcaattcattttggaagtaagtatgacctttcgctcactctgatgtctaataggggtgttagcaaaggtttaaatgtcacttaacaattttcagatggtttttgctttgtttttatttttattttttggaatgtattaggcctcaagaaaggagaactggatatgaacagtttcactcaggaccctcaccggtggatcatgattccttggagtccaagcgcccacgcctggagccagtttctgatgcccatttccagcgtgttagtgctgcggttttacctttagttcactcgctgccagaaggcttgaggtcgtctgcagatgctaagaaggtaaatgtttgttttcttgttccgtggaacttaggtttgtaatgtttttgtaaccaattttaggcagagtgcctaaaagagaagccaacattctcacagcctctaaaaggttagtgttatgggagtaaaggtgttaggtaaaactgcaaaccacagactaagtgcttcagatttcaaaattggtggtacctttgacttttgaggagttcaataattttcatacattgtttgctgctttgtacaatgtggccagagatactgaagactcagttttgtcgtatttatcttacttgtgtggtggcagggaggcttc

SEQ ID NO: 19980 - DNA, 1151 bp, Mus musculus
ccacatagtaaaaggagggaatcaactctcaccggttgtcttcagatctctactaaatgctgtggcatgtgtacagcctacacttacctccacaataaattaaattaatgtaaaacagtttaaataaggggttagagagatggctcagtggttaagtgtgcttgctgctcttccagaggactgaagttgtgttttttggactcctgtctataattccagctccagagcttctaacaccttcttttggactctgaaggcatctactgcatgtgtgcatacataaacagagactcacatatacataaaggaacaaaatctcactagatagaaattattaaaatgatgaaaaattgtctcagtaaagggttgaaattgtcattgctatttgttttcatactaactggttcttaattacttggtttaacttcataatgctgttcttatttgtggttaatagttaactgacaattattttaataccaggaatttgcagttcctgactaccgctcttctcatattgaagttagccaggcatcacagcttttacagcagcagcagcagcagcagcagcttcgaagacgaccttccttgctttcagaatttcacccgggttctgacaggtaatggaatttcttttatttttctgcttaggattaattgaattatataatttatttatatttttaatttttaaaaaaggtttatttatttataatatgtgagtacactgtagctgtcttcagacattccagtagaaggcatcagatctcattacagatggttgtgagccaccatatggttgctgggatttgaacttaggaccttcggaagagcagtcagtgcccttaacagctgagccatctcttcagccatatattttcagttttttttttttttttttaactaagaaagctacatctgtcatttcagttgtgttttgagctcttacgggttttctttgaactctcgatcctccttttcaatctcccatgtgctggtggattacaggacttggctgcaacatctggctcacatctgtttttttgtttttgttttttgttgttgttccattaaaattctatggttaagtttttaatgaaaatgtgtttgttttactttgtttgtatattgggggcatgtatcataatggt

SEQ ID NO: 19981 - DNA, 1330 bp, Mus musculus
cagaagagggcatcagatctcattacagatggttgtgagccaccatgtggttgctgggatttgaactcaggaccttctgaagagcagtcggcgctcttaaccactgagccatctcgccagcccatatatactttttttaaaaagaaaaagaaagaaatggaaagaaaatacaaacattattctgatagtgaaatattgaaccagtacaaaataaataaaatatgggaagctgggtgtagtagtatatgcctttaatcccagcattcagaagacagagacttgtggatatctctaagtttgtggccagcctggtcaacatagtgagttccaggacatccagagctacataatgagtttctttaaaaagtaaaaaaataacctcaaatagttattctaataggatggatagtgataaaaccacgtttacataaagcagtatacccacatgtaaaaatctacatgataatgaacaaatagtgttcttagcctgctttgtttgggggaagaagtgtatttccatagccacaggtgtaagcaagcagagctttgcccatgcctgtggagcctgtctctgaagagtccttttgtactgtgttcctgcactgagccctctgcaaggccgattcgctgattagcaacgacacagaagttgaaaggctgcatgtccagaaccaagttatattggggtgtccttagacaccttgcaaactgtctgctccccacttctgtatctgacctagcatctttgtgaccgttgggtaaacacttgggaatatagaagcagctgcctagttcccaccaaccaaaggctagggattctttcagatagcatctgaggcgtccagctgagatgccttccttccctgtgatccacctacctgatgttcccactgtgtgtgtgagaagtgcccatgtgtgactgtgtgtgtgagaagtgcccatgtgtgactgtgtgtgtgagaagtgcccatgtgtgactgtgtgtgtgagaagtgcccatgtgtgactgtgtgtgtgagaagtgcccatgtgtgactgtgtgtgtgagaagtgcccatgtgtgactgtgtgtgtgagaagtgcccatgtgtgactgtgtgtgtgagaagtgcccatgtgtgactgtgtgtgtgagaagtgcccatgtgtgactgtgtgtgtgagaagtgcccatgtgtgactgtgtgtgtgagaagtgcccatgtgtgactgtgtgtgtgagaagtgcccatgtgtgactgtgtgtgtgagaagtgcccatgtgtgactgtgtgtgtgagaagtgcccatgtgtgactgtgtgtgtgagaagtgcccatgtgtgactgtg

SEQ ID NO: 19982 - DNA, 1221 bp, Mus musculus
agtgttctaccactgagctctgcccccatgcctcagtgtagttttgagtgctgtgtagcattggttgtccttcactcggggcatcagctcttcatgtgggaggtgaggaccctaagccagggcgctgatggtgtaggccgactagagcgatgttagtaatcagtgggccacaagtcatccttacgagctgccgctgaggtagctcccgtgtgggataatggtgcttgctggtgagggcttgtctgacacattctctggtcttacccacacttggaacccctctctctgttccacttgccccaggaatcgccccccactgcctggacgaaggcactgtgcggagtgtggtcactgaggagttcaatggcagtgactgggaacgagccatgaaggagcacaagaccatcaagaacatgtcaaaggagtgagcagggcagtagccctgtaggttgcatgggtgtgtgtcgctgtgcaggcctgcctgggctaccatctccactccccatgtctctgaggttcactccagccaccatttctttaggcagctctgccttaacccaggtttcgtgtaagaaacttaaccttctcccttcctaccaatttttgtgtgatcttttagaaaataaatatttctgacattaatgctattactatgacatatttctttgaactttgacttttccttcggaggcttatcacttcagatcagagtaacaaagcgggccctattaagatgcctgcagccacactgagaagagaccagactcaaacagcacttacaaccagagactgaatgattacagttcgtgtgagttgtgaaaacatggactctgggtgcacagggtgcacagggctagtccaggaggcctgggagcctgtggcatgtggttttagtttattccttagctactcatgtatttgattatttctgacacagtgggctctttgttggcagtttttttctttttcctctcccctacccccaatagtttcatcatgtagcccaggctggcctgtgtatgcctgcctctgccccctgcgtgctaggttataagcatgcactactgtgcctgcccacatttttttttaaataaggtaaaccaggctccttgtttgttttgattttctgtcgtcaaggtttgggggaagccacatgacaggaaaataaagggacagagagagacacacggagccaatgaaaagactgcaggggaggagtcc

SEQ ID NO: 19983 - DNA, 1181 bp, Mus musculus
gtgcttggctttttctgtatatggctttgttatgcggtaatacagttaaaaggactttggccagaagccaaacagatgagattgcttgatctttggctttcagccttcgaaatgtgagataaacaatggccctttctttataaagtatccagccttgggtgttttatttttatagcaataaaattagactaatataagcaatacttgtgagaaggcgagggtggtggtggtggcggcatctgggtgttgctgtggggaaagagggctcctgtcttacctatgatttgataattagatgtgaaaggggatagggtcagctgagaactggggatggagacagagatattaggggacatttaagttgcagttactgtgtaaggaggcaaaagaaactaacagactgactaaaatggttgcgatatcccgtgtcttcatggaaaggaaggggcagtcattgcaggacatagaaaattagaaattagggtataagagagtccacgactttatttcttcaaacttctggttttgaggtattgaagggcatctaaggcttggacagttgcgttccagaccctggtagtggggtcagagcttgggcctagcagatacctcccaaagaccctgcttaatgataaagaggattcagacattttgatggctcctgtgatgggtctatagagagaccagtgtcttccactctatgtccgtatcagataacacaagcaaagcattgtcctaaccccaaggttgctcaggcacaatctctaggaaccaactcagaactctgtttgctagccttggcttaggtcagtatctcagttatgaagtttagagaaaacagatgctataacaggtgaaggtaggacccagaatcaggtttcctacagtgtcatgactgggtgttgtctgttaactctgggcattggtggagggacggtcatgcccatgtactatgttaaagtgttagtcatagaaggggggtggggacaggaaataattccttaatgaaagatgaaagggtaggaataaaactgtgagagaaagaatgagagacaagtgggaaccaaatggagacagcagactcccttctttctcttccacctttgaggctgtagaatgggtcaggcagggcaatcacttctcttcctcattctgagagaggtcagagacagagaggcatg

SEQ ID NO: 19984 - DNA, 1235 bp, Mus musculus
tcccacacctcgaacaccagtactgctgtctaggggggagggaggccctgaggttcaaaacaaggcagagtaggctaggcatgcctgttggtttgacataggatgagggaggggtaacttgagattagtagttggcatgcagattttgttcaacactgagctttcagattagcaaacctgtaaatccgttatttgagcactgatatgttttaaagtccatgcttcctgaagatgcgctatttctttagctcagtggtagagctcaaggctctgggttcagttctcagcttaaaaaacaaaaaaacaagaaacaaacaaaaactacaaaaataaggagcttataatttctatagatacattttgatttcttttgtaaatttcagaattatatcttgtataagtagcacaaaattaaatgtacatgtaaatgtatttcctgtaaagaaattaacttaagtcaaaattctacttgaatcttgaaaacactgtgctaagtgaaggtgttggccacaggagacaaaatattgcatgattttactttcatggagtgtccataatgggtgaattggtagaggcaggagatgattggttgcttagctccgagggggttgggaagaacagagggatgattgccagtggggacagatttgctttttggagtaatattgattgtggtgatggtcacacaactgaatagattaaaaagcatttaatttacaaaaaccccatacatacgtgtatgatgatgtgtgcatgtactcccggaggcaaggacgggaagagtatgaagttgagggtggcctgagctacctagtgagatcctatttgtcataagggcagggggaggaaaagaaagagacaaaactgtatggcgactttgtcttcatgcttgaagtgatttctcaccttggggctcttgtggcatgattagataatctaagctggtaaggtctggctaggtgctttgatagtttatactcaatgaggtgtcagagtcagttcatgtactatgttttcttgtaacggtataacctagtgtagtggtgggcacttgagggtaagctgctggcttcctcctccccttatctcatggttgtgggttgctggctcttgcagtgaagtgtaacggagctgctgtgccttgcttttaggcaccccgtggcatccttcttccatctgttcttccgggtcagtgcggttgtggtctatctcctttgcgagctgctcagtagcag

SEQ ID NO: 19985 - DNA, 1722 bp, Mus musculus
ctggtccacttgttgtgtatgctttagtattttgggattttctttttgtttgttcggtgtggtttttttgagacattgtgtacccttggatggcctggaccttgctatgcagaccaaccgggctggcctaggagatccacctgctagctaggattcgaggtgtgtgtcagcacatctgactgtagtgtttttagttgggagggactttggctattgaaccttggtaaaatattactgttttatctcatggaatctgtcaacactttaatatgacaagctggatatctgagtgggtgatggaatccacaggttttcttttacattgtgtctactttttaagcataaaaattattataataaggtattgaaaataatgtcatgaaggagctggcacggtgatagatgcagttttccttggtctggtactgtgagctccatggtatgtgaagtgaaataatgttgatattaagaggtagtttttttctctattgcagaacactggagatggtcagacttcgtgagtaaagatgaagactgtcatggactctgggagcaatggacacgattcttagtgtttagagctcagtctgttgcagagtggggtgtgtttgttacttagaagcttatttaaaagaaggaaaccccatggggccaggaagtctgtgtgtctggaaacagtgtcaggtgtgccttgggtgtctgtctggatagatggtcctgtagcagcagcaagtcctttgcacgtgtgagtggaccttcgcatcctgacccatagactgtaggaatgggtgttcagtctgtctcaaattctgtgtttgcatagcattcctgtacatggtttttggggtaagttttgattcagtggtaagggtgaacatgttggtttatgtatgagttagaaacagttattaattttaatgtgttctgtatggtaaagttccttatcttagacttgtataagcaagtaaaagctaaatttgggcactaatgttaactgatttctaaaattttggttttagttggtaatgagtcattcactcaaggtccatttggcataagtgggacctttgtagttgtggtggatatacaggggctgctgttgctgtgtttctttgtgaccatagatctctctggaactatctaaaatctcttagtggtcttttcgttaagttaatgaaatactaccttttaataagaatatcattcttatgaaataatgagagtaattacttaagtacttggcatagtaaatgcctataaaacattgtatgaatttattttttcttttataatggggatattgtaaatcacatatttgtattaaggttatttcctaagacaaagcaatatactatagactaaaccaaatgtaaactattgtaggcagctggattcttttgtagtattgtaaattttgttggaatctttatattatgtcatgaatacacttgtccattgttggcacattttaaatgtcttgtttattaagtatctttattagagtgtagcttggcaggtgtatagctttatatttatataaaactgctgtttacaaagcattagatgtgtggtcccatttagtcatggcactgtgatacctttgaggggacacaacctcaggagcatctgtggaatctaaagcaggatgaggctggggaagaaaatcacactccaaagtcattgtcttcctttggatgggtttgctaagttcttgtatgccat

SEQ ID NO: 19986 - DNA, 1209 bp, Mus musculus
atcatccaagaccacacctcaaaacaggataacaggcactggctggtctgtgctgctatttctctgcctcggtagttctctgagctcttgggcatttactcttctattttgccatcacaggaaggtcttcaatgtggaccaagagcctttgattagtgtttgtaatcctgtgtctttggttataagttgcaagaagctgctgggttaagggtctcaggagctgtggatggtgcctctcccgtcttttgaaaataaaaacatccagtgattctgcagtttcatttttatgaaagataaataaatctgtacacatacacacacacacacacacacacacacacacacacacacacactaagcgttgctagaagttggtgaatggaagaaagcaccatctcatcatttagtctggggactcagcttttggtgccacatagaccattttagtcagaatgataactgaagactggaatagcttcagacttcctcccccgaatcctgagccagtagagggcagcacagatacctcaccttaatctcctgccctggtctttggtccctcatcttactgccttgcacttgtttttcttgctcctttcctgggaggctaccctagactctttcctaagcctggtgcatacaaatgccgagagcgccatatgtccctcgttctgatgggccgaatagcatttatatcttttaagttggctgtggtagcacacgcctgtactctcagcactcaggaagctgagacagtaggattgtgagtttaaagacatggagctaggtacatagtgagaccttgtctcaaagtaagtaatgtaaaaaaaaatgtaatgaaataatgtcaaagtctctgaactgaggaatatcttacatatggacacgtgcgctagttgttttattgctgtgggaaaacacggtgaccaaaagtgatttatggaagggtttattttggcttttggtgaggagagagagagagagagagagagagagagagagagagagagagagagagagagagagaaagaagaagaagaagaagaagaagaagaagaagaagaagaagaagaagaaggagaagaaggtgaagaaggagaagaaggagaagaaggagaagaagaaagcatgatacaggtgtccagagcagggacctaagagcttacttctcatttgcacagcgaagcacagcagagcagagaggggaaa

SEQ ID NO: 19987 - DNA, 1165 bp, Mus musculus
catgttacaggctttcagcaacttctaagcagttcactgaggacaatagagtttgggccttaagccacttgaaagtgaccccgcacacacacacacacacacacacacacacacacacacacacacacacacacagcattctgctgctctttagtcaatatagtctgtagaatattattctgtttgggattggattttacttctactagataccgggggaagacttcaaactatggtcccagccccctggtgttccgtgataacgtggattaccgagcattcgaatgcttctaaaccactgcatttctcttccagcaagactcacggaaaacattggactccctctgatactgcttgaaaaacacaacccgtggccagcctacgtcgcttacatctccccggcagtaacccgaatcaccgaaaaaggctgggccagggacctagagtacatttatgctgctgagaaaaacggcaagccagtaaagcgcagcaaacatagtgccgtgctgctgaagaggaggaagccgtccaagccctcagaactcatgctgaaagagaccctgtcagagaccatgctacccacgtgggaatgctccaccatatatgtgagtcccacatttgtcccagaacctgcacaactccaaatggatgtcagagaggggcccacatcaaactacaacaagatcattttctccaagaggcctgcgatgaggaaacttccatttggcttactacaggccagcaaggagatgcataccaaagattagcaaagagccctgtagccatcacctgagaataacaacagttactctccatttgctacaaattacatcatgtccttgaaacttgaagttgttcttgtttatacagaggttgtcagacagagatgttatcagaaagtggtctgggggagtatttggatagacaaccccaacactggagtctgttgaagtgggacagctatagattctgagggtctaactgtaggcatgtttatccacatccagacagcagacagaaaccacagcagtgactttagcagtcataacttaaaaggctctttaaccaggcaacttaagagggcagaaaggtaaaagaaaccagttaccaacagagggtcgcccctgtgtgaaaccagttctgttcctggatgtattgagtgtta

SEQ ID NO: 19988 - DNA, 1231 bp, Mus musculus
aaaagagaggagtactggataggctaaggcaacagaatcatgccagtcttctgaaaggtgtgggcctcctccatcctcctccattccccctccatcctcctccatccccctccatcctcctccatccccctccatccccctccatgcccctccatcctctaccatcctccaccatccctccatcctcctctattctcctccatcctcctccatcctcctccatcccccatcctctaccatcctccaccatccctccatcctcctccattctcctccatcctcctccatcctcctccaccccccatcctcttccatcctcctccatcccccatccccctccatcctcctccatcctcctccatcctcctccatcctcctccatccccctatcccctccatcctcttccatcctcctctatcctcctccatcccctccatcctcctccatcctcctccatcccctccatcctcctccatcctcctccatcctcctccatcctcctccatccccctatcccctccatgccctgccatccttttccatcctcctccatcctcctccatcctcctccatcctcctctatcctcctccgtcatctacatcctcctccatcctcctccatcctcctccatcccctccatccccctccatcctcctccatcctcttccatcctacttcattctcctccatcccctccatcctcttccatcctcctccatctcccatccccctccatcctcctccatcctcttccatcctacttcatcctctaccctcctcctccatcctcctccatcctcctccaccctcctctatcctcctccatcatctacatcctcctccatcctcttctatccccctccatccccctccatgccctgccatccttttccatcctcctccatcctcctccatcctccccatcctcctccatcctcctccatcctcctccatcctcctccatcctcctctatcctcctccatcatctacatcctcctccatcctcctccatcccctccatccccctccaccctcctccatcctcctccatcctcctccatcctcctccatcctcctccatcctcctccatcctcctctatcctcctccatcatctacatcctcctccatcctcctccatcctcctccatcctcctccatcctcctccatcctcctccatcctcctctatcctcctccatcatctacatcctcctccatcctcctcca

SEQ ID NO: 19989 - DNA, 1307 bp, Mus musculus
caaacactgagccacattccccagcccatttcacagtcatttgctcattttcttctgtccatactcagcacggtgtacattgaggccaaccccacactgtcagcagaatcccctggctggcaggtgtgtggagacgcctgcacgcaaggtgctcacccgcctgtgcttttctgtgcagaaggctgtttgacatcagaacaaggctcactcccctcacgtacagcagaaccttgctcccagccagaggcagttgtcaaaggccttcaccaaggcttgctggctgctcccggagtctgatgtgacacatgaagtagaagagcaaaaagagttcagagaatggtacatagccaagtgggggaagggaggggagagatgtgtgagccttcctgttctctttccaagctggacacctttttgtttttttaaattcagtcgtttattttttttaattattattattattatttgcttgagaatataacaaaaacaagacatactgaggtagaaggaagtcatttagtcatgaacactgaagtgagttaggagtctgttctgggtcaaatccttggatctgagcagatgtcgataattagtggtgatggagcagggtgaggttttcagtgttagtcaaataaatcaaacaacatgtgcacctctttggtcaggctccactgcttgtagtccctggatgattggatgctgcatctgcccaagatgccgctccatcatcatgtgatagtcgttacacacagggcctcttctcggaggagttagggaacatggagaattaagccttaggtctgtctcttccttcactggccatctgcaagcccactgagtgtcacttctgagctgctaggctgctaggagacagacaccagttcatgtcctggcagtttgtcctgctacatgtttggtattttttaaattttttaattttttctccagtttataggaaagctatggcatattcctggtgtactttatttctgaaaagtttcatttctttccttgtttgaaaacaaaaaagaaaagttttttttccccccgtgtttgtttgtttttttttttgaattcctatccatggaaagccttctctctggggatgtttgcatgtaggtctgtgctcgtttactctgtagcacctacaaaggtaacttcaggcagagtgactatggaataaagtctgcattgagtggtggagagatgttctggggggaggggactcttggggagttcttctcagtgatgaatgcacttcagtctttgggagaaacccaggtgtagatcatgcctggctgctctcc

SEQ ID NO: 19990 - DNA, 1185 bp, Mus musculus
ttggtttggtttggtttggtttggttggtctggtctggtctggtttggtttttgaaacagatgagtgcagcaggctatgtacttgaaatggtcacgatttcttgggttaaaaaatattaaaatgtgcccaaactttgtgttctctttatttcagaaaccttttctggaattcgtcataattatatgctgttgatatagctttagttatttctattttacttttatttgcctgtcttttcttttttttttttttttaaaaaaaaggtctagctatgtcactataaggggatttaaacacactgtacagggtccttctaccactgtctcccggggctagtattagcaatttgccaccttatacagcttctgcattttaagcctctactatgcaaaacacagtatttcaaatatttcatttttgttagtttatgtgtatgtggctatgtgcatgtgagtacagatgactagggaagacagaagtggcacatctcctagtgctagagttacaggtgactgtaatctgcctaacctgggtgcaagaagatgaactcagtccctctggaagagcaacacatgctcttgacttctgagccatctctccagctccaggatgtttgaaaggaacattacccagctttttgaaaaaaaaacccagtagttcagcactactatttacttggtatgtacagccagattatatcatagaattaatagtcaagtattatttttaatggatcatttttcttcttgctattttaagcacccagatggttctctgaaatagttctttcctttgcctggccactgtggtgtgtcccaacgttgtgggttttttccataagatactctagtgaaaaagtcttggctaaaactaaaggaaaattgcctcatcaccagaacacccaggagcagttggcacagctttcaaacaggaatctacgttaccatcaggaaccagctcaaatgttcatagcatgccgtacagaagaagctagtctgtaaaatatggggaaatcatttgattatgcttaaaatcatgtgcctccagaaaatattatccactgtttggaggatgttatttgtttcaaatagggtttcttattgttattgcttttgacacagagtctcccagtgtatttatactagcctggaactcactatgtagaccaagtgggccttacagag

SEQ ID NO: 19991 - DNA, 1188 bp, Mus musculus
acttgtgctagtcagttaccaaatgtcatttcactttgttatatggcaagtgtccaggagctgtagtagcagagttgactaaagaagagactctgccatctgaagaactaaacaatatgatgatggtgttttgagaaatctttccttggggagatggaaacagtgcctactctctcatcataaggtcctaatcaaaaaccaaaggatggttccaccaaagttcagcctagggagccattgtttttattgggttgcttatagagcatgggtgagggggctaccggcaggagtaggaggggatatcaaagcagctgcacttgcaagtttgtacccagtgtagatgatggcttccccatagccatgaaagggcacctttcccggccttattactctagtatctctaagcctgaggccatatgcagttaaggcagaatagcaaacaaatggttgtgaggagtggctggatcaggtgagagtccaagtcctccccaacccctctgggagggaatgccagcagctatcaagctggatcctgatggactcttgcaagcaggcactgccagtctagtgaagatagaggctgtttcattccgagcactgcattctataaccgatgagaacagtttgcttcagatttagagatccatggccaaacactaggcagagattggggaagcccatggaagaggaagaaggattgtaggagccagagaggtcataaaaacatggctggaagaatcagctaaccagggctcataggaattcatagagactgaaccgacaatcagggtgcctgcatgggtcttatcaaggtcctctctatgttatggttgtatagcttagtgttcttatggaatgcataacagtgggagtagaggatgtctctgattcgtttgcctgctcttgggacccctttcctcctactgtgttgcgttgtccagccttaatatgaggggatgtgctagtcttattgtaacttgttatgctatgtttgcttgataacacatgggaagcctacccttttctgaagtgagatggaggaggagtggatctggctaagaggggaggttggggtgggtgggtgggagaggaaactgtggtcaggatgtaatataggggagaagaataaaagaaaaaagtgctgtcataaaacacaatataacattgtagaacagtggaaagagattg

SEQ ID NO: 19992 - DNA, 1121 bp, Mus musculus
ggagttgccaaggctgtctctgaggacccaagtgtttatccaagttggcccatggtctccatgctttcattagaaactccactttcttcttctaaatagttgacttaaagctccaggtaagctgaggagagctggatcgaatctaatgtttaacaaatcttcctggttcctgagccatttagggaatgtccccctcggctgttgggctgtgttttagttacggctgtcttgcgttcgcatatgcccatggagctcaatgacaaatgttactcttcaggaaccaacatcagggtggccatgctctgggcacagtcttttttagaatgaagacaatgggaagtaagacagactagcgaactaagggttaagacacacaggatctcagccagctttgtgtcatggaaactttagaaccaagtgcaatgggaagtcactggggaacttaggggatttctcagggccccccgccccaaggctacaattccatggagcatctcagaagacagcagtggggaatttggatggtttgtctctttttctcccgtatctgggtgtctgctgtctatctctaatctcttggtttgtctcgtctctctgtctgtctgttagttgctcataaacatgcagacccctcttcggggcttgtgaatttccagcattggttcttgtgaccatgtaaaacgctgctgttttatttctgggacttgtcaccattttaactacattaaatgtggtttagtaagactcatattctgttctgattttagatgctcctaactttttttttttcagaatacacagacttcattcaagaaatacacagactcattcaagagctttttaacttgacttgttcagtaatttggctaaaatgagcatgcaagttcctttctaagaaccggggtgggtgcaagttttctcaaatctttgtacttctgagcatcacgtcatcctgaccctgcttcaggtgaagtgaagcttagctgagcataaaagtgattttcttttcttttaaacttttacgatgcttgggcacttaatgtagtctagagctccatccttaactctcttccccagtgggcgcctaactgggttttccctttctacatgcatgtctctga

SEQ ID NO: 19993 - DNA, 1146 bp, Mus musculus
tgcctgttctatgtcttctgcatcaatgccattctggaatatctagagtaaagccagttggtgcctgtcttctacagccctgacaagtcagtgctcctggattgtggagaaggcacttttgggcagttgtgccgtcattacggacagcaaatagaccgagtcttatgcagcctcacggctgtgtttgtgtcccacctgcacgccgaccaccacacggtgagtgagcatgtgggggtgccttccccttgggcttctttccctctagtaccaaacttttgagttgactcagcgtttcttgctgaataaaacttgtttcacacacagcctgtccagcaggaccatccagatctggattttttaggcttcctaggtcttaccccattgcccgccttctaacacagcctgaaatgtttcagtcactagtcagcatgtgccacccacctgtgacacaggatcagtgagataggaaccacttacagggagggacttgagccctaagctgtggggatgacgactgagactggcttatcacctgtgctcccctccccagggcttgctgaatatcttgctgcagagagagcatgcgttggtaagtgaggcacctgactgacattgttaattgcctgcttcattattggctgtacctaccactaattatttcttaccatttttactggaaagtccccttattcaactgtacagagatctttttttcaggcatctctggggaaacccttccagcccttgcttgtggtggctcctacccagctcagggcctggctgcagcagtatcacaaccactgccaggagattctgcaccacgtcaggtgagcatcatgtgtactgggcgggtgccaggctgttgccttctactactgcctccttcctgaccccagctgactgggtggcagccgaagtcctggcagctctgcccttggagcataagtatcccagttctcactgctgctgtgcactgccatgactgtggccactgtctctgcagctgacagatccagggtcaagtgcaccagcagctgctagcacagacatccaagccaggtggcacaggatagggatggcccagcctcactttcagggaaggatgagaaggagtcctgacagatgctgcctgtcacctgcagcgtt

SEQ ID NO: 19994 - DNA, 1255 bp, Mus musculus
aacctttcaggccacccttagtcacagctccaaagtactcagcttcagacatccacttctgacagctttactttccccgtgtgatgacggcttcctctactccacgctgacaatctgaactgaggatttgaacataagtgaccctacgtaggtctccatgttcccaaacacattagggatcttagagcactttcgcattcaggcaccccgcttagtaggtgtgtggggcctgactctcctcttctggaggttacagctgactagcaataattctgtttcccaaagcaggtggagagggtggtactgggcacctagcccacagcgtggcctgcgtggctcaccagcagaccctgctcatccttctcaccacgtcccatgcagccctggggcaagggcgcaggaagcctgttcatactttgggattaagggaataaaacagatctgggccatgcatgcacagtcagtttaaagtttgttcctctgaaaatagatatacctatacatgatatatttgtatatatgaaatctatatttgtttaatttgagccattcaatctaaacctatgtacaggtgtacaatggaaaattctaaatgcttagttatttttcccagcagtgtgaactcacccgtctctgagagtgggatctgcagactcgaccttacagctttgctcacttcctggcaagggcagtccagtccccaaatttgtaacggagcctgggggttgaaggttatctttacatatatgtacaaactgttgtcaagagtaatgttattaaaatagatttattaaccctgagcttggcacatggtcttgtttcggtgaaggctgcggggcagtcacaacatcctgtgctgcctcatgaggaagtgagcagagcgccgccaggccagggaaggcaggccaagtcctcgccagggaaggcaggccaagtcctcgccagggaaggcaggccaagtcctcgccgtgtcacactcgcgctcctaaagtgtttgccacgctctcctgggtggggagaacacgcacatgttagagtcgactttgaacatccttccaagtttcagtcactaacctgctttcaggttccaacaggcatctagcccaaggtgacatttcttcatactttcatagtgattgtcactcatcatggaccaagagcacaacaggctcacaggcacgggagatgcggcctcactgggtaacccagcccacagaagaccccacactgaagcaggattccaaacttgagcttt

SEQ ID NO: 19995 - DNA, 1164 bp, Mus musculus
cttcctctctctgcttcttggcaaccatcttcctccaccaactgatggtgccacactgttcttctgcgacaagtgccttgtcataggcctaaaagcaatggatagggctgacttgacaagaacttggatttctgaactgaacccaaaggaatctttttttttttttgagttcctttatttcaggtgttataacagtggaaagctggcgcctgaagtctgtgaattagagagagtgtaatggatgctgatatacagtggactctgctaatgtagctggtacagtgagttagatacacagaaagatctctgaagcacaacatggcgagaaggccaggttgcagagtgggaacctgaatacggagaagaagaaatgaacatgcatgacctgaacctgcatgcttgtgcgtgtatgtatagatgtgcgcaaagccccaaacaggatggagagactgtgagggttattccaggggatggtttgctgccagctcaccactgcctgccacatctcccctgcatcagtgagccctccagaacctttgcaaaggtcaagtgcgttctccaagtctgtcctttgtccattattactttgtcttttcttcctctgctgtggcagtttaagaactttgtcccagaactttctttttccttgtgacttttgaatggtgagccctgcctgggaaggccttcctcaccatttctatacatgctagctgtgtacctcttgacttttttccttcccttagtgccttactatcttgcaactaattattaagcccatctcggcatttgtttttctgtgtggtctgagtgatggaaggcatccaagtagatacctactttcttcaacaccatctatccagcaatcagcgggtccagttgtgagcattctaaagccacgcacacacacatccttggaatgctcattacggtttgcctagcattgggatggactgtctctctggttatagtagtctcaggaagtgatctgttgaggttgaacatttgaaaaaacacttgtgtaatgaagtatctggatttatcctggcaccaaatgaaaggcactattgtcccacagaagcataaacaacaaagtgtggacataagctgggccagggggtgtgccttaaaaatgccctgtttgttgtagagctcaggcaaggtctt

SEQ ID NO: 19996 - DNA, 1142 bp, Mus musculus
ggcagtccaggcatcggccagtggtcccggccggccgggcatgaggctgcacaggctctaggaacagtggtccccggccgggcatgaggctgcacaggctctaggaacttttttttttttttttttggttatttgagacaggacttctctttatagccctggctgctctaggaacttttggcatagctggcatttctgctctggccgaagccactgaggaccctttgcctgaagcgacggcttgtccttcagtaggtctctgaaagccatcaggcaatcaataggaccagaggggaaaagtcagaacaagtctagattagtcatcacctgcttttgcaaaagctggctgtgatttggacttctcagatcaatgcaggcttctgcagcctctttctatgagaggcagcaggcttctccagaccagagactccccttaagttcttcagtagagagagtcctgggagcccaggcaggccctcttgctgaggtgtggcttttgtgctagcagaccacactgagccactcatgacagactggcagagggacagagaaggccctttgcccttggttctccatgccccttactctacaggcctgtcccgtctcccctcagatggcctgcctgttctctgcagtcagcaagaggcagcctcactttcttggagaattctctcagcccagaccttctgcaagtcattgtgagggagcctttttttttttcccttgagcagcaattaatcacctcccctcccacttttttccaccagaggaattcatcaacactgattggtaattttttaataatggtgataagaagcattgttttcttgtggctgtttaaaaaagtaaattagtagccatgtgactaaaacagtaatttgtggttatttgttttagagggatctgtaagcatcccttttattagtagtcaagagcagattatttccaatgctatttctgtggtgatgggaaatagggaggttatggtctggctcagtgctgagagctctctgagctcagagagcaggttctggggacacagagaggatctgtcactcctccattcagggacccctgacccttgccgagttggggaggctgtgatgtctagcaaatcgaaactctcctttctgtccaggaag

SEQ ID NO: 19997 - DNA, 2977 bp, Mus musculus
gtccacatccatccactgaaatgttcatgcgatgagtgccgttcttatgatatattgaagctgtgtgtgattgggagcttatagtactgtattgtatagacattgagaagcactgacgtagggctctgatacaaatgtttgacgctttctctgttcaattttctcgcagaaacatccctttattttgatgtatgaagaacgtactgtagaggtcgcatgctatgtttgtaaaatcctggatcagatgccagccactcccagctcgcccatgtatgtcgactgataccgctgctacatcagactctagaaaaaagggctgaggggaagcaagacgtaaagagttttcatcctgtatcacagtgtttttattgctcgcccagacaccatgtgcaataagactggtgttcgtttccatcatgtctgtatacttctgtcatctagactgtgcatccctgtaatacctgactgatcacagtgttagtgctggtcagagagacctcatcctgctcttttgtgatgaacatattcatgacgcgtggaagtcagtacgatcaagttgttgactgtgattagatcacaccttaattcatttctagactcaaaacctggagacgcagctactggaatggtgttttgtgagacttccaaggctggaaagacacagtcatggatgtactgtctgagcatagagaacccgggcttgagtgagaagagcttgcacagccagtgagacacattgccttctgcagctgggagacagaggaaggattccctttcttcaccaagtgcaatagatttcctcatctgataggctgttgctttaccgtcacacgcgatgtgctcagccaaattccctactcaaaatatcatgttaaattagaatttatctttaccaaaaaccatgttgctttcagagaggtcaacattaaaatactgagacaggacagaatgtgttctttgtccttttccagccctgctcttctctgggaagatacaggagtctgccacctgtcatagaagggtgctgccaacttgatgctctacctgccaccaaccaccaggactgaaggaaggaaacagtactgagggcaaagtttacagatgtttttgattctggcattttgtccagaacagcttgtagcagctatagattcccccttggccccaagcctgggacttgagccatcgtaactcactaacagggagaattagctagtagcaatgtgccttgatgaagatttcctgcaggcagcaaaacaccaaatcacaacgctttgcttctcgacatcatgggccaggtcctcagtttctaactctttcccttccccacagttcgttgtcgccatgcggcttttgctcagtctagtattctgccttgtttttcacattgggaaccctaacattaccagggatgctacttaccacaatttgtaaccctgaatctctcctgtgctctggtgttcagaaagctgagacagctgggcccagttgatgttgtacgtgagaaagaggcagtctgttggagaggcatacttgagcaggataaagatcctaaatggcagcctttcagataggcatgtctgacacctgctgaggcctctaccagttcactctctcccttggaagtggaattctacccacctaaaccccccaaaaaagacaaaacgaaaagaagccacttcatcttatgtgccgctgcttgtcttcagcccattagccaggtactgagcgtcaggctctgcatagcagttaagcagcactggtagtggtctgccgtgcaggggatgcctgctatgcaggtgatgccctcccaggatctattcctggtgggcactgctgtgtctcccccagagtggcactcaaagtactatcaaacaataaaaggaaaatggtgctgtttgaagttacatcccttctctttggaggatttaaaaatgatctatcttttggtccacttgcctaattttcccattttccacccctggccccctacccttagattctctgtgttccacaaggagacatcatgagatgtcttccttaagctgcaccaagccattgtcctccgttgttcccaggactcaagaggaatttgtttctctgctgtcagcttcctgtctggctcagtatagcctcactctgccgttatgcaaatggagatcaaagtaattctgactgtccaggagctatctcactttctgctgtgtgggcggccacataaaaaggcaattttagtgtattaatcatagattattataaactataaacttaagggcaaggaatttattacaatgtatctttattaaaacaaaagggtgtatagtgttcacaaactgtgaaaatagtgtaagaactgtacattgtgagctctggttatttttctcttgtaccatatgaaagtatataaaaattatcaaaaagctgatgtgcagggatattgccttatttgtctgtaaaaatgtagctcagtaacataactgcttcttggagctttggaatattttatcctgtattcttgtttgaatccttcctctatttaagacatagccatggagcccacatgtttatggaatagtctaccctttgcctgcaggtcagttgtaataaatctaggttgtgatgatggtcttgtaatctgattttctgcagtcataccccgagaaagaaattcaagaaaaaatgacattaaatcatctgtgcatttcatatacaggagagttatctccttccagaagtttctggttcttttctttattcgtcccctccctctgcttcttccctgatgtaacagtgtggcacagcttgcttttttcttttagcagctgtggtgcagtcttttcaagctcgcacttgggtgtctggacctactgtggttgtagaatgctgcaggaagcaggttcagttctacctgtatcagcgttgacaggtgtgaccttaggcctggtgtggccagccaggctcctgatgctgagactcc

SEQ ID NO: 19998 - DNA, 1157 bp, Mus musculus
tccccattccagtcctcatcttttctgtcctggactgtttcccatctcaatctagtgaatgaagatgctgctaggtagttaagaaggctgttgttgcattgcatgctagagcctatacaattctgagatgatggttaaaaatatatttgtgtgaaggagcctacaattagtcatgtgaaaacttctatactctgattttctttgtatttgcatgtgggcataattctcagagcctcagagagttattgtgtaagcctcaccaccattagtgaatgtgtgacttagagtcctgtgcccttaaaagaatttctgagtgcttttttgttgtgtgatcaaacttacaattataaagtataaggaaacatgataattttctagcctggttaatattgtgaggtttagtaattttcagtactacggaaaaggttttactccagtttctaaaactattctgtttgcatgacatctgttgttattcttttccagagaattcggtcaactgtggatgaaaaagaacaaaaacaacttctcatggatttggatgtagtaatgcggagtagtgattgcccatacattgttcagttctatggtgcactcttcagagaggtatggggaaacggcttgggttttagctggtaaatgcatatctaacttggatgagtaagaggaggtaggattaattctacattaataacaaagttgcctcttgttatagtacagaaccatcctcgttaacttgcaggttctttctgcttgggattgttttggaatgccactgaagtttagacttaaagcttcttatagtaacatctatctagccatatgtaaatatttctgtgtctttgtggttgctgcttctgactgccattggttttttttcctttatgttttctattaaggatgtgacacagctctgtgtcagtacttcaatgtagatttttaagaattattttgtttaatttggtggggggggcggttagtaatgaaatgtgtgttatggtttttaaaaaatacatttttcctaaaatagactttgtcactttcccccttgcctttcctcccactagcctcctttataagtgtatttcattacagtttgttctttttttgtcccacccacctgtccttccctcattcccttcctccttctggctgat

SEQ ID NO: 19999 - DNA, 1149 bp, Mus musculus
caggctgaagcacagttgtctgtccctggcctcagaagaaaccgactcctgacacccccatcattgattgccagtctctagaaccttaagaaaacaattattttctgttaaatcagtcagctgcagtgaaccagtatagtccattccttagttgtgagccaccatgtggttactgagaattgaactcggaactgctgaaagagcggtcagtgttctttaaccactgagcaatctctccagccaccctgttcagagacgtttaagacattaagtagccatttaatgtctttatctcagggttctgcatcggtcactctatatcatactgtaactgtgtgtatactgcgctaaggtcaaggaagaagcaagtagagtagggttcagtgtagaccagaacaaatgcaacaacctgcttgttagggtttttctttgtaaaaccaggattgcattaggaaggcatcagatggtgggagcacaaaccagacgtgcacagctccagcaggacttggtgtgattggtttcaattgaagcagacacaaagccccttccagagtgagatgccttgaactatgtagtggcttacatacctggaagtgtaggatgtatcctgccactgtctacaatctacacctcaaaacacatcagaagaattcctatgagtggccttgaaagaaagcatgtctggggtgtaagacttcaactcttagcaacgtgctctagcttagcacaatagcaagggcaggctaccccaggtgagagagggacaaagagactgaagaaggcagagctctcagcaaagtttaacaaacccaaagggaagagaatggtttattacttattgcaaacatcaccacccataatttccataatttccctacttgttctatgcaagagtcatcattaatgggtattattctgagacaaaattccattgttttaatttttactattgatcactagtaatgccatgttttccatctataatttacttgttattcttcttttttgaactatgcacttatgttcttgggctttttctgaagttattcatatataatttctttctggactcataatcatttcttatccattggtgttagtatttatgtttttggtgaagcctagtgatgactgtatgtgttctgcctt

SEQ ID NO: 20000 - DNA, 1167 bp, Mus musculus
catctggacctccacctcctaaaggctgcacaactttaagatagcatcatgagctgagtagtaagagatcaaataggaacttgcggggaaacatttcacatctagcctataacacccaagtcagtgatagaagagctcatgaggggggagggggtcatgcatgcctgaaagcctccatctcccagatctggtattcctagtgctggcttcagggggacttggctatttttcctcctatttctcaatctccctccccagggtgctgtaacacagacctcacatccctagggcatggtgggacacaggacacagtttggaagccgtcgcttctccatgtccatgttgatgctgctatcggctgcagtgagtggcaggacttgggtagctgggatgcacggttcttctgggtggcttctctgctttattattagtcttgtggaaatgatttcgcaaggagcagtagaaggtgtaaattatgcttcattgggaatcatgaaaaaaattatgtctgcagctagagctacaaacgaggagctgtgtgagacacaggcagggttagcacccacacaggcagctgtgtgcccaattaccagtgagctacctgtctgttactctctgtcatttgtagggagaaggcaaacagccatgtttataggctgcaccccatgagagaaggctaacgggagtggtttgaaggtctctgacatcccaggagcaggtacaggctctcctttaacccggtccttagcaacattctcttatatgactactggaccaaggacctcaggctgcaggcagccatcaacagtgtcctccctgtgttttcatcttatccttaaaatgtcttcttatggcctgaagtgtcaacgccttctcgtctgggccttgtgcagacacggtccctgagcaaatgtcacctggcctccctgctccccagtctcctcttctgtactgggaagatccagaccacttgagagctttgtgcttgtctcagtggttggtccgtctaaaggctcttcccttcacgcttacctgggcatcatggtacacttgtggcctgagtgtctctacctggccctcagtgtggagtgctgaagcactggggcctttaggaggtagagcttgatgggatgttgttaggctattgggggtgctaaccttggaaag

SEQ ID NO: 20001 - DNA, 1178 bp, Mus musculus
gtgtgtgtgtgtgtgtgtgtgtgtgtgtgtgtgctttctgtatgcttcaggtttatctctctgtgttaggatttcattccctttgacttctgaatgatgttccagttggggtgtctaggctgcattccgtctaatcactcatcagttgatgcgtttattgggtcatctctactttttggcctttaggaatgacacagctgtggacatatgctttcaatcctcttagacaaatacctggagtggaactgctggatcatatggtaagggtgtgtaacctgtgaggacttgccaggctgctttccaagaccgctgtaccatttgatatccacagcaggggtctaggaggcttccaactcctccacagccttgccaatatttgttattatctgtgtttcttcaccattgctgttgctagtgggtgtggcatgtcatccattttggttttgctttcccacgaagactcatggtgatgggtattatcttacgggcttgttggacattcacatgtcttccttcaaaaaagttctattcagagcctttgccaataaaaatatttctttattcattcattgatttgcttgttcatctatctgtctgtctgtctgtctgtctgtctgctgtgtgtgtgttgtggggggaggggttggtgtctaaggaggccagaagaagacatggatcctttggaactggagttacaggtggttgtgaactgctgagatgatcaaacccatgtcctctagaggggcaattgctgagccacctctccagctccaaataatgtctatatcaaggaacctagtgagtctatctcccccctccctcttttgagacagggtctcactatgtattgctagctgacctgaaacttattgtgtagatcatgctggccttgaactcatgaagatccacctgcttctgactcctgagtgttggggttaaagcatgacaggcatgcttttgccaatttgtaaaatttgggttaaaaaaaaaatgaatgtcttcagaattgagttgtaagtaatctttatatactgaagataaaagtcatttttcagaggggcagagagatggcttggcagttaaaaacatcttctgctcctataaaggacataagcttgcttcccagcacccacagggtgggtctccactgtctgtaatgtcacttctaggagatctga

SEQ ID NO: 20002 - DNA, 1161 bp, Mus musculus
cagctgtgtgcatgttcaaagacttcaggggtggagtctcacaaagtcttgtttgacacatgcccccccccccgcccctcaacactgtcgcacccttgaccagcactcctctgtgctgacttcaggccctgtgtgacaacagtaagagctgggttttgttattctctagaatggctccagctgtgggtgtgcacaatgagggaggaactgctttcccccttactgtcattggtcagtggagcagattctcatggctgtaggtagttgctacacaggaagcgaaggaactttggggagtcacaaggtgagtgggtaggggggtgaagaattctagctggaaacttgtacgggggtgaggggggacattttttctcatctttcccacagatgactctgtatttgacctgtctatcttctccaagggcaaaaatcctctaaatgccactcacatctttcagtctcacaatgcacatcacggatagcttactaatcttggaccttctggcagcccatccacagaaccatctctcatggttgttagcaagatgcctaacacactcaagcaaactaagcactgtcactttcctttctgaaccatctcagccaaaaaggccaccatgaggacatctcaccaacctgtgctcagcatgaactgtgacatcagcctttgatagtaggacattatttcttgatttccttattaaaagaaaaaaatgggtgctagtggtaatttgctttgtggcttagcaacctagtttgtgagtgatggtcaagctccaagtcttgtcatacacagggggttgggtatcacagtgtagctcatgactttgttccctcaccccacccccaatccaaaaggttcagagtcccccgagatgacacttcctccagcataaccccagttggctgacgtgagcctattccatctgaggccattctctctttggttcctttctaatctatccacacatgcctttcccttctttgatcccctcccttccattgttcattcatgaagagttttgttagagacaagcaatctgtaatccctcacctgaagaccgcagactgcagctctgtcatgcgaggaagcgctcaagtgtcctgtgcgaacccctcgcctcttcctgagatagacttggctctccctcttggatactc

SEQ ID NO: 20003 - DNA, 1411 bp, Mus musculus
aatttattgaacattggcccttgggtatagcttgacccttcccagaatctgttttgccatctgccatttgagggtgcttgttctaaacagcctttgagggttttaccccctgtgtctcttccctccccattgcctatttgcaccctatgcatgtggtcatatgtaagctggatcatctccacagctgtgaccagaaatcctcacgaagggcacatttctaggtagacccaaatggaactaaatcatgtcacaagctgagagaattactgagttcctctcaggacccctgaagaagctataagtcagtaccagtagcttcagggtctgtcgtaggagcgaggacaactgtaaacacagggtccgctgatcaagtccttcttgctcattgcagtttgatttgccagcagtcatactgagactagcttgatcctacacctgttagacagtggcagagataggcccaagctaagtggaggccaggccaggctgagggtggggccctctgggacctagtcctctaagctgtctttgttagatactgctgagtgaaaggtggaccgagaaggctcttgtgaagctccaggtagacgggaatgttcctcggttcaggtgagagccagatctagagagtcagaacccgggggtcttgagataggaggcaaagcagctatggaagggcttttgctggttaatcatttctgaggtgaaagaccttcttctcagggggcaggctccaccaggaatggaggatcaatcgctgtaatattctagtgttgagtgtagctcttggggtctgaactatggaggcttggttggggaatgtggatgcccttagatccttttctgggtgataatagggatgtgggccttttgtgtttaaggagagtttctaatagggctgtgctggtagagtgtgaagggccagagtcacagtatggcaccgaggcagaagggaagagctgagactggccctgccctgcttctcagtctgttccacatcctaaggtcacaccctgtcaggacttcttcgtactcacctgtcccttcctgcagcttccttgacagacaggttcttggacccaggcaccaacattccaagggacaccagccaacctgggtgagggcccgactctgtatgtcttcccttccctgggggggggggggggcgggaagagatgtccgaagcattcccttgcaacccgagcacatcagcgaaccccacgaaagtggaattttctaacaaaataaacttgctcatttggtccgttttctgtaacttttgctaaacactttatacatttttaatgttgaaaagcagtgtctcctgccagaactcctcacccaggatgaatgtgtttactccacgctgtatatctttccatgctccggctgcctggaccagtaaataaaa

SEQ ID NO: 20004 - DNA, 1154 bp, Mus musculus
tgacttactgctgcagaataattggtttctgtttgcaaagaacattatcacagcaaagcccagaaaacagaaaggcctgtctgtgagagggtttctgaggctaggttggaaggcggctgcagggggaaggagggagggatgtgaaaaatcacatttcctagaaggcaattagctaataattaattttttagcatgctcccatcgcggacttgtccttgtgtgatatatagacagggatgccggcttcctgctgcatcctttgattcctcgtggaaatgttaatgagactaaagcagttaaggagctctttagacaacacggtgctgtggggaaggccggaatgaaattcagaccctctgaggacttctctgacacacaagaagtccctttgtttcctgttttataaaccagaggcatgtctaaaattgcggggaaagtgagagggggctgaggcctggcgccggggcctggctttctatatttaaaaagaggaaaaattgttcgctagttatccgtgcctgggtttgataggcagtctagggtgtttttgaagttctgagggaagggtctctgaagatgtaagcgggatctgtctttcacttagacttaattaagaaacttgctggctttgtctgtagggggcccattacgcacaagctgcagccccctctgaataggggctcagcctggaaagtgtatacaagccaggccgcctttgtgttgtgttgccaaactggaggcaggagcaagtgggagcctggctctgccagaggccagcctgttgttcatacatgtgaaccaggtcccaaccaacgctgcagcaagtgtctgcccattccctgggggacctagaactaacgaaccttttaggaaagaaacatcaagaggctgaggggagagagggttggccttattctccggtgtccctttttagtcctggtgatgggccacagagctaaacagtatcagcagccagagctaggagtgtaagccagaggtggccagggcctggtagtggtgcggcagtctcagccacccacccccatcacttgatcctccagcccagggcacaattttgcctggtcactgttcttgtaaccctgagaataatttccccctggtgggctactgtggcctgccctatttagaacaaa

SEQ ID NO: 20005 - DNA, 3700 bp, Mus musculus
aagagcagcctggtgatccagtggcgggacacatgggcacggcggctgcgcaagttccagcaacgggagaagaagggcaagtgcaagaaggcctagcgcggaggtggcgcgggctccaggagggcgggcagggcgctggcaaaggctggcagccttggacttggccgtcaggggtttttttgggagggtgggggcggggcgaagtcgaagtggggcggggccctcagcggctccgccccagccccaccctcacacccctggctgcgctcttatgcgcatggcagaaagcaccctgtattgacaggccaggccctggagaaatgaggacaagacatagctacctcacggcgctccttccagaacagagatgcgcttccctagggctaggtgggggtcgccgtggaggggttagggaggtcctgagaggcgggaacagaatggcacagtggtctacagtcgctgtgtttgatggttattgaagggggatgtaagaactgtgaatttttgggcctgcagcctgggcaggggcaaccaatccaccaccagacactagtcacgcccccctcctttctccatcacccgctgtctaggaattcccacaggactccagactctgacaacaggtccctatgttagagggcccgatgacactgggatcagccagctttggtctccactgccacctgctgggctggtctcctgggtggagttcaccatctgtagggaggggagagttctcctggggcctgctctactccagtggggctggcccaggctcctggcccatcagagggcctagggcctaaggaccctgaagtcaagccgggtggtcactgcctctgctggagctgcctgtggaaggaggcattgcaaaccaaaacctcccagagagtttccttgctggaaacttggaaacagccctttttatgacattttccaggggagggggaggggtactggcgggggtttagggcagtgacactatttgtgtaatgacatcagctcccacaaggcctcacagcaatgtcaacagctggagagggcctggttaagtctggaatgccagcggctgtctaggcagtttgaaccaggcttgggggaaggggcttgcctgagtcagggtagggtcgctgctcagcaaggtgcctggcgtccaagctggagggcaaggccaggaatggtcaggttcttggggtccaagcattctgtgactgcttcctgctgccgccctcactgctggctccccagaaaagggacatagactccttggttaagaaacccactctagctcccagctgtcttggtctagcctgggcagtctggtctattcctttctggctgccttctttgtggaggtccccaggccctcctgtatgcctagctctcttttctcttagagacttaatgtcctcacgcaggcagctccaagcttcccttctggttgcttcccaggcccctttagcctttccctgcctccctgtactcgggcctctagcctcgcgccccgcacactggatgagaggcctggccctctcagtcaggaaattggtttcatttctcctgcccacttggctgccctgaagggccatatgagggatgaagctcagcccctcagtgacacggctccctctgcttctccacttctgcccacatcaccactgccacttactgagcaccctcttggtgccaggcactttacccatatgctcctggcctgttttcaccacaaacctgcgaggcagggattcactcttgtcttcgtgttcaccagtaaaaagacatgtccacgtgcccaaggtcacaccagcaccggtactcagactctgacctcaccacagttgcacatcagcagttagccctcttgacactcccacagtaggcgagggttgggtgggatagtggttaccactgagacccaggcagcttgtctctagagaactctgaggatatgagcctggagtatggtctgggacagacccagcaacacctcctgaggaggcatcgggagtggcggggaatgaggaatggactccctagtggaaagccgcaagatccaggaagacaggcatggccatctgagagggcctggagaggtggcttagctgcttccctagccggaggaagactaaggcttcagagggaggctggcatgagcacacagacctaccctggcaagggtcaggtggcttccctggtccaagcttgagattgagggcaaggtccactatccaggagagccagtatggtttgttgggtaccatctgtagcaaataacatccagctgtacagcaggggtctcatttctgtaccagcatgtctaatgctctggccagcttccacccttgaaccctggagtccagtctcacctggtatccagcgaagtctcttaactagacttcccccacgcccctgctaagcaacagagacgtcttgttagaaatctaccaaggcctcctgccctgccctctgtggcctgctcaatgggggctacattaaatagccaaaatgagccaagttgtggataaggtcattgctgagggagcagggtttgtcacagccaccacctctgtggaccagaatccagcccacctctcctctgcctgagagccagccttagggaggcagctgtctcctacccaccctagggaggagatggaaagggggaagaagacatcctctttgtacagttaggaaggggtgcaaaatggaagtaggtttttgagtttgagagtgtattaacagagttgtgatatgtaggtctttgaagaaaaccataccaggttagtcacttaccagtcaagatttcccagctgtccctttgcttaccatttgggtagtctggtcccctgtcaccagaatgcctcctttgctgacacacagtggcacaaaggtatgtggtgaaggtgatgacatgctcctaggtacagctgtgagctgtggtttctggccagagcttctgtcccagaaagcagggcaggaggcaggaccatccggctccttcagatgggagggagggtcagatgccaagggcaaagcctagggaggctggggtggcctctccgagggccttagggactttctagaactctgcctcagtggttacatacaggcagtgggtacaggctgtcttagaattgcccctgagctggaacaagactgaaatgaggagacccttcaggactgacctggggaatggttcctttagggtctcaacacttgaaggactccatccaggaaacctagagagtgggcaagataggctcactaatgggccgtggttcacagacagatattcctgtggaccagagccatgccataccccaggggtatcaaaattgtctttgtggggccttgcccctgccaaaaactaagccagcctcacctcttgtgtcagcggacttccttcccctttccctgatctgggtacacccccccggcctccctcctgtgtcaccgattctgctcacacagaattgtaaatgtttagttgtgaccatgacatattgtttgggccagtgttcctttccaatgcatactaatatattatggttattatatatgaatatatttaatgacatggagaaagttgtggattttctttctttttctttctttttttttttaaagtttttttgttgttagagttgtaatggacccagacggaacttgtaacgtgggccctacatgatagaactaaatc

SEQ ID NO: 20006 - DNA, 1199 bp, Mus musculus
ctccggggaactggattataaaacagctttatctgtggatgcacaaggatggatattttgtgagccggttttcttttttttccccctctttctttcagaagcgactaacatgccttgggttttctgtagcatcttttattatggggagacaagaggtcttggggtccttttgaaccgatgaagacttaagccttatacttaagagagtagcatgcagcgtttcgcctgtcttctagaagcctcggaaggccaagtgttggtttgggtggccctggaaccggcagtttagaccgtcattcacaggtggttgtcaggttgagtcctgaaggcagaccacaaacccccaccaagaaccaggcattgtccgaggtactctctgtgtgctttgttcaattaatcagattgccacaaggaacagaagcctttcaaaaacagatgttgctgccaccaaagggcagtttgtatacacagggaccaagtggggactcgtctgcagggcacattggagagagcagggggtatcagaggcatttgtttctgaggctgatcacataaaagccgtgtcctattataaatgactcccggggactgttgcactgaatggagctgggaagaagtgagctgcccaggccagtgtgctagacaggaacagagctgtctgctggcgtgagactggactgctgggtgggaatgaccttactactcccatgttcttaccctgatttcaaaatgtatctttattgtaaactcagaactaggtttcccatttctttgtttacttttggtttttgatacaaggtcaccccagggaacctgggcagcctgaaacttgtctgtaatctatgtgccttctgagtgctgggactgtaaacatgaaccagccacaaatggattagaaatacattttaatttgcttttgttcttttctttctttctttctttctttctttctttctttctttctttctttcttttttttttttttttgagctggttggtggtggcacatgtctttaatcccagcacttggaaggcagaggcagtttgaggccagcctgctctacagagggagtttcaggacagccaaggctacacaaagaaactctgtctcaaaaaacaataacaataacaacaacaacaaattttttttgtttaagtgtaagtgtgtgtgtgtgtgtgtgtgtgcgcgcgcgcgtgcg

SEQ ID NO: 20007 - DNA, 2205 bp, Mus musculus
ggggggggcggcacaggatgatggggtaggaaagctaccccccaaggccgtgacgccccagacggggtagaaggtggagagtgagccttgtttagaacccagcagcctcatgttcctgtgcatttctctcccaggcggggcggtccaatcagcttttcttcaagccgatctggccggcgccagctgcacattgagggggcatcgctagagctgtcagatgacgacacagaaagtaagaccagtgatgtcaatgacacacagccaccccaatcagaataggcacaggaggtcagaggtgatgctgaggacaggccagaactcatcccagcaccagtctgcttgagccctgcactcactgctcgggaatggcaagctcccagattccttccaggaaagtcaactgtgtcttaaggctttgcggcctgcgcagactatatcctgcttcagactagatacaattgcccctttttatatatacacctccacaagacatgcgtattaaacagattgtctcatcgttgcatctattttccatgtattcatcaagagaccattttatgacacattaagaagaaagaacctttttgaaacaaactccaggccctttgttgccagtggctgggcctaagggttgccccgggaccgtgctcagctgctctgcatgccctgtcctactgacaggtaccttagttctgtgttcatgtggccctgacccttccttcaaccacacctggtctcttagaacattgtgaacctaacctgcacttgtgtctctcatttcctgtgaatagtgatcactgtctcagtgagcaaactgggagaggggctttggcggcttaggggtgggtttggattggggaagcagcatccatttggggttctcctgcccatctcccaaggggtgaccctgcccctcaaattcatggtgtccccaccgtctcaatgtgaatagtctcagagctctgtgcacagagaggacagtggccacaacacataaggtgccccgggtggcagccatcacagtaacttccaggtggtctcctgagtgtctggcttgataatgccctcaattcaggagtgagcctctgtgacccttggggtgctcgcagaaggcctctccaagcagtcaagccctcttgcaaattcagccactgctttgagcccaaaacgggaatattagttttatgtcggaggtgtgttccaagtttgtcaatgaggctatagcctcaagaagatgccatctgcctgaatgttgacatgccagcgggcgtgtgacccttcattttccctttcccttcctttggacagtgttacaatgaacacttagcattctgtttttggttgatagttgagcaaactgacattacagaaagtgccttagacactacagtactaagacaatgttaaatatattatttgcctctataacaacttaatgtattaagttctgactgtgcttcatatcatgtacctctctagtgaagtagatgcgcaaacattcagtgacagcaaatcagtgttagtgacaagccccgaccgtggcgatgtgctggaaaacacggaccttttgggttaaaagctttaacatctgtgaggaagaactggtcacatgggtttggaatctttgatttcccctgtatgaattgtactggctgttgaccaccagacacctgactgcaaatatcttttcttgtattcccatatttctagacaatgatttttgtaagacaataaatttattcattatagatatttgcgcctgctctgtttacttggaggaaaaagcacccgttgagaacaaacagacctcaataaacaagaataatcatgtgaccatggactctgcttccgcaccttctgttcttggtttcccatctgtggtctgactggagggggaatcacacacctgaaccaagcacaccagggtgggggtctcccaaaaacagcaaacagccaacacctgaaggcaggggacaatgtacaagtgtttggcccagtcactgaagactagactaggttagaccatttttaaggaatcccagaagtttgggattgcatgtctgtaccagagaagtgtaggaaacaaatggggaggagccgctggctccccacaagcaacctttctggtatctactgtctgggattgtaaagaaaccctaggaagcatgaagtgagcacacacaccctaggtgtatttaggcctct

SEQ ID NO: 20008 - DNA, 1189 bp, Mus musculus
tggtcaccccacagggcagtaaatggctttgatccagctcctcctcctcctgggctgggctcctcacgcccatcgtcagcaccgggtatgctgcctctcagtgtgtgagtgcccggcctccaggtggggcccctgccctcttccagcagcccaggacacctacgcctcgtccctcggtgcctgggtccagccctgtgcccctctgtccgcctcttcaccgctggcagagggcaggctgcatgcagtggcggctgctgggccctgcccagccccaggactctgcgcgatatcaatactggctattttctcttctcgccgtagtgccgttggtttcacatgattgcacttttgtgggtcacaagtgatacatacgtgtattactcgatcactggatgtggaagtacccattcatcacatctgcctcatagcccccatctttgctgtgctgataggatttagttgtgtttaggacattgcagatcttctagaagtttcccctcaatcaggttgataagaccttctaagcttctgccaagcatcttcagtgctcacaatcatgtgtcccctagcctcacccctgcagttcaggcctgtttctgtcagagtcaggaacatctctgaattatggaacattgtctgtaccttctgactttatgtaagcagtccattccattgcttgtttctcaaagcagcgagatacctgtctgagctgcaggaggcaggggcagccgggacatgggcacttcagggccgagcctctgtgttgccttctcctctgtcctcagactcaggaggcaggtggcaatctcctcgccagcattccaggccctcagttcaatgacatctctcagagcatttttgttttctcctctgaaggtccatccagttgcattgggaagggttgaggggcctgattctggggctggctaatgccagctctcgggggcagactggctaggtgtttgtcccttgcaccctatgattattctcatgctgcacttactgtttacatttgttttattgtacataggtttgtaaacattattgcctaagatatttgtatataacttgggctttgtagcttttatttattcagactcatatggcatgttaattaatgacttacgatggtgtcctactctgggcagctgtataggatcatcatgtggttaaaagaagatacttccct

SEQ ID NO: 20009 - DNA, 1279 bp, Mus musculus
aaattaaagtcctgtgccacaatgcacgccccatgtaaggtgtcttttaatgtacatgagtacactgttgctctcttcagatactaccagaagagagcatctgatccaatcacagatggttgtgagccaccgtgtggtcactgggagttgaactcaggacctttaacagaaagaacattttctgtatgtaacattgtagtggtttttgggtttggtttttgctttccaccactagctcagttttcaaggaaaatgcagtggtcagttcttggtctctggtccttagtgcagcaagtgataagattagactagctggataaactctgagcttctgctccaaagctgcatcatcatttgtattttagaaagagacatttaggtatctactaccctgggttcagggaatggaaagtgggacctgtaattgggcctacgttgttgcttaaagcttagggctgcttctttttgtgcaggtcgttatcaccaggctaaagctggacaaggaccgcaagaagatcctggagaggaaagccaagtcccgacaagtaggaaaggagaagggcaaatacaaggaagaaacgatcgagaagatgcaggagtagagacatctcgtgcacggctttcattaaagactgcttaagtagtcctgtcttgtgtggtgttttccaagtaccttgttttctgtggcttactctgcttctgtgtcagtctttggggtctggaaaggacagccaccctcagatggtctgatagcactatgacaagttatgtggaatcaggagctatgatgaatttaaaccttggaatggcccttatttataggaatagccagttgaaaatattcctaatcgactggtacctggaaaggacccttaagagtcagttctcccaccttgtgagtcttacaggttgtttggtcttggaggctggtaccatctcatagggcctaaaatattgggagaaccctgacatttatttgtacctgtgtgtgtgcatctgtatatcaaatccctgcagtgtctacagaagccagaagagggcaccagatccccttgaattaaattgttgggtccccagacttgagcttagttcctctgaaggagcagctggccagctctccaactctggaaaaacatgtgttgtctcaccggagaaaacctggctgctgagatttcaatacagtgagaattttattactggtgataagattttatttccctgtgctaatgttggatcagtgctataactgagttgcaggcagcagtgggcacatcagaaa

SEQ ID NO: 20010 - DNA, 1279 bp, Mus musculus; identical to SEQ ID NO: 20009

SEQ ID NO: 20011 - DNA, 1315 bp, Mus musculus
ctaagccagacagaagaggggtccagtcgtcaggagaacgcccagaaggctctgggtgctgtgagcaaggtgggcaggagggaagctgcggagggaagaggtgccaagtgacagaggggaatgggagggaatatgctgcgatgggtgactggatgcttctcaccagatcattgagcgctgcagcgctgaggtggggcgcatgaagcagacggaagagctgatacggctcacccaaaggttgcgcttccacaaagtcaaggttagtccagcccagactctccatttagcctttactcaccatgctaccctgaggctagagcatctctctctctctctctctctctctctctctctctctctctctctccctccctccctccctccctccctccctccctctctctctctctctctctctcttttttttctttctcccaggctctacccctggtctcctggtcacggcgcctggaattgcagggggagctgaccgagctggggtgtcggagggggggtgtgctcttcacctcccgtccacgcttcactcccctctgcctactgctcttcagtgacctgctgcttatcactcagcccaagaggtgggtcctgcgtgggaggggagggagcctgaaccggagtggtgaagaggcatctagcaggacccctgctctcctctgaacgccctcttccctgggcagtgggcagcggctgcaggttctggactatgcccatcgctccctggtgcaggcccagcaggttcctgacccatctggaccccctactttccgcctctcgcttctcagcaaccaccagggccgccccacccacaggctactccaagcggcctcactgtgagtcacgtctatagaaagcactcttgggggctggggatgtggtttagttgtagagagcttgcctagagtgctgaggattcaatcctcagcagccaaagaaaacaaaccagtatggtagccttacctttattctctgagcactgggaagacagggatagatagggggaccatgaatttgaggccatcttgggcagcctcatcaaaacaagcaaacaagccactcttaggaccctcagactctgtattctatttcttttctctctgttgctcttacttaccaggagtgtatctcttaggccaaccatgaatcctccccaccccctctgttcaccactagatcagacatgcagcgctggctgggagccttccccaccccaggtccccttccctgttccccagacaccatctatgaggactgtggtaagcatctctcaaagggaggagggaacaaaatgtgagtc

SEQ ID NO: 20012 - DNA, 3262 bp, Mus musculus
ctgcggtgacctttaatccacaggccagggaagagctgggccgattccgaaggcggccggacaccttcagcctgggcgtgtgtaatggctgtcagctgctggctcttctgggctgggtgggaagtgatcccagtgaagagcaagctgagccaggccaggactcccagccaacacagccgggcctcctgctccgccacaatctgtctgggcggttcgagtcccgatgggccaccgtacgtgtggagccggggccagccctgatgctccgagggatggaaggctctgtgctgcccgtgtggagtgctcacggggaaggtcaggctgggaaggcaggggagggtttgcaagctggggctggggctgggcctgaaggaacttggccttcactctcttctccttcacttccaggctacatggcattttcttctcctgaactccaagccaagatcgaggccaagggcctggttcctctgcactgggcagacgatgatgggaaccccacagagcagtaccctctgaaccccaatggatctccagggggcatagctggtatctgttcccaagatggccgacacctggcactcatgccgcaccctgagcgggctgtaaggctttggcagtgggcatggcgaccctctccctttgatgttcttcccacctccccgtggctgcagctcttcatcaatgctaggaactggacccaggaggacagctgctgaggaggccgcatgaccaccctggcccacagctcaccctttgactccgttgccttctttccccattgctttcaggagtatcccatgtgatttccaaaagcatcttagcaagaaccaaaatgctgggatgacctcagctgcattgctcattttagccttgcccctgcaagagctgctttcagctcttgagtttaacatggatcttcagcaagcggctcaggctccgaggacagctgacaggcagaggggtgggcagagatttactggcagccctcccgggatcatcgccttgtgatccttcattctcttggttagagctctgagtgagctctcacatcctcgttttctttggctttgtgagatcggctttcagtctatagcccaggctggccctaaactcagaattcttttgcgttaccccgggtgagttgccaaggcgcttggcattggcttagggtctaggaataatgtacatcagtccctcccagcctctgcccagctgaaaagagcagctttccggatcccttttcagacatgcactgctagttgttaggaatcattgcttctgtccatgctcaaggcgctgacctgtgcctatctcagatcacattcctgattcttgcttctcttaatttagcagccaccttacagtagttgataccttccttcttagagcagagagccctggagcttgttttttgttgttttggcttttcaagacagggttgggtttttgtttttgtttttgttttttgggtttttttgttttgttttgtttttatgtgtgtatagccctggctgtcctggaacttatgttgtagaccggctggcctcgcactcagagatccatctgagtgctggggttaaggcatgtgcgactactgcctggccattcatttttcttcttgttgcttgatcagtagtggtgcctgacattggtactgacctaatggagtttgtagtcttttttttttttttttttttttttttttggtttggtttggtttcaggcaaggtctctctgtgtagccctggctgtcctggaactcactttgtagaccaggctggcctcgaactcagaaatccacctgcctctgcctcccgagtgctgggattaaaggcatgcgccaccacgcccggcttgtttgtagtcttaataggattgaaataataatagctccttagcttgtactgccaacctaaataggtgctgggtaacttatgtgtctatcataaagattaaggtatttgagaggtgtttcccagttaacaaagcaaagtttagtgataaactgtctatgattggttccaacttaaaatgaacagcaaggcgccctacccacccagctacatctgcctgtgaagatcctgcagtcacagatcacgtcttggtagtagctgttgtaccgacagccaccttcatcatccgttgcttcctacttacttgtacggtagactcgggtagccccctaagaagctcgatgtcatgattaaaggagtttccttataaaaacagactagcatgttggatttctaaatatttcagggtttgggggaatgcagaacacttgtgcttctgcagaagtagcaccccaagaaggtactaatggtgaataggtgttaagctgcaggttgtatgtccatctgagtattagaacacttgcctagtatctgtgtttcctgagtttgattcccgtccagcaccaccaaaggaagatatttggagatgggaagtcagatctttctccgttttgcattgcaaagtaacttttcctaactagagtgattctaaggattttgtttgtattttcgagacccatatgatgttctggctggctttgaactcatagctgagagtaatcttgaaatcctggtcttctaccaagtgctgtgttctgacctaagtaccattttggacatgtgaacattccctttgatgctgtggaagaatatatattttgcttatggtggtacatgccttttatcccaacacttaggagataggggcaggtggatctttgtaagttcaaggccagcctagtgagttccaggctagtcaggacactgtctcaaatttatatatttaaagtatttatgaaagtatttttgtaagcctgagtaggcaagatggcttagtgcagaagttttcaaccttcctaatgctgtaaccctgtaatacagttcctcatgttattgtgggcacaaccataaagttttggttgctattttataactgtagttttgctgctattaaaaatcataatgtaaatgtctgttttccgatggccttagaccccaagaggatcgtgacccacaggttgagaaccgctggcttagtgggtgggggtatttgctatcaagcttaatgctttgagttcagcccctggaactcacgtggtgacagggaagaaccaactctgcagttgtgatggcttacttgatgcgccatggcacatgcgcacaagcacacacacctgttagcacacatgtagacaggtgtgtggtacttgatgcgccatggcacatgtgcacaagcacacacctgt

SEQ ID NO: 20013 - DNA, 1178 bp, Mus musculus
ctgtcttgagctgccgtcccactttgctttcttaggtcatttgctttatgtgcctttgagccccgggcagcaccggctgggaggaacggctctagcccagtgtttctcccagcttggggagcaccctcctgatctagaccttcccgagaaccttgtgcgtgcctttcatatcacccaggggctgctgaaaggtgagcgtggccctggtacgtgggggcgggggggggggggtgaacaagtgagtgatgtgccttcaggccaaacccttctctcccgtgagtgcccgccttctcacactccctggctctctagatgctctggagccttaggcttgccctgagatggctgaatttttccttgttcctccagaatgccgtctttgctcaggccatgatgtcagcgatggggggcttgtcacctgccttctagagatggcctttgctgggaactgtgggatagaggtagatgtacctgcccctgggatccatggtgagttgcttgggctgtctcctctacttgtagattttctggtataaagaatgtggtatctctgaccctatctcctgagtcttggctgaatcctccatttctatcttcatgttctgaactttggccgtctacgacctctcatagtccctggtgcatcttccatgagctcctcctccagaacccatctcacccgagtcatccggactcacccctttttccagcattgcctgtgctgtttgcggaagagcccggtctggtgttggaggtacaggaggcagatgtggccggagtacggcagaggtacgagagtgctggcctacggtgtctggaactgggccacacaggcgaggctggaccccaggccatggtgaggaagccagggagaatgtagtgttaccgtgagcctgtcagcaaataccactcacggggacacactttctccttcatgggtctccccactgcaggcccgaatatcagtgaataaggctgtggtagtagaggagcctgttggggagttaagagccctctgggaggaaacaagtttccagctggacctactgcaggcagagccacgctgtgtgatagaggagaaacagggcctgaaggagcggacagggcccagctactacctgccgcccacctttcctgtggcctctgtgccctgtaaacctggtaagggagcgtgcaca

SEQ ID NO: 20014 - DNA, 1178 bp, Mus musculus; identical to SEQ ID NO: 20013

SEQ ID NO: 20015 - DNA, 1207 bp, Mus musculus
ttctttgttccatccttctctctgcctaggaagtcatacgaatattttccctgggcgggcaaatgtcctgaaagctgaactagctcccaagtgtactctagagccagcagcttacactcggagagcttgagtctccacttccgtggcttagggactgactgtaggacttaacgcatctcagtaagcactgtgccattgaacagcttttcttttgtaacatgatgtggctaagtttcccatactgggtttctgtatgggtctatgtacctgagtgcagcgccaatggaggcatcggggccccctagaactagagtctcaggcaggtgtgagcctgacatgggtacaaggaaccaaacttggaattatttctccatcttctgattaatttttgaaagcaggtgtccttggcatccagtctgaaaccagaggccagtggtgtgttgggtcgatagcagtgggcaagatctaccttcccaactgattcttgccaaggccttcagattataaccatctgactctttcctcaggctgaatttctcgactccagcatcgaccaacattgtttctgtgtgccaggcagccgggctgagggctgtggatcgggtagagaccacccgacgttaccgactttcggtaaggtgtgggcattgtggtaggagatcaagaggagcgagtgggccagagattagatcctgaactcgagcagagtcatgggagaagcagggggaaagctcttggcttttggcctgtcctgtatgcttaggaggtttggttgtttgctgcttgaaggtacctgtgaagggagaatcggccagcctgactaaccagacttatctgtgcatccttttagtctgaacaaagacgctgcatgggtctgagtgtgcatagctcagtggtgggaattcacctcctatatacaaaccctggccttgatctctgcactagaacagaaaagtggtgcaatgtggtagtagtgaggtgaatagcttggaggtccagagcgagtcctttttctcttttcttcagccttgtcttttgttttcttatgactggatcttcccaacaccagtttaccgaccaccctacagctgaaatggaagccatctctctggccgccttgcacgaccggatgacagagcagcactaccctgaccccatccagagcttctctcctcagagcattccagccccactcaagggctccatc

SEQ ID NO: 20016 - DNA, 1168 bp, Mus musculus
gggaagggcctttggccgatgggcagcattatggttaagggcgggggtctcatgtttaatgttacctccctctgcctaagccagatccctgctcagatggtgtggcaccgagtcctccggcctggcagggcctatgtactgacaaaattgcaagtaaccaagacccggattcacctttcctgtatttggacaaccattccatcttcaactctgaagcctctgagaccaggttatgtgcaagagctggagctggacttagagttctcgaaagctgaccttaaaccaccaccccagcccaccagctccaaagacagcagagggcaagaaggtcttgtccgggcttccaaagtcttgcattatttggtgagtgcaaggtactgatcttagaggttgtgacacctgcaatgtgagcctcctaaggaggaggaaatagtggcagcggacctctgtttcctgtgcagggaacagtcactgctgtgttgcatgagtctgccggcctctacattctagatgggcagctgattctctgcctcgcataccagaagatccatggcctcaggcgggttattcgaccaggggtctgtctggaggtatgtcagaaatcggatggcgatgagaagatgctcagttcatgggagatggtgggtgacctcggagagagtgggttttggtaggaaatgagataggcaacactggggagtttctcttggaacctatggtggagaaacagtagccatctccccaggggttaagctctgcccttgtcttgtcttgtcttgtcttgtcttgtcttgtcttgtcttgtcttgtcttgttccagacagggattttccaaagtttagttgttgtgagccacccatagtgggtactagaactgaacttgagtcctattcaagagtaatacttttcttttaactgctgagccatctctccagcctttaggtagttttttgtcttgtttgttttgagacagggtctcacttggaagccttggccaatctgagacttgctatgtaaactaagttggtctaaacctcaaatccccttcctctgatctggagtgctgcagttacaagcatgtttttttttttttgtttttgttttttttgttttagatcacagtagctcaaactggcctcaagcctctgtgtagccaaaaatggccctt

SEQ ID NO: 20017 - DNA, 1203 bp, Mus musculus
cgtgtcaggaacttggctttgtggcacacagaggaaggaaggttctggatggagcccacccgagtctctggccgttgagagcaaggatcagaaggtaagctgggactccaggttcctagggcctgacctcccatatgtaccctgtgttccacaccggagttcgatgctgtgctgtccttcctcataggtcttcctcatctttcttggctcttcagttcgatggtttccgttcttgtacccaaaccaagtctaccgactcgtggcttccggcccctcagtgagtgtgttcctcttgcacatcagaaagctagttgggttggactctggagcagacatgcgcgtgctgggtcccctaggtctcctggaataggcagaatttagggggactgaatcgtctgtctgtaaggacccctttcttcaccaggctctaggaagaagtcagcacgggaggacttaggcctaggcacatgctgaggcaattgtcttcatgtttcctagcagacaccagtgttcgagacagagggctcagctggcacctctcgacgtcctctggaactggctgactgtggatcttgcctcactgtccaagaggagtggaccctggagcttgggagctctcaggacatacctaatgtactggaggtccctagaacactgcccgagtcctcactggcccagctgctcggtgacaagtaagtattgtccattacctctggtcctcttggctgtgctctgctctgcgctggctgggctgagccagcagtgtgtgtgttctgtgtgatgtcagtgtgagagggggttctctttcagtctttcttgtcactgcaggaatagtcacaagtagtgtctcctactctctcgctcctcaccgaactgttgttattgttgagccagggtcttgtcttttggctggttttgaagttgctatgtagctgactttgattccgacccagctgagcagatgtcctcacagttaaggaaaagctttagcaataaaaggaaacaggaacagaaaatgcagggaagaaggtggcagtgtagagaaggacctgcgtgcactgcgtgcggtcggtagtaagtacagaggcgtggaacttcatagaagattctctaagcgagaacaagtgaaaatgtttcctgtgtgaaaaactctactggattgtgtttttattactaaaactgaatataagccagacatggtgg

SEQ ID NO: 20018 - DNA, 1183 bp, Mus musculus
tactctatatattttatttatatataattattattttctacctccccccagggtatctctgtgtaactctggctgaccaggaactcgctttgtagaccaggctagtctcgaagtcacgaatccacgtgcctcggcctcccgagtgctggggttaaaggcgtgcgccccaccaccgcccaatttaaatatttaattttttataactagaaaaaggagcgtgcacatcttgggacacagtttcaaactagtaaaaagaagcctcttaggccacaccttcgttctgtttcaatgactacatcacaaaaaacgtagccaatgagagtgggctgagtggcggctcagccaatggacctagagcgggagattcgaaagcgtccgggtcgcggggtaaaccggttctccgtgtgcgagcgcctagtggcgtaggctgcggctttgcggggaactgcgggggctgcagtggtccacggggctgatcgggttccgttgggcggatccacgtgcccgctatccgcctggaaggagaggtgcaggagtacccccgaccttggctgcgtgctgactcgcttccttctgcccgcccaggcttgcactccccggggatctgcctctgcatctcttgccttcgctgttgtttccctctctgtccagctcccctcccgctctcgccctggagaatggctcagaaggagaacgcctacccgtggccctacggctcaaagacggtaaggtcctggccacattccccgccccacgtcccccggaagaagagtccatgaagatagaggctggccttgcaaatggccggactctaagcgtttccgacgtgtgggcctcaagaatttgcttgcaaaactcagtctgatcacttgcagtcttaccgtagcagatgttgccaacctgaatctgagggcttccgtagagctgagcctgctcgtcacgtacaataatagttgggactgagcaaacatcatcgtgctttcgggtcgtgaatctcactctcgagtctgaaaaaattaactacacaggaaatagattatagaatagaaggttacggtttaaaaggttccgaatgatctaaatatttatgtacggccctgggtatgaaaccccagagcttccaagttttgatgtaccatccatactacactccagctttggaatgtatcgtactgagcggtgg

SEQ ID NO: 20019 - DNA, 1233 bp, Mus musculus
aggagactgcagcagacccaggcccaggtggatgaggtgagtgtgtgtgtgtgtctgtgtctgtgtctatgtctatgtatgtcaaagatgcaagatgatgggctggcaaataggtgtgggagcccatcttgggttgaaggtaaagacagtttatgcttgtgggtttggtcggagacctgcctcatcccctttctgtctccctgttagcatgcacttggaagggctgcaggatgaatcagttgagctagcctggggtgtgccagctggggcaggtgtgctctggtgataggcggatccaggccctatagatagagggtgttgctgagacatctgagcgctatggtagcggcatgaccctgatgtgtgctccttgcatgtcccctaggtgtgctaggcatgttctgtgtatgtccttggcatgttagcctggaaacatcggggtgcatgttccacttgtgccacgatgggcacatgttcaagaagtgccctccttgaggcatgccttggcacacccccctgcctcgtggacccctccctcaggtggtggacatcatgagggtgaatgtggacaaggtcctggagcgggaccagaagttgtcggagctggatgaccgtgcagatgccctccaggcaggggcctcccagtttgaaacaagtgcagccaagctcaagcgcaaatactggtggaaaaacctcaaggtaaaggggaggagatggggacaggttgggaggggcagtggggaagtagggtgtcactgtgtcattcacctccctctcactcttagatgatgatcatcttgggagtgatctgcgccatcatcctcatcatcatcatcggtgagtggggccagaggccagggcccctcccctggggaggtagaggctttccctggggagcctgggctttgaaggtcactaacctagtttttactctgcaaccaaaacacactttgctgctattggcagttctgactcatttagagcccaaaacttgagtgttgtatagccctgctttccctggttatgggtcaatccggttaagattttgggactaggaataccgggtggggtcctggtgttcgtctaggaaccctttgagcctaaaagctccatctggggattctaaaacgggagtaggagacaggaaagggtgaggtctcgaacaccaaccaccaggataccacttactccactgtttgaaagctaccgtcacatacccagtgcattaaaggt

SEQ ID NO: 20020 - DNA, 1195 bp, Mus musculus
ccaggctgctctggaccccaaggtttcctcctcccaacccctctagtctagtttgcttcccttaccccgtttcccacacctcttgtaccctcctctccctcccccagctggtgtgtaagtgtcttggagttcagtgtgttatgatggaccaataattctgccactcggggtctctccctacattcctgctccccagttttcatgtggggcactcaactgacattcccagggggtctcgctccctcccatctgcctgatctgctgcctcctcccatcaggagaactgggggccgaccacaatctggttctttgaggaggggtggctccagtgtgtgggggtcatcactgccttggggaggagtgggacaaaacagaatccccctaattcctgcctgaagtctctggcctcatccttgctagaggttcgactgaaaactttcctccccagtctggggggggggtattacccccatcactgcccagctcctctgactgcccccctgtattcagggtgggggtactagtcactgccaatatgtgttgggacttgctggaggatggggatcctcgtccttctccagggctgttgagcccagagagagagagtgtgagagagaaagcaagctatttccttgttgagtacaatgatagaggaaggatctaatctttttaaatggcacagttttagggatctgagggtacagccccttaacctgccttggggggggttgttccccaaactcttgccccccacacaccaggttttctgtgtggaggggaaccaaggagatctaaactgtggtgtgaaagggtaggagagatgctgggggtgggggtgcttgtgttttagacccccaatattatcccagtgtcccctgccttccttcttcccctgccccatgcccccaattctgtggcgcatccagattgtgaaaatgtacaataaacgtgtaatgagtaaccatatggtgtccaaaatctttttcttaatcagtaataagaatattggattttcagatatggagtggttgaaagattctttggtaagagctggctggcctgttgcaggaggccctgaccttgggccctggcaaagtgtaattcccgaagtggccacagggggcaccagcagacgagaatcagaagtatcactaaagaaagtacctgatgtctaagaggcaggtgaactctgcag

SEQ ID NO: 20021 - DNA, 1255 bp, Mus musculus
actgacccgaatttcttttgttgctgtatatttcaaacccgaaatgaggactcaccgaggcgctaaacgacattgtaaagaagcgaaacaaatggtcccaaagacacagagatttacaacaaaacaagtttatttagtgagatcaaatctgggaaccgagcaagtctgagcttggtagcttacgcaagaagcagcccgagctttgcactgctggggagctcaaatttcgttagtctccctctctgtttctcgcacctgcatccacccttcctgtcacctagctcatgcgctttccatacactacatttcattccgctgacctgaggctgtcacctctagctcctatgacgctccgccccatctccttgcacacggacacacacacactctctctctctcacacacacactctctctctctctctcactcacactctctctctctctctctctctctctctctctctctctctctctctgtctctctgtctctctgtctctctgtctctctctctgtctctctctctctccctcccacgctacccctttttttcctatactggtgtccgtaagccggaaggaggcgccgcccgccatgtggctctgtggcgcaatggatagcgcattggacttctagtgacgagaaagcgattcaaaggttgtgggttcgaatcccaccagagtcggttttattactcattttaatcttttcttggcttttaaaaaatttaaagacccacaaataaagttcagctccaacctcagtctgtcgctccgctctttacttacctgtctcccccagggcttgggccgtggagagcaggcctaaaggtgggagaagggtatgggcaagtaggcgtggcgccaatataaaggcaggcccctggctaggggacacaccgggatttaataacgattttattccatgcactagggactcgggaagggactgggactggactagggtagagagagtacaatgctacacacagggaagtgggacagggaaaagggatgggaaaatatatatttatatagatactctaatatagaccacatctcacccgcgcgctgagcccgcgcgccccgctgccctcctcgcccggatccctctcctgccctctgactggagtctctacaccacccccaatccccgccccagcccccaaaagctcagggccaaggtctccaaaacgcgggcggtgggagtgacggggccttgggcgccccgtcttgtctgtaaggcggtggcggtg

SEQ ID NO: 20022 - DNA, 1126 bp, Mus musculus
ttgtctcggtttcagcacccggctgcttgggccttttgctttggagcctgtggcaccgtcatagtggatcaaagtgctccctgttctcagtatacccctcccacagcccttaacctaaatcctaacagttctgttcctcctccaaagcaccataacctgggaaccaagcaggcaacacatggctttaggggacatttaagatcctaaccataatagaaccaaccccagagtctccaaagccagagtgtccacggagcaaagagagactgacacactgaggtcagggcccacgagaacccctgggcagttcagaatattatcctgatcctaaagataacagagcagtatctgttttggttaaaaatgaaattgaggttggttttgtttttgttttttttggtttttttttgttgttgttgttgttttgtttttttttttgttttgttttttttgagacagggtttctctatatagccctggctatcctggagctcactttgtagaccaggctggcctcgaactcagaaatccgcctgcctctgcctcccgagtgctgggaaattgaggtgagggggaggagggctgaaaagatgactgagcagtgaaggtacacgctgtgcttataaaggaccccattctcttctgagggtcttcaggcagctcacaccccaccactccactccctgggggagcatctgacaccctctttttgcctcagcaggcacctccatgagcatgtatgcacacacaacaaacagaaggacacacacacacagggacagacataattttaagtaaaataatttaaaactttttcatcctcctgtgggttggctgggagtccctctgttctttcacttggtctccttcatgtgtctgtattcactgagcaggttgacagagcaagaatattccagacatcttcattaggatgtcaggcactcagcactcgcctccagtgcttgtgtctaaccctacttccttctgtggtggtctcagggcatccttccagcaggcagatgtgcactgctgtggccttctgtggtggtctcagggcatccttccagcaggcagatgtgcactgctgtggccttctgtggtggtctcaggcatccttccagcaggc

SEQ ID NO: 20023 - DNA, 1112 bp, Mus musculus
agcctcccaggcctttcttgtagtatcacctccacctcctgccaaagtgggggattagccttgcccggcctttaggaacttctatgagatcatcaaagaggaggggaaccttgttacaaagatgaaaatagcgggaggaggaagggaaggggggggggctgcatggcacttttcctccctcttccaaatggagggtacaacagctacaagtgagagagagcgagctgattgctgttcactggctcggttacctcctgtgtgtcagcatcttgcagtaggaactgttctcctccccagggaccaaggaccaccccacagagtaagggttgggtgattctccctcaagccaaagaggagctccccagcctgttctaggtgacctagaaagggtggggggaacacagagggccaggcatggggcagacccccacgctggggctcaggtttctaggggacgaaatcctccctcttcaaggcctggatacagactaaatttgagtaggtcaggccagggacctagtcaggagcctgtcttgcctgtgggaccgagcaacacagtggatatcaggctagggagattcgggcacattccccctccaaggaggggccagggagtggcagtttgcatggggaacccccatatcctccttgccgcctttcccagtctttctctcccactcctggtctgtcccaatcccttcttctgtatcaggttatcggttgtacatataaattatactttcctttctgcgtgctgtcatttttgcctggggaggggaattttttgtgtggaggtaaagtaaggatgactgctttgtactgtttcatcttaataggttccctgggggccccttgcattgttgttgttttttgttttgttttttttttttgagacagggtttctctgtgtagccctggctgtcctgaaactcactttgtagaccaggctggcctcaaactcagaaatccgcctgcctctgcctcccaagtgctgggattaaaggcgtgcgccaccaccgcccagctactaatcccttttctactttgtgacttttctgcatttttatctcttgaatcattcaccagaataagacctttttccagtattaagc

SEQ ID NO: 20024 - DNA, 1099 bp, Mus musculus
gggagtctggattggggtgggagaggcaagcagtggtggccagatgtcagggtggaaaaatctctgctttcccctcttactaggctgtttgtgtgattatagtgagatgcatgaagttggacagctttatagaggaaatgggtttatttgggttcatggttttagaggttccaggtcagcagctgcatctggggggtgactttcttgcttgcagagtccttgcttgcattgtcacatggtgaaatgcagagagcatgcatgtagatcctcccctctctcttcttaagagccaccaggcttcaactatggggtctcgccccatgaccttatctagccctggttatcttctttaagccccacctgtgagcactgaggttggattccgttcctgccagtttattactttaccctgggcgttaagtttcaacatgtgaccctttagagagtacttaggtcacagccaaaccatagcactgcgccttcactcacagctactccagctccaagtgagaagggagatggtgtgaggacaccgctggacaaggatgacactgagaaccaggaagagaagccagagaagaacagcaaagtgggggaaaagatggaggcagaggtgtgtgcacacctggttctctctgaggagatggagtggaaagtctggagggatcttggcatcagggtgcctaggaactctctagctcaccttgactcttctgtcctccaccaggtcgattctcccagcccagccccatcactgggagaacggctagaacacaggaaaattctcttagaggatgaagcaccaggggtacctggagagacagagcctgaacctggatacagaggagacagggagaagtctggtgggtgtattataccactgatgatggggatttgagttttggggttccctcttctgcacttggggtgagagtaacagcctctcttcatatcttctgactcttcccacagcctcagagccaacaccaggagaaaggggggaggagaagccattggatgtacaggaacacagggagaggacggagggggaaacaggggatttgggcaagagaggtaatgggtggaaggcctggatgcc

SEQ ID NO: 20025 - DNA, 1680 bp, Mus musculus
cgatggtggtatcacgggcgccctcaggcaggaggccattgatcgcttcaatggtgaggaggaaatacggtgctatctagggacatggagggcctgagaacacctgccgtgtccttaggatgggagacggggcggggacgctggaaacttagactagcagttagaatgtagtggttgatagagcatccagcaaccaggggtaaactcggcctcttacttctcacatcccagcccctggtgcccaacagttctgcttcctcctgtccacccgagctggtggcctgggcatcaacttggccactgctgacactgtcatcatcttcgattctgactggaacccccataatgacatccaggtgggaacctgcatcctgcatcccctgtaacattcagcaagttgacatgggttcttgaaggacgttgtcctgctcagggatgggtcttagagagaagacctttcccgaccctgtgtcagcttctgtcactctcctggctgacctccgttttctcctgcccctgtaggccttcagcagagcccatcggattggccaggccaacaaagtgatgatttaccggtttgtgacccgagcctctgtggaagaacgaatcacacaggtggctaagagaaagatgatgctgacacacctagtggtgcggccaggcctgggctccaaggctggctccatgtccaagcaggagctggacgacatcctcaaatttggcaccgaggagctattcaaagatgaaaatgagggtgaggtagtccctgggaacccccaccctccaaaaaaaaaaaaaagctctcaaaaaacaacccccccaaaccctcaaaaaaccaaacttctctcagcctgtaaagggcaaatcccttcttcctaatagtgctgagagaagggacagccacctaaggaaataaggcaaaagacactaagatgtgggcccccagggagcagtctcttcctccagggcccagtgagggagaaggaaaggcatctcacccatcccagctacactgtgcttgagtttctggccaacacctcaggtcctcttctgtctctgccaggagagaataaggaggaggatagcagtgtgatccactatgacaatgaagccatcgctcgactgctggaccgtaaccaggatgcgactgaggacacggatgtgcagaacatgaacgaatacctcagctccttcaaggtggcacagtatgtcgtgcgtgaagaagacaaggtgagaggcttggggaccacaccctatctccaaggccatctctgaagggcagtgagtgcctttcactactttttgaagtaggagtgttctcttgcactcatatttttgatttatcctctcatcctggtccccagcaaaaagcagcagtgtacctcagacagtttatcattttgatagatgagactggactttggaaaggcacctagacacagaaagttcttgtggtcacagactggtgcttctgagtctatgggagtgagcaaggggagcgaggggaggcttagaggaggagccagaacactgcaaggaagaggtggtaggaagaatgtgcagcgtccagaaactgcatgctgggtccgaaagcttcaggcaggatttggccagtgcaggagacagggattgggatgcagccctgggacgagttgggaaggaggctgccagacttccctc

SEQ ID NO: 20026 - DNA, 1185 bp, Mus musculus
ggagaggaggaagttgacggctacgagacggatcaccaggattactgtgaggtgtgccagcagggcggggaaattattctgtgcgacacctgcccccgtgcctaccacctcgtctgccttgaccccgagcttgaccgggctcctgagggcaagtggagctgcccccactgtgtgagtacctgctgccctcactgccctgcctgcctcttttcctcttgctttctgctgtggttttctgggcctctcagcagtactcaagtgcctaggatcctaactgggtcctttctttaaccccttactcccagagtcattaagtttgaaaagtcggagtatcctgggtggtaggtcccaggagacttatgcacatctggggctcagtcgtcctggttttcctgtctctccttctcttcttctgtctgtgtctgactgcatctgacctcctaggagaaggagggggtgcagtgggaggccaaggaggaggaggaagagtatgaggaggaaggggaggagggagagaaggaggaagaggatgaccacatggagtactgccgagtgtgcaaggacggcggggagctcctgtgctgtgacgcttgcatctcctcctaccacatccattgtctgaaccccccactgcctgacattcccaatggcgaatggctgtgcccacgatgcacagtaagtggaatcacatcctcccagcgccaccgttcacccatttctgaggcccagataccaaccagctcgtccttcctcagccccgaccctgtgctgtacctttgtcctacctaacaaagggctctcttcccctccttctttcccctttctctaatgcaccatcctgaagtgtcctgtgctgaagggccgtgttcagaagatcttgcattggcgatggggggagccacctgtggcagtgccagcaccgcagcaggcagacgggaacccagacgtcccaccccctcgtcctcttcaaggcagatcagagcgagagttctttgtcaagtgggtgggactgtcctactggcactgttcctgggccaaggagcttcaggtacaaaggcttttcctttgcctcggcctcggctccagctcccaggcacccgctctgtcctctgggtatccagctccttcgtcatcctaggagttagaggctgtttcttctctctccctctgtgccccaacagctgg

SEQ ID NO: 20027 - DNA, 1174 bp, Mus musculus
tagaatcagaccctatctcaaagaaggaaggaagaaaggaaggaaggcaaaaaggatctttacacccaaaaagaaacattacacccaggtgtggtgccgtagacctacagtacctagctacttaggaagccgacctgaatgctcaggtttggaacacccaggtagcacagtgagaccttgtttctgagcaagcagggaaccttagctgactctccccccttataactgtcctttctactcactgactcctgtcacttgacactgttagagggactgtggaaccagctgttgaccaacagtttcctggccacaatagagataggaaaagctctgctgagccagttctgcagtgtgctctctgctggaacctgctgctacgctgctctctggccctttcagcaagtttagtaatttcatcatttcctggacaaggtctctcttctccctctccctacctccccccttccccgcccccaacagggtttctctgtgtagccctggaactcactctgtagaccaggctggactcaaactcagagatctgcctgcctctgctctgcgtctcttccttccttcctttctgtcttctctctctctctctttcttctctctctctctctcttgcatatgcatatgtgtatgttcacaggcatatgacacagcatagggaggaaggatcagaggacagcttttgggaatcagttttcctatcatgtaagtcctgggggttgaatttaggtcaccaagttgtcataaaagttaccttacctgctgggcagtggtggcgcacgcctttaatcccagcacttgggatgcagaggcaggcagatttctgagttcgaggccagcctggtctacagattgagttccagggctacacagagaaaccctgtctcaaaaaaaaaaaaaaaaaaaagaccttacctcactggcccctgattatctgtaatgttataatattctacatagtacattttagttttgttaaatgtataagaaatgtctttacggcttttttcatcgtagcttaaacctcctcacacacgatcaggaaagcatttgctgcatctcattcttgttcatttaaaactatttttctaatttcaagtggaagggttgctatcaaccactgagcccctctccaacccctaaaccatttttttagatagaattt

SEQ ID NO: 20028 - DNA, 1065 bp, Mus musculus
gtggggctcaaactccggatttcagcgatttcttaatctgctgatgctgaagtcgttcacttagtcccatgcaacctaagagtccataaattgtttggatccatcaatcgtgatatttagtaagctcataaatgatcttatttaaactatttgagagccaaagccgtttcttccatgacatcctgagggaatgctctggggtgtgctcatttgaccaagcttgtctcttttccaggacatcccacttgtagattattttcctgggatggggtgggggtgtgtctcatgtcgggggtgtgtgactcattatgtagccctggctcgccaggactcagaggtcacttgcctgttcacaacttcttgttagacacacactcctttccctgtatacccaagcactcatcagctccatctctttggaatccgtccttttgtctaacagaataaccatctttggtactgggaaacttcctgatgcccattttctacttctgccttcacaaacttaagtatcttactttctgcctcggatcttcagtgggtttctcgtgcttttggaataaagccctaaattcaagaagccttgcgcaagtcaggccctgccttcctcgccccctcacagtccttgtcctgcaagccgtgaggtctcctcctgcctcagttagcagagaagctgttctcagcccaccacacccttctgctttgcaccttgagaatcctaactagtcagttttttttctttgtcttttttggccccactttagcagtatgcattttctctatgttcttattatcactttaaaactgtgtagacagagccgggcagtggtggagcacgcctttaatcccagcactcaggaggcagaggcaggcagatttctgagttcaaggccagcctggtctacagagtgagttccaggataggcagggctacacagagaaaccttgccttgaaaaaacaaaaaaacaaacaaaaacaaaacccacaaaaaacaaactgtgtagactgggtgaaaatggctggctggctgctagattgtaagctcatgagggcagaaacctcat

SEQ ID NO: 20029 - DNA, 4727 bp, Mus musculus
agcggtgaacatacggtggaggtccgtacccaagtacagcagccctcagacgagaactgggacctgacaggtaccagacaaatctggccctgtgagagctcccgttcccacaccaccatcgctaaatacgcacagtaccaggcctcgtccttccaggagtcactgcaggtgaggatcaggcacaagagggagtaagggtgctgggcttactgggtcagggcttcaggaagtcactgacccacgtacctgtgtgaccaagcaggaggagagggagagtgaggatgaggaatccgaggaaccagacagcactacaggaacctctcccaggtgaagtacaagtttgtccctccctgcttctctctctctcctcccttggctcgccatcaacctgtctgtgatttttgccccagcagcagtgcaccggaccccaagaaccatcacatcatcaagtttggcactaacatcgacctgtctgatgccaagaggtcagtgaggctagaccagtgaaactgggatgcaaccctgctaggtactggtctgggacaccctcttaatttcgtcggcattcctgtgtccacaggtggaagccacagctacaggagctgctgaaactgcccgccttcatgcgggtaacatccacaggcaacatgctcagccacgtgggccacaccatcctgggcatgaacaccgtgcagctatacatgaaggtccctggcagccgaacgccaggtgtgctttccactgcgcatgcgtactgtgctggctgcgcgcactcttaggccttagccaatgagggcaaagggcgtggttgtcgctccttgctcgcctgcatcagaccttctgtgacgttctatctccctctgcaggccaccaagagaataacaatttctgctcagtcaacatcaacattggccctggggactgcgagtggttcgcggtacatgagcactattgggagaccatcagcgccttctgcgaccggtgcgcatcaccccttgcaagtcaccctatcacctcgggtccttgggtttcccacctgaccctgtgactgccctctccacaggcatggtgtggactacttgactggttcctggtggccaatcttggatgacctctatgcgtccaatattcctgtttaccgcttcgtgcagcgccctggagaccttgtgtggattaatgcagggactgtacattgggtgcaggctaccggctggtgcaacaacattgcctggaacgtggggcccctcaccggtaagaggctggggtcgggtcatcatggggtacgtatgaggagcgaaccctggaggggaaaactgggtctggagaatcagagtctgagggaagaaggggccgggggctggttgagacccctgcatgacttcctctggcctacagcctatcagtaccagctggccctggagcgatatgagtggaacgaggtgaagaacgtcaagtccattgtgcccatgattcatgtgtcctggaacgtcgctcgaacggtcaagatcagcgatcctgacttgttcaagatgatcaagtgagacccctgtttggttaccagcccgtcccacctggcttgttccccacccttgttcttcctggctccccattcttcccctgcgtctgcagcatgtccttaagaccttaagtgtcactgtgctggggacatgacagaagccctgctctcatctcatagccgttgtttcctgtggtccaaacacacacacaaaaccttgaaatgtcaagtgtgacatattcaagacgggaaatgcaactcagaaacgaaaagaaagggagggttgcccagggaagtccgtggggctagggtctctggagctccacccctgcccatctgccatcctccagccttggcaccccgctggagccttgtctcaacacccaccctttgggtcttgctcaggttctgcctcctgcagtcaatgaagcactgtcaggtacagcgggagagcctggtgcgggcagggaagaagatcgcttaccaaggccgtgtcaaagacgagcctgcctactactgcaacgaatgcgacgtaagtgtgcaagctcttccccctgcctggaagagacctaacagtagtagtgacttcttagtgacagccgctttctcctggccaggtggaggtgttcaacatcctgttcgttacaagtgagaatggcagccgaaacacgtacctggtgcactgcgagggctgtgcgcgccgtcgcagcgcgggcctacagggcgtggtggtgctagagcagtaccgcacggaggagctggcgcaggcctacgatgccttcacactggtgagagcgagcgcctgggctccagagggggcgcgggagcggccggtccccatccgcccaccactgaagctgcccactttctccccgcaggctcccgccagcacgtctcgatgaggccggacgccccgctcgcccgcccacgctgggcgcggcggggccaccagcacacgcctgggctggacctaggtcccgcctctggccgggaagggggtcgggcccagcccttccaccctattggcagctcccctcacttaatttattaagaaaaaaaaaatgttttttttttaacaaatacgaggaaaaaaaaaggaaaaaaaatgggagacggggagggggctggcagcctctcgcccaccagcgcctcccctcaccgactttggcctttctagcaacagacacaaggaccaggctccggcggcggcgggggtcacatacgggttccctcaagcctgcccgccgcgcgcccgcccgccgcccgccggcgcagacgttcgcggctcgttgtgtacatagacgttcggcagccgaggtttttaatgagattctctctatgggctttacccctacccctggacctcctttttttttttttttttttttttttttttacttccaatgctagctgtgatccctgtatatgtctcttgtttattcacttggttatgattcgtatttttgttctttttgttttttggtttttaatttataacagtcccactcacctctatttattcattttttttttctctttttttgggaaaacccgacctcttacatccccaagccatccctcctgcctctttgggaggcccactcctgggccttccctgcgccccagtatgtccgggcttggcccgtctgtctccgcccgcccgcggctccagccgggctctcatggtgctcaaacctgctcccctcccctacgtcctgcactttcttggaccagtacccccactcccgacccaaccccgaccccacctgagggtgagcgactcctgtactgtaggggaagaagtgggaactgaaatggtattttgtaaaaaaaataaataaataaaataaaaagttttaaagaactatgaggaaaagaaaccctgtcctccccagcctcggccattttaaaaacattggacacacacacacacacacacacacacaccttttttaaggcgtgaaacatcccagggcagggcctctctggggcagggacaccctggggtgattttctctggggctttattttcattttcttagttcggtttttttcccccccgctggggctgcggaggggtgggggggtttacagtcccgccccctcgcactgcactgtctctctgccccaggggcagaggggggcttcccattcctaccctattttcggtgatttttgtgtgagaatattattaaaaataaaagcaggaaaaaaaaaaaagagacccttgtgttttgatgatggctgtgaagcatatcagttgaagggtcgaggagctaaggggagggcgatgcagcctccggaggtggggagcccctcctcagaggagcctgtggaatgtccagacccacagtctgccccttaggatggggatgcctaatcccagagccgcattccaggataaggtagtggggggcggggtgcagagagactgccccgggggaggggcaggaaagagggctataaggactgcagtcgtgtggggcgggaaccaaccaggccatggcggaggtccccggagcccagcgccccgttctcgctggcggcccagagcctcgggatcccctagattgctgggcctgtgcagtgctagtaacggctcagaatctgctggtggctgttttcaatctcctcttgctggcactggtgctggggaccatcttgctacctgctgtcatcatgttaggcttcggctttctctgccactcccaggtaagcataccaaggggtatgcgtgagtggtgtgtgggcggcgggggtgggggggtgtctgagccactgcatccccacttgggctgtttcctcctgggcagagtggcccattctgatgtctcttatccgcacagtttctgcgctctcaggcacccctttgcacctcgcatctgcgggacccaggcttcacagccctgttggtcactggattcctactgctcgtgccgttgcttgtccttgccctggctacctaccgccgcctctgcctgcgcctccgcctggccgactgcctcgtgccctacagccgagccctctacaggcgccggcgcatcccacagccgaagcaaatcccagtctcaccaggttctcggtctgttcccacaccgggaaaggtctgggtctgaggtgcttagagtcaagaatcctgtcgattgccctcctggtctctcaaggacttgaaacaagcccaggggtgtactgcccaagccggttccttacc

SEQ ID NO: 20030 - DNA, 4727 bp, Mus musculus; identical to SEQ ID NO: 20029

SEQ ID NO: 20031 - DNA, 1134 bp, Mus musculus
gtcagcacagagccaaggtcctgcctcccctggagcaagtctggaatttgctgcaccttgaggtgagtgaggctgagtaagtgactgagagaagggggtcacatgcagctggctatgctcatgccaccatggctctctctttttttttttagcacaaacggaactatggggctaagcgagggggccctccagtgaagagatctgctgaaccccccgtggtccagcctatgcctcctgcagccctctcaggcccctcaggagaggagggccttagccctggaggcaagcgcaggagaggctgcagctctgaacaggtagggaggttgtacatgggtcagcaggcagagtggatgccctggggcaaggagtaggattttcactttctcttctcttctaggctggccttcccccaggtctgccactccctccaccacccccacccccaccgcctccaccaccaccaccaccccctccaccaccaccgctgcctggcctggctattagccccccatttcagctgactaagccagggctgtggaataccctgcatggagatgcttggggccccgagcgcaagggttcagcgccgccagagcgccaggtgagccccttgtcagtacctgttaccttttccccttgtgaattctgtctttcccttgctcactgtaacctcgatcatctcccttaggagcagcggcactcgatgcctcattcatatccatacccagctcccgcctactccgctcatccgcccagccatcggctggtccccaacacaccccttggtccaggtccccgacccccaggagcagagagccatggctgcctgcctgccacccgtccccccggaagtgaccttagagagagcagagttcagaggtcgcggatggactccagcgtttcaccagcagcatctaccgcctgcgtgccttacgccccttcccggccccctggcctccccggcaccagcagcagcagcagcagcagcagtagcagtaacaacactggtcttcggggtgtggagccaagcccaggcattgtatgttatgacattgggctgaaggtgggtgacattgtctgaggggccacaatagcacactgacctcccctttctccacttgcagcctggcgctg

SEQ ID NO: 20032 - DNA, 1446 bp, Mus musculus
cactctcagtcttagcttgctgttactgccctgagggctaccagtttctgatcagagatgtggaccctaggtgggaaccttggggtcacatcggggtcaccctagggtgagcttgtctgaccggccctgccgcccctcctcctgaggccgctcagtgcccggctaaccttactcctattggttcctgctaggctgttactgaggcggagacaagggtgatgattggctttctgtggatagagaagtcttgtgattggctaaatttctgaagctcttgaagctgtgagaggacgctcccacggaggctgggtaagcaggcgcgcggtaggtcgccctagtggcccaggattgggagcctgtcaaacagtgcagtggctgggttgttaaccgtcgctgactccccgctatttgtgccatattcctattacccacttgcgcgattctaggggctcttgatgctgatgtctgtcctggcgccttgccctcagtcttcctgcactgacagttcagatcagcctttgggccctcgctgtgttggcaacttcagtacactcttttcttctctctgtagaattggttgcagaaggccagagactgtcacctggaaacagtgggcactattgttaagggcagttggagctggaccatcgtgccagagagctggggcagggggccgtgccccatctccagggctcctggggccactgctgacctggtaagggaaagattggaacaggtttggctgaaaacatggctgaaggtttttgcttccctgttagagcatgatctcttgtcgctgatttaggctggatgcatcgggcagtggaccctccaggggcccgctctgcacgggaagcctttgcccttgggggcttgagctgtgctggggcttggagctcctgcccaccccatcctcctccccgaagctcatggctgcccggaggcaggtgagaatgtggctttatctccaggcatttctctcccagtcttctctgtccattgctgtcattttccacgagtttctgttctgttgtgggtccagatgccagtctcatctgctcttccctctgactactccattctagggggaagcgtgattctggcagtacctaacagagcctttctctttacagatgctctgccagcgttgggcagcccccactctcagctcctttacccccatctcatggcagtagctccgggcaccctaacaaaccctattatgctcctgggtaagtgggggattccaaagttctaggattggagggaaattggggccttaaaggtttccccaagcctgatgatccccaattccttccactctgtaggacacccaccccaagaccccttcacgggaagttggaatccctacatggctgtgtccaggcattgctccgggagccagcgcagccagggttgtgggaacagcttggacagttgtatgaa

SEQ ID NO: 20033 - DNA, 1182 bp, Mus musculus
cctgtccagaagggtccagcctctagcatcttttctccagaaggtcctagccaatccagttttctcagctcgctgctgaccactgttccttaagggccttgcttaggtcagaaataacacttccctgggggcagtgtcatcagcaggcacaaaagcttgcagtgcattgcatcatggaggccagaggcctaagtctctggggcagggggaaagatgggggctggaaggccaggaaatggagaggccaggtagagagcccgtgtgtctgggtcctggagaaaacactggtccccaaggagtgagtctgaggtgagggttgactgaggcctaactcctgctatcaacacctgagtcttggccctagacttgtagtaatatacctagctctttgtatctaaggattaggagggaagagagtgggcccctgtcacctccttgggccacatggaggaaggaggtgatggggaaacaggatatggttttggaggtgacatggagggagcctgctgcagaggctacttcctagctcaggcccagtcacagctcttgcggaggaagaaggctcctccctgttgggcccgttcatcttgtctgaccacctgtgccgcttgccagaacctgcctacaccagcctaagggaactggaagggtcagagtccaaaaggtggtgttgactatctggtgtcttgttagggttggaggtagcagaactgaaggcctagggtccacatgccctgggggcaggaactaaggttgcttgacagtagatgtcccctgtagctgggcctgagccagaatatcagtctagtcagaaaagggcgacgtgggttggtactgaggtgccaccctatgcttccttactacctgaaccaggctgcttcctaaaggaaaggttggaagatggcttttttccaggttgccatggaaaccgaatctcccatctcatctgacctctagagcctggtttctcaatgagggggaccaggaaggaagggaactcctctatcttgggagatcccatctctaactgaaattgttttcttttaggttcccccaggcaccatgtcagcctcatagcaggacccaccccacgacttctgctgtagcccataggacccaccccacttctgctgtaacccactgctggagtgcttgttccatgagacagtccacttccaactc

SEQ ID NO: 20034 - DNA, 1174 bp, Mus musculus
gaactcaggacattcagaggagcagtcagtgctcttgaccactgagccatctctctagcccgttgcaggcagttcttacaatcagaaagaaacattgaaacccctttaactccctgagtctcacattgcatgtttgcaaattctgaccatgtaaggattaaatagagcatgcacagaaactgcccagcacacaggaactactcagtgcacacaagttccaacctctagccaacctgttagctgtcttgtctgatggaaagttctggccaaaagtcatgacactgtcgctcaggtcccccatgcaccccctatttcgggtgccacctttgctactaaagcattttcgggaagggtgtgttgggctgtggtctagtggcctgggacacctctcttgctgtagtgacgctgcctctctctcccgctccacagagtggagcctggggctgctttgacgagtttaaccgcatcaacattgaggtgttgtccgtggtggcccagcagatcctgtccatcctatctgccttgactgccaacctcacacgtttctattttgagggctttgaaataaatctggtgtggtcttgtgggatcttcatcaccatgaatcctggtaggtgggaggaacgcggtgacactgggcgagggggcaggagaagcaggcgtctgggataagtattgtgtcctttttccctctctgcaccaaagcctttatctaagaagtatttaactaaagatgactgtgttcatctgtggtctattaatgtgccaaaatccccaaggagtatttagcttaaaggaggaaaggggagctttggttccatggtctctgccatggacaactgttggcgagggcaaggcaggctgtcctggtggtcagggagaatagggcggctccggatgaccagggagaaaagaggcggagggagggagagagggagggataggcatagatgggagaaggaaggacaaagagagagacagaaaggagggagacatttgttggttcatgggtttactccagtgattgacttctttcaagtaggccacaccttctaaagtttctgtagcttttggtctgtgagacatcctctgatgaggtccagaccctcgttatctaatcacttccagcaggctccgcctctggacctgctgcttgaggaacaaagcctttaag

SEQ ID NO: 20035 - DNA, 1150 bp, Mus musculus
tcacctgtagtgaggtagggagcgacttcacctggatcctgtgtcttcccccaggccggctctgagtataccaccatccactacaagtacatgtgtaatagctcctgcatggggggcatgaaccgccgacctatccttaccatcatcacactggaagactccaggtaggaaggcgcgtggtaggttaggttagcctgtttcttccccagcttctgcctgtttctgttccacgagtcccgccccctaccacatgcccaacgctctttggttcctaccctatctacctaaatgaagtctcctcctctgtttcctcttgggcttagggacgtctcttatctgtggcttctcggggttcctgtaactggacctttggctgcagatatgacaagaggggttgggaacaggtgggggcctagtttacacacagtcaggatggggcccagctttcttactgccttgtgctggtccttttcttgtcccggatagtgggaaccttctgggacgggacagctttgaggttcgtgtttgtgcctgccctgggagagaccgccgtacagaagaagaaaatttccgcaaaaaggaagtcctttgccctgaactgcccccagggagcgcaaagagaggtacgcaggcgggaccaaggaggcggaggagcctgttgagcttcaccccaaagtcacctcttgctctctccttccacagcgctgcccacctgcacaagcgcctctcccccgcaaaagaaaaaaccacttgatggagagtatttcaccctcaaggtaccaaggctggagagtcgcatgccagagacaagctgtacccattattgcctctgtctctcgcatgtataaaatagtgttattagcaggttgccaggtctttttcagtggctttatctctagccgtgacattagcttgagagctcatgctctgaggctgtgcctcctccgacagtggttctcagtgtaactaacttgacaacaccaacttacaccataagacaggtgctcctccactggggatgggaacatgtcctaggaaactcaccataaattgaaaataacacacgacaaaaatgtgtttagaggcaggcctggtggcacctgcctgtaattacagcactgaagagggtggttcaaagctggcaagaaaa

SEQ ID NO: 20036 - DNA, 1410 bp, Mus musculus
caccctacgagaactgacttcttgactttttaggctctgttaaggggtatgagggacaaggtatggtgtcatgctcctataatctcagcagtaaggaagacaaagtcaggaggatttggggaagtttgaagccttcataaactatataaaactttaggccagctagggctagctacaatagcaagaccctgtctcatggtgatggtgatgatggtggtggtggtgacagttgtgataataatggcagtggtggtgatgatgatggtggtggtgatgatggtgatggtgaaagggaggataaactgattctcagaagtattccagtgtgttctgtgaatatccctacccatagtagaagccatcttaaattcctttttttcagcctccagcctagagccttccaagccttgatcaaggaggaaagcccaaactgctagctcccatcacttcatccctccccttttctgtcttcctatagctacctgaagaccaagaagggccagtctacttcccgccataaaaaaacaatggtcaagaaagtggggcctgactcagactgactgcctctgcatcccgtccccatcaccagcctccccctctccttgctgtcttatgacttcagggctgagacacaatcctcccggtcccttctgctgccttttttaccttgtagctagggctcagccccctctctgagtagtggttcctggcccaagttggggaataggttgatagttgtcaggtctctgctggcccagcgaaattctatccagccagttgttggaccctggcacctacaatgaaatctcaccctaccccacaccctgtaagattctatcttgggccctcatagggtccatatcctccagggcctactttccttccattctgcaaagcctgtctgcatttatccaccccccaccctgtctccctcttttttttttttttacccctttttatatatcaatttcctattttacaataaaattttgttatcacttatatggttttgagaggttgatatcagcataagctgtctgggcccccaggggcaggatgaatttgggaggtacccacctgagtccaggcagtctgttggagtcaggggtggggaacttgggttccagaagaggaacaaagccggggactgggtcagtctgtgggctgcatgacaacaagagagcagggtgactccattcataacttgggaaccaactgtccctcctccctcctgccaggactggcacatggtccttacccacccctacttctagggttgggctcctgctgtcctctggggagcctctcaccaaggattaagggatttaaatgtctgatatagcaaacctgagcctctggagtgaccatctgctccacaagaaaggatcagggtgcctgggttccacaggg

SEQ ID NO: 20037 - DNA, 1831 bp, Mus musculus
ttcttgggaaagacgccaaggtaccagaggcttacgtttttttcttctcctggcccaggtaaactatactcagcctttggtggctgtaaagttcctgaatgtgacccccaacgtggaggtgaatgttgaatgccgcatcaacgctgccaatattgccacagacgatgagcgggacaagttcgctggccgtgtggccttcaaactccggatcaacaaaacctgaggctccccacccccacccgcccacactctcctgtggatgcttctggaatgtccttgaccctgcctgatccctccctcacccaccccaaaggtattttttataatagagctatgacttgtctgagcctcacaccctttcctcaacttctctacctagcctgatgcccacacaatttccaacatcttccaaccttagcttagccagagacagagaggagtcgggagttttctagttcgggaaccggagttgtcactcagcgacagaggacttgcctagcaagcacgagggcctcagcattgttggaggttttctagtttgagtttatgaatgagatgcccttacagctcctgtttcagtttctactcccatccccttagaggtacaggaaatggtctcatccacccagcctctaccccacagatccctcgaacccgtttcagccacttgcttcccaggggtgaacactgtccttcttccttttacaaggttctagccactttcctttcatctcttcacacttctgtcaccatagccagtatcttggtggctttgacttctggttcctccagcagttctgccctctcctctccctgatccctctccctctgaaaagctgccatttgtagctcagtacaagttggttctgtggccttttccgtccttcctgatacatcctgcttctcccccaactgtgactccaaaggatgactggaagagaagtctttaattcttctagaaaattctctagtaggcttagacttttaacttcttcctggtccctcctgtcatccaaacggctcctactcaggcgggcttgacctgctctgaatatccactttgttttttaactgatggctcccttcccccactggccttcccagaatatctttcaaattctccttcccagggagctctgtgggggaggggccgctgtcttggctctatccccagcagccaccttggaaacgtcagctggctggggggactccctaagcccagatctacccacccccatcctctctctggctactccttgcaagttgctaactggtcactaaggtcttccctttctgcatgccagcctgaaagcgtcagacaccctcctccagctcagctctgagtttctttgctccgcctccttcaaactcttttgcctttaaaaaacaaacaaacaaacaaacaaccctatgacatccctagaatgttgcgaaagagccccctgctccaagttttcgtccatcagagcagcatattcctctagtctctctgcttctctttaatcctttccaatctcctcttcaccgcagcccccacgtcccaccctcaagtggctccttccctctttcctcccgctggatctgtgtctcttccctttgggtatccaggtcttcctgccccttcatcttcccagtggtctccttctgcagttatttaatgcctgtgtcagatctactgtaaaaagagggtaaagtacaataaactgagagcgattatatatataaatgtatatcatacacagagccctgtgtgtgcttgtctttttctgagaatttggaagagctctgagaaacaactggagggtggatttgggtgatactgggttatgca

SEQ ID NO: 20038 - DNA, 1212 bp, Mus musculus
gggcgagagacagacagacagacagacagatcttgctacctgagtcctctgaggtgataagaatttggctgagagtgctgcgcagttaccaggttgcatccagatccttgtgctctgagacggctctaacttcgagttccgatacggcaggaacagatgctgccttttcaggaccgtgcagggttgagaagttggaaatgcattagccgcagaatgacagtggcctattcttggagttgtcacaacaactacagtttaggtctcttgtggcctccaaaaggtcagacttcactgtgccccaggaggagtctgggagtcagggctggagctggaccctgcctgtttccagcttgtttcctttagctcccaggggaaggctctaagatatcctgtcgctccttggcctatccccgtacacagcttgagaggaaggaggaagagaggggttggtggaagatgtgggagctgctgactctagttcctctatcctagccttcatcctcctcttctacctcgtcttctatggtttcctcacggccatgttcagcctcaccatgtgggtaatgctgcagaccgtctctgaccatacccccaagtaccaggatcgactggccacaccaggtgagagaagagtagttttccccttaccggtcactggaactactgtgtccttaaggcctcacaaggaacgtatagttctttccaggagttggagtggggagttcttgaacttggccttccttcccatgccctgcagccgggagtcatgtgatttggagacgtggcagatgccacaggagattgctctcccaggaaggcagtttcagatctttgcccccacctgaccctggtgttcttcatatctgtccatttcccttgatgtgtttctcttcatcttatgtgactctctagtcttctctcctgttggctctaggcttgatgattcgacccaagactgagaaccttgatgtcattgtcaacattagtgacactgaaagctggggtcagcatgttcagaagctcaacaagttcttggaacgtgagtgtggggctagtccaggaccttgggggaaggaatccaggaccctggaagtgagacatttggcctctgaccttctctgtctgcctcccacctcctagcttacaacgactccatccaagcacagaagaatgatgtctgccgtccagggcgatattatgagcaacctgata

SEQ ID NO: 20039 - DNA, 2322 bp, Mus musculus
gaaggagaagacagtggccacctgactccccagcctcttccttttgtttcactagtgctaaaggatccagacagcaatccttacagcctcttggacacatctgaaccagagcctccagttgattcggagcctggtgaacctcctccagcaagtgcccgtcgtcgccgttcccgccgccgccgtactgatgaagacaggactgtcatggacggaggcctggagtctgatggtcctaacatgacagagaatggcctgggtgaggggctagcctggagaattcttagaggtgtgattaagaatgaagtatggccgggcgtggtgttgcacgcctttattcccagcacttgggaggcagaggcaggcagatttttgagttcgaggccagcctggtctacagagcaagttccaggacagccagggctatacagagaaaccctgtctggaaaaaccaaaaaaaaaaaaaaaatgaagtatgagagggtgggtgaatgactcttctttactccacagaagatgaatcaagaccccagagacgaaatcgcagccgccgccgccgtaatcgtggtaaccggactgatgggtccatcagtggagaccgccaaccaggtcagctgacatacagaattggagcctttctggaactaagatgaaatgtctcattggctgggaaaccagggttggattcattgggaaccatgaaatcccgaagttcctgaaagtcttgatcctgtgtctttcctagtgactgtggctgactatatctcacgggcagagtctcagagccgccagcggcccctggaacgcacgaaaccctcagaggattctctttcaggacagaaggtaggcaatcaagatacagcctaccccactttgttgttgttgtttgtttgtttgtttggggcagggacacagaaaactttgcaaagaaagttgaattgactgtatgtgatggagttcaggctaagctgagggtagagcagagccggcacaaacagaagacagggctggtggtgattgagcacaggggggtgagggacctggcctccacgtgtgtctgtagtgagaaggaaggcgtgcctgcatctgctgtactcatcagctgcttcctttttgttttcctcctgcttcctctgtagggtgactctgtcagcaagcttcccaagggcccctcagagaatggggagctctctgcccccttggagttgggtagtttggtgaatggagtttcataaaacctccggtccacatccctcctttctccatctcgcttgctgcccaccaccatggccctcatgggtccaactgacctgcgctggagctgctcttatctacgggggaggggggtggcacagcagcttgggtcccccccaacctccaggagctagtggaggggtgtgtaacagggtcatacccctccctcttgtccaccctacccccagggtgagggagcctccccttccctttcagactggatgtgcctttatcctctaatgccccgacctctgaacacccccattctccgcctgttggtgggggtgctccttgacccacccagatttgacagttcaggggggctcccctgctatccctcctcccatcctgtaccccccatttctggggcctcatcactgtggaagacggggatagtgagggtattcgtgggtgggaggcatggggaaggttttggaatagaaccaggggtatgtatgaaggggggtgacaaggtctcccaggggagttgggaggaaataaccttgtctggtggatgagaaggcgtatttatttttcactgtacagtatttaaaaagagaataaaaaaatccaaatggccttgtgtttcccatgttgcctttgtccccagtctgggctgtttaaatctctagggctgaccggcattggtccctggctctcgttctatagcctttattatcagctcctcgttctgtgtcaggaagatgatattctgggaatggctgcatccttaattctccgtggccagaggaccgtgcttcagaccttgctgtttcttccctcccttggttgttgagagttgggccactcctgagccctgagtcacaggaggataggccaggctccgtgaagctggagctgttcctggtagaagctgagagtctgagcaggctgtttaatccgattatctggggcctggggcacaggctgggccttcagcagagaggaaaatagggtttcctcaccatagcctctagaactcaggagggcaggttgtatttctggcctggtgtcactctagctctagaatccatgtcactgacctcagcttttaggggcctcaagggtaaa

SEQ ID NO: 20040 - DNA, 1399 bp, Mus musculus
aagtatcaatgtctcctctagttgcttcaggcagccactaactaccgcaacggacacacaggccagctttcagccattacagtgtttatgctgtttgggggctccttggcccgaatcttcacttctgttcaggtgagtgcaccttctgcccactagagggcactaaaacctcattctctgctgagtcttggaacttttctagatctgtgctctctcataacaggaaactggagaccccctcatggctggagtctttgtggtctcttctctctgcaatggcctcattgctgcccaggtcctcttctactggaacgcaaaggctccccacaaacagaaaaaggagcaatagagctgagctcgcttctagaacaattccatttccactcatcctcagagtcctccccacatgacttgatctgcgggtgcagtgtaagcaccctccattcctctaactgcagcctcctgagccagggttgtgggagcagtaaagcttgtgtaggccctgccttcactcactcacttccccagatccctccttgtgagcagctggtttactggagcagatgctctggccctgtccacttaccttccttttggaccaaggacagagcctagaaaactgtggttggaagctagtggctgcttccctgtgctgcccgggtgggatggtctattggagcccagttctgggggtgagggagagtgactcagataagggccctggggttgggtggggaggttcctgccgaggcaggtcctggcggaagggtgtgtgaaggcgctggttgctgctgtagggagagaatacaaatgggacaataaaagactccgaaacatggttttaattgtacaaaattgtgtttagtgtgcattctggttccttggagatctgtaggggtctgtggggttggccctgggcgtccctgccagttaaaggtgggttactggcatgggggctccagcaagggaagtattatatggagtggaagagtctggggataggtaaggggagaaagagggtcttagctccccctggagcctgggatcactctgagggaaggtgcatggtaagggggcctccggtctgcagtgggaagagctgtaaaaagaaacatggggtctggaggttagtcttcttgaatcgattgggcagtgtcctcaactcttcgtgggggactggtctgaccagtttgcagcagacagggttagagcttgccattcagccagccttgctgggtacagcaggcatggaatgggaccctagggtgacttaaagaacaaggtagttctgttggggcatgctcagcaggcggcttgcgtgctgcacggctgtttgcctcctggggcagcaggccaggaaggagcaacaggatgggcttggtctctccttgcccccagg

SEQ ID NO: 20041 - DNA, 1207 bp, Mus musculus
atttattgattcaggaaacaaacacaaaattctgaataaaattacttggaaactgcctgtttgggcttcttgtttctttcccttccctcctacctgctagtgtggatcacctgcccccatactagttgattactgaatttgccatgttgcttcctgcaataccaaatgacccacattactaacatttggtaatttgcctcagtgttaggcacaagacatgagtgaaacttgctgcattaagacttaaactggctgggtatggtggcgcaagcctttaatcccagcattctgccggaggcagaagcaggtggatttctgagttcgaggctagcctggtctacaaaagtgagttccaggacagccaaggctacacaaaatacctgtcttgaaaaaccaaaaaaaaaaaattcaactggttggttaggcctagcccagatgatgtaggtgtcaactcaccttggggatgtagggagatggttgttctgtagctcttcctgtcctgcaactaaataaataggctaagctgacctcttacatctgccttcggcctcctgtgctaggattggagtgcatgggtggggttgcatttcttaccaatgaggaaagggcttcccatttctctgctgcattgtaagctcccaagtagagcaagttttgcttaggtaagttccgtgtgagtcagctgcctcattctcacgaggtaaccaaggctttgtaccgcccactgagaacgtcactgccaatcacagcctaattgtgaaaaccaatggcttgagtgggttgctaaagctgaggtgtctgagtcaggtttggggtgggattattttagttaagggaagtgaggcttttcatttcctcttccaagagaaggcaaaggggattggattgaggaaggaactggtgtagcctagctggtctgagcatctctgccatgcggctccctgtgtgtctgatcttgctaggaccgcttataggtaaggagaaatgggaggtgggggagggagggctcatgggcaggagcctgcacctgggtggccaaccaatctcttactgaaagcccaaggaacagaggaagactgtcctcacaaaaaggccgttactctcctgccatccttcacgatgacacctacagccacagaaagcacagccagccctacgaccagccacaggcccaccaccaccagtcacggaaatgtcacagttcaca

SEQ ID NO: 20042 - DNA, 1207 bp, Mus musculus; identical to SEQ ID NO: 20041

SEQ ID NO: 20043 - DNA, 1219 bp, Mus musculus
atcacacacattgttggtataaggctatgttcataatcccagcctttggatttggaatgtggtagtagggtggagagtgatttctaagcctttgtagagctggcctggtgtttttttacaaggctgcatgtaggggtggggaaattactgtgaacctgtgtggtgggattcagcactgccatttgtggttgtagtgctgggattgagagagaattacgtgggtaccgcccgagttaatgtagatgttcttctgcattcagatacaaaaggtggttatggcattaggagactacatgggtgcctcttgtcatgcctgcattgggggcaccaatgtgcgtgctgaggtgcagaagctgcagatggaagctccccatatcatcgtgggtacccctggccgggtgtttgacatgcttaaccggagatacctgtgtgagtaccatgtaacagttggtgggcattcccacatgtcattttcttggatgcaagttttcctttagtttagaactgagttgctctgtgatgaaccccatgcgtgtcatctgagcctggcttccctgttgttaccttagcccaggtagtgttctacttaccagggcttttgcctggcttatcagggaagctttgggcaaaggatcagtccttgtattctgagagcagacatctgccctttgactgccctcttaccaagagatttccatgtatttcacatttgtctgatcactatgtgttggtgttttttcttctgccttctagcccccaaatacatcaagatgttcgtactggatgaagcagatgaaatgttaagccgagggttcaaggatcagatctatgacatattccagaagctcaacagcaacacacaggtggacaaatggcgaggttgataggacacaaggggcttggttgtgatctgaggaatgtacagtgccctcatcatggctgctgttttccccattaggtagttttgttgtctgctacaatgccttctgatgtccttgaggtgaccaagaaatttatgagagaccctattcggattcttgtcaagaaggaagaattgaccctggagggtatccgccaattctacatcaatgtggaacgagaggtgaggcccagtgcaggaggcagacctggtagtaagttgttgagtgtaacccctgacttctgaatctccaggagtggaagcttgacacattgtgtgacttgtatgagacgctgacca

SEQ ID NO: 20044 - DNA, 1210 bp, Mus musculus
acccaagtacaccccaactagtccttcctacagtcccagctcaccagagtacaccccagcttctcccaaatactcacctacaagccctaaatattcacccacttctcccaagtattctcctaccagccccacttactcacctaccaccccaaaatattctccaacctccccgacatactcaccaacctctccagtctataccccgacctctcccaagtactccccaaccagccctacctactcgcccacttctcccaagtactcgcccaccagtcccacctactcacccacctctcccaagggctccacctactctcccacttctcctggctactcacccactagccccacctacagcctcaccagcccagccatcagcccagatgacagcgatgaggagaactgagcgaacagggcgaagagctggttagggtcagacaacctcggtggcctgtgtgtcacttccctcacctcacaggctgtgaccctaccctgggtcccttgtacataactccttgtgacaaaaccctctggaagttctggaccccatttttgataggcttttttgtcttgtcctctactcatgctgtcttggactcactgacccagctgcagggttttgttaccctgccagtcccctgcctcactccaccatgaaggtctctgctttcctgtgacttgattgggatacaggcatttaactttggaaggctagtttggtgcctgctctgggtcatacacctgatctggaagaacaaagcttaagctgcctttgttattttttgaaattgaaataaagtttactaattttgaccaaaagtctgtatgtgtactgactgcttaattgaggctcagagaggcaaaaattccaagctcactgagccttcttgaaaaactacgggggctggtgagatggctgagcaggtaagagcactgactgctcttccaaaggtcatgagttcaaatcccagcaaccacgcggtggctcacagccatccataacgagatctgatgcccttttctggagtgtctgaagtcagctacagtgtacttacatgaaaggaaggaaggaaggaaggaaggaaagaaaagaaaactacagaagatgctagtgcagaagaagcaaaaataatttgcctaaatcctaccatcaggaagcatgtctttgtttttgtttgtttgtttgcggggaggggggcatgtttgttat

SEQ ID NO: 20045 - DNA, 1103 bp, Mus musculus
ttaataattcttagtctttacagaggacccaggtttcattcccaactccagacacataattgaacacagacatacacacaaacaaacactcacaaacaaaaagtaaaaatatattaatgtcataaaagctaagggctttagtgaagacaaggaagcaattctttcttggccaattgtagtttggggagggaacagaggaaatcacaggcttactgacctcactcttgttgcaggaggaagaggtggtggataaaatggatgatgatgtcttcctgcgatgcattgagtccaacatgctgacagatatgaccctgcagggtatcgagcagatcagcaaggtcagcatccgttctactctggccacctgcccgcctgctcttgcccctactcagcctgactagagcttgcctcgtctctccaggtgtacatgcacttacctcagacagacaacaagaagaagatcatcatcacagaggatggggagttcaaggccctgcaggaatggatcttagagacggatggtgtgagcctgatgcgggtgctgagtgagaaggatgtagaccctgtgcgcaccacgtccaatgatattgtggagatcttcacggtgagagcccacagagcatgatgcctaagtctctctaggaactccccgctcatggtttccatgcttaggctttctgtctggatccattggttttttagtttgggatggactgcccccgatatcctccctgccagtctgggtagtgaccggatcagggagatgaactgagctaacttggtgtgacttcctttcaactctggcaggtactgggcattgaggctgtgcggaaggctctggagcgagaactgtaccatgtcatctcctttgatggttcttatgtcaattatcggcatttggcgctcctgtgtgacactatgacatgccgtggccacttgatggccatcactcgtcatggggtcaaccgccaggacactggaccgctcatgaaatgctcctttgaggaaacggtactgacaaccttttcccggcctggtttttagagatagataggacttcactgggcctttcctagccttagactcttagtaatccccaggaa

SEQ ID NO: 20046 - DNA, 1100 bp, Mus musculus
caagatcaacatctcccaggcaagatgcttcattttccagatatgtggcctataccagagtttgtaaagaggatggtatgtacatgttttggtgtgaggaaagatggaaaaaatagtagggaattgtcaccaccaccaccactgctgcagtgtcatggcttgaaacaagattcactcacgtgtaaaagaccttttttaaaacaaaacaaaacatggttttgctgtgtagcccaggttgagtgtgaactttgtatctttctgcctcctctttccaactttaggtttcaggcatgcactatttctgccataaattcatacttttaatgctaggggaaatcatatgcagcctttccccccccttaggtcattgctgttgtcgggcagcagaatgtagagggcaagcggatcccatttggattcaagcatcggactcttcctcactttatcaaggatgattatggtcctgagagccgaggctttgtagaaaattcatacttggctggtctcacacccactgagttcttcttccatgccatgggaggacgagaaggtctcattgacacggctgttaagactgctgagactggtgaggccttttctgagctcttgtggagatgggaatggggattctccatctaaaggtgaattttggtctctgcattttgagctttgtcatgcttttacctcaggtctttcaattaattccctttcccagggtatattcagcgaaggctgataaagtccatggagtcggtgatggtgaaatatgatgcaactgtgaggaactccatcaaccaggtggtacagctgcgctatggagaggacggcctggcaggggagagtgttgagttccagaatctggctacacttaaaccttctaataaagcttttgagaagaagtaagaaagcgggaaaacagatgattcacacccctgggtcttagtgccttccctgagttacaggattccctttagaaggtgacctcatacagtttgcagcagacgtacttgacttttagcaccatcgtttctccacccatttgaaatagatgctgcatgggaaaagagtggatatagaggcagatttgaagtctccctatg

SEQ ID NO: 20047 - DNA, 1149 bp, Mus musculus
tccacggtacctctgaggtcactcaggcagtcaggagtagaaaactagggctgggaatgtaagtcaggaatacagctcccttagcacacctgaggccctgggttcactcctcagtcacacacacacacacacacacacacacacacacacacacacacacaaaacatagaagtggggctggagaaatggctcagcaattaagagcactggcttttcttccaaatggacccgggattcaaatcccagcacccagatggcaactcacaatttccgtctgtaattccaattgcagggaatatgataccctggcacagatatacatggaggcagaacaccaatgtaagtaaaattttaaacatttaaaaagcaaacaaataaaaaaaaaaaccatagaaatataagaatatgttttcgtttaaaccccagatgtggggacatggggatgctttgcagcagctgactatgatttgcctcatgctctagcagaggtgtggttttgccagctgcagatagtttctgcagttgtgcgatgtttggaattctgggaacttttcagagggtatataaatgctagagctctgataggtggggtggtggttattggtcattcaggggggtggagggttacggcttgttagaaacaaaaaggaagaaattagattcagagatgttttatctttctctcttccctctgtcttctttttttgtttgtttgtttgttttgttttgtttttgtttttcgagacggagtttctctgtgtagccttggctgtcctggaactcactttgtagatcaggctggcctcgaactcagaaatccacctgcctctgcctcccaagtgctgggattaaaggcatgtgccaccatgccccgcccctctgtcttctttctctcctatctagtggcagggggtgagaagggagctggggttggggagggatagagggtgggaaaaagaagaactcacaaagtagctaagaccctttgcaagagaaacagcaaggacagacaaagaactttaaaattcacagaaccaccaaactcatcctttcaaatgtttgtttgtttctttgtttgtctgtttaatgtgtatgagtatcttgcctgaatgcatgtttatgtgccacataccatctgctgccaatgga

SEQ ID NO: 20048 - DNA, 1150 bp, Mus musculus
tgtggcttctttggggctaacctaactttgagcaccaggtatgaagcactccatagagaatggagaagatactctactttctccctgacaaccccttactagggcttctcctagattagaccaaatagccagataaatggatggggtttgatgtgtgggtaagcccaggatttgaacatcacctccatctttacctttatcccttctctgatgtcactgtcctcaccgatcactccagatggtttcaaaggaaccatctttctcttctggtgggctttggggtatccccaccaactttgcctccaaaatagcaccttataccccatctttgactcagtcccccacacccaaagatcccagcctaggaatggggtgcagggattttaaatagtccctaatccctaatttgcactagttaaccctggtcaggggacctatgtttccttccagtagggactatagacaaatgtttgttcttaattccctttgaaaaatggggcctccctgatgtgtgattagatggatatttccaatatacccatctcccctcccccacaaagaaagaaccagctcacaaagggagagccagtttgggcaagcaaatttgatgtgggagttagaggagtatgacttcaaaaggagaaagactgttttaaccaaatgacagtctttctctcagctactgttttctggggccaagatggctgccctctgacctgctgtggagagggcaagatcatggcttttggagggaggtgagtttgggaaggccaggagcatcctcctgccccctcctagcctccaagtatatagaaagggggaggtttttgacaggcttcctgaatgttaaccacggagggggtcactccacccctcctctgtctctttgcacttttcttggtcttggctacagcctgagtgaagaatttcctactgaatgtaccaagttccagtttttaagggtttggaaaaagtttcaaacagggaaaaatggagagaaaaaaaaagaaaaagaaaaaaaatcactaaaaactcccgtaaatcttgtttctggcactttagaaaaactgcaaaaaatacataataaagaatacatatatatatatctacacacaaattatatatataaatatatctatatatacagcgg

SEQ ID NO: 20049 - DNA, 1180 bp, Mus musculus
ttctctcatcaaggaagctgaaataggaagcctgctgtgagttcagggtcagcctgggctacatggtgactccaggccatcttgggctacataagactttgtataaaaggtaccatatgtctttaatctcagaactcaggaggcagaggcaggatgaactgtttgagatgcagtcagtcaggtctacatagcaagttccaagccatccagaggtgcacagtgagacccagtctcaaatagctaaataaattgaagggataaaaaggaaaacaaacaaacaaactacagcttccagtaggcactactttgaaacaacggaaagggtgtgtaggcaccgctgcacctgtatcgtggaacacaaactacaactcccagggtaacaacatctcagcagggtgagaggcgtgactgaacgaactctcacaggaggcggaaccagtccggagccacccagacagcttccagaaagggcgtggacatgtgaccaccaggaagttacctgtagaatcttttatgttgctttctgtccaccacctttgaagctaccccttcatcggaaagccgcggaccaataagcccttctcaaaaagaggtaaagggaggtgggcaaaggctcgtggtaaagattggctattgtattcccaggagggaccaaatagcctttttttttttttttaacctgctgagtcaggtgaaccgatttaccgtggggcaacctgcttagaaaaaaccgaaggcaatagtcatttgttcatcaggaagactaaatacagatcacatcatctccaagacccacttgtggcctgtctgtaacccttgatctgcctcagagggaggggaaaactggacaagtttggggccgcaaaagaaaggcctgccaaagctaactgcaccaaacgctagcgaagcatggcttccaccgtctgggggggtgccccctggtggggaccaccgcccccagccccagcccggcctctcacagacatagatttctgctcgggcgcccagctgcaggagctcactcagttaattcaggagctccgtgttcaggagagttggagtgaagggcccaagcctggagctgatcttctccgagccaaggattttgtcttcgctctactcggtaagtgtgggaatttgcaaaccccagcctcgccatttcctgccccgactttgaacc

SEQ ID NO: 20050 - DNA, 3238 bp, Mus musculus
aacaaggtggccttctggctggagctcgtgccccacctgcacaacctgcacacagagctcttcaccaccaccactcgcctgcctccctatgccacacgctggccacctcgcacacctggtcctggcacttccggcacacgccgtcctcccccacctgccactctgccacctgagtctgatattgacctaggcccaagggcctatgaccgcttccccggtgactcgagggactactccacggagctaagcgtgactgtggcagtgggtgcctccctcctcttcctcaacatccttgcctttgccgccctctattacaagcgggaccggcgccaggagctgcggtgccggaggcttagcccaccaggaggctcaggctcaggtgtgcctggtgggggccccctgcttcccactgctggccgtgagctacccccggaggaggagctagtatcgctgcagctgaagcggggtggtggtgttggggcggaccctgctgaggccctgcgccctgcctgtccacccgactataccctggccttgcgccgggcaccggacgatgtgcctctcttggcccccggggccctaaccctgctgcctagtggcctggggcccccgcccccgcccccacccccttctctccatccctttgggcccttcccacccccaccccctactgctaccagccacaacaacacgctaccccatccccactccaccactcgggtatagggggcggctttgggaggtctgcctccctagccctcccagcccaggccacttgaaggcagggaggaggacttggcaccgggctttgcccccgtggatttgtcagacttcgtggagcagtgttaaggtggacatgggattcctcactgggaagagagtttttcccatgcagagagccccattatctcctctggacctgggccttcgaacacctggggggtattttttgccctccgttgggacaccagtcttcggtgtgtggaaatgtggaagtccttttgcccatgtgaagacatgctttcctcagggggggggggtgttttcccatgtgcagggtgaggtttgtttggtttttttgtttttggttggttggttgggtttttttttgtttttgttttattcgggggggggggttgtttgtttgtttgtttgttttgccgccctggacacatgtttgcctcctccaagaatttctgcggggatttgtatcccatgccttcgtcttctcctccccgtccaactccctggagaccctggaagtgatgtgtgcacatccggtgacccttggccaccagacaatacagggaggtacctggggagcagctaggaaatcacaggccccctggaccccgctccccacccacccctgaatagcatgtttctcccccatggcacaaggcaggtgaagcccgtgctccctggaagccctcaccttccacagacaacagagatttcctgctagaggaaagggggaatctctgtgcatcccagcgctgcctggaaacttaccttcccacggcccaggacgcatttcatcgaatggaaacatgttcttgcatgtggatgtgtgtttcccaggcagagggtcctgcgccccccagcactcccctgccctctcccacacctcaggtccagcgcacacttcctccttgcatagcaggtgggagcagacttctaatggacagaagccacgtgggaagtagagacttggagggagacgccgaggtgggaggatggggggcatggcacatgtcacacaagaggccatgcatgtttaacctaagccctcaagggggcctgaggacagccttttcctcagtccttgagatcattgctcatccgtgccaaactgggtagatgggttgggagactctcaaaatgtgccaaggatcccctacgttctagtccagggaagggaaacgccaggagcaggtggcagctaaggtggtcccccgcaaccctcccacttgtgtctcacccccatgtcatttctccttctctgccttggttcctctttctccatcactggctccttctttgatgctctctccccatctcagggtcagaccagccttctctctttaccttctttaacctgtctcccctccctggttggttgagttgaagaagaagaaagaaagctgaggagagggggaagggaggagtcagggaaaaaggttacatggacaggctggggaagagaatgaggtcagccgtaccaaggagcagatggaggggctgtgggggacagggcagacaccagcaggaagattttgaaaggaaatatggggagcagctgcctagaggtctttggatttggacctcttggggaaaagaacgctgtcaggaagggttttaagggacaccagtggaggtgtggctgaatcttcatgtattgtttggctttctgagggatgttagtgccaaacttgtataggagtggggtgctgtcttccactgacacccaggtccagaatccttggtcttgagcccctgtcctttctccatcccccatggaaatgtagttcttttctggccctttcccctgcctggtctagcaactcttggaacagccatgccttccaaaagctatcaacctgggccctgagccctgtaagcagatgccccagagctggggtgtgagagaggggctgggggaccccacgatacagccacggactccaatgcccggcccctttccaaataatcccatgcccccaccccaaccctttgcggctctgtacacatttttaaacctggcaaaagatgaagagaatattgtaaatataaaagtttaactgttggttgtgttgtctcctgtcgtgttagaaggtaggtggagggtggagagggtacccagctctggttgtacctgtcttgttagaagggggtgggaagaagtgcccaacccttttcagaaaataactcttaagatctgaggagaaatggcaaagggaaaagtctccatcctgacgggattggatggttaagatagagaccaggatgggattggatggttaacatagagaccaggatggacaaatagtcagaaacacttataatcatagcattcaggccactgcggggggtggggtggggcaggaactcaagaccagcctgagctaaatacgagatcccatctttaaaataaaagtgctggctgggcagtgttggcacatgcctttaatcccagcacacgggaggcagaggcaggctgatctcttgagtttgaggc

SEQ ID NO: 20051 - DNA, 1485 bp, Mus musculus
tagggcggggaggagaccaagcccccagggaccctaaggcctggcacccctcacccacagactagggtgccatgtggagctgaggcccaagcctgagtctgaggagatgccagggcctcccagcacctccagccctagtcccggccttagtccgctctcaccaggagcaggaaggagacttgtgtgtgtggagcagccctgaggagggccacttcctacctttggcctctgttgggcttcttggaaagtgtgtccaacatttggtggagtgcttggacccatgctggccagtgatgaggagggaccttcctctaggcttagctggggagggagggagggaggggaatccggtcttgccccccgccagggatgttagtgacaagtcccctgagctccaggctggtcctcagaaggtctgggagctccaaagtgctgcttctggtctgactgtgtccttgtccccgatctcccggcccacctgccacccccttccctcgcagatatccgggactctgggaagaaaccggtcatgctgtttctacacggcggctcctacatggaaggcaccgggaacatgtttgacggctcagtcctggctgcctatggcaatgtcatcgtagtcacactcaactaccgtcttggggtgctcggtgagggtgggcagccaactcttggggggcaaggtctgggaagcagtcctggtgggcagggtcctcccaagtacgctgatagacttacgctgcattaagcccctggctgagaggcaaggatgctgtgacacctccagggagtacccttcttctacccctaggttttctcagcactggtgaccaggctgcaaaaggcaactatgggctcctggaccagatccaggccctgcgctggctcagtgaaaacattgcccactttggaggtgaccctgaacgcatcactatctttgggtctggtgcaggggcctcctgtgtcaacttgctgatcctttcccaccactcagaaggtaccagcagcctcctcacctgccttcccttcccaaagcctggaccctaccaatcctctccttcctttggctgataacagcctagcctgaggtctgcctgtcccaccaggactgttccagaaggccattgctcaaagtggtactgccatttccagctggtctgtcaactaccagccgctcaagtacacgcggctgctggcggccaaagtgggctgtgaccgagaagacagcactgaagctgtggagtgtctgcgccggaagtcttcccgggagctagtggaccaggatgtacagcctgcccggtatgggggtgggagagggctgggtccaggtctctgctttcctaactggttccaaggaggttgaggtgagaggttcttggaggcaatctaactgggcaaggagaagtgggcttcagaaacccctagtggctgttggttagcagccctccttatgtggaggtcaccataccacatagatcaagcaca

SEQ ID NO: 20052 - DNA, 1213 bp, Mus musculus
ggttgggggagtcgggcctgggctggaatggaagagcaaggcagagggatcgggaggaggggggagcaagatgtggcagacagagatgaagagagaaaatgggggagagagtaatagaaaaaaggagagagagagagagcacttgagggagaaaatcagagaaggtatttggaggagagagcgatgagaaacaccaaggagacagaaatgagaaaagactgaggggtgagagactgaaggcaagagctggagcaagccagttaaggccaaggaaagatgctccaagggaccctgttcggaggagaaagatgggggggggggggctctagtgggaggggaagagagaaaagctagttagaggagaggaggcaaggggcccaaagtaccttaagggaaaggggtgactgaggcaggacatgatgggagaagagggaagagatagcaaggcccagcctggcataggaaaaagagattgggggggggtcaactacaacccccccttcagctgatgggagaacaggagcctaaaaggacctgaaaaggggagggcatgactgggtgtgagtggtgaggactcctgtgtcctcatctctggaataaattgacacctgcagagagccacccgcgggctggcgcctggctctgaaaagcccagcgtcagcaaacagtcctgaaggggggggtgccaagggggggcttactgaaatgacctgggtgtctgccctgcctacctttttactggtcctgttcctgctgcctgggtaccagggcagcagtaatactggggactggcaagggggagggggactgggaaggggagggggtgctcctggggtgagaagatatctgaggtttgcctcaggacataggtcaaaatgctgtgcaaagaagacctcagccagggtccaaggctcttccagattaggtgggggggtgtcagtaagcttatttgagaagccaacctcagtactgcttctcttatcccccctccccatctgccaaagacctggtcagtagggttaggctctgatggggctaagcaggatggggggaggggcatgtctcttaggattctctgttcgcctagactaccctcccctcatatatacatatttcttcctctctgataagattgggtgaaactagcgttctgactcttgtccctgtcctccctctcacggcccgaagggactcagcaaccaagcaagcccct

SEQ ID NO: 20053 - DNA, 1233 bp, Mus musculus
aagagtgctggggaggagttagctgagcaggccaggggaggagagtactacatacacaatagttggtgctaagccagtcacggtgaacagtatttcccagaaaacagcaaggcctgggtggagggggcagaattagcagtcatggaccttgggagccttactcttctctcgtttctgcttggctaacagattccgggacccaaaatcccagcggacacaccaggctcaggtggcctttcaggtgtgtgtgcgccctggctcctatactcctggccctccctctgcggccctcagagaacttcctgaccagcacttcagcccatcggaacttgagtgggtcactaaggagaagggagccacactcctctatgccctgctggtacgagtggaataaggggtgacataccactactccaagcacagccgggcctcaagcccaggactcttgaatgacgactgcctccacctcattcccgtgactgagagcatgtccagtgctgtcctggcaaggaggagcacgtaggcaggctttgatttagagcaggtgtgaagcacatctctacattcagggcccagcacactccctctgctgagagggagcccagctcgtctcggggtccccccttcatgcactgacttggggaacatgactccctattattaccctcccccatatcacttaatttatttccgtttttgtttctggttactgtgaatcccaaaggagtctctctgtgcccacatgaagctgctttttccgtggccactgggcgccatggggagggagtgggtaaaaggaagggctgcccgaggacgctgtgggcctctgtacagttgttactgactctgatttctaaggagccaataaatactgtcttcagagcatctgcctccgcctctgtctcccgcggcctcgcgagtgaagagttctaggggctttatcatcccaggccgctctgtaaatccacatggagtttggacatcccggcacccgtctctaagcgcttccgccttccctttcctccaatcggctgtgccgtttgccgtcgtgactccggaaggatttatcctggccgccggatatgacgtagaggccaaggcgcgccgaaggcctcggagaaagcgccgacaaggcgggttgcgggggttggcgccagggctacgagggaggggcgggggcgcggagcctaagaccctcgcacgcgccccggcgctgaggcagagaccccggag

SEQ ID NO: 20054 - DNA, 1555 bp, Mus musculus
gagggagctggtaaaggctgtggagtgaaggaagttgctgtcactgtagttggtctgtccattctcttatacttaacctacttgtacctgcttttaacttctcccagctgattggcatccaggatgggtacctatccctgctccaggacagtggggaggtacgagaggaccttcgtctgcctgaaggagaccttggcaaggagattgagcagaagtatgactgtggagaagagatcctggtacgatgccccctccttgctttgtatgctgctttgatccttaattcgaagtctttcagttaaggcatctctggactgtcattttgcttttccagatcacagtgctgtctgccatgacagaggaggcagctgttgcaatcaaggccatggcaaaataaccggcttccaggtgagagaacgcaccccccactgtccccacacttactgttgaagttacatcctatatcttaaacatgatttctttctcttgcccagggtggcggtggtggcagcagtgatccatgagcctacagaggcccctcccccagccaggttctgctctggctgggcccttggctggactcctattcaaatttatttgacgttttattttggttttcctcaccccctcaaactgtcggggagaccctgcccttcacctagctcccttggccaggaatgagggagccatggccttggtgaaactccctgcctcttctctcgcagccctgatgggggaaagggagttgggtactgcttgtggtttaggttcccctctcctttttttctttttaattcaatttggaatcagaaagctggattctggtaaatggtcttgtgccctttatcctactcatccccgatctggtcccctgttctccatagtccttcacccccaagcaccactgtacagactggggaccagccccttccctgcctgtgtctcttcccaaacccctgtaggggtggtgagaagaggagggggggaggggacacgatccctcctcaggcatctgggaaggccttgcccccacgggctttaccctttcctgtgggctctctccctgacacatttgttaaaaatcaaacctgaataaaactacaagtttaatatgaagcccccaactcagttgtttatttgttgattgaaaggtacttttagaatctagaaatgctgagacttcatagtagcctttgtggtttaggcagttggataggaagcaaataaacagcactcaggcatgatggtgggtacattttgtacattttattggtttggggcacataagaccccagcctgagggatggagggtgggctggagctctctggtggttacttgtgatagaatcttgggttctggctgtgttggatgaaagggagtcgggggccaggttggctggtggtggcaaagcctgactggtaatgataagagttttatcagtgggtaggtattccagcactcagcacaagggggaggggacagttacagtaagaggttagtctttccctggtagtatatgtaggtttgattgccagccttaccttccctgctgct

SEQ ID NO: 20055 - DNA, 1111 bp, Mus musculus
ccaaagaggccttgtggtttcctgtaccaatgactggcttgtgtgtggacagggtgggggggtggtgtaacaactgggtggggccttgtcctccgtctccacccctccattagccccgcccttcagctggctcattgctgctcacctaattatagtcctggcagagtgtggggaagagggggtggttggtttcagtggcgagtaacacctgagtcctactcgctcccgggaagtagccctttcctcatctctgggatttggcatcccaactcccaggaggcttcctttccctagccacaactttagatgtcattgtgggggcccaggggatccccagctgttttacccccaatactcaagctcttcaatatgtttgactccagtttcaaagcaggaaatgcaactttatttaggtgggtaatgaatgaaggggaagtggatcagtgttttagggaggaatgggatagatcagcgatctcatttaacctccatcgttactgaccctagttctcttcttggctttagttggaatcgaagcctcttaaaatggcagatgatttggacttcgagacaggagatgcaggggcctcagccaccttcccaatgcagtgctcagcattacgtaagaatggttttgtggtgctcaaaggccggccatgtaagatcgtcgagatgtctacttcgaagactggcaagcatggccatgccaaggttagaatcacctctcaacatcttgccttccctgcagctcccacacccctaggactctgggcagtgaactgttggctctagtcttgaccccttttgctgttttccttttgttcagcacccagttttttgctccaatttaaaactaaactgttcccagtttcttctgtagggtacctgtcatgctatgtttttttcctccctctttgtgctagttttcttttggtttgtatattcagtttcttattcttgaccttgggctccttgtccaggatttctccagtcaaggacccctcctcccaaggcagcattcttggggtgctccagtctgcattctctaatcactgctgctgctccttcaaattctggcttcccctttggggttgtgataaatctcaatgtc

SEQ ID NO: 20056 - DNA, 1168 bp, Mus musculus
cacctgaatcctcaggccccgccccaagccactgaattaatccgcctcggggcggggcggggcctgggcactcagttttgacccgctcccaggtgattctgatgctagtttgagaaccactgctgtggtggaagtgctcggtgggatcgaggtaagaagcacagcacgtttcacccactttgcaacttgagatgttcttcagcctgttttgctcctgagttcctactgcctccatgtcttgaagtccttgaggggtacagtggggaggaaggacatcttggggatagcggctccctcagacctctagctcttgactttgccctactaatatatctctgtcttgtggagctgtgctccaggccctccccctccccctttgaccattttcatgctctgccctccagccctagactccaataaaatgtcaccaagagtggagttgggtggaggctgaagctggtccaagggatcctggctttgctgccctcacctttctcatgacttttccccccaaccagacagctattaagagaaacaaccccaggaagtttctgcggagtgttggagatggggagactgtggagtttgatgtcgtggaaggagagaaggtttgggtgctgctgtggggtggagttggccagaactgtgggagggtggcctggaggtcagccgaagctctggccctcctgggaccagctctgcctctgcctgtgaacgctagagctgctctaggacatgtcctaaagaacccatccctgtcaccagccagtaacatgtgggtttcttctctttagttcaccaagcacttccatgtctgttttctacacgggaccccagccctaacaggaccctcagtcagtcctctggaatgaaggagggacagtggctctctctatctcatcctgtcctgtctttacactctggggggaatgtggcagttatttctaaggacaagttgtttcttctcagatgggtacaaactctttctgctgcccctcgggggaggggacaaaggaggagtggttttgaggagtgatagggtagaggacttgggcctgaagaagtgggacaccagtgatctggcaggtttgtaagtactgtgtgtgtgtgtgttgtcagaacaggttctgattgctccccctctacctccccagggtgcagaagctgc

SEQ ID NO: 20057 - DNA, 2018 bp, Mus musculus
cactgtgtgaaagtggtatcaagttctgttctgtccagtgagactccgttgtgctagtgttgtgagggtgtcaactataaggtatttcaccaacaccagttactgtcatttcaggttcactgctgatgtccgatcggtgctgagccgaaaccttcaccaacataggctctggtgacagctgctccccctccacctgagttggggtggaggggaaagggagggagagttcttgggacaccgtctgttgccctgtccaatgtgaggactgcctgggcagagtctgcccctcccacccctctgccctgggagccctacactccacttatggagtctggatggacacatgggccagaccgtgaagcagcctcactctgggttcacactccgtggaaatgccagactgggacaggcgaaggcctagaggagccgaaacagtctggtgaagaggcaggactggccagagtgacagacatatcccagaggctcaaaagaagccaattcaactttgttgtgatttgatttttttaaaaactcttatacaaaactgatctaattcttcactcctgctccaagggctgggctgtgggtggggactggggtttcgggccactggatcctcctcagacttgtcccccccttacttttcctcattttttttctttccccaatcccccatacctgtaatcggctcctttcttctttcctcttttaaaccatgcattataactttgaaaccaaagctgccctagacccttctctgatgtttttggaaatggagggaactttgttgacatctgctctgtccttgaagcagagggagaagatgctgtttggagttggggggaagtgggatttagcacagggataaagtagtttatgttcagtgttcggcaggaaaggccccactgactggatggagtccctgatggacagtggaccaacaactttaaagtaggatatagaaggctaaagagggaaaactctagaaccctggaagggcatacagctggagaaaggctgggcttgtctgggaagttgacgtggacaggctaagagggcgctgcctacgaggtgttggcactccagcagtaacctggggcggaaccctctttcctggcacctcctctccagagccgggactacttttcgccacccgccacgtgattctccgcccttttctgaggtcacatgattttatctacactcagaaatgtgttcctccgctctggtgtagtccttatctttggggcttttgcagtttctcttggttcacataagcctgagccttgagcattccctgggtgtctgcaaacctctttcctttctgtcttatggtgtccatatccacagcttgggtactactttgttttggtgtcaacggccaccttcagcgtagaaacacgtctcatgaaatcctagacttgtaattgtctgcctttccccaacgtaatttccgagaactgcagaactaaatctcatgactgccactgggtaccagtttcgtcctcaactttgtactgtgggaaagggtttttcagttcactcgaaacaacagcaaccttatctgcgatgtcatatgtgtaacccacaagttgattccaaagcagttacgctgaaggcgtaagaggaccaggctacgggttgcgctagcaagctgagctagtggcgtatgttagcaggcggggccggtccgatggtcgggggcggggttgatgaatagggaagtggcgcaaattcgtggatcgctccgccaagtctgttcgtcgaagccgcctccgccgccgccccctgtcccggccccccccctgggttccctcagcccagctcggtccagcccggttctcgggagaatgaagttcgtgtacaaagaggagcatccgttcgagaagcgccgctctgagggcgagaaaatccgaaagaaatacccagaccgggtcccggtaaggacagtagccagggcccaggctagcgtcgctgacgctgtcgccacaggctatgcttgagtctgggaaagctga

SEQ ID NO: 20058 - DNA, 2018 bp, Mus musculus; identical to SEQ ID NO: 20057

SEQ ID NO: 20059 - DNA, 1139 bp, Mus musculus
agcccagcttgtttttgtttttgtttttgtttgttttgttttgttttgttttgttttgttttttgagacatagtctttctgtgtagccctggctgttctggagctcactctgtagaccaggctggtttctaactcacagagttctgcctgcctctgcctccagagcattgggattgaaggtgtgcaccactaccacccagtccaagtcagcctttcctataggagagagataaaataggaatgattgcttttcttttattccttctgtactagggaccacgtttagtgcctactgttgcttacagatgatctgtatcttcaaatctattttgagtccggttcttaagttgccttggtagcctttacctttcggccctttcctgcatctgaaattaccaggcaatgcttaaagtggttcttgaggaattgaggtattggtggtgaatggttgagtaacgagttcccttaacctccccccccccttttgcatttacttcaggaacaccatgaagaagacttctttctatacattgcctacagtgatgaaagcgtctatggtctgtgaagctgctgtacctgaggtggggggttccattctacgaagagaggtggcgctccttccttgacatccagttcctccttcaggctcaaacaccacctcctttcttcaggacctgcacttaatgtttgaggctgtctctccagtccctctcagcaggaggggtaatggtagatacagcctccatacatctctttctccccttgtttaccctccattcccactctgatttagacttcttgattgtcgatctctgtcacatccgatgattgttttggtttctattccctttctaactgcccatcgggctcagaaccccaataatcccttcctttcactatcttctttttggggggtaggtggaagggattgacattggatgggggaggtaggaggcacatcaataaaaaggaaaccaccgagctgaattgaatttgccctgtgtcattccacctcctggttttttgtttcaagtatcgtgaacttcagtagtgggaaaggggaaggattgaggtatagatcagtgaaatagaaacgcgttgttgatgttggtaatttcctgttttttagtgagtggaat

SEQ ID NO: 20060 - DNA, 1172 bp, Mus musculus
aatagaaagttgggaccaggaggtggggctggctttggggtgcttcggagacctcgaccagctcctggggatggggaaaagcggtctcgaatcaagaagagcaagaagcggaagttgaaaaaggcagatcggggagatagactcccacctcctggccctcctagggctcctcccagtgatacagactctgaagaggaggaggaagaggaagaagaggaagatgatgaggaagagatgacagtggggggtggagtcccagcccctgtgctcccaacaccccctgaggcccccaggccccctgttacagtgcactctgaaggtgctccccctactgacagtgaaggcaaagatgtgggcagcacagaaacaagccaagatggagatgctagctccagtgaaggcgagatgcgggtcatggatgaggacatcatggtagaatcaggtgagaagttgggctgcccggggtggggagcagaggtgatagctttgggggctcttaggagttgacgccttgaagcagaacactaaagagatttgtcttttccaggtgacgactcctgggatctgatcacgtgttactgcagaaagccctttgcggggcggcccatgattgagtgcagcctctgtgggacgtggatccacctctcctgtgctaagattaagaagaccaacgttcccgacttcttttattgccagaaatgcaaggaacttcggccagaggcccggcggttagggggtctccccaaatctggagaaccctgacatcactaaggctggaacttgtgacattacttgggaactgagcctcagggtccccagccttcccttggagtgaggaggctgtccccacttgagggccacaattcccaagggagacgtatttggaaatgagtgtcttctactctgtccttcctgctccatggacttgaagttgaccccattacagttgggtcggggaggctggatctgtagacagaatctctgtccagtcaaccctgtacccttttcacttgcaggtccagggctcaaactgggatgtaatgggatagttgtctataaaactgtagtgtaaatacagcactcccctcatgtttcttctctctcccgtttactttcttttacaccggatgtatttttaatttggggctcccccatttgagcgaggttgctca

SEQ ID NO: 20061 - DNA, 1211 bp, Mus musculus
agagggctgctctctacaaagtagttgggtggcagcacgcagggtcctagtttcaatccccagcgcgagagacagagacacagaaaggcatgtacttaggagcagtcttgcaagccacgtttccatggctacccaagcccaccagcttagatgtggcctcttccaatattttgccttcctgctccttggtctacctctgtaaaatggttaccatgatagaattcatttggtatgcttcttgggaagactaataggagttaaagtgctttagcatggtgtctgatgcatagaacttgcatattggatgctctgaatggctgacatttccctgctcgctcgccaccttcaggaacggtcctcagaacatatacaacctgtacgagcaagtcagctacaactgtttcatcgccgcgggcctctacctcctcctcggaggcttctccttctgccaagttcgtctcaacaagcgcaaggaatacatggtgcgctagagcgcggtccgcctctccctccccagcccccttctctatttaaagactccgcagactccgtcccactcatctggcgtcctttgggacttgtgaccctagcgagacgtcatccctggccctgcaaaactgcgcccagcctctggaggagaccgagggtgaccgcgccccgttctgaactacaataaaaagaagcggttccccctaagcttgctgtctgtgctttcagggaggggcgggcccgggctggaaggggctgagaccggcctcatcgaggagtccggaccctccgacggaagtggaatgaagctagccggaagtgaagcaacgtcttccacctcgtcttcctccgcgcggcgaggccccttgagtgactggggagaggtcgggtctcggccaatcagctgcagggagggcgggacttcctgcgcgggagcccgagcggccggctgccgggctctccgtggtttccagctcgcgtggtggtggtggcggcggagcgtctccgtgaggaggtgcgcggggccatgacgtcagcgtccaccaaggttcgacctccctcgcggactgcgctccctggcggccacgggagggtgggccccctgcctggctcccggctggtgcgcgctgggcggggggcgggcggatccgaggctggggtgggacggcgcgctgccggccccccgtaatgctgctccgcccccaggttggagagatcttctc

SEQ ID NO: 20062 - DNA, 1211 bp, Mus musculus; identical to SEQ ID NO: 20061

SEQ ID NO: 20063 - DNA, 1898 bp, Mus musculus
tagtggatgccgtgatgttaggtgactctccttcgggtagtcttactacctgctatctctctcattgtccaaggtgaggccagtcctcctcagtgtatacatgtagtaaattaccagcattatctatcatccccattttatactgggggaagaaactgagggtaaatgccttgcccagggtagacagtaacagaactggatgctccctgctaggctgtgtgcccttgccttcctgtctgcctttgacacaccattctcttctcaggcctcagtcggaccatccttatgtgcgggcctctcatcaaggaggagactcacagggttagttagtagggaccgatcctgatggaggggaggggccactgttctgtgcattgggagtgtttaccccaaaggtggatccactgaaagctgggaacgaggcactggctttgaaggtgatgtttctagactcacactattttcttttcagagacttcatgatctagtcctgcccctggtcatgagtgtccagcagggtgaggtcctgggcagctctccttacaacagttcctgctgtcgcctcgggctctaccgcctgctgctggctttattgctggcaccttcccctcggtgccctcctcctcttgcctgtgccctgaaagctttctctcttggccaatgggaagatagtcttgaggtaattgctgacttgagtcagatctgatcctgggttctcttgttctgatgcttgcttcgtgagaccctgtgttcctgacattcttgcctctccttccttcctttctcaggtctcctctttttgctcagaagctctggtgacctgtgctgctctgacacacccccgagtacctcctctacagagctcaggccctgcctgccccactcctgcccccgtccctcctcctgaggccccatcttcattcagggccccggccttccatcctccaggccccatgccctccataggtgctgtgccatccacaggcccattaccctcagcaggccccattcccacagtaggctctatggcgtccacaggccaagtgccctctcgccctggacctccagcaacagccaaccatttaggcctctctgtcccaggcctggtatctgttccacccaggctccttcctggccctgaaaaccaccgtgcaggctccggtgaggatcctgtccttgctcctagtgggacccctccgcctagcatacctccagatgaaacttttggggggagagtacctaggccagcctttgtccactacgataaggaggaggcatctgatgtagagatctccttggaaagcgactctgatgacagtgtggtgattgtacctgaggggcttccctccctgccacctgcaccaccctcaggcactcctccccctgcggctcctgccggcccaccaacagcctcacctcctgtgccagctaaggaggattctgaagaactgcctgcaaccccagggcctccacccccacccccacccccacccccaccggcctctggtcctgtgacacttcctccaccccagctggtccctgaagggactcctggagggggaggacccacagccatggaagaagatttgacagttattaatatcaacagcagtgatgaagaggaggaggaggaagaggaagaggaggaagaagatgaagatgaggaagaagaagactttgaggaagaggaagaagatgaagaagaatattttgaagaggaagaagaggaagaagagtttgaggaggaatttgaggaggaagaaggtgaattagaagaggaagaagaagaggaggaagaagagttagatgaggtagaagatgtggagtttggttcagcaggggaggtggaagaaggtggacctccacccccaacactgccacctgctctgccaccttca

SEQ ID NO: 20064 - DNA, 1118 bp, Mus musculus
ttggtatcagtagcaagaatattgtgagtggattttgccttcctttgcattgtagtcttgcttaagaccctggccacttggacaatacccagctgtcatctctgaaagtgtccctgaggcatatgcaagtgtcgtggactccctcacacagggtagagccacctgtggtcagggcagacagtgctggttggggatgagccaaggcgtcgttaaagggctcactcatggtcaagctctcctacaggatgggagatgggagatgggcttgggttgagctgggccagggagttggttcatgttatataatctgatatacctgctatgtttctgtctttcttttccatcttactgttgctgaatttcctccagaacttgcttggagatggtcccctcaggttgctgctgctgccttctctgcaccttgaggccttggacttgctctctgccctgatccttgcgtaagtaaacttggtcatggtgtggagaagggaacgaacatactggaaatgaaggccaccgttccgtcctctgcccctaggtgtggaagtcgacttttgcgttttggtgccctgatcagccggctgcttccccaggttctcaatgcctggagcactgggagggatactctagctccaggccaggagaggccttacaggtgattgtccacgagggcggatagagtggagagggtggatgagaacatcaggggccccggggctctggcatgtcagctctcgttcataccctgctttccttattccttctccagcaccattcggaccaaagtgtatgctatcttagagctatgggtgcaggtttgtggggcctcagcaggtatgcttcagggaggagcctctggagaagccttgctcacccacctgctcagtgacatctcccctccagctgatgctcttaaggttagtgagaccttggctcctgttcccctggctcctgtgcctatttcctgactgactgtcctgacttcctgtttgcctgtacatgtgactgtgtttccttttaccacaagctatgcagtaccaggggaagctctgatggaggtttgcaaagtgggaagccaagtgctcctaagaagctcaagctcgatatgggggaagctt

SEQ ID NO: 20065 - DNA, 1197 bp, Mus musculus
gaaggaggttctttctcccagtaaggaggcttagaaccagagctcatgtgctgggtctctaccccagaaacatactgttaatggctgtcatcaccccatggatgcatcatgtctataggaaagtcaaacctcaggtagaaggactgctatggacactcggcattgttccatggcctcttcctttctcccctcctccagggaaagctggcttcctttttcctgtctcgattggattccctgaaccctcagctccaacaggtaaagggaagggagaggcactaagtacggggatctggtctgaggcatcgtttacagcttattcttagctgttaattgcacagcatttggaccctcttttcaatttcttcctcctaacacacacaattactggctttcgtactcttagggattctgcctcactgttacttgaacttgttgagctttgttttctgggccattagtggggtgggagacccatggccaagctagtccctctctgaccagctttctgcccttctgcagctggcctgcgagtgttactccaggttgccctcgttaggtgctggcttttcccagggactgaagcacacagagaactgggaacaggagctgcacagcctgctgacctcactgcacagcttactggggtccctgtttgaggaaacagagcctggtagggaacagggctgtagtctggagatgggttggagagcgtggcaggagggaacaagtgtggtccacagaggccgggcagtgggtttctgggtgacatggatgagaacataagtgggtaatctagcataaatgaaagagtgggggctggagaggggttcagtggtgaaggacactggctgttcttccagaggactgggaattgattctcagcacccacatggcagctcgtacaaagggaaaaggagggatgggagaaaggcagagtgtataggtggttgtattgctgcccagctcctgtgcagagtgaaggccctggaatagagatgctgctttcccactcagaagatggtaacacccatgtcctcctccagcttcggcagaggttttcaggcctggcccgttgcctggggctcatgctcaggtgtgtggctattgaagggaacgggcttggggctggaaggtgcggtgggtgtgtggagtcagctagggtgactgctctgagggtctctttgttctggttct

SEQ ID NO: 20066 - DNA, 1120 bp, Mus musculus
agccccatgaccacatcacccttcccagaccccagtcaggtgagtgccacccacacgctgagccccgcagagaggagctgagccagggtcagtggagaagtgatggtcctttcagcgcccatccacccaccccttctctgcccttcagccccccgggaaacagacgtgcctgtggataccaacctcatcgaattcgataccaagtaagaaacaccccctgccttcttcattgatcctctaggatagagattcccatgccattcagatccacccccctaccttgtgggtcgtttcctcctgcttatagaggctgtggctactgccctgggtctcctgtgaacccctctgggtcttttaccgcttaagtgcttgactctaggatggggtgggaggaaggcagagtgggaggcccaaggaagggtcagaagcttttattacatctcctcctcactctcaccaagctatgccacagacgatgacatcgtgtttgaggactttgcccggctccggctgaagggaatgaaggatgatgactgtgatgaccagttttgctaggacgaggggctgggagaggtaggggcgggcaggactcaggtcccacggccctcgagggtgggagggtcccagcctctcctccttccccgtctgtccgtctgtccacccgagatacacactggacccatcacttgttgaaagtgggcattaatcttctgacttcagctcgctgccccagccccgctccctagggcggcaagctgtgtacacacctaaagttttgggaagggaacagtgaacgcaaggagtgaatgtagagaaaaggtgtagaaagaacgcccatgtttggcctcacaccaactcgcccccagtcaccacttctgcctcccaatccttgaagacgagactttggggaggggtgagcaaggccatttctttgtttctgagcatagggaagaaataaaccttttaataggcatgaatgtgtatgtgttctgtcagcggagtttaaggggtgtccagtgtacccatccatgatgcttttttctacatctgcagggtaccttacttgggttatcaataaatgtttgctggatgactgtgctatgccagtgttccaaggtaa

SEQ ID NO: 20067 - DNA, 1171 bp, Mus musculus
agctaccgaacgttgttcccagaaacttgtgaggccatatttgcttggggactaagaagacagacatcgctaagaggcttccagagtctttactccagctgctactgtttactgacatctgtggtgtgctgggcatatcctaaaactctaggaagtattcgctgtggtccctatttcatagatgaggttcacacagtggttaagctttttcttttttttttttttttgttgttgttgttgttgccttagaacactgagttaccagtcaactaatgtagatcaaacttgggaaagatgtgagaccagagaaataatactgcccggttgtgggtggtaaagagaggcagtaccccattgattgatctgacttgtaggtggccacagggcagccgcatgagggctccagctactcttccaggaaggactgtcaaatggctctaaagcgagtagactacgcccgcctcaagattagtgatgtggcgagaacctgtgagcagatgctggagaactgagttcggatgatccagagtgtgccctgcaccagagaccgtaggatggggagcagtgcatcatacacgtgccctactggtcagggcagacgaggaccacaaggcagaaaggagaactgaagaatccaaagccccagtgtacacacatctcttctgactcttccagcaagacggccctgttttccactatgcaagatcagacagaggtcagaggtcaactcccaacccacttcctcatgtgcaccctgccctggagtttcagaagacttggcccaataaaaataaatgtgttcttataagcacacacagtggctcacacctgtaggcccggtacttgggaagtagaggtgggaagattgctgtagtttgagaccaacctgggctaagtacatagagggaccctccttcaaaaggggaagttatgttcctcattggaagaaacaaaacaggaactaagtgttttaataataaaagctgtatttttttataaagctaagagtctctctctcgctctctctctcatatgtatgaggctccaagagactgaggactcgagtcctgtctacacagcatcagcccagtctatatagcatcagcgtggcggctgtgaggaggggagtgagaaagcccaggcttcagtgtggggttggagaacagctgat

SEQ ID NO: 20068 - DNA, 1157 bp, Mus musculus
tccaccctttctggtcttcccctgcagagcctggtggcacaccgggtcccactgaagccatatgcagcacctgtaccccgatcccagtccctgcaggaccagccgactcgaaacctggctgccttcccagcctcccacgaccctgaccctgctgctgtccctacacccactgccacacccagtgcccgaggagctgtcatccgccagaattcagaccccacctctgaagggccagggcctagcccaaaccctccatcctgggttcggcctgataatgaggctccacctaaggtaagtataaccctaaaaaacaagaatataagagttcagggtaggaggaagaaatcaaggcagccacggagatactgcctgtaagggtagaaagacagaagtgactgcaggaatgggaaatggccaagcatctaagggccacccttacctcagcatggccatttttcaacattacagcctagacatattgagtaacttgtctgaacccatttgtttctctgtgagtgctgaggactgcgttcctcagattgacagtggaatggagtgtgtgctgtgcctacacaagaccgacagagcctgttacccgtctttctctccaggttccacagaggacctcttctatcgccactgcccttaacaccagtggggccggagggtcccggccagctcaggctgtccgtgccaggtacacagcaccagggtgcgctcatgtggcagcctagggagtaagagatatagggactttgccaggttatctgcataggggtggggcaagccccaaatcaggcacctcatcccctccctgtgccaccacgacccgccccggcaccctgtgctccctccacagacctcgcagtaactccgcctggcaaatctatctgcagaggcgggcagagcggggcacccccaagcctcccgggcccccagctcagccccctggcccgcccaacgcctctaggtaatggagttgccccctgacttactctcacctctcacttctgccgcctgcttctctggtgatggcgccccctgcagtgcagcttgacacacacagctctgtgtgagcacagctctgatgtgaactctctcccttcacagtaaccctgacctcaggaggagtgaccctggctgggagcgctcagaca

SEQ ID NO: 20069 - DNA, 2109 bp, Mus musculus
aaaggttctctgggatgtctagactcacacacagactagtctcctgccctaataaactttttgaacttaattagagagcccccggggtcagcttccttatcttggggcatagctacctggacccaaactccaggttacccggagacccaggcgtccgggctcctaacaacgcctgcagaacctttgaccaaataaggacaaagttacttctcctcccttcctaccccctcccttcccctctttgcttctgcttttcctgaagggctgttctgagcatccaaaggctccccctcgatcattgatcgatttctggtacccagcatttgctttccctattaagcatgaacatctaagacttcagaggaatactttttcctccttgacccatttaccagactttaggaccatgatcggtctctgcaatacccacagtactgggttttccccccaacttttggtggtgtggatgaagcaccctcaactccagctccacagtacataagaggacaagttatgcaggtgcactaacttaatgaggtgattaattcttttagccagctgaggttggtgtcctggtaggcaaagaccggtcaagttttttcgtcaatgggctgacacttgggggccagaaatgttctgtgatccgggactcactgctgcaagacggggaatttacaatggatcttcgtaccaagagcaccggaggagcccccaccttcaatgtcactgtcaccatgactgccaagagtgagtttgactgattctctagctttgaaatccttttgttagtcactttatgtgtcctcagtgtcaaggctgcataacagtatttactctgctggttatgggaaccgtggatggtcctttgggttctgactctggctccccagcttgtaaagaaactaaaacttatattacctcttaagtcccttcttgctttgagcttttttgagattagtttgcttagggcagttgggatcttaagtcagcatttggctctaatctccagttctgtaaagacttgagaggtaggaagcgcatcacagccgttcctagccacctacagcctggaagtttaggacctctaaattttgcctttttctttactactcttaaagctcttttttttttttccttctttgaaaagctctattgttttaggatgactgacagcctgcctgtgtataagggggggagggctggttaggagggctgaggttaggttacaacccccggggccagacagctgctgaacagctggcagggttgaattgtgacacctgggtcctagcttcctttttctttcctccagcgctagtcctgctgatgggcaaagaaggtgtccacggtggtttgatcaacaagaaatgttatgaaatggcctctcacctgcggcgttcccagtactgacctcatctgtcccttccccccaccgttccctttggcttttgcacccccttctttccatacacacacataccattattttttgggccattaccccatttcccttattgctgccaaaaccacatgggctgggggctggggctggatggacagacacctccccctacccataccccctcctgtgtgtgtttggaaaatttttgtttttgggtttcattttttgttttttggtcttttttttttttttttttttctgaataaaaaaagattctactaacaaggacctgtgttggtttgcacttggcattagttgggagacaagcacagtgacccacctcaattaggtacctgcttcttggctgtgtccagaatgaactcttatttccagtcttatttccttttctaagccccaaggactaaactaagtaggcattcttctgtgtacttagtcatgtgacctaggcccctctatagtggtatttccattttcaggtccagttgaattagtatgtaatggaacatagccatccagaccagagaatgggtccaagcctgcgggtgaggcagggccacttgagtcatcctgtgtaggtggggctcccctccctgagtcatagcaaatgcagctagggctctccccgacaagttcatcctatgaggtgattatttttccagaatttcacctgtgtaaagatgatctta

SEQ ID NO: 20070 - DNA, 1105 bp, Mus musculus
tcttttttttttttttttctttttctttccctgcttcctctggcttcctccttctatagccaagtggtattcaggatgaatcggagcgagccctaaccttaacctctcctgccaccaccactctatatagcctttggcgtggctttccatcgaactcggcaaattttgcaaagtggggggagggttttttaaaaattgcatttgcaaaagttcgctatctggcccggcggggggggggggaggatggagggagggaatggggcgcaggccccgccccgccgccctttgcaaataaaaatctagaggggggggggaggagcaggaagtggcggtgcgagggctgctgcacagctaacagagccgcgttccggacggcagcgcgtgccccgagctctctgccttcccccgcccgccagcccgagcccgagcccgcgatcccagcaacagcccgcagagcagccccagcagcagcgccatggccgggtggaacgcctacatcgacagccttatggcggacgggacctgtcaggacgcggccatcgtaggctacaaggactcgccctccgtctgggccgccgtccccgggaagaccttcgttagcattacggtactgcgaggctcgtgcggtcccgagcagtgaccggccttagaccctctgggggactggggtgggggcgggcgcaggcgagcgagggcagcgggaggccgtgatccggtcctctcccatcggcggggcgaatggcggctgcgtgagactggctccctctgtggttccccgggctctacgcccctcggcggcggcgcccatctcgcccgccgccccgctttctgcgaccgggcgttacatccggggcccagggcggggaggggcgcggcggccggtgcggcggcccacttccgcctcctccagggcggggcgggcacgcgctgcagttttagcccgggattatgattgataaggggctccggagcctggactccccttcgggccgaatgctcgctctccctccaccattgttccccctgacgctgatgggagcgccaggcgcgtggccttgggcccgggccggacctcggtagccaccctgcccctcccagctccgtt

SEQ ID NO: 20071 - DNA, 1205 bp, Mus musculus
tgtgtgtgtgtctctctttctgtgtgtgtgtgtctgtgtctcacgcgcgcggagtctgggggtgggatgggatggaggtgggaaatggaagggtgggagtcagggggtctttccaggaagggactgctggggaaaaaatgtatcatcccttctcttctccctattctgtccactccaggttccgggagccttacccacaaatgcagtagcacgaaacaccgcatcatctctcccaaagtggagccccgagctttagccctggcttctatatcccactccaagccccccgaacccccaccactgatagctccacttcctccagagctccccaaggcacacacctccccatcttcctcctcttcttcctcctcctcctcaggatttgcagaacccctagaaatcaggcctagccctcctacctctcgagggggttcatcaagaggaggcactgctatcctcctcctaacaggactagagcagcgcgctgggggcctgacacccaccaggcacttggctccgcaggctgagcctagacctcctgtgagcttggccgtggttgtaggttctgagccttctgccccaccggctcctcccagccctgcctttgaccctgatcgttttctcaacagcccccaaaggggccagacatacggagggggccaaggagtaaacccagacttccccgaggcagagggcactcacactccctgtcctgccctggaacctgcagctgccctggagccccaggcggctgctcgaggtctcgctccacagttgggagcaaacgggagaagaggaaacaaattctttatccaagatgatgatagtggggaggaactcaagggtccgggaacggtgccgccggtaccttcatcccctccttcatccccgtcctccccaaccgccttgccgccatcaggcagggcaacgagaggagaagccttgttcggaggctctgctggcagcagcagcgagctcgagcccttcagtctttcgtcattcccagacctcatgggagaactcatcagtgatgaagctccaggtgtccctgcccccgccccccagctctctcctgcgctaaatgccatcacagacttctccccagagtggtcctacccagaggtgagtcagctgccaccgcttctccccttagttctcagacttttcaaaatgaatgttgttaacccttatccccacggcctgtg

SEQ ID NO: 20072 - DNA, 1137 bp, Mus musculus
tttgtaagaccccactcccacccccagttcctctgttcccttctctctgtccctcaaccatgacttaaagcctgctggaatttggaagggatgggaagaaggtgggggtagggagggaatgaagaggaactggtggaaagattgggattcctgcaaaggaactgaacagaggaagagttggggagcagactagccctccccccaccccagcctgtctcctggcagtgtctctatggctgctacgttcactcttccatcgtccccacattccaccggcgctgctattggctgctccaggtaagaacagagaagtcagccagatttctggttctttgaggaaaatgggttctcaaaagatgaagtgaaatagattctgagtgggaaaagcagaaaggaaattagggatagaacatgatataaattgggggtgactagaattggggtgatgctcagaagaacgtgaggaccaggaggctaagcccctgagtcctagaccccatggctctctgtgtgcctttgtgcccccagaaccccgacatcgtccttgtgcactacctgaacgtcccagccctggaggattgtggaaagggctgtagccccatcttttgttccatcagtagcgaccgtcgagaatggctgaagtggtcacgtgaggagctcttgggacagctgaagcccatgtgtaaggaacaagcagggatgaactctaagggagagagagagtgtggtacttcccaaagcactggggttctgtgcccaaaccccacgggtaactctttctctctaagccaggagggcactttcctgtttggatactggacacagagcgtgtgcagtctaagatgtggactatggagaggggagtgagagacagctgtgggctgtatgtctgaacaggtttaagttcagcaagtcggaggtttggaggaaccatcaaggtgctttggaagtctcacgtcttttccccaaatctcctctagttcatggcatcaagtggagctgtgggaatggggcagaggaattctccgtggaacagttggtgcaacagatcttggacacccacccaaccaagccagcacccagaactcatgcttgtctctgcagtgggggccttggtaagtgacccccatactctgg

SEQ ID NO: 20073 - DNA, 1160 bp, Mus musculus
gggatagaccagaatgatcagaaagagtgggggcaggaaggtgctgggagaagagatgtagatgtggagtcttgctttctcttgcttctctgggacatgggaagaggatgcctttgcttccagcagctcaccagaggaagcaggtgttccctggggtccacacctggatacgcaggtgctccctggggtccacacctggataagcaggtgctccctagggtacacacctggatcagcaggtgctccctggggttctcacctggataagcaggtgctctctggggtccacacctggatcagcaggtgctccctggggtcctcacctggataagcaggtgctcctggatcagtgagaggcacactgactcttgactgtttcagttttggggtggtagagtagggtggcaggttccctagaatcaagggcaggatctgtgcttgggcctgggcatgtttttgctgctgcaggtgagcaagtctactcttccatttccaggaaacaggattgtaatgggcaagaaccatgttttccgcttcaatcacccggagcaggcgcggctggaacgagaacgtggggtccccccgcccccaggacctccctcggagcctgtggactggaactttgctcagaaggagctgctggagcagcaaggcatagacatcaagctggagatggagaagaggtgcggggcagctcccacaggtcccaccaacctctgggagcctagtattctcctgtgggtgatcctcacagcttctccttcctgtctcaccccaggctgcaggacttggagaatcagtaccggaaagagaaggaagaggctgaccttctgctggagcagcagcggctggtgagggacacgtgggggccaacagagcctgggcaggtgggcagaccaacagtgaagctggcatcatctcagcctagctttgctgttggtgtcctgggtggcacctagaaggacaagtcaggagaggaaggggaaggggaagaaaccattgccctattcagggagtgagcacttggccctgctgatgacactccctggactgcagaggtctgggccccttgagatcacttcgagtaccatccttcatggaagattgttccttagatggacctcatcccgagagtaatacacagtcatttgctgcataat

SEQ ID NO: 20074 - DNA, 1163 bp, Mus musculus
gaagctttgttctgaagaacatgcatgtcatttgccagaacctagggccaaatattatcagatatcaataatctatattcgaaaagacaactattgtactgtctcatctcgtatatggaatctagggtgtttgtgtgtgtgtgtctgtgtctgtgtatgagagagagagagagagagagagagagcgagagagagagagagagaagacaggtgggtaaaggaagagtgaggagagtgaaatgagggcgacggctggtgctaatgcagtcaagtacctgatggaccggaaagaaatggagttttgaaggccattattttgtaaatataacaaatgcatgttaataaaaattcaaagaaaaaaccctgaagaaaaggattgatactcaatctcatgaatgctaataaagtgtgtactatagttgttatactaattttagcaaataggtagaccagggtttcttagaaaagccataaattagtaaattgttgcgtttaattctttgtaatcataggcccaagaggatgctgaaaagcttcgttctgtcgtgatgcccatggagaaggaaattgcagctctgaaagataaactgacagaagctgaagacaagattaaagagctggaggcctcaaaggttgtgagatgctcttacccatctgctccaatgccgggaacaaaattaggatcacttaagaagcggtgctgggaagtcatttagccttgtgtcttaagaatcttattttttgttttaaattcagaaaagcaaaatgaaagcaaaccccctctatcataatctggcctttggttatttaaactctcagtgatgatgcttattcatgaatgaagactgctgttcagtggcttattttatccaagtgagactcaacctcaattttctcttattctttcccccccccgaaccaccccttcttggtttactgaaacagagttggtctgtgtagccctgtctgtcctggaactcgctttgtacaccaggctggtcttgaactcaagagatgtgcccacctctgcctcctgagtgttgggattaaaggtgtgcactaccactgcctggccctcctttttcttttaacaagttatcttttttggtttattcttgtaagacagggtttcatgtagcccaggctgaccttgaacttgccgt

SEQ ID NO: 20075 - DNA, 1228 bp, Mus musculus
acgtgtgtttgttccttgagtatgagacagaattattttgttttggctgataagtggtaattttggtgcccttcaggtacataatgctggaaataagcttggtagacgttgtgatatgtgttccaattatgaaaaacagttacaaggaattcagattcaggaagctgaaacaagagaccaggtgagtttcattagagccacagagttgcatttttttttccgtctgctatatgaagtgtatctatctggttatggaataatctagcacacacagcggcaacagtggcagctgatttccaatgagagcccagtaggaatgggtatccatttttcattagcatgctaacactatatcagctagctcagccctcagaggtgccagcaaaccttagcacctttctctgcactccatcacccaaacacctaaacctgatgctggcttgatctcagcctcacagtgaacttaatcgtacagatatgagggaggtaacatttactgtggactcataaaagctagccgggtgtcatggtgaccagagtttggatttgttgcttactgcctgtttgctgtaaatttgttgacttgattaatggtgattcacagggcacagaagttaagctcccgcgggcttggactacttgaactacttgagggtaaagttcatttccaaatacagagtagaagagtgtgacactggtaacagtgtagagtttaacaagagtagtcttgtgatagtgtgtcaggaaaggaatatttttctttgttatgaggatctgttgttgcctttgccatcagagctgaaggaggtgagattaaagatctggtattttcaggtgtcactgatactcagttcctcatctgtagtctttttttttattgatagcttacaggtggatttctaaagctacttaaactaagataaaatggttggcttctgatagcctgacatgggaaagggctgtcttggattccttagttatttctgtaggcttctatagatgcctcttgcttgcctggtgttttactgggtttcagcaattcagatacagttgaaagatggttttggcccataaggagctttcagcattacaaacccaagcataagttcagtctgtcttgttcctagagatgatgtctagtttagaggaggctgtgtggcttagctgtagtttcaggtaaggcaacacttgggctgtgtgctttagagtctgctttcacattaggaga

SEQ ID NO: 20076 - DNA, 1174 bp, Mus musculus
ccttctgtgggagggggcaccaatgtagctggaggacttggatcgcctctatctctacctcagatctttgcatgatcactaaagccagaaacttggtcttttctatagacttgggccccttctcctttcccttctaccttcaacgtatcatcaggttgagtgatactggaggggctgagggataccagtctgtaatatagattaatttggtgaatttttaaagtattttttcttttttcttcgaagagctgtatctggtgaattgatctgctgcatgtcaactaaatagcccaagtagagggcacataggtaggtagggcgtcatctccccgtactcagctcttcattgtttctccaggtgcagttggagaggatccggcaagcagactccttggagaggatccgggctattctgaatgataccaaactgacagacattaaccagctccctgagacatgacaccctgatagcaggattctaacctgcattttgggtttttaactcatctttagaatatttattattatttaactcttaacggaagaagtcacagcaaaggaagactgaagaaatgcaaatctggagggagaaggctgctgtgtgcagggacagccaacacctttcaaagggaacactaataagacactggactcgattccaacaggtgtgggatcagatgaggtgccagaaaagttgctgtttcctgcctgctttctccaacatggattttggaacatatttcctgacatgaaagcaacttcccaatagtgtttggaattacgttttctgttcatacaaaccgggagagagaagtttcttttttcagttgtctaaggcttcatcagtagcagtgttcagctagcagagaggtgtagtgtgctatatgagtattttatattaaaatatgaagtgtgagagcaggccattggctgttgattgtatttcccttgctcagtgcattttgtttcctttttaccattttatcttctattggaagaccttaaatgctactgaaacttgcctgagaactataggaccatggcaagcaaaaacaattaaacaaaattagaatctgaatatttggctgaggccatatattggaagttgaatttatggaaaaaagcacaaacaaccttggaagcactttgcacaccgtgatgaacttcctgggcc

SEQ ID NO: 20077 - DNA, 1727 bp, Mus musculus
tgagtggtgttggcttacagctggtacccaaaggaacattatgggagtgagttaactagacttttctggtttaactaccatcaattcatagcgtaaatggactttgttagtaatgagtcattatgaatttgccctcaagatgtttgttactttcttcttttaataaaacagataaggcctacttaccccataaataggttacttttataatcatgaatttaaaagtaaatatgaattatggaaacgtgctaaaagcttgccaatgcatggaaaaattaattggcttaaagtcccttgtatagtgctacttggtttaaaaggaatataatatcctcattgaattaaaaggattattaattataatgggattaaattagatttaagactagtccctggaccccaagctgatttgtttggatcaccattggctacagttgaatggataattcataatcatactgaactgtgtcactcccagtgaactgttttgctgaaaccaagtatcttacagatcttttctcctgaagctggggattgtgcagtaaaagcatcatgactagggtactgtttagagtctgtaacttgtggcaaatgtaaactgctgggatccactcaattgagaaacatcctaggggaagagaaactgaaatgctgggttgaatgaaataaagtaatgctgcaccaccaggtaagcagcagttctttaaagtcaagtcagttttctgcatgagagaaggtttggtgtaggagctgacgtcaccaggagaggaaaggttggtctagtttcacacaccttcctgtactgcattcagtctgtgtagacctgttctcttgcatgtctgacctggcttaactctaaactgtaacataccttattctgtggcttttaattggcagtcacttggtcatttctaggcatatttacctttcagaacttaagtaggcagatatgaaaagatgacctaaagccaaggacaaactgtatgcaacagaccacaatgttccttttcttttaaggtgctagaatttgcacctcctacccaccaaggagacagacatagccagactcaactctggaaggtattggtgcctgtgaggaaatgagccagcagaggacgctgcagctgtagaccttcagctctgctctgagcagactgagtatctgtgttgactgtactgaggcatgcccttaagaaagtgttcaaattaaaagagctgctgctgagtagagtgtgtggccttttcctttgcatcccagggttctggttcccttcagaggcacagttttggtactgctacttaagatgaagatggacctggcagtgttcagcaggagcctgtgtccagaattaaaacaaaccaaccaacccatagactttaattgtaaagcaaagtcaaatttttgaataaaaatttattcaaactttatttgaataaataaatttatttaacagaaataataacaaaaaggaataacaaaagaataaccacaccaaatcttatccaaaatgctcctttataaattaaacagtgctccctgtttgttttacagccttcaagttatgttcattccaggtggtgtcagaaggtgacatgatttcggatgtcattgatttgcttcaccatttcccttatgtgttcacccctgcaaaatcatcaaatgaataagatgagctgtcattgctgagttgtaaggactcccaccatcctagacagggtctctctgt

SEQ ID NO: 20078 - DNA, 1465 bp, Mus musculus
cagaactgacatcaactcccaactttgtggttgaagttaccaagactgatggcaagaagacccttgtactggactgtcactatcctgaggatgaggtgggtagggtggagtcttctgaccttcatgtagcatacacaggaaagatctgttaatctattagatggagggggtgggaacagggttagaactacagagcctctttgcacttcccttacctctgctgtatctctcagattggacacgaagatgaggccgagagtgatattttctctatcaaggaagttagctttcaggccactggtgactctgagtggagggatacaaactatacactcaacacagattccctggactgggtgagtgttggctgagggggtgctgggcgtttgcagagaagtgtcctctttcaagcattacaagaggggaaataaatgtgtctgcgtgggtgtgctgaaccacacgggaaggtcagcccacagaccttgccagaccacttttgggttttgtttttcaagctagtaaatgtattttctccccaggccttgtatgaccacctaatggatttccttgcggaccgaggggtggataacacttttgcggatgagttggtggagctcagcacagccctggagcaccaggaatatatcacctttcttgaggacctcaaaagctttgtcaagaaccagtagaactcagagactgcgggccttaatttaaatggcaagctttggccagtgaacaaaagctcccttggcatcagaattatgcttcaaaaatggctgtcatcctaatatatcggggggaagcaagtttaaattactgctgttacacctccattcgctattcctttgggctttttttctctgtacaaatttattatttgtagatttttgtataacatgatgatggacaataaatctgactccaataaatctccaggaaagttgaggttctttcgcccacatcagaacaccaagagcagagatgtctgaagttttaatataaaatccgttatatacaaaaggcttgtgcatacagggccctctcaggaaatgagttgttctcagctcagtagtgaagtgtgaggtcgggatggctagaggatcacagcccaggtgtcacaagtctggattaaacagaaaacaagatagtgtaacatcaacagttagatcttacatggctaaaagttgtcatcagtcgtgacatgtgtactacaagtagaaccactatgagttaattcactggaattcaaagaagccactgcgttcatggacctgttctactaaacagaagccatcagcaatgtagcttataagcctaggcaccctcagaaagcaaaacccgacagcttggggcttgtggagcctgacagcgagcctctttggatttaccaagtattctaagtctgcttcacagtagcctcttaagtgatccacacctatactcgcctcatccttggtatctg

SEQ ID NO: 20079 - DNA, 1189 bp, Mus musculus
cttcgcaagaccaagggcctcgcctatgatgtaagccatatattcctgctcccaggaaaccgatggtccattaaaactggcccatgaattgttagggcgtgcaaaggtttccaacataaatccttcatcctgttcttgggattctggatctaatgtctaatgaggccaggatgtccactccacagcaactgcgtgcaggtcagcctgggctttccagaattagtcggtttcagaagatcgttaagtgatctttgaatatacggttttgcgcgagttggggtgaacctgaacgcattccgcggtaacaaagcttggtgtggattgagaaaagcaggtgaattggggagagtgggcagcaagggagacatggtggtcaaggtagctgagtcaaggcctccccgactgcactggcggctcccagcagagggcgcggtccggcccggatgactgcagtcctctggggtggaaagcgcttccccgggcgagggcggggcttccggcagcgcgcgaggtcacacggtgccttggcccggtcgtccttccctctgcacgtgtccgccccgcgatgctccctctgctgcgttgcgtgccccgcgccctcggcgccgccgcctccggcctccgaaccgccatcccggcccagccgcttcggcatctcctgcagcccgcgccccggccatgcctccggcccttcggtttgctcagcgtacgggccggctcggctcggcgctctggcctcctgcagcccccggttccctgcgcgtgcggctgtggcgctctgcacacggaaggtaaggttcacgcaccctagtcggagtgcggccacccagcttggaacagaccctcgtgatcgaaagcttccccccccttctcgcgtcttggaaatgtggcttagcaaagtccgtagggtcgtggtttcaaagtgtggttgttggttatgtcttttggaaccagaaagaggataattgggaattcttttgtttaatatgggaagtaatagtagtgagtccatgataagaaataaccatctcatgataaatatcagttcagctcagtaagtatatcctgctctttttatagagtgagaaacggacgttttaaggagtgatttgggctagtgtcgtaagaatggatacagtccggtctatcggtaaccggcttttctccctttgggtcatcttggcttttc

SEQ ID NO: 20080 - DNA, 1105 bp, Mus musculus
gctgcttcctaaccagtcgccatctgaaaccttcgtcgtctgcacttgttagagggaactagagaagcctcggcatccttttcccagttggaaaagagtcatctttgctgatgactaggagcaaacattccccagtttggtactacttacctataatcactccccgctgagaagggagggctgcgagtcctaggccagcctgggctaggccttgtatctaagtgaaggaaggggaaggaacacactttcacagagaatgtttgaagggggggggagttttagcccttttattgtgcttaatcggtccaaacacatctgtactactgggattttctcatttatacagtgaattgtatttataagcaacaaatgggccaaactgccttcaaggcacttcgaagacagtgggcagtttctttgagtccagcaagctctttccagagagcctagcctggctgggcacttccattgccaggatctcattggttcacagctgtgtctgttgagtctggtctaggctttatctaaccctagccgtgggcaaagcttttagtcagtgcttagggctgtctgagtactcgtgactacttggatagaaatggtcacgttatcaaccttctgaaaggctctccggaatgtgctttctttttcagtgtattttttgtatttatgcaaggtttatttagccttgcttggtaagaggaacttttgtattttgaaaagaacattcatcgtgctagttaaagaaaacaaggaggcaatatattccccagcaattaacagtttctgttccactgtaaactaacagtaaactatcgaggtcttttctgggtcatgggaacagtagcttgcagtgactggctccagggtgaggcctaggaccttaccctggagggactgctgcagaggactgggacctcccagaaaagggagtgatggatacagtttctaaggacccaatgtttctgtatagaaatatgtttatcattctaacattgtggggggattttaatagaatatttagttttttattaagcttttttaaaaattactattcaacacagctgctcagggattacatgaggtgggagccccattctgactc

SEQ ID NO: 20081 - DNA, 1234 bp, Mus musculus
tttagtttagttttcatctcagtctctcctcccttatccatgtccttcctcaccctttaccctttacccaagctgctgcctaaggcattggaagtgactcctttggatgccaatcgaaatttcactttgtgttggctgcagtgtgcaatgtgtgtgcagtgctggggagaattaatgcttgaggtcttttctgtcttctaaaacagatgtcaatgccaatcatgtcatctcgaggggacatggagagtgtccgccgttgcatggctcacagcctctttatgaatactgctgaactccagacagatggcacctatgccaccacggacacacatcagccagtggccatccacccatcatctgtcctcttccactgcaagcctgcctgcgtggtctacacttcactgctctacaccaacaaatgctacatgcgtgacctctgtgtggtggatgccgagtggctctacgaggctgcccctgactacttcaggaggaagctgagaacggccagaaactgaaccgttccaggatgctgccagcatggctgggcctggagcttagatcacagctgtcttccaaacataagtttgcagccagacttccagactccaagagcttaaaagaattgctgaagcttctcagactcacccgtgcagaatgatcctacgtagagcatgagaagctgagcttgtgcctcgggtctcaccaggcagttttggagactgaattaacttctgagcctcagattcctcatatgccggagtcggataagacttacacgttcagagtaatgaagtttagagaaaatgaacagaatgtgacagagacttgcctggtgcaagataagacaatctgtgacttgtgagccattgtgctttgtgatactaattaggtacagcacagccccttgagctctcatgactgggggaggagccataggagactacagatccaatttgttgaaatgtttctccccccttcttactccctctcccgtggatcccagagcctcatgcatgctatgcaaaacactttgccactgagccaatccccagccctcacttctactttaatgtctacctgtgtgtattttagatagaaaattaaaaaattgactcccacagacagttccagagtaaggtatattctgacctgttgacccttatggctcagggtgtagcacattgtcttgtctgtctccaagcagaggccagcaagtagttccttggttggtccc

SEQ ID NO: 20082 - DNA, 1167 bp, Mus musculus
ggctgggtcatcctgtttaggctgagttgcttttcagatgagattttctcagaggttagcataggcttaagtaagctctagtaaacattctaggtggaaagtttcagatacatttgaggtagaaagtattttaatgactaagtggaactcgataaggaatggaatgagtacggtactagtaaatcactgaagaccattgtaactctatgggacgtgggccaatgggactgcttttgtcttgtttaaaaatttttaacgtttaatgacaatcttagattgtatgatccttatgggattcttaagtttgataattgtttttgttcaagaaggccttgtcagtaacttttaggaatttatttttattattattgcttgcttttaagccagaaatgggtttctttaaggttttatttattttccctaagttaattttagatttagctagttcatggagttattgtgaccgatctttaattctaaaatctctccaccagctattttcattttaaacagtgaatacctatacatattagtgactgaaaacagaaaatatattttggattattgttagggtgtgaattcctagtggtagaacaccatgctgtgtgacacactgtctcctggcagtgctgatttcagtcacttggcctcttagtagtttggcaggtccctggccctgtgttgtttggcaagatccctgtgctcactgggacacaagggaaagtcctcacttccccagccaacctctcaattccaattcttccaaaacacacttcctttttgcgatatgagtcagcagaaaagtgagattgcattatgggattctgtgaccgcttaaacttacatgaatacagtttgagccatttcctggattgattgtatcagaaatatccgaaaagcacacctaaagcatagggcattttgtttcgttgttacaggaatacagtatatgttcatttaaaaatgaatggacatgccaattgcatctccataggagatagattttatatactttggtgtgtttttttcactatgaatttttacttgtttcttccacttctttttctgtccctctgtgtcctcctgtcttttatatttcttttgtacttgcgtgaggcaaagcgtccacatcctggatcttgaaatggaaccataacactgtctcta

SEQ ID NO: 20083 - DNA, 1198 bp, Mus musculus
aactgggctgggctgcccagagagtatgtgcccagatgataggcccaccctgatttcctgctcctgctgagatgcggttataccagtgggctgaacactgctctagtgcattgatccatggacccctgggaagcatgggggctggcacacaggcagcagggtgttcttgaaggggctgctttgtgtgcaggagatctgaggcagcacaaggcttacccagagggatgtgtatcacaggacactccttgccggacacttacgcatcctcagacacacttagacatcaccccattctcacagtgaccattttaatgtgcctaagccacttgagtggggtgggtcagacactcccagctttgcacacacagacaaatggacacacacacacacacacacacacacacaatgtgccagagactgactatctgcctcacacacgctccaggctttgggagaccctgggtttcctgggctcaattgggcacaaattggcttttgggggcccttggctctgggatattgtgctggggagacactattgatctgagtagtgcactgaggactggaggtacatagacagactgttgctgatgggtactgtatgaccctgactgcttgtctgacatcccataaatgtgtgtgctgtgacatcctggcactgcaaacactgtgtctctgcctctctcttctctgtcgatggtaactggccacattgtggcaacatgagcccccccccccaaaaccccaacaagcacaaaaggtgactttaggacacccactactatttagcttagcccaactagtctctttcaactaacaacatcagagcaggccacttgcttctttgtccaattgttttgggaaactggagcatcaagccctgcccataaggagcgagggccagaggatggtatgggggcttggccttctggggatctccaggctcaacgagagaccatatgcagaaggaagggtttgtggtggacaggggagaacctaaacggtatgtctcagggaccactaggaccagtttccccacatgctagcaggcccctgccttgtgaaggtcacacagaaagttctgtgaaagccacccagagacatcgacccacatgctgagcacttgagagctggaagcagtataatcgagtgctcacagtcatgttcaagtaagtaggggatttgaggctagctggtc

SEQ ID NO: 20084 - DNA, 1386 bp, Mus musculus
ggctcagagcaattaagtgttatgagcagacctgtcattgaagtatgttagactgagatggaggagggaagagaaagaataggactaaggtaggatccagagctggcatccagaaaactgagcctccctcactctctgagttagtctctgcctgggggctcagatgtagagtggtcttgctgctacctgctgagttaccacactggatctcaggaaggtcttggaggagagtaccatctcatggggagtcatgctgttgctcttggcttactgttgctgctgcttagtaacagcagactgtgtttgtggggccagccctgggctggaagaatggctagagcctggtagcccaccttggtcctatctgtgccaaccttctcacatgaacccatcacagaggatccaggagtcctgtcagagtggcaccaagtggctgatggagacacaggtgaaagtgagaaggaagcgaggagcccagaaagacagagggtcaccaccacccagtctgagccagaagaacactcggctatgcagggccaaccgggatgctagagtcgggggacatcttcgcctctctggccagatgggtccgcatgcccatcgccgtcagcggctaaggagggagtctgccctccggagcccctgttcctccacagaacctctctgctctcccaggcaagtagtcgtctgagcccaggaggacctccccttctgtcccacgagtctcctcagtcacctgggacgagaatgccctgatctgtcacatcctagttctggcccaggtctgccccaaagctggtgaggacctgagggggaaaaaaaatctctgagcctcagtttgcttagctgtaaaaggaataggagatgagtatcactccctcctagatgggagacatctggaagaccgaggcccaggtgcaagaccagcagcagccctcaccgagctataaaataactgcccattgcttggcctctcaggcttgcatgtcacaccccaaagggaggctctagtggggctttcccagtcccccagggtcacctgggccctgctcagggctctttctaatccctgctgagacatctccttgtgttcagtgagtctgacagtgacctagagcctgtgggagccggaatccagcatcttcagaagctgtctcaaaggctggacagagccatcaaggctgaagagaggtgagctgcatcttggggtcagggtaaaatggccatgggctccttgagccatactgtatttctagagaaggtgctggttctaataccaacctgccacatgaccaagaccaagtccttgtccatctgtgcatctgcctcctgggatgatggtaaaggatgcactaggaatcatccaggttatagattcccaccttc

SEQ ID NO: 20085 - DNA, 1310 bp, Mus musculus
agtggtgacatgaccgtctcccttatccgtgaatgaggacagcaagcatcctacaggtaatgaccctgcgtctttctcagtctcttcctcctccttctccttttcccacatgtaagtttgcacgcacacttgcaggagtgtaaagaaatgaatggagtaagaaaaccacagggtaggttggtacagagttgtccacttccctcagccaaagctgattacatcaacaccctgtgatttcagaggactgaaagtcaactctcagcctctcaattgggagaagggacctatagtatcctatatctcctgccttgagaatatagagacgcacagtggaacctctgtcttacaggaagccggctctgtccaaccaccaagccaccaggatgtccatgctgcccaacccatgaacttcctggagacagcattgggtttatcagcatccccaggccactgctaacaaggatttgactaacatagggtccagaacccttctacttcagccatatctgggcccactggtaaccactggccacagcctgagagttatttaggaagaccttgaagaggtgatgggaactgcccatgttcccccaggggactcctggactcgggcacacccatctggctctccagcttcatagttgtccatccatattaggaatgtaccagaagatgctagatagttctgagtctggaaactaggaccaaggacctgcaggagtcatcccacaaaccctccccctgtattcccagggcagagattccggaggacccactttcactgctgcttcccacccccaggaccccacaggaagagaggaggtatttgcagactgcaagcctcagctcacggagcctacttatcttctccatgtaggggcactagcgtgcctggaggggaatgctgttcgaaagcagtttcttctctttgtaaattatttaagacatctgctatgtcattctattaaaaagataccagtgtgtcatttgtaggtcacattgtttttcgtaataaaagctcgctttccatgcttggcatgtttttagatatctatctgcacataccctgaccccacactgacaccgtaggtctggagtgcatacccccatcccctccactccgtccttctctcagagggaaacagagtataagaaaagctttttcaccttagcccaaaacagagcgcatcttaaaggcaaataaggtttttatttaagtgacaatatttcagagttaaaaacagctcacatcaaaatcaagaccaattgtaaaaatcttttaactccgtaatgctgtttttttgtcttgt

SEQ ID NO: 20086 - DNA, 1151 bp, Mus musculus
gaatggtcagcagcctttagagaagaggactgcggagcccgcagtccccgctagggtgaacagggcctttgggatacctgggactgcaggctcggttgaggcagcaatggaccccaggacagtgtgggtgaacgggactgtgggcgagcccgaggtggttgggcctgctgggtctgtgtgggtgactgtatctggggaggaggagctagacaataggagctctccaagctgtgagagaaaaggtcgtccaggaacacttggccatgagagcatcctggaactgtggttgaaggtgcaggctatgagggtagcgtcgggatgctgggaaggaagcagagtggagctccatcccgttcccgtgggagaggggccgatcgagaagggtattcctgggcgagcttcctgggtagagaccagccgaggtggtgtcaccggaccctgggtgagaggcaatactaggacattcccccaggcctcaggactgcccacagctaggggaataggggccggttgtgagagagtctctatcctttgtaggcagggacaagctgggaagacaccacctcctgtgggtggacctgaggtagtagagaagatagactgtgtttcctctggaccttgggaaaaaagacaaactgtggtggtgcctgaggccataggatggtctcaggtcttgaaaaggcccagagctggagaagtgagggaatgtgagggtacctcatgtctctgtgggggagggcagtcagggcagttttctggggctctggcagaaggagctgaatatgggcatatgttatgggaaagggggctgatggaagggggccctgatgccctgctggtactacccagggccatggaagatggaactacctcccacgggggcccagggttgtggcaaaggagacaagagatggaagatataggttctaggggtattcctggtctaaggaccatgggacagcttgtaggagtgccttgtgctagagaagaggaagctagatgtggaggtgacccggggtcatggggtgcagcacaggctgtagaattgtgtgcttctgaggagcatgagataggttctcgaggtgcccagggcctgtggggtatagaacaggcaatgggagcacccagggctttggggaaggaggcagatg

SEQ ID NO: 20087 - DNA, 1296 bp, Mus musculus
ttccaacatcacattgttgttcagagtgcatcagaaacacacaagttggtgtccattcctctgccaatcctgacaaactattaataatgcagatattagtgtctggggtgtatttttaagccacttttaagattctgtcttcagaagaaagttgactcatttctgaaagcacctttgtcaatgttttctaaacccacttttcaggcttaaaagggctctccctctatttcagccctgcccctagaatcctaaattaaagagttgagggaaagagatggcaccaggcatgctgtctcttgttttcagcctatggggcttcctagtgtggaaatacaaggcctctcaggccaagtgttttaatgattcatcttgacacaagcatcctaactatttaataaagcttgttataactagctgatggcataatttgtgttcaaaaacttgtcattcaaagtagaattcactccacccctagtaatattcatagcaacagtgaaaacttaaccattctttttacagcctcaaaaacttgtggagtctgagtgctgtcaatccagccttgtggagatgatcttctctgaagattaagatttgatgaccttgccggactgtggtggcacatgcctttagtcccagcactcgggagacagaggcagctggatctctttgagtttgaggctacctggtctacaagttgagttcaaggacagccagagctacagagtaaaaccctgtctggaaaaaccaaaccaacccaaaaaagcctgatgattgcaattttgtattgattgcctggtttgtttaaaagcagccacattattgctttgaattgatgagtaaatgatgttattaaatcagtgtatatctaaacaataaagaattgaaatacaaaccattaagttttttaacacgtggctatctaaaagatttgagtaaaatgagtcttcagtatggtggtagtagctcaaaggaaatattgaagatagaaagtaacttactaacttccaaatctgcagcaattagtatctattaccttaagttctgtgtatttgcaaaaccctttctgcctttgaaatggagaacttcattaaaccatttaggaaagacatgggattcatatgcttaactcaggcagttttctttcacaaatgtctaaaatgtgattcttttgttgtgaaacaggctggttctcctagccacaggccaagtactatctaaatcttcatttcttcaagtaacaattgtgtcaggcatagtgacacacacctgtaatattattttagatgctaaggctag

SEQ ID NO: 20088 - DNA, 1218 bp, Mus musculus
cgaggcccatctttactaggacccttccatctctcctgggacaggcaggaaccagagggaccagggctcaaatcttgtactatgtggctttgacagactactggctccatgctgggctcccggttctcacatgcctgctcccacggtctccacacgggggggtggggggggagcggattgccaggctgggagccccgtcctggtgcctcttctggatgtccccagatcatcatatctatcaccacgagagaacttcccatccagggcagaactctgatcttaaacacttcccactgccagagtgagagtgggagtcatggcctcctgaaaacttggactctgcatggtgccaccaccaaccattgagtagtctgaggtgctaacatcaggccctcctgctcactccttggctgacctgcccccctacttgcctcatttcatatttcatattcatttcatatttcatattcattaacagtttgagctcccttcccagctccccagtaagccctccttcagcctccagatccccacccccctagctgaggctcccccagaaaacccctggttttttttttttccagggagctcagtttgatcattctgggaattcttgtcctgccagcctggtgcggctgggatcacacttcaaggatggacagtggtgtctctttgggagatggtgttcaagtgggatacctaagtcttcccgtggctagatccagagcagattcagccggctcatttccaagggctgggccactgcacagtttgtctgtccccgttggactcttgagctcctctgggaaggcctttcccttgccggctgtgcattgtggccaggactggtagcaacagagcatggctgagaaggagcagcgtgcttcttggtgtctgagcagacagaccctgccagagtaaactggctgaggggagtgtccatcatatgaaagggagacaggagaggaagctctccgttgtctttcagtgataccctcttccttgcttaatttgctctgaaaagaagcacagttgggtagacgaggcccgtggatgtcatttttttttttctgggcagaagacagtatggggacccaagaagttcccatcaaagaccaagtatgtgcctggctccttaggagggatgactcctgaccacactgttgaaggcttgctcttgtcaaatactctgtctgctatggaaagttccagtgtgct

SEQ ID NO: 20089 - DNA, 1298 bp, Mus musculus
gctttcatctttggtcttcagaagatgtcttttccttcttctgagctacagatgacctggagaaaaggctttcgcttcttgcactgaactcgagcacctaggctcaactgctgggttggtggctcaagaaacccctgctttatcctaagtttctccctgacctttttctttgccttcctcattggctcttctggacaagacaggttaggaatatgaggcctagagggggagatgaagcaggagaaaggaaggaaagagggagggaggggaaagtggaaagaaagggaaagagaaggagagggggagggaggggagggaagggaaagaatgggagggggaggtagggaaggaaggggaggggcagggcggggcagaccagggagaattagagttcccagaaagtctttatactgggagttcttaaaagactaattgttagaagggcaatcgtcatagggaggttcacatggtgcagggccatcttgaactatcttagccccttaaaaagaagccatttgcccacatctgtgtgtgacctaacatcctgtgactcctaggtaaagttttgaaacatatgagtggatcccaactgctaagaaagtcatcacatatgcatctggagcctatagcaaggtctcccgctttgctataaccgctcacctgttgtaccaccagaatttgtaaagtgactttctttgttttgttattttaaaacttcacagaaattgttaccaaggtcagagcacagatatctgaagcaaactgaatctgtatttctggaccacagtcactcatttggctccaaaataaacttatctctgcatccttttagagctgtgtctttcacgtcggtgatggggagggtgacaaggtgaagccaccccgcagggtagctgaggtagctgaggaagggggcgtgcagatgaggtttagcagtaaagtatggagtaagtggctggggcagcttatctagtgacagacacactattcaacttttagacctgggcttcagcacaaaggttacccactggggtaggaaagggccaagggttacgtgtgcaccaccttctgaaagctggaaaggggaactgaccttaggttcaagccatgtcacccaccctcttggggtgaggtgttacctcatctgaggataggaaagtggaggcccatggctagcatgaggaatggacgagtcctcacctgggctttggaatggaggctcaaagctcccggaggtcaagactggagggaagcgacctgaacacagtgttgggttcagacctctctgctgctatgag

SEQ ID NO: 20090 - DNA, 1110 bp, Mus musculus
atcatacccactcgagtggcctgcttggttcccaccttttctctcctagctctacactcatatcttcgagattgacttctgcccggtgatggatgtctctgatgtggtcctttctgatctttctcatttttaatgtttggttcggacttgcctttggagtctttgatcgcttatctcttgctatttggacaccaaatagcccttggccttctttgaaagagcatgctaaaaatccgaaggctgaggctgaagcgatggctcagcggttgggagcactgactgctcttatagaggacctgcgttcagttctcagcacccacatggcaactaaccatgttctgtaactccaagatctgacacccttacacagacatgaagataaaacactaacgcacgtaaaataaattatattttataaaaattcctaaggcttgccttttttctggaacgttccagtgggggcaaagcacctgggaagaaggaactcgagagtgttctcatctgtgctccccagggcatgtgggaggaggtccctacagagtggggactggtgggagaacgctgtggatggtggtacctggtacacgtcagacatgtcactgcctgggtgtccatgctggcatctaggagattcccttgtcacctgggcattttggttctgttctggaggcaggtcatggttctctttcctcccctaaggctttgcgctgccacataggttgaggtaaaaacctacagttcccacaaaccccatgtttccttacatttctctcttggtttatctttttttttttttttatcacatctgagagaaaggagggcagtcagacaaagacccacggaagtcagttctctccttccaccatgcgagtcccagggatcaaactcagggtgtcacgcttggctgtagtcacctttacccactgagctgtcttgctaccccctaagcttgtgcttctctaacatcaagagctgatagcacaatccttctgcggacgttggggaatttgtgggtgtctgaattgaatattttacttcctccttccccccactacctggcttctcaaagcagtcaccgtttccaccaacggcagcaccatcactgcctgg

SEQ ID NO: 20091 - DNA, 2083 bp, Mus musculus
tgctattcgctctctggcgtgtgaccatgtgcccctcacactcgttactgattaaaagtattgatgaggctaagctgagccccacagtccctccacaggctggaaggagaaggaaaaactccagagtcaaaagaaattggtgctaagttatgatcttcctacagggagcgctcatggtttccctctggtgaatttgatatattggcttgacagggttccactgattatcaagctttctttcttttttcctatcaaagtacccagaggttgtttttgtttttttaacttcctcacactctctctttttttttttgttttgtttttggtttttcgagacagggtttctctttatagccctggctgtcctggaactcactttgtagaccaggctggccttgaactcagaaatccgcctgcttctgcctcccaagtgctgggattaaaggcgtgcgccaccaccacccctctgggccattgccaagaaacagtctctagttcttgggaagaaacagcttagtcagccccaggtcctatcttcctatcatctcttctctgtggggaggtggcaggatttctacctagtcctggacgggcttctggtactcacaggagaccccacaagtgtccagctaaggaatggttacctgagcagtaactgagcaggagcaaggataggtccttagggatgagagagttcccatttgctccaggtatttatagaaaaggattgcatctgtaccattgacctgtttgtacacatgtgacctgtttgtaagatgtggtggcactcttcgcttgggtttgttatttctgtgtgggaaatgggaggagggttgggcaataagagacggcatagatttaaacagagatctactgaaatcatacctttattgtttatgtatttaaaaccacttgcctgggaggctgaaagcggcatttgctgtctaccaatgtgcttgtccctcagccatctctatgttgttgaaggattgtgaacagaaaatttaccccctgcccatctatcccttagatattggcaaatatattatgataaaaagtggcccaaagttgatgactttgagtgatcattgtttttggggtgtgtgtgtgcacgcgagtgcgtgtttctttcatttatttgtatacaatgcaaggggttgggaatagaacccatgttctctaatatgcaagcaagctctcaccactgaggcccacctcctgcccctgcccctggggtggtctctttcatggaagcccatcaaggagtgctggtttaatttcacagctgtttggcagtggagtttgaatagaaaaaccatgagagtccacaaagctgcagctcttcgcttattcctccccaagactgaagattcattttagaattgagttggatgttagccagagacttttaaaacctcccttgaaggacctaatatgggcactttatttcatgtaaccccctctgagtggggtcagccctgtgtccgaggtgttgggagcttaggacagaatgtcctcagggatcctgggctctatgacagagcttgcaggtggtttgagcattttcagtggctctgtttgctcaggctgtggccttggtccatcttttgggttttcccacagtgggagccgttcccttcctggctctctcaacatttgtaggcttggagagccctattcttagcagagacacatactggggcttagggtttcaaacttaaagccaataagggcacactagggctctataaacagcgtgcctatatgtcactgagtagttgcacatggcaaagcatgctctcctgagtggcagacatggatttctgcctctgcacataaaatatagcaggtcttactggatgaggaattgcttctcttaaactgtaggaacggtgtcccttgtgtcccgccttcagaacattacagactagataggtttagggttggctctgtgatgttcttgtttacaattgtgtgtatgcaagtgtgtgtttgatgtagaattaaaagtaatgttttggcccaggtgtggtggtactcatttgtaattcagcagtcaggagatggagaaagaagattttag

SEQ ID NO: 20092 - DNA, 1214 bp, Mus musculus
ctgtgctgtgaccacagctatagcctgtgggttgagtactgaccagaaggtgtaggaacgttctcttcattggctccctcagcaggcttgccctctctccacaggggcaaaggtgagaccagggccaaactaaaaaggtcacagagtttcggtgtggccagtgccagcagcatcaaacagatcctgctagagtggtgccgcagcaagactgtgggctatcaggtgagtgggctgagacaagccagggatagtgccttccctggacttgctagcagggcaaggttctgctaggctgggggtgggggggatgggaggcagggagcttaggtcttctgagtggtatccaagctacccacaacacatgcttagaaattctacctgagcagactggtgtagtgcaccttaagaggtgagctccagcatggttgactgttcagtgggtcggggctggagaacccgtgctgagagttgaattaggtgtcaggagtggggttcctgttgacctcaacttttctccgcttgcagcacgtggacctgcagaatttctcctccagctggagtgacggcatggccttctgtgccctggtgcactccttcttccctgatgccttcgactacaatgccctgagtcccacacaaaggcagaagaacttcgaactggccttcaccatggctgagtaagtatggcaggtccccgctggctactggtcccagcctagaccctgaatacaacttctaccctggttaggatcaggacgcacagacagctttccagcgagcttagggaccttgaggccatccaggctgtctttctcttgtctgaatgggaagactgaggctgatgaaggatgtgcccagaatcacacacaaacagctcggtgatagagctctttctgctcttcccgcccccttgccgggtgcccagcctttgctgtgcagtctgggaaagcagccatagacagagcctaaggaacagtggggcaggggcactgtggacatcctctcaggctggtgtcaaggtccttagcaggaagctggggttgcctggtgtattttaaatgtagattatgtttccctaaatgctgtcacagcatgggctgtggaattacctcgggcttcaggcctgctttctgctattgtaacagaacactagaggttaggtggttcattagaggttaggttgactttggctcctgtgtctgtaggcgggacac

SEQ ID NO: 20093 - DNA, 1449 bp, Mus musculus
cattctcctctggctacatgttctggctgccttccccttcccccaatcacttccacaggcaatgggtaccttcttggagccctgaggatagcatctataaaatgggcctgatgtttgtttgatgaccaaattccatttgcataataacttgcccctgctcttgatctgagatccagaggaggtgggctatgaacccaggccacttggtgggttggcagctcagccaatatcccaggatttcccctgacaccccccctcttggtgtttgttcctgtaccccagagttactgtagcccttgaagatgtgtggagtcagccagatctgcacacactatatgtctagggaactcttgtgttgctgtgtctgacagaaaagcctcagggtgacttggctccatatccctttttgtccccaaaagaccttgcacctcaccctatctgtttcttccatgtggaagtcctagctgtgggggacagggacctagcctcccacacatcatctggtgtgtgtgtgtgtgttctcttcagaacttgcaaacttgatctttatccttagccttcttgggctctgggacgagcctctccggattcgggagtccctggcgttaggtgtgtacatgtgttttctctggaccatcgctgaccattctaccttctatatgatcctttcttccccaaatgagtgaagtttttgccatcagaaccagcagagattttgggaagtgcctttagggtgggcagctgatgggatgggcatatctggctctcaccgacagggttcagtagtgttggtgtctccacagagcgtggaacatgatgaagccagtgaccttgaggtgagacgtgcttcaaattcatgcatcttggagaacggacaccagctggatgcaggtaggagcctatggcagaagggaagttgcttggtagatctgaggttcggggcttcagccaggcatctgtggcagccatctcttgtctttgggggtagtcttgagactgaactccatcaggaagagacagttcaggggagcatcctcattcagtgtgtagtagaactcttaaaatacagagagcctggtgcaatggtgcgcgccttcaatctcagcactcaggaggcagaggcaggccggtctctgtgagtttggaggcaagcctggtctacatagtgagttccaggacaaccagaggtacatggtaagaccctgccttgagaaaacaaaacaaaacaaataaaatacacaaagaaatgggagttcaaggaagagatcttccctgtttctggaagaaagcaagcagaggctgtgtaattgtcagttcataaaagtgggtagagtggcccaagctggtgcaggggaagttgaggagaatcaggtctgagcggtgcagtaagatgtacatggtaatggaggtgagggaggctgaagtggtcagaaggcttcctggaggagc

SEQ ID NO: 20094 - DNA, 2199 bp, Mus musculus
ccatgtaagatgtggtcccttgaaagcagtagcgcttgtgagggatgggaggagcacggagattatattggggaaagctgaaggagggaaatggacttggtctggtttgttgtccctgggccactcctgagctctttctggtcttgcctggtagctgttgcagtcttttgaagacatcccattgtgtgacatcctggatcagatacaagaaaaatacagcctacaagccatgaacaaggtgcgtgagattcccagacagacaacctgctcctgaacagctatggggagggaccctcttcacctgtgttttcaatctttttctaggcaatgatgagacctagtctctttgcaaacctttttggagtgctagccctctttcagtcaggccgcctagtgaaggtaagagcttttggcacggggcgcagggactggtttagggctggaggggaacagatggtaacagaccctgctcttcaccttttgctctctgtggataccaggacaaagaggccctgatgaagtccgtgcaattgctgaagatcctgtcccaacaccccaaccacttacagggacagccaataaaggctctggtggacatcctctctgaggtagagaatcacaagtcatgccgtctgatttgggaaacgttgaaaagatttgggtaggaacatgatgaggacagatggtttgaccatgcaactggtatgaggaggttgtttgtttgtttgttattcctctctcaccaactatcttaaatctgccttgtctttcagggtctcagcacatgtccactcagttaggcagttcagatactccataaccctctctggtggcctttgtgtggctagtgtgggtctggaacagtgcttgtcaatgcctgagtatgtagaaggcaatctgagtacatttgccatagttggtttggtcaagcctgggtctgtttgtatctagagtcatttgccactgtcttgtccctgatttgtccttttggcacaaatggagacagaccagaatttaagttgcagctccccacatagggctctgtgtatatgacaccggctagccctcttacaaaacaaaaagaggtatagttttgaatatagaccccaggccagttagtcatcaatacagtgctggggtctgctgcttggcaagttgactgactagtggtgtatccgaagcccatgggtagaacaagacccaccctttccacctgtgcccccactccaggtcccagagtccatgttccaggagatcctgccaaaggtcctcaagggtaacatgaaagtgatcctccgctctcccaagtacttggagctcttcctcctggctaagcagagggtgccgacaaagctcgagtcactcatgggctcggttgacctgttctcagaagacaatattcccaggtttgaggagattgtgagtgggttctcacgggggtgtcctgcactgtagtcctccgggtaacgtttactgaatctcctctgccttctagtctggtgaacatcctgaaggtggccgccaactctgtcaagaaggagcacaagctgcctaatgtggctctggacctgctccgcctggcgctcaaggagagcagattcgaactgttctggaagaaggttttggaggaggggctgctgaagaatccgtcctggacatccaggtgtgtgtgacactggtcttccctctcctccagcctgggtgggacctgatcaagtacagggcctctgaccaggctctgccccaactctccttagctacatgtgcttccgcctactgggtgcgtctctgccgcttctgtcagaggagcagttgcagttggtgatgcgaggagacttgatccgccattttggggagaacatggttatttctaaggtaggtgtcgtcttcccatgtggttcagtgctgcctgcagggccagggcaggggttcttcctctgaagatctggtaggggaggacttggccagtaatcaggcccttttgtcctggggcccacttaccagcaggcccagccagccatctatttggaacactgctgggggggtcacattgaggggagtggttattgaccccagtgtgttctgcattttgtgcctagcacctgtaagacagtgatgggggtggggggctatacagaaagcacttgggttttgagccacaggatggcacgggtaggtactggtctatcacgacttgag

SEQ ID NO: 20095 - DNA, 2838 bp, Mus musculus
gacttgcatcaagaaaagcatggagcagaatccccgccgatcacgctctagagccaaaggtgtgtcattgctcctgggcaggctaagtaatcaggctgtctgtatcccgctcagcctaaatctgctctccctcctgtagcctcccaggagccagtatgggtggaggtgatggtggagatcttgctgtccttgctggctcaacccagcaacttgatgcgccaggtggtccggagtgtatttggtcatatctgtccccaccttactccacgttgtctgcagctaatcctggctgtgagttggggcctttggagaaatagattgtaagatgggtctactgatatgtgggagtatgtgacgtcttctgtacctctgcacctcaaagtgctacatgccgccatccccacaggccgttcaagggacactcctcttttcctccctggggtggtgggggcctttggccaacatagaagagactttcaggggtgacctaaggagagtatgaagttggggcagcaagtacagtggtggtctggaacttctcaggtgctcagccctgtgacaaacgaggatgaggatgacaacgtggtggtcactgatgacgctgatgagaagcagctgcagcatggagaggtactcaccagagggcgcttggtagggcgggtatctggacatagtctcttagtgtcatcaaaaaggtgtcttacctcttcccacccataggacgaagactcagataatgaggacaataagaactcagagagtgacatggacagtgaggatggggaagaaagtgaagaggaggaccgtgacaaagatgtggacccaggcttccgtcaacagttgatggaagtgttaaaagctgggaatgcattggtgagcaggacccaggggagagggggtttgtccagccatttaagggtcggctgatggctctgctgtgtctcagggtggagtggacaacgaggaggaggaggagcttggggatgaggccatgatggccctggaccagaacctggccagcctatttaaagagcagaagatgcgcatccaggcccggaatgaggagaaaaacaagctacagaaggagaagaagctccgacgggacttccaaatcagggtgagtgtactggtagttgccatgcaccctgagctgttcctgcctctcccatgtttctgcatgagctgactcttagccttttggccacaggcactagacctgatcgaggtgctggtgaccaagcagcctgagcaccccctgatcctggaactacttgagccactgctgaacgtgatccagcacagcatgcgcagcaaaggctccaccaagcaggagcaggacctcctgcacaagaccgcccgcatcttcatgtgagtgcacacgagttacccacccctgggttctcacgcttgcggcttcctgtgcatagaggagaggtcccatcccagccatcactgttagaatagttggggattccgacaagcccactctgttcctgtctctgaggacatagaacttcatcttactttacagaggccagaagccactgtcccacaagacagatacacgtaggagaggagggacactttagaggcatcaagtttctgtccatctctaagctggtttcctaacttagcaacgtgacttggggctgctctttgctgtacttgacagagcaaagtagagagacaccttttgaccaactttgcctttcctgcccataggcaccacctgtgtcgtgcccgccgctactgccacgaggtggggccgtgtgcagaggctctgcatgcccaggtggagaggcttgtgcagcaggctggcagccaggctgatgcctctgtcgccctatactatttcaatgcctctctgtacctgctgcgagtcctcaagggcaacaccaataagaggcaccaagatggtcataagttacacggagctgacacagaggactcagaggtgagccagggtcagccctgctcaagactctccctcagccttctccctgctcccagtctcaccccagctctctcaccaggaccaggctgctaactgcttagacttggactttgtgacccgggtgtattcagcatcactggaatctcttctgaccaagcgtaacagctcacttacggtccccatgttcctcagcctcttctccagatacccagtaagtatgggagccagcctgtctgttgggaactctacccagcccagtccccagctaatggcctcttgtccttccccaatccctaggtgatctgtaagaacctgcttcccgtcctggctcagcatgtggctggcccatctcggccccgccatcaggtaaggggctgtcagaaacacctggacagtcttctcacttgagaggcctgcgtcactgaccttggctgtgctcgtgctgtaactcgtgattggcacagaggaactggaggaaccttgctctctggcctgcataagagggcttcccttgtcggcttagatgccagggctatcagacaggctagagggagatcaacatgaggtcgatcttgcttctatccagttgggaccactgcctctccaggcctcggcaacccttttcccacataagaagagagaaattgatgattgtaaggcctagcacatgcagccttctctaagtttctgtgagttcctgagtcttgacctgacatactggggttcctactgactattacattcgccttgatgcaggcccaggcatgcctgatgctccagaagactctgtctgcacgagagctgagagtctgttttgaggatcctgagtgggagcagctgattacccaactcttgggaaaggccacccaggtaatagctgtgaa

SEQ ID NO: 20096 - DNA, 1213 bp, Mus musculus
aatctgtggatttgtgggagctgccttcttccagtaaatcagtgccctcccctccctggaagggccgggagcataggtcagcactggaacttgccaggtcctgctgtcttcctaaatcctcctggacaagggtgtaggtctctgaccttcccagtggcctagccctggaagctttagctttctggtaatgttaaacaaggatcagagccccaagttcacaggaatggcgggagaaagctgaggaagccagctttggaacaatacccaaagctccacctctgacctgaccccttcccacaggtgccgctgggacagcaatgaactgcagtttaggttgggagaggttctccagcatcctggaccggcaggacggtcccaaagcttcctgtgtaactcacagttgggtacccaccctctttggcctgggaccgccaggactgagtggccctatcttcaagaagaagccgcatcctcagttagcctggaaggctgtgtgtgctggaaccactcagttggacacaactccagccctggctggggactggagggccaagatagaagccaccgtgcagcagggatttggggagattctggcctgcccttagctcatatgatcttgagggagccactgccgtcctccttcgacagtagaaacaaggagctggagcttcctccattgtgtgccatgcaaggcacactccacagctttgaagaaacaggtcctgggctatacacagaagacatggctcaggtctcgggacctcagttccagttctgaggtctgccaaaggctctggtgtatggggaccacttccccactcttaggctctaaccttgggaacagcaaattctgcctggcatatgtagctgggtatccacttttgggtgtttctggctgggacagtctcccaggataccatctctgctgtcttcagctagttctttgcctggaggttttctcaggtgggagcacccccttaaagaaagctgcggcactagggggtgaaggccctggtggtaggctgagaacttgaccttttcttaccccagccccccaactcctacagtaccccagaagccacctcatcctacaggatgcaggatgacccaagagtcctttccaatgaggagtcagataagatgctaaaggacttacccagctgtccacactacttggcctagggtataaaactgctggagattgcccaccagt

SEQ ID NO: 20097 - DNA, 1170 bp, Mus musculus
agtggtggctactgggaagccagtaagagcaccacacacacacatgaagtcagacagcttgtgtatttctctgtgatattattagcttatgacttactgctcgacggatttagtggcagttttttgttgtttgttttgtgatgcattaaacaccaagaagtcactcagtatgatagatcaattaaaaaaaacactttaaaggtattataaacacaaattaaaatagaatacagagctgggcatggtggcacatgcctttaatcccagcatttgggagtacatttgaggccagcctgatctgcatagatctagggcagccagagttacatagacactgtctcaaaagaaaaaaaagaaaaaaaagagagagaacaaaaattagtcatttttcctcctgaccaagagtcctctttgagggaccttgtctttacagagattatcttttatatttaattttaattgagaaattatcttgctttgtagcaaggtgggtttagaatacttggactgcctagctctacctccctagcctggattacaggcccctaccccagctgaagaggtgatgcacttaatggcttcttggctgaagactgacacggaccagccactgttattttacacattatctcatttaatcctcctgaaagaaaacagaggcttagtgaggtcaaataaatgctgaaggtcaaataattgctgctaatggagttgctagagccaggaccttcttatttttataaacttctcgtattcagtgggcaaattgctcccaaggagccgtagttgacgcaatcaatgaagtataattttactttattaaatttttttttgtgcatgaatattttgcctgtatgtaagtatgtgtgccgcgtgggtgcctggtgcatgtttggtgctagaagagggctccagacctgctagaactggagttatagatggttgtgagatgccatgtgggtactgggtatctgtctgggttctctggacgagcaattagtgttcttaactgttgagccatctatcagtcaccatgaagtagaatttaaaaatcaaataccatatgtattggtttactcctttggtcctagcacttgtaagacagatgcagatgaatctctgagttcaaggaaatccttagtttcatagtaagaccctgtcttgagtggt

SEQ ID NO: 20098 - DNA, 1112 bp, Mus musculus
tgtctcaagagaatagagaaaggctcttggatccttttgtacgctaagcatgtggaggtatgagtccatataccatttacataaccaccgcctacagataatactgcatacacactagttatgaattggaatgacttttttattatatattatgtgtgtttgtaagttcatgcatgttacatcatgcatatgagagttcaaggacaaattaaaaaaaaaataaaaaaaatttttattctgaagaaaaggtggagagaaaaagggtcaaaaaggcctcacatgggagacctaaccttgtcccatccacagatcccatttagacaactctactactttttcactataggcttctctcagaaaccattccatcactcaaaaaactctaagctctcctgggaaagatgagatacagcataattatcactcctctgtgggatggttgatcctgagcctgcgggggggggggggggggcaagctggttccagaccttcccaaatccaccgcatttctttgcctccgattcttatgtgtccaaggacagggaaccaaaaccacgcccttgtaggaggatcaaggacaactttgtaagagtctgttttcccttccacctttgtgttggattcagatgtaagttacacttaggccatcaggcttatatggcaaatgcttttatccagtgatcctctctagtcctagagtatcagttctcaaccttttgggggttagatgtctcaagctaccctttcacagggtcagtgaagaccaacagaaaacatagatacttatgatttataacagaagcaaaattacagttatgaagtggcaatgaaaataattttatggttgggggttacaataggatgaactatattaaagggtcacagcattaagaaggttaagaaccactgtctttgcaagatgtgtttggcaaatgccaatgtgtaagaaactgaactatatagtaaaaaccagtcatttaggaacaaacaaaagacagacatttcactaaagaaggatggatacacagatgttaaataagcaaatgaaaagatatttggtattagtagacattaggaaaatgcaaattgaaagcacaataagacattaccac

SEQ ID NO: 20099 - DNA, 1163 bp, Mus musculus
gggggggggtttcgagacagagtttctctgtatggtcctggctgtcctggaacttactttgtagaccaggctggcctcgaactcagaaatccgcctgcctctgcctcccgagtgctgggactaaaggcgtgcgccaccacacctggcttatatgtgtgtctttaaaaggccatcccactgttttaacaggccagctgttcaggatggtgacaaacatggtaagaagtgaattatatgagatggcctgcctacacttttctggctggctgtgaagtgagcttcttggtcagaagcaatgctatgtggaataccatggtggtggataaaatattctataattccatgggtttagttttgtcagttttatatgccagaaggcaaatcaaaaaccagaatacatcgtatttcacaaaggacaaaacattgccctttccacaatggaaatagtagtcaacctgccacttggttgctagctggacacccaggggacttagtgttggtctctgctgctggcagatctggcacttagctgtagtgggagcaaggtacaacctcagaacacctaggattgtagagatcatgaagagaagttgaggcttcacactatgtggcagagtacctgaagacaaaaatttagatgagggtattggtgaaagtgcagcacagttgcagtggacatgccaacattttggagatgcctatactgtgagatgaccaggatagcagcagctatggagtggagccagtctgagcctacaagaaaagctgcatgtgctgtggatgacagagctggataaatgctgctgccaaggacctttgaagctcagtggatcctgagtgggtcctaaacatcaagcagtgactctacactgttggacttcgatttgatttgatttgtaaccgccctgattctgacctcttaaagtatgtaacttattttttatttttatgtgagcctaaagttgagatattttgaagttttagagtgactttggatattttaaagagactgaatttaaagtttgaattttttttttttgtttgtttgttttgtttttcgagacagggtttctctgtgtagcctggctgtcctggaactcactttgtagaccaggctggcctcgaactcagaaatctgcttgcctctaccttccgagtgctgg

SEQ ID NO: 20100 - DNA, 2534 bp, Mus musculus
aacaagtgccaactaaagatgattacgcattttgaattctaatgaactgttttaactttcaggaagaattgtaaagacatgtacatagcacaacatgatccggataatatatatactgttcatgtacatccacaaacacaccttgtaccaaataatgctttcttgtagtagaataagaatcgtgtaaattctaaaagactttagcgggttttcttttcccattcattgttttttatcagttcaaaaagattccttaaagcatgtcaggtgaaaaccaataaggatgaaaagtttccatataatttcctttaaaccattgagtctttcattacattctttccatttactaatcttttatattttctttgttttgtcacacccccctttccttttatctctgatatctgccagaaagttctcaaatcatttagttaaaatactgaaatactagtaaattacttgagtttttcacgatgacttcagaggaggggtcatcactaggtgctttgtcctttttgtactatgattcacccatctcttggattggatgtagcaataacattttctggctgttgagagctcttgatcctagtcattatctcctgagaactttaaaaataaaatgtaaaggctgttctaagttcatcttagtgaaatttattccaaacaatacaaaaatccagatttggtttttgcccttaagttgtctaatattaaggttggatgaatatagcatgcgcagctacaggctttctacatctgggattgctattaaaaatgctatttgtcctattacccttctccttagtccatatttgtttcttcttacagcagattttcctcacctattgtacaaagaaattgcgatgtatattttcatgtaatttgattttggaattttgtcaccttatgtagtgagttcttccaaaatataatttttttccaataattgtcaagttgttggcttttattgtattaaatgaaggttatagtactgaataccagagaagtgcagtttagaaaaatctcaggttgattccttatgcaaacaaacttaatacttgaaaatctcatggccatggcagtgtactctcgggttctgtctacagtctttaaatctgaaggtgttccagaggagagtcctttgctagctgacattcagactctgtcactgacatagtgcacttagatgtgatttttgtttgagtgtaaatatgtttcctaagcagttttataaaacaacttcggtgatgggtaaaattagtacattaaatgttgaagacaggctggcctaaactcctgtctggttttagctgagatgggaagttgtgtttggtatacaagagctagagagcataaaacagtacttgtcacttgatgctgtttgagtgcgagaataggtgtggctctgcccttggggtttggataaatcttttggcagaagagggaatgaaaggattcctgtccgtgtcatacctttcaacttatgtctttttaaagcagaggggaaatggatcaagatgtggctatgacacagcaacattttaaagttttcttggaagcattgtaaaatcctataaacctgaaaacccgtaactatggagcaactgtgaacacctcagttttgttggagcccaataatcttgaagagcttttagatagctgttttccaccccagactagaagagttattctacagtgctactgtcctcctataagggaccgtcagaaattgttcccacagtggttgcttccacaaatgtggagttggatttttgatctattgttgtgattcaagcagtctgttgaattaaaatccagggtttgaccgctcaacaagtagtaaattacctagtaactcagggacaactatttctgaacttataagtggcactgtaatatacttatttacctttggataaccttgtgtttctttgggctagatcaaggactactgggaaggtaggagtggttgcctttctcctgaagctctttcccttcgtttccctcatggtgccctgaccatttgctacacatgaaacgagcctaaatattagggcttgcttttctgtcagaggtgtcatctgtgcctttcctagtgttcatctgacaatgcctctacatttgacataaactcatactcaggtggcactaaaccaggaggcatttctcccagtaatacatcatcattagtgttaggcaattatgttatagaaaaggtcccatcactaccccaaaatcctgccacctatgtccacccatcagctactcccacagaattttttagattatagaattgttggctgttaactaatttgctcaaagttcttgtagaggattgcaaattttagtctgtttttgtaatgggataatattgatggctttatgacctcagagtttaaaattcacatggaattgattttcttgtcattagaaggtaatgcttgaacatttgatttttctattctgtgatacctgggtgtcatactgtctaatggcctttggtcccaattgtgaaattttatatgagctca

SEQ ID NO: 20101 - DNA, 4239 bp, Mus musculus
acttaccactttcttgggggcgaaggttcatcactgcctcagcgggtgccaaggactacacagcgtctgtgcttaacttcttcctgtttgctgtagcttagctactcattagtattttcttaagaactaaaaattgtgtgacttggtgtgacttggctggtagttggcagagttggctgcagatgccagagaccgggctgaccatttagaaccagtctgcttttcagtgcctctcacacttctttatttgtctccacagtcgtcactgcggccgtcttctttgccataaatgctcaaccaaggagatccctattataaagtttgacctgaacaagcctgtgcgggtttgcaacatttgctttgatgtactgactctgggtggagtctcttagtgaggcccccaggaggacccaggcctgcatccctggcacctccccagcagctgctctgctcaccggcctgcctcctacccagagcaagagctggcagttgtcttcctgcggcagaagaccatggcgtgatccctgattgttacaaatgattctgtatgactgtcagtgtgtcagactgtggtctattgcactagatgtctcactggttggaccaggccagtttaacctgcgtgacaaatgtgataggaattggctagcagcacacaaggacacttggagacaatgttcccttccagtaacgtagcgtccatctcagagaattcacaaagtctccctgcctgggctgactcagaacagagccctcagagcagagagcggctgctggatgagcgctggtcactctagggcggtggctaccctaagaggctctggcctctcatgcacagtgttttcataaagagaataggaacctctgccctcaagtcttttctttctttaagctaagctgtatttttagtgagctgcccttttaaaaaggtgaaatctttctaacagggttcaaagatgagagctgaaaaattgtggccttaacaactgaaagctttaccaatgttgctgctgctgggcgtcagaatgcctgtggcagcttgacacccagcagctgtctcatctctcgtcttgctgcgtcctgtctttggagtcctcggtcgctgccacttgagtggtggaagaaatgcactttgactgtgctgcacttttctagctgtgtcattggtgaatccaattcaaaaacccatgttcaagaatgccatcacatgctcttccatcagtggttctgatagccagcttggactggacctcagcacacactaatctaaaagggaaaactgccaagaaggaagaaattcatactgataagaaaggagatagctgtgactttgatccaggttctctctccctgacacatccttcctgctaaaaccttgccttgcatgctgagtgctagtggcaccagttctgggtggcgctgtgcctcatcagagctgaacagcccaaggccccggccagctatgagcagcctgttttagagctctgtctgaaatgatgagcgaggctacgaagcataggtctttggttcctgctgctgccgcctgttctacccctgggatgcggggcctctttcttcttaaagtttggccagtgttttgggttgtttctgtttgggaattttaattttttcattttattatattgcacactgaaagagaaacttacaccactgggttttctgtttgtttttaagaaacaaaaccacaattgctctgagactctgagatgaacagtatctggtcatagtcagagcttaactgtcaatcactcgcactgatttttttgagacatttgataaccctacgatacttgcgttaatagagtatggctgtatgaataaaagggacttcttttggcatcactttcttccttggatagtggtatgctctctgttgctgtagagttagacatcttactgcctaaatatgtataaaatgtgctgagaaaccagtgtgctactttctaaaaatatttctgtgatttatatgtatgctttttatgttaacattagcttgtacacagtgtttaaaaggaagagttacttggaggagtgccattgtcccccagcctgtgacttacttcatatataatctttatggaaacatttaatcagtcttggccaacaactataggagcatgtagtcagtttccaggttttattgcctaaaaagggccacgaagacctagagttaggttgttaccgtggttctttagtgggaaaggtaggaatggtatggttatgaaccagggtggaaagggcacatagggaagcaggatgacgctgatcattgtgtccttgccctaccacaccagtttcagtaacaaccttgcctataactgtacttacaatttgcagatgatgcctaaagcatatgtaggttcaagcttctgttccttcagaggtcattgtagtcatccccgtggctgacggggctgtgtgacttgagcattggtagccatgctgtagatgtggctcaggctttcttccacagccgcaatcccccagaccatgccatgctcactgtgctgccctcctgctgtacactgccctggccaggaccagacttactgtgtgtctctcctgtgctctctccatgctgaccagatttcaccatgaaattgcttacctgttcttgttcggtcttatcactaccttaagaactagcagcaaaacttcatttattcattcaaaaagttgttggttgtgaatgagccaatcaggaagaatcaagtttactgaaacataattgctgcatcagttaacactgctatactcacctagctttttacctgcctcttgttcatcatgactgctgtacagtgtatcattaaggttttaaagatagaggtacagaccatgtgcttacactagtttgctatgatcttctaacacagcaatgtcccacaagcttaagtgcctacactgaggactcccttgtttccagttgtcttttcattggtgtctcactcagtgatgtgttagaacacgagtttcgggcctattccaccccagtagccaattcagtccagtctgaatattagactgctcagttcatctgccatattctctccaaggagtggggtccacatgatgtttctgtcctctacctcagaaccatgagttgtttctgactacccatcagcttcctccctctccttgagtgggtctttcatgaagctgggtgtgtggaatctcaccaccccgcccaatttgcgcccatcccccatactgaaccgttcctgtactagtcttgtttgcaggcaaggggtggaagacaggcccccatctaggatttccttacctggagaagagaaaaagtggctgaactgccaaatgcttaggagaggaagcaacagcagcatgtaaatgtctccctcacagatgctggcttccctcaggatcagcccctagagccacctgaagctccagagctcccctgccagcccagcagaggaagcagctcagcaaaggcctctgagctatgctcactatacagaactgatatagtgaaaaaccagctaactaaatataaaattcccagatgtcatagatgccttaaagacttttctcgggaggatcattgcctcttgtgtggaataaataatgtattaactcttacaaccgacaacattggttttccacagtgagggagtctggggactgctggacttactgacttgccagtttggcagctgtgtggaactgggcgttccatgatatcttatggtaccaaggacaaggtggcagcagctgggccataactgcaggcacgtgtttgtatagaccactttggctctcaaactgctctggtgctgctcagtgtgggatgaccgcatcagctgggaccatggctaaggcttagcagcattgtttctttggattctgtgtaatggaatgtatttttcaaatattgatattttgattttctgtaataattccttacaataaaaatgaggtaaaattgtaaatttaaagtgtaaactttaattaaagacatttatagctacttctaagtcagaagtaccagtaaacattaaaaaacagtttctaaaaattgataatgtgagggctggagagttggctcagcggttaagaataatgctacagatgacctgggttccattcccagctctcatgtggaggctcaaagccgcctcaggcaccaggtatacaagtgatatacagagatgtacatgtaggcaaaacactcatacccatgaaataataaaagtaaat

SEQ ID NO: 20102 - DNA, 1739 bp, Mus musculus
tcagcgggacctgagaatggaggactttccgtaggaagagagaggaaggtctctcagcgggacctgagaatggaggactttgatccgtaggaagagagaggagttcattctgaagcatgggaagggtctgcacaaatccagtaaatctacaaagtcggatactccaaaggagaagggcaaaaaagcaccccgggtgtgggaactaggtggctgtgctaacaaggaagtcttggattacagtactcccaccaccaatggaactccagaggcagccttttctgaagatgtcaacttgatttgaggaactgggcctgggggacagcttcaagatctggattgcagcagctcagatgatgaaggggccactcaaaataccaagcctagtgctaccaagggaactcggggtggcatgtttgggatgctgaagggtctggtgggttccaagagcttgagttgagaagacatggaatttgtgctagacaagatgcgtgatcatctcattgctaagaatgtggctgctgacattgctgtccagctctgtgaatctgttgccagcaagttagaagggaaagtgatggggacatttagcactgtgacttcaacagtcaagcaagctctacaggaatttctagtacagatcctacagctacagcatcgtgtagacatgctctgggatatcatggatgcccaacgtcgccagtgcccttatgttgttaccttctgtggtgttaatggagtagggaagtctaccaatcttgccaagatttccttttggcttttagagaatggctttagtgtcctcattgttgcctgtgatacatttcgggctggggctgttgagcagcttcttacacacacccggcgcctgactgccctctatccccccgagaagcatgatggccatacatacaatgcagttgcttgaaaaaggctatggcaaggacgctgctggcattgccatggcagccattgcctttgcacgtaaccaaggctttgatgtggtgctggtagacactgctggccgcatgcaagacaatgcccctctgatgactgccctggccaaactcattactgtcaatacacctgacttggtgctgtttgtaggggaggccttagtaggcaacgaagctgtggatcaactggtcaagttcaacagagccttggctgaccattctatggctcaggcacctcggctcattgatggcattgttcttaccaaatttgacaccattgatggcaaggtgggagctgctatctctatgacatacatcacaagcaaacccatcgtctttgtgggtactggccagacctactgtgacctatgcagtctcaatgccaaggctgtggtggctgccctcatgaaggcttaatgtggctcttgcctaataccaaatcgccgcttgccccaagtccctattcctatatcaagaatgtgctttagagtatgtgagcaacttgtcttccgtgtagtacaaaggcagagtgaggggagctttggagacttgcagctccttctaacccaatcctttgttcagccctacctccttctgcaaggagggcctaatcatgttacaatcactgcccaatgaccatccctcttcctactcaggcatccccttcactctgcctacagactccatatcatagctttgaccaatggttggaaaacccaacacctggagtgttgctgactagtgtgatcacagacagagccatggtgagataaggagcagtttgag

SEQ ID NO: 20103 - DNA, 1119 bp, Mus musculus
tcttatacagctgacttcctccagtttcagatacagttctattttattgagggtaattactttcacacttttcaacctcaatgtcattcaagactctggatgaggcccttagagagagagagagagactataataacagttgaggatgaagcacatgccacatctgagaaccttttaagtctttatctcaagtgtgtctcaagagaacagagaaatcaagatatagaaacttgtccaggtagtctttgttttagtcatatgtcaataaaaactaacttgcctatactgctaaatctatacaaagaaatcgtttgctctggtacaaaggacaaagtggagagtagtgatttgtaatcaggttagttagggaatagaaggaatgtgttagagctgatccattgttctttctcattagtggtagataaacctaatggaaattccatgcccatggagatcctaaaacaagaagtgagaaacactcttctcaatggggctgccatcttctttcctgatcgacagacccggagaagccagctcttcaccatgatggtaattatgtaccgaagtgtggattccatgactgagttagtctttatcttctctaaacacatgacagcattttctgatgtgctcactatacgcagagctttgtgtgagattttaaaggacaggcactgtgctcaatttggatttcagagtttattctcttgcttagtcacagtgtagtttccactcttatgacttgccgacaatcgaatttttatcttttctttcccaaattatgagaaaaatttaaaggaataacatagtgaatcctcatcacctaactttgacagtggcactcaggctaatcttgaggtatatctgtgatatatatatatatatactcaggctaatcttgaggtgtatctgtgatatacctcacttacttttcaatatacacacccacccagtgtcattttgaagtaaatccctgaccaattttattcataactatctcagtatataactgaagaaaatctaatggggtgtgactcctcagctggttcttcttaccctcctagggcccccccctcctacattactcagattcagtaccagggtagaaggtgcttttca

SEQ ID NO: 20104 - DNA, 1146 bp, Mus musculus
ccctttcccaggagtgagcctgcgctggctggctgacctcagccctattcccacctttgaggctcacttcctcagctcaggttggctcagggtgtcctaattttaccgtctatgcccctggtgtctgagactccaggcatccctgggtccatgtcagcttctcctgccacccagcctggtgtgatactttgtcacttgctgcctggtcccctggcattactctttgctctgctcctcctagcatacattttttgagtcagagagatgtcactagggaagtgactccataagggacttcctcccctacctccccactgaaagaaagcatctcgtggggaatctatcagatgaacgtacattgctcttctttttttttttttctcttaactctgctgttgcccctttgacaaaagctagctaactgtcacaggaaacggagtaagtgtgacttagctcttcttgggtgtgtacaatatgattattttatatgtaaatcaagattcacatcactgtcctgacccccagtaacaaaagccccctcagcctaccttgcagacagatgaactccgtgtttggctgcccactctcctgcatctcctccccccgccccccgcaggctctggaggggcctcagagagaaatagagtttggagggatggcttggcaggagcagagcgctgtgcccacttgctgattgtttctgatggagaaataaaggtgtgtgtctgagggattggagctggtagtcttttctgagccctgtggggcccctagttctgtggctatggtgggggagtggggtgaagggggagggcatccacctggaattagcagagttaaaagtctggggtcccatcccaaagccaagtccatctcttactcaaagatggggctttgaaaaacactaagttggaatctcaagactggacccacaccccaatggcagaagtggggtgagcctgcccttcattggaacagcctgcttattgctccactgttagcagtttaaaagcagcgctcaactgtttaatcacatattttatgattaacatgtcacctcaaaggaaaaggagctgggggtggaatggaacccccttgtcccttggaatcccgggcatccagaacctgaccccagcaggctgttgc

SEQ ID NO: 20105 - DNA, 1196 bp, Mus musculus
tgcaccatgactctctagcaaagcagtttttaaaaggagcgctcaatagagtgagcctacagcctacatccttctcactgccttcttctgtaagtccatgaacaccccgacagtcctctctgtgcatttgtaaatattggtgtttatgaagggctcaggaggcagccttctgactgcgtgttgaagctctggtgctgtgtgagtctctttagcctgactgatgaaagcggaaggaagcccaggaacctgctgggtgaggggaggtggctactgtttgttgagactgtgctttcttagggcactgcgttaggcacatgtttgtttctcacagcaagtctctgaggaatatatttttttataattactttacaaaggaagaaacaggttgtagaagtttaatgagttgctcagagctaatgaaaaactcaggattctaacctatatctgtctaactttaaagacttaaaccttactttaaaaaaattgttttagtgtgtgtaattttagtcaacaattgcttataagaagagcaatcagaatcttccgtttctgccaagtttttgttttaggtagaatctcacatagctcatggactctgatcctcctgcctctgactcccaagttctgagtttattggtatgtgccaccatactcagctatgcagatatttcattttcaaggcagtatgtttgcctggacatcggttggggaatattgctcattttatagtgcaacctgaatacaagcctaaggcaagatggcctaagataaaattgtgggcagatgcagttggataagtcctagaggtaactattgtttttgtatctcctgagtagtttaatgtggagtcaggattgggaaccattgggtttgaacaaaggttctgaagcccatttacctggattcaaattctttttgtcgctctgtaaccttggacaaaattagacagaactgtcaggagtctgtcaacatgttgcagctcttagattggtgctttggcacatagtaggtatctagtggatgttagttatctggcgttcttctaagtagtcacctgagcaaaccagcttcagagaggggaactgaaatgagtatcttcatacccacagctataccagctgtcaactaatttttttttcttattaatatcaacaataataacacttgttaaatgcttactgagtaacggttgctct

SEQ ID NO: 20106 - DNA, 1162 bp, Mus musculus
tggattattagaaatagacctgccctgaacattgctatgtgagctcctttgtgaactcacatgtgtgttaggattgaggcgagaattgagatgttttaggatatgtgctagagtacattctgataccctttggagtacccttgtctatgctacccctagcaggagaagcaactcttcccatgtagcctatgtatcatgcaaaagacaaaatctgctcagtatctttttcattggtttttagtcagggtctcactatgttgccttggctggccaggaactcacagtgatctgcctgcctgtctcctgaatgctaggattgagggtgtctacttccacacccagcttgatattgtcttaatatgaacttcccatctcttctttttgttttgttttggtttggttttggttttttgttttttgtttttcgagactgggtttctctgtgtagccctggctgtcctggaactcactttgtagaccaggctggcctcaaactcagaaatctcttcataattttacctgtctgtataaattgttttacaccttttgttcatttttgaaggtttttttttttgtgatttgtaggatgtcctttttcttttgggtgtatatctttgggggagggaggacaggacagtacagtttgagaaaggccccaatactgtgaacagccctatgcagcagtatatttgtttatttgttggtgctaaccccttcctctatctgagtcctacctgactattctgcatcccatcatttgcttattgcaggtcaatataaacatttaagaagtcgaccctaccctcttgttctgtgttcttttgaaattattactgtttcagtttcttcctcttctagaatcattatctaaaccatggtaaaaaattcttagcaagctgtaaatagcaggtaggaaaattctgtgtcttgttttttagcaattcccaaggtgagactggagacaatctacatttgtggagtggatgaaatgagcacccaggatatcttctcctattttaaggaatatcctccagctcacattgagtggttggatgacacctcctgtaagtatacctacattttcggtgtagtatgctttcgtttatgatttttaaggagttcttgctattttgatagtgaataattattgcccaaactgcct

SEQ ID NO: 20107 - DNA, 1342 bp, Mus musculus
aggaagatgactcggagcttcagagagcatggggtgctctgatcaaggagaaagaagagtctcgccagaagaagagtcggctggatagcttgccttcgctccagattgaagtcagccgggaaagtagctctggttcagaggcagagtcctgatgccctggccttggcaactgcccttaaatctgacattcttacataaggtggggcgtgcagtgggaacctcccttgcaggagctggcgccctttcctcctacctgcaccctgaacacttgctgtcctagtaggacagcttaagagtgtgatgagttttgaaggaagggtgtctctgtcttgtgctgcagagttacagttctgggtcctcaagtcttccccaccaccccacaagctttacccttggagttaaaggcaaccctccagattttgtagacattttcttaatatttttaacattgtgtcttttaaaagcaatgttttacacagtcatccaaagagccgagaactgaacttctcattgttgccttggccctgacagatcttgccagcaccctgttccaagaaaagtcagttctcaggtgcttactggacagtctttgagggggaagatgagggaagctgccagctcagccttccagggccttagtgtggtggctaagtctctcagacctgacctgagaccctcccgagtagatatgcttgcagcagcagtcagcagtggcttccattcctcccggggggagtcttttagagccttttgctggctggtagcctggtgtaaagaccaagttcagtgctgtaggacttctagggacaaacaactgtgacttctggatttggagttgatttctgtgcttaggggtggggtcttgggttgatgttgaacaatttttaagtctgtattatgtttaaaaactattaatgacttaaaagtttaaatttttaatttttatatgtggatattcctcctgttggctaaggggaagctcaagtggtgtcttttgtgttgttaaatatacattatatactttggaagaaggcaaagaaaggagtgtcattattttgaatggtaccaattgtatggtctgttgtacttgagttcaacttgctttgtggccactgtaggaaagaaactgctgtccatctgtgatgggctcttgtttattcccacttttctagaaatgataccctgagaattcactctttgtgtctctgacttattattgaagacttattcaaaactagcaaataagacagtagtttcagaaaatgtaagtttatgtttattctcctttcaaatgattttaccatggaaagggagtaagtagattatttggcttctcatctga

SEQ ID NO: 20108 - DNA, 1191 bp, Mus musculus
tgccaaccaggactctacacactgggcctgagccttggtttccccatgaagcaaggaaatggtctggtgcagagattctggctttgttgatatctctcagtggtattttattcttggaagttgtggctgcagcatgtttttctgttgaggtggccaaagtgtcagggaacaaggtggccatgagattgtgaacagagactcaccccatccgtttacaggctccagttctcccagtgtgttgaagatgtgcctgtggggtctagagccccaacccatcctcagctttcttattgttctatctggcaacccaggcccatttgcctagggtctttgagcacttgtcaacctcctgctagagatgaggggaggactttatggaaggtaggcagtatgtattcaaaactaactccttgagctgaccaggaaagatgcccttgagcagcattgcagtttttacagcacagacaacccagaaacgtacatactgcctaaagtgatggtctgcccagcatctctctctccagccagctctcagagctgcccagagcttcaacaccttgaaccctatgtgcttaggagtgacagtagtcaggatagcccagcaggcagctgggtatactttattcagggcactttctgtacatgtggggttagtctttatatgtaggagattattaaatgcccttttgctgcttcataataattgcagatacctcatctttgtttcctactactcttctttgtagaggggcctgatggcctctggccctcctctatcataattccatgattccttcccctgcttctgtctttcctttctgcggcagcttctctcaaccctccctcttcattctacacattgtagtgggggcaaatttttacttgagagatacgtacatagtatgcagtttatccttgtacagtgtacatttgattgtcgtctatttacagagctgtggaaccattatcatcatcagttttagaacatatttatcaccagaaaaatcctgttcccactagcagtcctccttcacctctcctcagacctggcaactactaatctttctgtccttgtggatttgcctataacggacctttcataaatgttatatgcgatgtgcaatgtgtctgtttacttagttttaaggttcatctgtgccatggtatatatcatcatttcaagtagtgagt

SEQ ID NO: 20109 - DNA, 1195 bp, Mus musculus
ttccgactgtttctcctaatattttcccataattagccttgttttttcttctaaagcttatcttggtttttgttttgtttttttggttggttggttggttttttgagacagagtctctgtatagctctggctctccaagaactcactctgtagaccaggctggcctctgaattcacagagatccacctgcctctgcctcctgtgtgctgggattaaaggggtgagtcaccattgcctggctggcttttgtttttaaaattaaatgcacattggtttgtgtgctggtacaggttggtgggcagggagacaagaagagatcagaggacaccttcggtgtcatcctcaggaatgccatccaccactgagacagagtcattggttgtcctggaatttaccagttaaactaggtttctaggatccttcctcccctagcaatgaaattccaagcccgtaccaccacagccagcactttatatggattctgaaactcaaactctaggctttgtgcttgtaaggtcagtgctttactgagttatttttcagcccttgttgtattttttgtttgttttgttttgttttgtactaagttttgatccagggccttgtgcaggctagccttctactgagctgcatccctagccctctttagtatatgagaagatctctgttggggttggtcttatgcattgtgtattcagatgctgagttctgtgctccaagatccaattgcagtctggccatggggcattgcattgaccaatgtgctgtaaagaatgatccccaataatctctgattggataataaaaggctcaagcctgtgactgggcaggaaagagaggaaggcaggacttaagattgaggagagggtctcaagtagggatgatgtcaaggacaaaggaggggaagatggaggtcattatgaggcaggatggaccatgagcatgtggccaagagaaaaatcaccctgaggaaacacgtggagcagagcaaacagagcaagactcaggtggcaggtaacggggctgtgctggggatgtaggttaaaatagctcagaacctgcccggtttaggtttatagcttgttaataaggtttctgtttctttcttgggagctatacagggtggagttgggcagaaacgcctcttaaaattaccattatagatctcgggttactcactccatagctgcaggct

SEQ ID NO: 20110 - DNA, 1179 bp, Mus musculus
gccgaacctgaagcgcgccttcagcagcagcctcagcgacagtaacgagtcgccggctgtcgcttccgacgacccggacgaccccgacttccccggcagcctcgtgggccagcggcggaggcgtcctcggggcagcggctcccggaaccagcggaccctgacaaacactccaagagtccaaaggctgcgacctcggctcccgcagaagtgcagcaccccgtgcagccggctgcgaccgccacctttccccaactgcagcccgggctgcctcgggtcggaccacagtgtgtgcatccagtccagggacagcaacgagctgggcaccagtgcctccctcttcagctctccggcctcgcccggagcccccgaccctttgtatgctgactctgcagtccccgggagcttccacttgccggcagcctccctaagtgaaccgtctgtgccctgcccccaggtggcagcaaccggtgacaggtacaccgggagggccctccgagccgaagccagcttcaggtcatctctctttagccttgtgaactcaggggccacagaagagaacaagtttgggacagatggggagaatgtgaaggaatcgtgttgtgaaagaagacagcagatgggaaacagactaacggaccctgatctgacaagcccgggaaagagaaaggccgcgtgtaaaaaggttgtgtcccaaggagtcgaccagagagactatgaggagtccagtgcttgcaaagaccttcgtgtaccaggggaaatcagcaggcctaagagaactgggccactccggaagaggaaacagcaagaagcaacgggaacccctccccgccactaccaccaatctaagaagaaaaggaaagcgtcagtctccttatggaacttgaatactagccagagggattcttggaccaaaaccagagcctccttcggtttccacaagaagaaaattataaccagtgtgatagaggtatgcagttctgttgccagttcttcctccaggtccctcctgtctgaatgttcgacccctcctatcaagaacagagcacaccttactgtttcttctcgatgctcttctgtgtatttgctaagtcccttaaagaccctgcatgtcacagaccaaaggccatcttatgctgaaaaggtttatggggagtgtaatcaggaagggcccatcccctt

SEQ ID NO: 20111 - DNA, 1659 bp, Mus musculus
taagccacaggccatctgtactccttgtcatggctgccttctctgggtgagccagcccatcctgaagactgagaagctgtctttggctcctcagtcttccaggtttgcaggaaggttctgctgctgggtgtagaatagagcatccaacaggctaaacgctggctctacacagcaggcacttgaagatcccacctcattaagtacacatgggtctgtggcacagggctgcttggttctgggctcctgtgtcatcgagcagatgacaagaatttccaaccaagtgctttgcctgcagaggctcctattcccaagccaaagtacagaagggtggaacagcctttggggctggtatagtaactgtttctgctgcctttgtcatctgagcacagttttggtccttcatcccccacgcacttgcgtgcagccaggggagggggagctcatccctcactccacttaggaaacctgcttacgtgaaatactagtctggtaagatttgttctagttagaaggtcaacagaatatctgtttatcttttattaaaagccagcgtagcggcagccggggctggaagaaggcgggtggattctggcagtgttctgctggcaggtttctgcttgaacttgaaaggtcaaaccgtgttttctttgaaactattacaggactctggctcccttctctgtgttgggcagttttccccacttggtgattgtgctatgttgtattgtggtctggggctcttcaggggctttcaggttgtcccacgctgtctggaaaccttataagcctcgtccccactgctttggctactctgcctgcaggcattacctctgggctggatgactgtgtgctgaggaactgagaggccctggctgtggtcctcacccttggtttgctgctgaggtactctgggcaggatatgagatgcccctgccctctgctcatgcctctctctatctaataggtcatcctgtggcttccagagtaggtaccgccagcccagctcaagttctctgcttaacgggagtagaataatggcagggcccagtctcctctcagccctctgggctggaggctgttcctccacactctgatccagtctttcctttcatggctgtaccaagtcttagggctccgagccttgctgaggccccttcatgtgactgagcctctgtagccgatacttctgcttggatgtggggggacatttccactgttacttccacaaggggttctcctggtcacaactctggaaactatattttgcaggtgttaataggcatccagatgcccccagctctgttgatacactaaagcagatgtgggagggctccagatagaaggccttagccagagtttctctctctgtgataatgaatgtcaaatggtgtttcttggaaaaccatctggacttcagttttgtgggccctttttgatactcaagcctcctaggccctgtttgcatctcaacagaccatgtcatcctccagatgaacagaaagaacttgcctgaggccacacagccgccttgagcccgttcctgcataccaactgtacttactgttggcacagcaagcagttgcatttcctggagcctgggttttgaggaagcctggtagctggggtctctgcactggcgggcaggtgctgaggtccgag

SEQ ID NO: 20112 - DNA, 1122 bp, Mus musculus
gcccctgctcctgcccctagtgattctgtggaccaggctgtggagacctacgggctgcagaagataacactgctgcgggagatctcactgaaaaccgggatccaggtgggccctcctttccagcctggcccacaaaacaaggggacgggagctttcttgggatggtagtctctggacatgtgatgggaggctgggaggtgctgctcttgtgtccacggctgagactttggatgttgggccctgtccccagattctgctgaaggaatacagctttgatagccgccacaagcctgccttcactgaggaagatgtgctcaatatcttccctgtggtcaagcatgtcaaccccaaggcgtcggatgccttccacttcttccagagtggacaggccaaagtacagcagggtgcgtggcactgtgggctgggggaagcgggagtgtctcttgcccagtcctgaccttgccaccccggctgcctcgtaggcttcctgaaagagggctgtgagctcatcaacgaggctctgaacctgttcaacaatgtctacggagccatgcacgtggagatctgtgcctgtctgcgtcttctggcccgcctccactacatcatgggtgattatgctgaggtgtgtaggctgtggcacttctggctgtcacgtattagttgggactgcatgaaagaaaggtctggggaccccaccatcaccccctgttaaaacagggagaatgggtttccatgtagggaggtccaaagttcttgttccgtgagctcatcagctcttgttgctgtccttgggagaactcagtagctgcctgtgctctgcaaggtgaacatgacaccgctcagggacacaggcaagagagccagtgagtaagagctgcgacacaatacctggcctttgagtgaccatgggaagaccagccgatggtctcttgttttctttggtgttctgtggcattccagctattttgctggtcttcaggctctcggtatgctttgggccccctgctctctcaaccagaggctgtcctaggaaagctttttaaaaattaatgcattttcagatgttggtttttgcataggctttgttagggaagaagatgtagaatgataagtttcggatgg

SEQ ID NO: 20113 - DNA, 1646 bp, Mus musculus
gtccaggctactctgacttcaccttcgcctcctaatgttcagccaaaaagacttggaaaacctgaaggcagaggtggcacggcgacaccagctccaagaggccaacagaaacagggataaggctgaagaacaacccatggcccccgagcctgagcctgagccagagagagccgtggaggacatgggctcccctcagactgccaaggaaggtccttcttccctgaacttacagggataaaaaaagaaagaaagatggacagtccagcagccccattacccggcgatgcagacagattccaggagaattctgggggcgtgccctgcagattgggagaggaagctagtcctcaactttatacccccacctcaccccaccatctgcctggggccctgccctggtttgcctgcccctaaaagatggttttgcactggttcaatgaatattcaatgcagaggcctaattgaagacacgaaagtaaagtgtgtaggcatcagctccagctgagggggcaagtgcctccccagcatcaagcagatgtgtgtgtgtgtccatgcctgtggatgtcttgctccgtccttcctgatgtacatagcccagtcagttctgagtggatgacgtgcagatgcaatttctcaggtcatttatatgtttgacattatggctgctgcttttgttgccactacccctgggtccagcctggcttaaagtccaggtttcagccaaaaaagatgggggctttcgtgtgtcctgggagggggagccagatgtcttctggtagggtgcaaggtgagacctgcagtggctttactgtgattgggcctggcctacctgtagcctcagggtgaagggaaggggccagcagtggtagaccccacacatccatgtgcctggccttggccaagcaggagaggaggtcctgctacaggctttgacttgcctccctgctccctgtaccccaggtgagcataaccttgggggccaacagtctgaatgtatctttctccccatttaaacctgagctgcctaatgcacagttgggtaaggggtggggacccagggctgaattgtggatcccagggaaagtgctatgcacaggagtgatttgtcacctctggagcctggctcctccttggtctttgccatataagcacttatacaaagaagctctggggtgttggggctcctactgccttggctgccctctctctcccctccctgcctgtgtcgcttctctttgtctgctgtccctgaaggagatggccaccctttgagcttaagggagctgttttaggcagagcctctgcttggggcttttctggagctgctgatggatagtatctgtccagggaccttgtttcaaagggaatgggcatgggccagcaaggcacccccacagctatcaagaacgttttcttgtttttaaaccatcacgtcttcatttcacattggaataaagtgagtttttgaaacctgctgccccagcctttcctgtgtgctctgtggaacttgttcctattgcttgagtgaggctcagaagtactgctgggaggtaattgtgtatatattatgtcaaactcaacgttatgttcaagtcactgaagtggaaggggtgcgacttcagttgttaggctgggccctacacaag

SEQ ID NO: 20114 - DNA, 4168 bp, Mus musculus
gacctggagggaatcaagtacaaggcctgctgggcttatataaaatatactgctcaaaaagcaagcaaagcattctgtctggcttagtatggtttgaaaacaagccttttcttttctctttcagatttccataagacggcaccctatgtggttactggcagtgtagatcaaacagtaaaggtgtgggagtgccgttgattgagtcacatttggttcttcctcccttttttcctctggatgcactctgatgataccatggttaccccatttgagctctgtttaaataaatattgtcctttcatgtaaattattctggatgtagattgaacttattaaatgttacacacaaagtattcatgcatggtgaatccaaattgtatactgtaaatttacatatgttgtctagaagtaccatagggtttaaaaacctgggctggcattggtcacaccaggcctacaagggcagaagttaaataaattgaactagggcactaaactgaatagttgacagtgtcattttatgttggattattaattactgtttttcttcctgctatctgttggtgcctgacttgatggcctcattttggggaaagtggtggttattagggctttttctgaaatgtgtatctatgtaacatcacttaagtgtgcttactaaatctttaagggtgttagataataagactgcaattcagaatctttgctccatctgtgtaatggggattacacatgaagtttttgtcatgacccctttgccaaatcaataggatatgtttgttttggcagcctatcaagcaaaggctagtggtttatttatgtaagaaaatgatcgtaattctcaagaaaaatctcagcagctaatagtgaatcctttttcatttgggtcttactgctttgtaaacaggtcaggaagcactgtcctactttaggcttctcttcacactagacatgcgagttgtattctccagactgttggactgtgtagtgatgtgactccccagtagaatttgatcttcccattgagtgttatggtacagatcactatgtgtttatgatgtttttagggatgtgcaatgtgcatgtcagaattatgaatgctgacaaagctgggtgcgcattttaaaggagtggaaggaacagtttccaacatgaccctgataacaattcgaactgtttcacttacaagctataaaaaaaagtgacagggtgtaatgaagcgtgcatagaatatactgggttttttttttctcatgttttgtttatatgtaaatgtttataagtatatgggcctatctgtaagtggatatgtctatatatgtatatcacacacatataacctccatgttgttgggtcttaagtttttgaagaagtgctaaaacttacgcatagagtaaatcttgctggggaacaccaaccacagccatgctaaactcttctgctgtttctgactctgaggagcttttctaagagaaagtcacttcctttgttctcccctctaatgtggccagtcaccatgttacgcattcctcataggctgtatattttgatccagagtttctacagtaggtttaagagaattttgcccatgacttttggaacactattccattgtcaatttttaataaagaatttatcacctagctaatcaacttttttttctttttaagaaaatcaatttgaaaggttaacagaaacaatgacataacagtgacagtctaacaatgataattttttttttctggactgcattttattcgtttgtataatagattttttaaaaatccctttaagtattgaatggaaatttggttcctgaaaggacaaagggtgagaattaatgtcctgtagatatacacaagagattaggctctgacagaagctcactgtctagcttgtgtgcttttgtttgttcacttgtttgttcttaatattcctcagagatttctctagaaaggaaaagtgttttgagaattaagtggttatttttgaggacaaaaactccatcgtgactcccataaacaacactgtaggttggcttttaggacaacattgcctcacagccctgcttacattaagaagtctttttctcctagctgttctgactggatttttctccaaaagctatagaaaataccttcgttctcatttgctgctatttcctgtcctatttcaagaatataaatacatagaaatggtgcatcttaacatttgtttgtatgtgttaaaatgtcttgttttttaattcagttttagcatgtagcaacatgaattgtttaagggtaagccacaacatctagacatcattcatagaaacaataaagaatggtaccaatgtagaggagcaaagctgctgggtttcctcccctgcagcagtgactcactgacaacggaggagagagtgctctgtaacaaagctgtccttacttgggagaatgccacagcctgctgcttagctgagttaccagacatcatccatttaagcagcagaaaacattgaatctcagggatggtccacagctggatccaaacttaacgagccctgtttgaataatgaagggtggcggggcaacatccacatctggcatcggatttgcaaaggtttctcacactgttgtttgacactgccctgttgatgcccttactcttatgttactgttttctctgtctgctgtctaaccctgtgccttgcctgggataaggacaatgataaagttactggtttgggttgtaagtagaggactttatgaattggttagcggttcactgctgctttgttactttcttgagtcagattggctgcttactaaataaaaagctgatagaattgtgtactcggatggttgttgattgtgtgtgtaaacagacattccagtgccacctatagcacagcgtgcccaagaagtcctaaccgcatggagagtgcaagctgcaggttggtttgtgtagacatgacctgaagaatagttgcttttcacatgacatcttgcactttaggagactaagaccgtcctgttctgtctgcatgtggtgtgaccaatggtgtgctcagagcactacccacaatcactagtattagcaagccgtcccgggccgtgatgcactattagtcctttggaagctttggctttaggctcaccaagcccagtctcctgtttgcctctttctgttctttgtgaacttccagataataccactcactaaagtttatttttttgttgtttgttttttaatttaaaagaaaaaaactatttaaaaataaggacattttgtttgttgacagtggtggcttgataatccttaagcaacaagttgaaatagaaggaaaaggcacttgaaaaggttactcttcctgtccagctgtatataaacccagtgtgttgattaatctagatggtgcaaaaaggaatgtcatggtagacaagcaacatgggcaaaattgcaagaaaggttttgggttttttccagtgggctgggttgggtgggatggggtaagctggactcacaagtcacgactggacgggcctttttatcctttcactgtatcatgtaagtagctgctttcttgcctgcttatccttcaggcatccccaaagctcactctgaagacgttagaaataaacacaaactctacgagttagaagccggtcctgacactgacatgaaggcaaacattgatttcatatgaacgttgcagaggtggtcattggagaaaacagttcccagattgttaagagttcaccgaagatatcgacaaaattttaaaaatcagtaaaggaatgtatataatattgctcttgtgttttacagtaagatttgttgctctcagactgtgtaaaacaaaatttatccatgttttctgcatattaaaaatcttattgtaccaattggtaaactattaaatgcctataaaactagatctggtggggtttttttcaatggtcattgggggtgaggttgtgttgatcttggcaggaagtgagacttgggcaccagcaacagaaagaatgttagttggccataagcaacagagctgtgctaccactgccttttgctgttgtctaccccttatctggagggagcagcatgtaggtaggtctctcgtagccataggcttgagcctaactagaactactgactgcactgcacagctaagcacacttactg

SEQ ID NO: 20115 - DNA, 1121 bp, Mus musculus
acataatacttaaaaaatagtgaaaatttggaagaatactagtctatcttaagagtatagctcagttagttgagtgcctgcctggcatagcatacatagagctctgggttaaaacctcagcatggcacaagatcagacatggtagtatatatctatgattccggcatccaaggtggaagcaaagagggtcatcatctcaaggtcagtgagtttaggcagctctgagctacatggggccctgtttgcatggggcaggtttctgggatgtgcctctcttgatagaaaaggtatttacaggcataaaaaccctgggtttagttcccagtactacataaacttgagtgtggtagtgcctgcctgaagttcaaggttataaggccttgtcaagaaaaaagaaaaaaaaggactggttttagtattaaaatgtgttctatcctaaatgttacttaagtcaaatacttttttgtctttaaggtgggtcatgataactgggtacgtggagttctgttccattctggggggaagtttattttgagttgtgctgatgacaagaccctccgtgtatgggattataagaacaagcgatgcatgaagaccctcaatgcgcatgaacactttgttacctccttgggtatgtacacattgtgaggtttctgaacatttgaattttggagtgccagatgtagcagttttatgtaaccttgtcgacttttccaggtaagaagtgaccaaaaggcctgtttcaacattatgggttcctgccagtggctttaagcttctctctttagaattaagcttatagttaaaatattgtttcctctgttgtgcattgggtttggaaacgacttggaaaggatacttaatgatcactcctattgactggctggtatttttctttcctattaacttgtaattttctttttttaaagatttatttatttaatatatgtgaatacattgtagctgtcttcagacactccagaagagggtgtcagatctcattactgatggttgtgagctaccatgtggttgctgggatttgaactcaggaggaccttcagaagcgcagtcagtgctcttaactgctgaaccatctctctaaaagaaatctttaaaaaaaa

SEQ ID NO: 20116 - DNA, 1099 bp, Mus musculus
tgcactgtatgcactgtgaacatgaatgcactgtaggaagaatttttgaaagccagttctgtgagatatctactttctttcttctctgtgtggtttatttttgttgttgttattttttttttgttttgtttttcttatctgggtttaaattagaatttaaataatgtatatgctgctggtatgcatttattagacttgaggttttaaagttttattgtgtttagtggtgtttcttgtcagcttattttacctagtgttgttttacttcaggttagtgcccattttttattacttttacttttctttttttgatgtagtgtaatttctctaactaatgatatctcttcatctcaatttgtgtcacttttggaaagtgttctagtggttaccatttattcacaatgtacacttcttaaattgacagctactgtgtgaagacattcacaggacacagagaatgggtacgtatggtgcggccaaatcaggatggcactctgatagccagctgttccaatgaccagactgtgcgtgtgtgggttgtagcaacaaaggaatgcaaggctgagctccgagaacatgaacatgtggtggaatgcatttcctgggctccagaaagttcatattcttccatctctgaagcaacaggatctgaggtactgtacgattgattgcatgtctttttatgattttgttactgtgtcatagggcagagccttaggtaacttgtgtgattttcagtctaaggtctctggatacaactaaaactgtagcctagaattctgagttttgaggctttttgtttgctctttgtagttgtcagttattattgggctagtaagatggctcaataggtaaagacacttgccgccaagcttggtgacttgagtttgattcctgaacctacatggtaggaggtgggaaccaattccctcaagtagtcctttgatgtctgtctgcatgccatggcaagaatggagtacacatacaaagataaacaaaatagctcatccttgatttgttataagttggagatcatctactaaaggcagactggatcatttaaatccaggtctgatggccctgagatgattcataatca

SEQ ID NO: 20117 - DNA, 1156 bp, Mus musculus
ggtgatttcctataaaattctggtttttcttccacataaggtgcaacataagcgaattccctgtggaagagaagaagttagccttttcctgacagccatagaaaactcttggattcatttaaggcggaagagaagagagcgagtgaggcagctgcgggaggtgcctcgggctcctgaggacgtcatcttagccttggaagagagaaagtccactcccaaagagctgagtagtggccaagacgtggcccacagcccccaagagagtgccctgtgtgggcttgatgtgccgggcggcgaggctgctgctgatggaggccattgcctcagccagaagttactgtgccaggaggagactcccgaggccacggaggatgaaagggatgaggaaaggggagggatggaggccatggaaagttgtaaaggctccagcaatggagcccaggacggagaggcttctgagaagggggatcgcctggatggggcggccggacgctacctgtttaagtgtttagtcaacattaagaaggaagctggcgatgccgtggttgaaatgcattgggttgagggccagaatagggatttgatgaaccagctttgcacttacgtacgtaaccaaattttgaggcttgttgctagttaattcttaatttcttcctcagttagaaaagtgatgtatggggctagggatatgatgcaatgaccttatgtgcttagtatccagaagttaccctgtgttgagtcccttacatctaacatcattacaaggaaaaaaaaaacccatattataaaatagcttgctttggaggtagagcctattgggaggccagcagaatttcaccactggtccatgagtgacaccatgtggaatcttctttaaaaaacacaaatttagttggatgtgctctgtggcacttgtaaccccactacttggaggcaaaggcaggaagatggctatgggtgtaagggcagcctgtgctacagagacagacactcgtctaaataaaaagaaggaaaaaggaaagcagcagtggatccatttttaacccttgccctcttcacagcagctaaacctaggaggagcagatcatcgcagccaaaggccagaggggctctggtggcatctggtgtgggtcagggctgcctagaaagtgtctgt

SEQ ID NO: 20118 - DNA, 1165 bp, Mus musculus
atggttgtaggctcaaggagaaactctttgtctctttatggtacaaggtcagggtcagcagtgacccttgcatgctgtttacaaactttagttactgctccttgagtatggaggcgtcttgggcaccatcgggagtgccctgaggaaggggagaaggggatgtgtttacattgtttttagggagtttgttgctctgaagatttcatttgctgaatggccatctcctcagtaaagtcttgtcatgttcattaatagaacaattggcctttgcctcttaaaggaagcattaatggttttgaaaggtgctaatcatcccatgtgccttgtgtgggtaccactgtagtgttaaaatgcctggctcagggtactcagagcaatagagcttacacatgcctaagatcctgttctgttctggaaagatctgctgtgactcactcaaatgactaaaacagtggttcgtttctttaattgctggttggagcaactaatgctgcctttgtgaatctgtgcttttaccctgggaaactatgttgtgactgagtgaagacctcgtatgtctttgggatataggctatctggctgtctgagtccaagcaagaaagctcagggcctctaggctctccttgggagatagaagatcatgggtgttccttagcaacagggaaagtgaacaggagagcaaggtacagggctgaagttcagctgcacttggcagaagtggcttggaagtaagctcagaggagggcaagcttgtactccaggtactgttcacccagggcagggagcagtgggagagcgcagcttggcagcctctcagcactgggttagcagtgctgttccactccttatatagggcaccagtttgactgggcttcggcctctggagagtgagacgtgagagcgccctgcctgcgggaggactcaacagcaggggacttcagacacagcaggggacttcagaaacagcaggggacttcagaaacagcagggacttgagacacagcagggacttcagacacgatgacatttcaacttgtgtcctctcctcactgtgtggagagtcgtagagctttgtcagaaactctcctgctgttggtctcaggtgagaaggttaagaccttgattaaacctttaagggtaggtaggcagctgtagagtactgctt

SEQ ID NO: 20119 - DNA, 4034 bp, Mus musculus
aactggttgtaacattaagaaagttgagaaccactggtctagaggttttgagggtcatagagcctgtggtcgttgctaaggacaccctgctgtccccttgccctgtccccagtccctgaagaggaaggagaaagagtatgagcatgagatggagcgccttgcgcgggagaagatcgccacccagcagcggctggcagagctcaagcatgagctgagtcagtggatggacgtgctggagatagatcgtgtgctccggcagacaggccagcctgaggacgaccaggcgtccacctccacagcctccggtgagcctcggcccctgtgctcttcctgccactctcagatgttcttttgggcttctctgaataggttcttccctgctagaaaagaggccacctgtcctagtcccgacgtgttcccagactcccaagcacccgtatgcctccagccaattgttttccaacctcttttgacttagtccttgccctgtgctccctgacagagggcgaggacaacgttgacgaggagatggagggagaccgggcaggcctgggcccacctaagctgaaccatcgtccccagccggagctgctgaaatccgccctgccaacccccagcaccgcccctgcgcctctgcctacccatccgcaccctcacccccacccagtggccctgtctcctgcccaccttcctgtgcagcagcagcagccaccacagcaaaagacccctctgccagcccctcctcccccacctgccaccccaacccagacgctagtgccagctccggcccatctggtggccacggctgggggcggctccacggtcattgcccacacagccacgacccatgcctcagtcatccagactgtgaaccatgttctgcaggggccggggggcaagcatatcgcccacatcgccccctccgcccccagccctgctgtgcagctggcacccgccacaccccccatcggccacatcacagtgcaccctgccaccctcaaccatgtggcccaccttggctcccagttgcccttgtacccacagcctgtggccgtgagccagccagtggccgtgagccacatcgcccacaccctgtcgcaccagcaagtaaatggcacagccgggctggggcccccagccactgtcatggcaaagccagctgtgggggcccaggtggtgcaccacccccagctggtgggccaaacagtgctcaaccctgtgactatggtcaccatgccctcctttccggtcagcacactcaagctggcttgagaatgaggccacttaggcccccagtgggggcagggaaggggacctgactgcccctaatcccacccaccagctccacacattccagccaggcccaggcccgccccacccacaccacccccaggcctccttaggggaagggggtgcagagactctgagccaggggaagggaggggcccccagggagttggctgcaggcaggaagtcctgctgcaggaggacttggcagacaggaggatgcttttggtggacattcttgcctacccagcctggtgccagttctggtgccgctccatctccctgttttgtcccctggaagtctgcactgtggcttacgttctctgccttccccttccctggcctgccttcctgtgctgttgctgctattgctctgtctggggaggtggctgagctctccggcttcccctccccagcctcagagtcctgtgggacctctggataggaaacagggagccccagaaagatgggagatgggtggggaggggcccacctctgagtgcaggtgacagatcctaagatctggagtcaggttaggacaagtgaaggcctgggcctgggccactctgacccacctgtggtcactgtgattggctacagtagaaactgttcagaatgagtcccaaccaacaataaacgaggtcctggctgttgtcaaggttcccgagcctgcccctggggtggggcttccctagtgcttcccccggccctggtttaggtactgcctgcagcttgggaggtgtggaccagcaagggctctaggagctaaggtacactgtggaggtatcccggggctcttcccattctccctccctctcggtgccagtgttgagacccctcccttcctggtggggctgcagtgtctatggtggaaagggcctttgctggggaagacaaggcacagcatgtgtttgatggagagcgggggtgctgtgcttcgggggtgctgtgtctcctgcctctgcttctgcagaccgctttggcttctctttttaagtggatatttattacaagtggccttgtgtcagacactcagttactcgcgtgcgcattcaggccctcactggacactcaccaatggcctttccgtgtggggcaggaagcaagtgcccctaaggtgcgaagtttgcactgggggcttaggcagtccaggggccagaggggaggactcagggtccttcagatgacattgtgagcagacactgaggccagcgaaggtcctgaatacattctcccttgaaataatgactcctcaggtgcctcagagctcacaggtcctcctggccctggaaacctcccagggcactttattattattatttgtctcctggggtagggaatggtagctaggaccaggtctcaaccccagcacaggaatcccaacaaactggctgccttcctgtggctgctgccagccacctctacccacattctgactctgggggccacctccactctctgctctgtgttgtgacaaggggcagagtctggtgctggctgggtcagaccacttgtcccattaacccttctctgtgtctcgaggccagttgcagagttgacagcatcgtgttggcccccaggcctgcacagatacctcatcatccacccagccctccccccatccccccggcaggggttcctccagatctagtgccgaatgactatgtccagattggtggtgatgggtgttgtcgctgtttttgttgtttgtgactgctgtgtgcccaagtgggcagccacctcccagccctttcttgggcatctcccctttgagagctgttaggaccacatctgtcctcacgctgtgggaccgcctggcccttcccttcctatcccttccagcctgggacacacacacacatacacacaccttacctctcatgcgtgttttacctgtgctgtttggagtggctcactgcctgggatctttacctcggggaggaaaaggggagagtggttcccttggggccaaagaagggcaggggatacctggaggggagttgggtcaccacagtctctctctaggaacagctgcttctccccccaccccaatcccagggtcccactcccaatccccaaagaggtggcccttgtttacagtgaggacttggtcactgtgtctctgtttcctgaaatatgaattgtagcgaccccagactgtagagatttttatgtgtttgggtacatctgctgtgtgggaaaaaaaaaaaactacaaaaaccctaattttgtacatattgtatttttactattgaactgtactctagtggctgttcatgctctgagtttaggtattgagacatgaatactatccatgtaataagcacttgcctggaataaaatataaaactgaaataaatctgcactgaaacctgagacggagctcccaagcctgcagcatctgggtcatttcatttcaagaggcagggacccacagggaagcagcaagaggtggcaccctgaaggctgctgaagggtgaggttgggtgatggcctgagtaattaaaaccctggtaatagggttccagagctggctcagcagccagaccatgtggtgctcttataccatgaacccaggttgggtctccagcacccacatcaagtagctaactgctcgaggctccagttgcagggctcttgactccctcttgtggttcccatgagcatttgcatgcatgtgatgcaggcacatgtaaataagaaaattaacagcctgttaaggcccgggaagatggctcagcactggc

SEQ ID NO: 20120 - DNA, 1770 bp, Mus musculus
gacttcaccgacatcatcaaattcttcaacggtatgagctgatccagccattctcgatgtgccctagaagggggcatggggcctcaagtcctggactgggcagagttggagggttctcaagaattctaggatcacttcgcataggaggtatcaagagcacagcaggtggaaactaagcagaggtttcagccagggctcctctcaacctcccataattctccatgttttccccagagcgggctgagcggcatgatgcccaggagatcctgcggattgcccgggacttggtccacaaggtgcagatgctcatagacaacaagtgacggctgcagctgggggtggcaaagtgcagagcccaggtaccaggcccctgagctccagcagggagaggcagaggccatcatagcccaaactgcctctcccgatcccttaccccaccctcacccctgccaaccccacccactcagctgtgtaacctaacaaagtgactgagcctgggatgtgagtgtgggcagtgctggccctgcagggcaagttggggtcaggatgcctgcagatcacagctgggtaggaggggtcggcctcaggagactggctgccttgggggacccctttctgtgttcccctctcaaacaacttagaatagccccagtgccgcctgcagcctcagcctggactgtttcccaaagcctctttcctgtcaacctggggccctgtatggttagtggggtctacagtggcccgcgcctcatctaacaagagttgcataggaccaggggctctgtgccatatctctcctgaggccttctatggtctcaactagctgcctgttcaggcatgtgtcctaggggcaggagaccttggctacctcccaggctctcctaagactctggggcagtcagatgtgggccctgggtgagagtggcccacctcagcagcactgccacagcctctggccagagattaaccccatgatctccccacagtacacagtgacccacccactcgtgtgtacagtgtcactctctgcaccctgcccttgctttctgcactagaaatccctaggactgcacataagcaacacactcgccgcccgctgtgtggtgtggagggcagtgactgcgcttgccctccagaaccaccccagaaagtgtaggaagacagtcctatcacaaccttcctccaaggacaggcctgtgagttccggggtacctgttacctattccagacatctgagtacctggggctgagggaggtgggagtgcctggatagtcccagttcatccccagggagaggcaaggccagctccactttccataggcttttcagggttctgagaagcctgaagacccagaagggtctctggaagagtttacagggttgtcgataaaggtccaacccttgacctgaggtctaggcatgctgtttctttgttctgtcaccccccccatgtccccaccatctgagcacatgtaagccaagtctgggccctgaagcccacacctggcctggctcctgcctagaagtcaccaaggtccacagacttgctgcagctgaaaaacacgagaaaggaccagccgcattctgcacatagcacagccttccctgtcccctaccccaacccgggtactgcacagcctgtgtggggccagcttaccccattgcccacccttgttcctgactcctcagtctccaccaagcacgggtggccaatgtgtgcctgccttagtgactctggttttgtgaggagcagagtgtatggggttttg

SEQ ID NO: 20121 - DNA, 1530 bp, Mus musculus
catatgtaccagagccagtaccttgggttaaaagtgacatctcttcaacagtgtctgaagtagacatggagtaagagactcagttgggttctgtctctactgcaaccaaccaaaactccagtgttggagtctgggttgtgaccaggcagcttgtgctctgtatttcagttgtccatgtctctgctaagtacagaatttacatgattacttacactttcttcattaggattttgaacataatttttaaagggaagatggaaacaaaattttcatctagagacaatcttgcctgaatttaaacagaaaccgtctggtaaggagctggccgttcagcctgccccacccagttcagggaggttaggtctacattccccccactgagtacaatgcagacgttctttacttctggagagactgtttggaaatgctgagacagcactgcagccagtgccacgccagcagtcggctcaatgagcagtttcattctcccccacaccagctgggttgcatactgttggcacagaaaggagcaagggttaatgaaacaagaaacggagccggagtctagtaggttacattcgaaaaatgaagtagacatttgggtttgttgtgataagtatgtgatctactgtcagggttctgttaacaatgcctgagtcttaccttgatttcatcttcggtgacagtgaagacatcatccacaaggtctcttataataggccaggtattcaagccaatgctggatttgacaccatctgctatggtttctggaggatgaagattgggggtcagttctcctttcagtttagactggtagcagtcatctgcattcgagggctcagcagcgtataccttcacactaggtttcagggcctggggaaggaaggcacatgttacaatacagcctttgtctacgtaaaggaggcagagagttaaagatgtgttacccttggtgatcagaatggaaacaagaccttgaagcactttaataaaagttgtatctgataactggcttgtctggattctagtaattgggaagggccatagctttgtgaggtggacttgaggagtaaggatgccaccattgtaactgttaactgcttctatagcagcatagagcaaaaggacagtgggcaaagaaggctatgagaggtgatggtcctatacctagtctaggaagtctagaaggtgtttttgtccccaacccccatacagggtttctctgtatagctctagctgtcctggaactcattttgtagaccaggctgaccttgaactcaaattctgcctctgcctcccaagtgctggcattaaaggcatgcaccaccaccgcccagtgaggctgttttttttttttttaccttaattgtaatggctattccagcaaccattcctcctcctcctactggtaccaccagtgcatctaccaagggaacctgtagtaataatgtaaataggccaattaataaacctttatgtgggctggagagatgactcaatgataagagcactgactgctcttttagggtt

SEQ ID NO: 20122 - DNA, 4170 bp, Mus musculus
taaccagatgtgatatacactcttgtaatccagaacttggatggctgaggcaggaggactgaatttgaggtctctctggaatatctatggtgagactgtgactcaagaaaggaaggaaggaaggaagaggggctcagcaggtaagagcactgactgctcttttggaagtcctgagctcaattcccagcaaccacatgatggctcacaaccatctgtaatgagatccaaagccctcttctggtgtgtctgaagacagctacagtgtgttcatatacataaaataaaagagaagaaaagaaagaaggggtagacttacaggttgtgtagacagaataatttaatgcctgaacatgttagagatctttgattctgaaataatgaactagtttggggtctttaagatctgaataggagccgggtgtggtggcgcacgcctttaatcccagcactcgggaggcagaggcaggcggatctctgagttcgaggccagcctggtctacagagtgagttccaggacagccaaggctacacagagaaaccctgtcttgaaaaaaacaaacaaacaaaaaagatctgaataggaacatgacttggatacaagagaatacaactcccctctatttccataactcaagtaagtacgtgtaactctaacatagttaaattcttaacctcactgcttactaaacactataactccaaatttctgcctttgtagaaacgttctttcctgatcaccaatattatcatttgtatttgtattttttttgttgttgttatgtaactagaatgacaactttccttccctctcttctccattattcttttcttctgtgttgtttcctcttatcaacataatagaaaacatgaaggaactaaaggaacccagacagcgcaaagataataggcgtccagatttggaaatctataagcctggactttctcgactaaggaacagacctaaaactaaggaggcttctgggaatgaggaatttaaggatgagatagtaaatgacagagattcttctgctgttgggaatgatacacagcttattcaagtttgcaaggaattggacagccaacagcaaaatggccctatagatgcagaaaatagtcaggcacaggaaacttttccaaagactgttggactagaggaccgaagtctaaagatcatcaaaagaagcaagaaaccagacctgcagatctaccagcctggaaggcggttgcagaccattaccaaagagtcagcaggcagggcagatgaagaagagatcctcaaccaagtggagcagttgaggatagaggaggatgagtgtaagggagaagctataaaagaagaagttaataacaaaccggataaaaccgagatagaaaagcaccaaagtaatgaccgtgtaagaactgccaagggagaaaagggaaaaaagattgaaaagggggaggggtcaaagaaggtggctgatgactctgtcccaggaaagcctggctctgtaaagagatactcgagatcagacaagagaaggaatcgctaccgcacttgcagtaccagctcagctggtagcaacaacagtgctgagggagctggcctgaccgataatggatgtcgccggcggcgccaggatcgggccaaggagaggccacgactgaagaagcaggtatctttgtcctcaactgattccttagatgaggacagagttgatgagcctgatgtcctagggtccaggaggagctcagaaaggaagaagcatttagaaagaaattggtctggctgtggtgagggtgaacagaaaagcaatggtaaagaaaaccgaagtgcccttcgtgtcacttttgatgcagaaaccatgagtaaagactcccctgtggtgaggtcagtcaaagataatgtggatagaatgaagtctgacaaaggcccaagcagtgggggtaagggctctgagaagcaggagctcagacacccgagacaagaacttcgagatcgtggtcgtggtatcctgattctgcctgcccacactgccctatctgtcagttcatcaggttctccggagtctacacctttgggacctcgacttttatttggatctggtagtaagggatctcggagttggggccgtggaggcactacccgccgactatgggacccaaacaatcctgaccagaagcctgccctaaaaagccagacacctcagctacatttcttggacactgatgatgaaattagccctacatcttggggtgattcacgtcaggcccaagcatcttactataaatttcaaaactctgataacccctattattaccctcggacaccaggccctgcctctcagtatccctatgcaggctatagccctctgcagtacccagtaggccctacaaatggtatgtatccaggggcttactacccgggctatcctgccccctcaggacaatatgtgtgtagccctctccctgctagcaccatgagtcctgaggaaatagaacagcacgtgcggaacatgcagcaacaggagctccatcggcttctccgagtggctgacaaccaggaactgcagctcagcaacctgctttccagggaccgcatcagcactgagggcatggagaagatggctcagctcaggtactgagtgttctttcctactgtcttgcttagagagaaatggacgctgtagggctcctgtggctgaggaaggtagaggatttttagataagccactgagtgttacctgcctttcacatgaatccctaccccccaacaacccctcgtgggcatggacatcaagtctggagtcttgtgcatcttgtattaagtgccctaccactgagccacacttgaatcccctttacattgattttttttcttttttcttttaaattatttatttatttatttaatgtatatgagtacactattgctctcttcagacatgccagaagagggcatcagaccccattgtaaatggttgtgaaccaccatgtggttgctgggaattgaactcaggacctctggaagagcagtcagtgcttttaacagctgagccatctctccacccttcattaattattattatttttttttataagcaacaggcagttgggaaaataagttttaattctagtcttaaagctgaatatactttttactttaaggggaaaaaatgtctttaagggaacatataattttcagaatgccaatttcagcttgcaccaaagagctgctttcagctcttcaatgtaggtgtacacatatagcaatatggtattttcctagatgtatgtttgtaagacattctgctgtgcagaataggacccattatgagtaggatgcctggtcacatttcagagttcttgtcaggaaggaggtggctggtttgcaggagattcagatcttgggtgtggccttgcctgtgatgtattgaagctagactttacatgaattttattccagaactgaactactgcagctgtacgagcgctgtattctattagatattgaattctccgacagtcagaatgtagatcagatcctgtggaagaacgctttctatcaggtgattgagaagttcaggcagcttctcaaggatccaaacagtgagaacccagagcagattcggaacagactcttggagctcttagatgaggtaagcattgttattatcatcattattgttgttgttattgttatagcctcaggataaagtctgcagcatctttttgtttgttttttctactggagatgttatagaacagaatattgccaaaacccttctatttttcttgcatttagatctggtctccctgtactgcttcctttggactatacacacagacagctggagttaactttttttccagtgctcagctactgagttacatctccagacccagaattacatttgaccttgaaagctttctgaatgagaggggtgggcgggagtggggtggggaaggaatgagagctgaaagaggtggggagtggtaaatgaattatattttttaaaacatgagaggcttactataaactgttgctgagattatccgatggcctctaaccaattacttatggtaagtaccttatatctaggatttctggacattgatagattgtgaaagggttgtttggccaaggatttggtaagtagattacaaaaactgattgacttagttttgttt

SEQ ID NO: 20123 - DNA, 1197 bp, Mus musculus
gtttagcagccagcaaccctatcctgactgccaaggagagtctcatgagtttatttgaagagactaaacgaaaggtaagtaagagtgcacgtgggcttatccttcctaggagaatgcatgtcctctgggctgaagtgtgaggagatgatgaaacacatcttcacatagaccctctgggcttcactgacgggttatcagttggcccctgcaaagaacggatattgaaatcaatcttcaggagggcttgcagggcctttagagcgtacctgttccacagcacctagttcacagaattaatgatctatatggcagcagaggtggtctctgctactttggtactgtagcagaatccttagatttttatagtctttagcctgcagacacagatgatagaggaatttttcattggctgactgggagagtctgagcttgtgtgtctgttgtataggctgaacagatggaaaagaagcagcatgaggaatttgatatgagccctgataagtggcgaaaaggaaagaagtctactttccggcatgttggggatgacactactcgcctggagatttggattcatccatcacattctcggtctgcccagggcactgagtctgggaaggattctgagcaggagaatggtctgggcagcctgagtcccagtgatgtaagttcctgagaatgatgcagtgagccagactagagtctggctgcctcaggtcgtgcaagctggggctgaggcatagacaggtcccagctttaagacatttatcgatttatttaaagaaaaaggatcttgttctctataccgggtaagcctggaacttacggtgtagcccagactggcctctaacttgtgacaatcctcttatctgacttgctcatataggggtgagccaccatgcctagcacccccacttactctggagagtacgacccactaactttaggttcccttatgcctccttggttctcacagatccctttatctttggcatgtgcttcccttatttaccactatgtggcactgtagaatttagtaaatgtagagttagaaattgttttactgttttgagttgggcatcaccaatttgtatgagaatttgctgagattttgtactttgctgagataatgtatttaatcttgaatagctttctatttggagtatgaactaaagcaacatgggtaggatgattaatctg

SEQ ID NO: 20124 - DNA, 1167 bp, Mus musculus
tgcccatgggaagctgtttacccggattgggtaagtgtgcaggatgtttattttatttccctacattacaagtcattttggaatttaatattgttagcaactagcctgtgtttgtaactgagggcacagggtgtgaattcttagaggcctccaccttctcttcattctctttcctactgtgttcataaaatttgagatatatcactatctttgtctttcctttttttccctttcttttctaaagccattcttttaggacagtctttcccagtcccctcttcttgtcctcctgggttctgttgactctgtcttcctgcttaactcccaggaagtctgagatagtcgtgctacatccttgggtgcagcttccaggggtcctccttggggaaaaattatctcctaatctttcctcaataacagagtaacattttccttcctctgtgttcttctgacccatccaacttcctatgcactcagtcccttgtgccacattgctgatctcagtaaatctctgtaagccccagggaaggcagtgtgtgcaaagccttagggctttctcccttgagttcctgggaagagtttgaatgttcctcttgggcatcagaagagttttcctggcaatataaaagctgcacagtgccttcagtgtcagaggagatgtgtgctgagtgtctctgtgcagggcctccttgggtaagggacatcaatgtgaagaagcagcatcccttctataaaggtgcactgctcaattggctttgggtttttgagacaaggtctcttctgtgtagcccaggctgggttagaacttggcaactttcctgcctcagctttccaagtgctggaattcccaagagtaccactgtgcttgggttcctgttggctttcaatcttttttgaatattggttttattgtgagctgcccttagaggtgattggcttcacattgcaaatctcctgttatggcattttcctttttcttcaatgccatgaacttgtaaggttccctgtaattatataggttttctgcagggagacaggagtcaggtcggcttccatatactttgtgtttacttttttaagatgatggaagactttgtgtcctgcttgaaaagccattgccctgttgattgtgagtgaaagtgtgcttcacattatattcctctggca

SEQ ID NO: 20125 - DNA, 1151 bp, Mus musculus
caggcatgatctaccatgtcttgtttctgaagtaattctttaagtaaagaaagtttttttgtgattagattccttttacggagcacagttttcataaaggagacttagggatggtgtaggtactaaaatttaaaggaaatattctcactgtctagaaaatctgtttcaaacagaaactcttatcagtttgaatccatttaatatggggggtgggctgtgctaagaaatagcctgctaaataaagtataataacttacaacagctatttatccagtaattgagttgtttttatctctaagctttgaatatttttcttttttcttctatatgtgcaaaactgtggaataagtaggaaagaaacttcctaggtattagttgtgtgcttgggagaggggaattgttcttctgagtgcctttaagaatgtgcctcaataatggaatccccatatttgtaggatggagacattccctgcagtggctgagaaggtccttaaggagttccaagtattgctgcagcatagcccatctcctattggaagtacccgtatgctgcagcttatgaccatcaacatgtttgccgtgcataactcccagttgaaaggtaagggaaatctaatttctccatctagacagagttgaatttagtatctttgctaccttatcactaaccccatctccacacacacagacacacaacacacaacacacaacacacacacacacacacacacctctcccttctattgcttcttagatctttattttagtctctaaattctgtaagactctatagtgcttggttgggatattaaggagagatttgtaaatataaagtttaatttaaaaatccagagatgcttttgcacatctggctatgctaatggcagcagcaaggcctcttagaggctgcatacccaggacttctcccaagagagaggcattgctgaaatgtttcattccagagaccgtatgcttggcagggattaggcattgctgtttctggactcgtgtaccctgtttgttcaatatggaaaagtctagttccctatgggatatcccttatgggaccctgccagagagtaagaacagagaattgatgagctttggtgactcaaatctggaagcacaaaacccaccaggcccagaatctg

SEQ ID NO: 20126 - DNA, 1210 bp, Mus musculus
aagaggaagaggaggagggaaaaaaaagacaagctgaagaatgtttccatgcttaagagcacttactgttcttctacagtagagtctcttctagcttccataggcactaagcagtaacatagtgcatagacatgcatacatgcaaaaaaaaaacaaaccctatattaattaactaaaaaaatattttttaaaaaagatttagctgggcgtggtggtgcatgcctctaatcccagcacttgggaggcagaggcaggtggatttctgagttcgaggccagcctggtctacaaagtgagttccaggacagccagggctatacagagaaaccctgtctcaaaaaaccaaaaataaataaataaataaataagtttgtttatttattatttatatgtaagtacactgtagctgtcttcagacacatcagtagaaagaaagactttctggtcttaaaaaataatttctaaaggaaaaaagaaatatatatttttttaaaagatagaggaggaagagcaggaatagaaaaactatctttactttgagctggcaccagccatcactcctcttcccttttgatttgctcttctgtgaaacttttttttttttttttgcccatttctttagatgtcagtataggagtgatgcctcccataaaatactcagtaatgttttgagataacatatttaaatgttgtgcacctaacttttacctcactatgtcttagatgctctgatacagacctcatgtgttgtgcatacacatcacatgtagctgtggtagactcgtactgtgcatagttaagcccacaggtgagacaggcatgtatctacttgagatgagcagtacagttcttgagcttcctcatggttctgattatcaagggtgtaataatttaatgttactttgtcctcaaggagcttataatctcattggtaaaacatgccacatacataaaatactagggtaaggtattgtctgttagtgtgcatcagagtacattgtcttccacatttttctgccctttgtattatgtgcattgagcagcttctgggtgttgttgatagagaatgtgtgagggtaaagggggctatacagagacttaggagaaaagagtcatgtggggatatgtaattaatttttatactttccccagtaaaccatcgaccctttttatgatgtcatgagggattccttaattttgcagctgcttcc

SEQ ID NO: 20127 - DNA, 1202 bp, Mus musculus
gactacacagtgtgactactccctgtgtgcctgtggctgaaggagagaggctagtgcccagtttctgtctgtgtggtatatacttgactatgcaagagcagggacttctgagagctgccgtaggcactgggtatctagactgtttaaagtgtctcatcatactgtctggaaaggtgacagaaccagcattaggcaactggttctccaaattctttttctttctctctggttaggattaaaagtcccccgatcaatttcacctttacatagagagtacacacacatagatggtagctatgggcacaacttaatattacatttttgataatatttcttgggagctgccagccagccttacagcttttgttgcaagtccctttccattcccagagcaggaagaacactttcaccgacctctttagaaccgttcttcttttcttgtcttgtttctcacagggttgctgtggatgtctggtcaacactagctgatttctgtaacatactgactgcagtcaatcagtctgaggtgccactgtacaaggacccagatgatgacctcaccctgcttatcctggaagaggatcggcttctctctggctttgtccccttgctggctgcccctcaggacccctgctacgtggagaaaacctcggataaggtcagctgcaggccaaacatcccttcccatttacccactctcttaattctccagactttattcttgggaagttttctgtgcaaacggaacatgattaagtcattgagaagggtgttaagggaaaatatcgaccttttagccgctgacatccagttctgtgtcctgaaaaaaaatccctctcaacttcctttgggggggggggtgtctcctgtgtatgtgtatgagagagagaaatgaagggggggaaggaaaggagggagggagggagggaggaagaggggggtggaggagagagagcgcagagctcctggcatgttgtatatacgatcatttcctcacatgtttaaatagtgcagcttgtgttggcagtgctcttactcagctccaaatggtttgcatcatgcttaaagcaccctccttccttccctctccctccttccccagccacagaactctgcactaggaaaacagccagggctttttcccttctctaaggaggagagtgataaataggtgactagagagaagcagacaccatgtgtta

SEQ ID NO: 20128 - DNA, 1150 bp, Mus musculus
gtcagctcactgaagacccaggttggatttcctcactcatgtggcgggtctcaacttgctgtaactccagttcccttttccagcctaatcaggcactaggcatgcatgtagtacacagatatacatgcagactcactaccactggggggtgtgtgtgtgtgtgtgtgtgtgtgtgaatattagtgaattagttctaacttaactgtaagtgttgtctttactcctcaagtatagctgcttgcaatgagtgttaacagtattaccatttctttctctggcagctcagactttagttctcttatccctaggcattagtctttatttggcttacatacacatctttaactgccatgtatttactagtgcaataaaagatctactatctatttatatatcttccttgcatgtttatggccttgcttatttttatatcattatcatcatcattactgatatgcaaattccttatatattgtttatagttatgtttcatgtattaaaaatgttttctcctgtttagtgatgtttatataaacttatttattcttttaatggggctggagagatgacttggtagttgagagcactgattgctcttccagaggacctaggtcatttcctaaaatccacatggctgctcacaactgtctgtaaatcatgcatgtggtgcacggatatatgcaggaaaaacaccaatacacattaaataaataagcaagcaaacaaacaaataaataacgtgtgtgtataattttacaatgtacaaatttagatttttatataggcaaatgtgtctgttttctgtgtgtctacttggatttttaatcatgcttctctcttagtacacttattttgtacacctgtttaattagatacagttcagcagttaagagcactggctgctcttctagaggtccttagttcaattcccagcaaccacatggtaggtagctcacaaccatctgttgtgggatctgatgctctcttctggcatgtaggtatacatgcagatagagcactaatatacattaaacaaataaatctttttttaaaagtttgtgattaacagagtatgttattcatgtatgattcatgtatgattgacatgatacagtcaggcttctgccatttttgactgcagaagaaattc

SEQ ID NO: 20129 - DNA, 1234 bp, Mus musculus
actcactgccttacgctctgccctttcctacttttagatctttgtccagtctgtctctcaatccaaaggactctttttttgctccacatttcctgttacctgttgaaattctattttccctgaattccccaatgaaactccatctccccagtgaagccttccctgatttctcccaggaggaatttgtctctgtgctctagggttcctgcagagttgatttatatctcatttgtaggactgctatcatgtctcacattacagttatttgtgggccttttcccccacagtaccatgaattcctaggaatctgggaccatgttctcagttcagtttagcaagatactgagcatcgactctcctaatggctgggttgtacaaaccttgggagtcaaaggacacggggaggtgacatttcacagcaggccatacagtatagaaactattcttttgtttgtttattcttttgcttgcttgcttgctttttttttttttttttttttttttttgagacagggtttctctgtgtagccctggctgtcctggaactcactctgtaggccaagctggccttgaactcagagatgcttctgtctctacctgtctctactgagagcttgacttaaaggtatatgcctacagctgccctatgagaagctattattgaacaaatgatttggcatgttaatgaggtcttttaaaagatcaagtattaactgggtatagtgacaaatgcctttaattctagcactcaggaggcaaaagcaaacagatatctgtaagtctgagaccagcttagtctgcatagcaaattccaagacatacagagctacatagtgaaatcttgtctcaaaaaacaaaaaagatcaagtatagggctagcaagatggcttagcaggtaaaggcacttaccacccaccaagtttgataatctgagttcaaggacccatatgtaagaaggagagaactgactcctgaaagttgtcctatgatacatgctatgacacatgcacttactccctccaccacacatgatagatagatagatagatagatagatagatagatagatagatagatagatagataggtaggtaggtaggtaggtagatagatagatagatagatagatagatagatagatagatagatagatagatagatagatagatagaaaattgtttttaaaagatgagatacaaacaagcctgggtaataccatatatattgaagctca

SEQ ID NO: 20130 - DNA, 1179 bp, Mus musculus
ttggcccctttcatcaccccaaaccccctaaacttcctcccctcagttccttgtgggacttctcgttctgaatcttacccctaccacctgtgacaggaaccaaataaagccttcccagctgtccttccttcccaacccgtcacacctctgagaagtctcctagctgggagagctgaaccccaaggtagaggtgccagggtgttgagcccgtttctggctttgtcattgtacttctttacccagaagaggggacatggggccctttagcctttgagggttttggttcttttaggttttttgtttttgttttttgctgcctctgtttacaacctcacttggaggctcccgaccaggaatgaattccttcagtctagcaaagaggtagaggaggattgagaaggctgtctcaggctaagcaggggatcacacaacccacctcaggaggagcagtgcttcaccaagggtgctctgcccttctcaggcccaggacagtgcccaggactcagctcagaagctctcttgattgtaaggcgcaggcaggctacttcctttgaggtcccctcctctggctgtgagggtcattggctgggggttgggggattgggaatggaagaatacctttcttctttctgtcccacttggaaccctggttttgtttccttaataaatttttagttatgaaatataattgacctctgctggtctattttttgggactggggaggggcggctggtttgggcctgtacacctatgttggggccttgccacccaccgtggtgcaggggcagaagagagccacaggattatagggaccttggttactgctttattgctgtttggttgagtatagaaaatggaagcggctctggaagagcctgtgtacagagtagagaatatacaaagggacagaacgggaaccaaggaaggagacctctctccagcccagctaaagttgggctcaggataggggtcacctagggcgcatgcaataaatatatggtccggggaccccaggaagaggaggggacacctcggaagcagagacagatgggtcagggttgtcatccctggcgccagagctgcccaccctggtggtgaggaaaggaagggttggccctggggctagtgccacttgtgcaaaatgaggaacttcacattatcagtcccgggctgggcag

SEQ ID NO: 20131 - DNA, 1180 bp, Mus musculus
tgaattattcagaagccctgtactgaggccctactgtgtgtggtgagcccagctcctctctctgtgcttccttctcctgctgtttttttcctcttcgttttgcagggcctgccttgccctccatccatcttgctataggatctacaacaaagagcctgctagcctccaggatcaggctgcctcaatgggcttcaggtcccttatggggggtgctcacgtctttgagcttgtggcctgccttcttagcagggaaatagatttctgaaggagaaaggtgtgtcctaggagctgtcagtgccccccccccccagtgaagctctctgcagcttgggtggagagctatcgccttctaggcaaacgaagctgggagccattgatttgtctcttatcaccccttagaaaagaagagctaccctgtgggaaggctgtttactgtggagggtttgtcccagagagcagtggggacaccaaaatgagggcacaggtcccctcctgtgccaccctctctctttgctgagttgaagcctgtgccttccctataccaggaatatgggcgctccgaggtcaccggtcctgtgtgcctcactgcagtgacctctccgcccgactgggactggccggatgttcttactaataagcaaactgcattaccatctcgacagaattaaccaaaaaaaaaaaaaagaaaaagaaaaaggaaagaaaaatggtccttgaacaaatgctgctggtgtctaccaggacctaagatctggtactatctgttttttaataattgagggtaataaatatgtatttctttctcctccctacccccatcctccgagcttgtcagctccctgcgtctctcctctgatcagaccaagtcttccccaagcaaaaaaaaaaaaaaaaaatcctttaagcaaaaaaggattaaagccttgaaagtaggtctgcctgcacgctttcctcccctccccccaggcctggcgtggagaggcccctcaggaaaccagggactgggggttgggggtgtggatggagaccacaggtcttggggaagagctcagtggggaaggaggacccctgtagtgctctctccctgcagcctacctagcctgggctaacctggaagtagcaacagtgcagccgaagtttccattggtacctgagggctagcctgagactaggtccactc

SEQ ID NO: 20132 - DNA, 1149 bp, Mus musculus
tagaagtgtattctgcatgttaaacacaccacacacctatgccctcccccttcatgcccctcccacttcccctcagtcccttttgtctccttagagagttttacttccaatttctttttttaaaaattatttattttatgtgcattggtgtttatgtgcgtggatatctgtgtgagggtgccagatcccctgagactggaattacagacagttgtgagctgccatgtgggtgctaggaattgaacccaggttctttgaaagagcatccaagtgctctcaactgctgagccatctctccagccccctactttcatatcatacaaacatacatgcatatatacatgacttgataggcctttatagaatgtaaaaaaaaatgaaagaagatacatgctacttgctttttgagatggatttactttacgtaatactcctcttgccagttggccttctgctgctttgttgttgtttgttggagacaaagtctcacatagcccaggctggtctcaagctagctatgtagctgaggatggccttgaacttctgctcttcctgactgtacctcctgaatgttgagaataccagcatgaaccaccacgcctgggttctgtagtgctggggatggaacccaggcccttccttgcacatgctaggcaagtactctagcaacagagttacctcccagcccattctgccattttccgctcagcactgtgtgggaaccccaggggagaccatccctttccttatctcacctcccaccaggcagtcttctgtactacagtgacagagaacattgccagcctagtggagacatggggtggcccctggcatcctcagataagcttacaaatggaccagccattgtctaggctttggggacaggaaaatgagaaaacaggctctctaaggagctgagagagccgtgagtgttctcaaccagtgtagaactgagcctgtgttactgtgttactgagctgcagaacaaggggctcagctggggttggagagtcggagagggcttcacacacactcccaacccgtccccgccactatcacagtctcagaagaaagaggggcagctagagaagacagtgggggagggttaggctgatggttagtggcacacagtagctcagcctttgaggt

SEQ ID NO: 20133 - DNA, 1871 bp, Mus musculus
cagccgcagagtttgtgcattctgcgttatcaccagcttagtgcctgtgaatagatattttagttgttgtattaaatgaacataggtaggctggtgtcagaaagtcgggtagatcaagggagagtgtagggattttctgtcttcctgggatggacaggaatggtgaagagcagagaagtaaccttgcccagagctggagcagaagcctcagtccctactaccacagagctcctctagatgaaagtgatgctttagggtgagttacctgtctgctctgggcccccactgcacccatagaaagacagaggcttctccgggaggatgctaggtctgagcacagggcacctaggatggggaaagggtctgtggaagaggatctggcccaactccaggaagtcacagcactttctctctgagacttgtaaactttccttcttcctgctggactcattgaagccactgaagcaaagaaagttctctcttccgctgcacgccaggctctgccactcacaaacagcttctctcttttctaaaggatgaatctcgaattaaggccactgtgatggacgtgaagcccgtggacttcagagactatggcagacggctgatcgcgaacatcaggaagaacatgtgatgggagcaagtaccactggtggccagaacggaagagagaagaacagaaatagaatggcttccttcccgccccatgggacagctccacaatgaagatcctctaggggaggctggcaacccatctgggcccctcttgggactcactgataagcaaagacagtgagctcagagggctgtgtgtgaaccttccgctccagttctcagccaccggtagtgtggcagcagtcccctcctcctgccttccggctttgtcggatttcatgaaattttgttatcttcaaacagaaattatgtcacaagtcattaaccccactctggataatgaggcaaattatgtaacctggagtgtgcttttccagtggtggcacctttttgtcttgagttcctcctggggggagaagagtaggggagaacccaggtgttcagagggtgcgtctgcctggaatcaaagggtctgttttgcagagttactgcatggttgttaatgcttagaatggcaacaaggtagaattattaatcaaaggcctatcgttaatatctgaatatccttccttcagggtttgataggtttaatagactgagtcagatgactctgatattaatcagaattgtctcctctgaggacggctgataagcactggcttgctgtccccttggggaaaagcaaacccccaaattgcataatttacttcattatccacatagtggggtcagttacttgagacacaatccctgtttgaagataacagaatcttagtaaatccgacaaagcctgcagacagaggtggcactgggacatccaggctgctacagagcatggcttcagtttgcatcagttaccgttcggttgccaggcggacctgtgtacctttattaaagctatgttaaatagaatttaagaaagaagctttgtttcctttgctttgtttgaataaacagtatatctttgtggatcctactttctttgactgtaaaggattcttgtaactggaaagcaattaattagccttcataataaatattcactagggaaagatgttaactcattacagactcagagattagactgaggcctggagatgattctcactaatgtttgcaaccctggaatgcatctttaaatgaatgaaaacacaaaaggaaaggcgattgagcccaggaacaccgatgatctggcccctcggggttggattgatgtttacgcggcagcctaacaccaagccaactctgaaacgtgg

SEQ ID NO: 20134 - DNA, 1055 bp, Mus musculus
gtttccggtcactccagagctacagggtgtctcctgaagtgtgcttcagcctagtaaacaccttttaggaaagtggagtcaaagcttgaagtaaaaaaagagaaacgcaagtgcatatccgggcacttgctgtttggggttgtcaggagaaggtcataggaagccactttggtgtgaagggaagacttcattttgccttgatggttgctgtctgttgtcccagcacttgggtggaaacaggaggttcactcagacctccaggccagctagtgtccacagtgagttcaaagctagcctggactacatagcaagaccctgtctcaaaaatatatacattagagtaaacaggtgaattgggacccttggggggcctcagtgagtgaagcccttgccaagcaaatctgaccacccgagttccatccctgggacccctgcgacccctggggtggtggaaggagaagacctgctccatgcggttgtcctctgacctccacgaatgcgcctggcatgcacaccacacagtcaaaacaaatgaacattaactgactttacctttactcatttgccttcttatacactaggtttatttaatgcagagcagaaattatgccaaacataagaaagacactagctaaggtaaaaaaaaaaatagactagttagtaaaagctgtgttttctagttcgtggggattggtacctgtgtatagtgtccttccctcctccctccatatcgcttggatgcgtgtagaggccacggaggaggagcttttgccattgtttcctgcactttcctttctttttctgccctccacgctgtttaaatcacccacaaggtcttagcagatagtccgtcccgagaagtccttccacacagatagctggaattgacttttaaagtatagtttgccttttatctgtcttgccctctgttttcatatcagattttcaggcttgggcagcctttcaggattttttatgagcttattatagttggctgttcttggtgctggtgaggacgcacaaggcttccctcagggaatgtgctgctctggggg

SEQ ID NO: 20135 - DNA, 1153 bp, Mus musculus
agctgcttttgttttaccagagctgatagcttgaaaatgtaactgtatatgtgggattctgcaatgtctgcagccctgtgagggtctctttacacttggactgttgctccgaggatggtgtctaactgtcaaaatggcctgctctcgctgttgagagcgagggcctagcagcgcagttctaatgtgctctcccttgcttctgcagggtgaaatcagagctactgctttcaatgagcaagtggacaagttctttccccttattgaagtgaacaaggtaagaagacggtgttgagtcagagctgacaggctgaactgtgagagccatgagcacagtttggaaggctgcattgtggggcgggctttgatggactgagtagcttgccctgacttggcctcttttgcaggtgtattacttctcaaagggcgccctgaagatcgctaacaaacagttctccgctgttaaaaatgactatgagatgaccttcaataatgagacttctgtccttccctgtgaagatggccatcacttacccacagttcagtttgatttcacagggatcggtgacctagagagcaaggctaaagacgcactagtaggtgcgtccagggttgagggcaaagagtggtgatttttgtctccagtgtttggggtgatgcgtgactagcgtgcttgcctttcgtccctgccgtgttttaaagaggagccttgatgggagctcttacaaagtgttctttgtttcagacatcattggaatctgcaagagctatgaagattcgattaaaatcacagtgaagtcgaacaacagagaagttgctaagagaaatatctatttgatggacatgtcagggaaggtggtgaccacaactctgtggggagaagatgtgagtccttgcactgagccgagtcctgagggtggggctttagctcagggagttgtgctatccagtaagtatttgaagaccttcgctgtgtgagatgatcggttattgcagcttcttgtagtgcaatgctccttcccgagtgggaggtctgtcttagagtccacagacattgactgactcttctccataaaaccatcctgtacattcttcttgtcagtgatgtgtgcgtgcgtttgatttgcaggctgacaagtttgacggctctcggcag

SEQ ID NO: 20136 - DNA, 1173 bp, Mus musculus
acaaatcagacataatattataaacaagtattagtgtcactcaattaaaaagtcactcaggaggtgagatcaatccccagcataatgaggggaggaggggagagaaggaaatgaatgggaggggaggaggaaggaagagagaaaaaggaaagatctcaaagcagaacacaggatgtaatttaaggcctaagctctcgactgaagttgtccacttttaatgacccttttcatgctcatggttttctgtcttcggtacatagtgaagagtggaaaccaagggtcatcctggaatttccttttgttttcaggcatgtcttaaagacatagtggaagcaggtatgcatgggtatcctgaaagactgcagcccaagatgatggtgcgtaagacagaatgcctggtgaacctggggagactccaggaggcaagacagaccatcagtgatctcgaaagcagcctcactgccaagccaaccctggtgctttcctcttaccagattctgcaaaggaatgtccagcatctgaaaataaagatccaagaaaaggagactctcccagaacccatccctgcagctctcaccaatgccttcgaggatatagccctgggggaagagaacacacagatttctggggcctccctctctgtcagcttatgcacacaccctttgaaaggccgccatctagttgccacaaaagacattctcccaggagaactgctggtgaaggaagatgcttttgtaagtgtccttatcccaggagaaatgccacgacctcatcattgccttgagaacaagtgggataccagagttaccagtggagacctctactgtcaccgatgtctgaagcacactttggccacagtaccttgtggcagctgcagctatgccaagtattgcagccaggaatgtatgcagcaggcatgggacctctaccatagcacagagtgttctcttggggggctgctcctcacactcggggtcttctgccatgttgccctgagaatgactcttttagccagatttgaagatgttgatagagttgtaaggatgctttgtgacgaggttggtagcacagacacctgtttacctgaaagcaagaatctggtcaaggcatttgattacacaagtcagggagagagtgaagagaagagcaagataggtgaacccccaattcctg

SEQ ID NO: 20137 - DNA, 1119 bp, Mus musculus
tggaggtagggctgcaggtttgccgccagggctacaacatgctcaaccttctcattcaccggaagaacctcaactatctgcacttggactacaacttcaacctgaagcctgtcaagacgctcaccaccaaggtcctgtctgggatcttgcggctctgctgggcttaggggtggatgggactgtggcacacctccttctgtggccactatcattaatgttctttgtgttcttggccttttcaggaaagaaagaaatcccgttttgggaatgctttccatctatgtcgggaagtactgcgtttaaccaagctggttgtggacagccatgtgcagtatcgcttgggcaatgtagatgccttccaggtgaggccatgctgcctggacccctgcctggatggagagacagggtaaagcctgtgctggctttggagctggctctggctctaagtctaatgggtgatttttttttttttgcagctggcagatggtttgcagtatatatttgcccacgtgggacagttgacaggcatgtatcgatacaaatataagctgatgcggcagatccgcatgtgcaaggacttgaaacatctcatctattaccgcttcaacacggtgagacccagccctcactgccagccttcacacacccttgctttttctttgcagttagagcttttccccaggaccttcttagagagaatctcttgactatgtccttactatactcagtgaatcacagcacttcccctcaaacctaccactgaatccttgcaggagcctcagtttctgccttgaaattcttacatgcatccctattctagactgaggactcaaacaacatttaccctgtctcacggcagcctgattcatgttcatccttctacttctgcctggttttctttctatcatttctctaaaggaattgttcatttatgttcatgatttctgcttgactgtagggtcctgtagggaaaggccctggctgtggtttctgggctgctggctggcgggtctggctgttctttatgcgtggaattacccctctgctagagcgatggctgggcaaccttctggcccgacagtttgaaggtaagtggtttcctcacccaggcttgtgttc

SEQ ID NO: 20138 - DNA, 3000 bp, Mus musculus
tcaaagggggtggcaaagacagtaacgaagcagcgggtggagtcgcactttgacctggagctcagggctgctgtgatgcacgacattctggacatgatgcctgaaggcatcaagcagaacaaggcccggacaattctgcagcacctcagtgaagcctggcgctgctggaaggccaacatcccttggaaggtaggctctcctccacctccaaggaggcctgccattcattcatccttctgaggttaggagtaccacatcctcacaggactgtccaccttctaatacccctccttcttgagacagtctcactgtgttgtcctggctgagctggaagtctgcaggccaggctggtctcagactcaagagatcaatctgcctccgcctccatgctggggtgcaggtgtggagcactatgcttgggtcttagtactctttcattgtgtctgtacctgcaggtcccaggactgccaacacctatagagaatatgattcttcggtacgttaaggccaaggctgattggtggaccaatactgcccactacaaccgggaacggatccgtcgcggggctactgtagacaagactgtttgcaaaaagaacctgggccgcctcactcgcctgtatctgaaggcagagcaggagcggcagcacaattacctgaaggttgggacagctagactgggtgtgggggctgggtggtgaggtggactgcagagtgaggatcaggctttgtcctggtgtggacagtagtgggagactaacctgacgttcaccttccaggatgggccttacatcacagccgaggaggcagtggccgtgtataccaccactgtgcactggctggagagccggagattctcgcccatccccttccctccactctcctacaagcatgataccaagctgctcatcttggctctggagcgtctcaaggaagcttataggtaaggggtggctggtgggttcctgttgggacggtaacagagagaatggcatcgtggtcagagttcagaggaaggtgtagttccttctggtttagcatctcattcactttccttttgctttgtcagtgtgaagtctaggttaaaccagtctcagagggaggagctgggtctgattgaacaagcctatgacaacccccatgaggctttgtcccgcatcaagcgtcacctcctcacacagagagcctttaaggaagtgagtaatatgttccctccgttttcttttggtctgtgctctttattcctggcagattatctagtgggtggcagattggcttaggtgaattgatgtgaaccaggttcctcctcccacaggtgggcattgagtttatggatctctatagccaccttgtaccagtgtatgatgtggaaccactggagaaaataactgatgcttacctggaccagtacctgtggtatgaagcagataaacgccgtcttttcccaccctggatcaagcctgctgacacagagccacctccactgcttgtttacaagtggtgtcaaggtacaactttgctggagttacttctgtataaacattcaggctgcatagtccgttttattgcataagagtgagtagtactgccagatggtggtggttctatgcgtctttaatccctgcattcaggaggaagaggcaggcagatctctgagtttgaggaccgcctggtctacagagtgagttccaggagagccagcactacacagagagaccctgtctaataaaaagaaagaatgaatactactgttgggatgggtggatggatggatggatggatggatggttttggaatgtgttgagagctgctgaggttactagtcctgaaaagaaatttttaatgtgccatatctccgacatttttcttttgtaggcattaataacctgcaggatgtgtgggagacgagtgagggcgagtgcaacgtcatgctggagtctcggtttgagaagatgtatgagaagattgacctgaccctgcttaacaggctgctgcgactcattgtggaccacaacatagctgactacatgacggccaagaacaacgtagtcatcaactataaggtctgtcctagagcaaggaacaaaggaatgtgttgagggcatgtctgacccagggagttaggatttgctgagggagattggaccctgaagtgcttgggacacagtcaaccctagtcatagctaagaattgtggttctcttttttcctttttcctttctaggacatgaaccatacaaactcatatggaatcatcagaggcctgcagtttgcctcattcattgtacagtactatggcttggtgatggatttgcttgtactgggattgcaccgggccagtgagatggctgggcctcctcagatgccaaatgactttctcagtttccaggacatagccactgaggctgcacacccaatccgactcttctgtagatacattgatcgcatccatattttcttcaggtaatgacacacagctcatttacccaacagggcagggagccatgctctgtctgtgcagtggctcttgtagcttagttgattaattgcttttgggctataaagtaaaatgaagcctagtggggaatagggtccccactgtggagctagagttagttctcaaagggtcctagtatatttggagttcgaccgtgtaccttgtcttaacgtaggttcacagcagatgaggctcgggatctgatccagcgttacctgacagaacacccagaccccaacaatgaaaacattgttggctacaataacaagaaatgctggccccgagatgcccgaatgcggctcatgaagcatgatgtcaacttgtgagtctcagctgggtttgtggaatcacgaggatgttagtcctcaattaggactgaggaggttgtgccttggggggaaggaatataggcctgttgggctatcgtctacctggtctttgaatgtgtcttcaacagactgaagtgcctctgtgttctctggataggggtcgggcagtgttctg

SEQ ID NO: 20139 - DNA, 1079 bp, Mus musculus
ccaacctgctattcaacatgtgtggctttgagtgccgcatcctgcctaagtgccgtaccagctatgaagagttcacccacaaggacggggtctggaacctacagaatgaggtacagtccaggaaggacatccttttacgacccctgtaactctggagtcaatgggtggagaacagtcatagcttctcattatcattaagtgggttgggtttagtcacagttaatccttgcttgtttaaacagtgtctctgtaacactggcaggccttgagttcactttgtaaacaagactggccctgattgtctcagatcagcctgcctctgtctctacctcccaagaagtgtaaggattaaaggcatgtgtgctgttatgcttgattgattgattgattgaaacagggagggttctgggggctgaagtaaggaactaaggcttggtaaacagcaccttggcctgctctgagccatttcaccagccccttgggagtttctgagacaagttaacactgactttatggtgtaggttaccaaggagcggacagctcagtgcttcctgcgtgtggatgatgagtcaatgcaacgcttccataaccgtgtgcggcagattctgatggcctctggctccaccacgttcaccaaggtatggagggctggaaacctcagatttcctgccagcctctgtcttagcatcccttcagctcgtccctggtttgagtttcctgtttccaaactgtgcctagtattctaatctccatgtattattttgggactgcatcttagaatgttagatctattgagtttatttctgaggattccctgcaaaaatttaacaggctgcatttgtggggttttgatgatttttagatcacagcaaaagtggagtctataatttgaacaaaagtatctatttgcattttcccttaggctaagtcaaacagcttataattttagggagtagcatagaataccattaaaatgaagggtcttttgtttatatttttccttaagttgtttctggggcccatttaacacagctaagggaagctggggatttgttagttgtgtatattagggtcttgca

SEQ ID NO: 20140 - DNA, 1195 bp, Mus musculus
tttttttgtaactactaacgatttttaagattaaccgttacagtagggatgtaagtaattcactagtaactgcaaggcctgcattgctcatgtgaactttactcctttctgctgactttagattgtgaataagtggaacacagctctcatcggccttatgacatattttcgagaggctgtggtgaatacacaggaactcctggacttattggtgaagtgtgaaaacaagatccagacacgtatcaagattggattgaactccaagatgcctagccggttcccgcctgttgtattctacacccctaaggagctgggtgggcttggcatgctctcgatgggccatgtgcttatcccccagtctgacctcaggtatggcctgtgtgctagcttcattatttcaactcggagggagatgggtgtctggttatgtttgattttacttttatctcttgtctcgattttccaaaacaggtggtccaagcagacagatgtgggcatcacacacttccgttcaggaatgagtcatgaagaagaccaactgattcccaacttgtaccgctacatacagccatgggagagcgagttcattgactcccagcgggtctgggctgagtatgcactcaagagacaagaggctattgctcagaacaggtgggcatgcagagagtgtgccaatcacacagcttttgggtcacaacattttgaatcttatatagaggccatgggaagagtatgtgtttaggagttaagactgattctgtttatccttggccaaagaatgttgaatgcttcctctttgtgaggaaggatgttgactctgtttttttctggcagacgcttgactttagaagatttagaagattcatgggatcgaggcattccccggatcaataccctcttccagaaagaccggcacacattggcttatgataaaggctggcgtgtccgaactgactttaagcagtaccaggtatgtggactggagagtaaagcaagtttctcccaatcaggatatttctggcatccctgtcacttagagtggtagacacccagacgcttcactgtacttgccttaccttgctgtctaggttttgaagcagaaccccttttggtggacacatcagcggcatgatggcaagctttggaacctcaataactaccgcacagacatgattcaggcgctgggtggtgtgga

SEQ ID NO: 20141 - DNA, 1530 bp, Mus musculus
tctcttcaagggcacttacttccccacctgggagggtctgttctggtaaggactctgccccaactacctgagcccatcacttgtgtgctgtagtggcctgctgctgcttacccagtgagggcgaagcacctctgggaggtggatgggcagcgtctcacttggttcctctgctcatcagggagaaagccagtggctttgaggagtccatgaagtggaagaagctgaccaatgctcagcgatcaggattaaaccagattcctaatcgtagatttaccctctggtggtccccaaccatcaatcgagccaatgtgagtgtgattgttcagcaggggagatgagggaaggttgtttcttttgccttaatctttgtcctaagaagtggcctgctgtggtctcgggtctctaaagcccgtctctttcttggcaggtctatgtgggcttccaggtgcagctggacctgacaggaatcttcatgcacggcaagatccccacactgaagatctctctcatccagatattccgagctcacttgtggcagaagatccatgagagcatcgtgatggacttgtgtcaggtgggctgcagttgaggggtgacttcacagagtcacgtcacctcactgtttttctagttttggagacagtctatgtggccttggcctagagctccttatgctggccttgaactcggaccaccacctacctctgcctcccactggcttggattaaaagcctcacacggccagcttgctcttttgagaatgagaagtttatcttggacatgcaaggattagactcctcctgcttcatctaacttctcttagcgctcagtgtaagtggatatctgtaacgaggtacaaccctctcgtctttactcccaggtctttgaccaggaactggatgcactggaaattgagacagtgcaaaaggagacaatccatccccgaaagtcctataagatgaactcttcctgtgcggatatactactctttgcctcctataagtggaatgtctcccggccctcgctgctggcagactccaagtaagtgttttgtggcccagctttaggtattaggaaccttggtgttactgtactaggcattttacttaaggggttagccctgcctctttggttttgttattctggcttaaaccttataatcctattgcctcggcccctccaaatgcttgctgtacaagggtgggcaccattcccagcttttgctgacattctttcaaacttggaggtagtgttaacccctgtagcccatcagcagtcagacctgctcatttcctgggggtcttgctgatctgtttgttttgcttgtttttgtttgagacagggtttctctgtgtagctctgcctgtcctggaactcactctgtagaccaggctggccttgaactcagagatccgcctgcctctgcctcccgagtactgggattgagtcaagcaccaccactgcatggctaagggtcttgctgatctacactgaggaagggggtgactttgagatttaggtgcagtgttg

SEQ ID NO: 20142 - DNA, 1780 bp, Mus musculus
gaactcagaaatcagcctgcctctgcctcctgagtctgggattaaaggcgtgcgccaccacgccgggctgaagccatcctcttttatatattgagttctaagccatccaggaccgcatagtgagatcatgtctctaaaaattaaatatcgggggggggggggcgagacacgacacctacagaagccaggagcatcagatctggaactagagttacaggcagttgtaagctgcctggtgtggatgttgggtaccacatcctcacgtcttctgtaagggcatgatcttaatctgatgccagtagctctggcgcctgtcttacttcactgtttctgaacaactataattcatcattaaacatgtaggcatctttttctgattactaagtttagcatccatgttcgtcgttatagaaacagtttatttcaagatttttttttttctagataattgaggaaggtagactcagtttgttttgttcctttttggttattagttggccaagtggaagactgctgaggaagtggctgccctgatccgatctctgcctgtggaggaacagcctaaacagatcattgtcactcggaagggcatgctggatcctctggaggtgagaggtggacacagtagaaggaggtaggcccacgccctctgggctgtgtctctgacctcgggctttcctttaggtccacttactggatttccccaatattgtgatcaaaggatcggagctccagctgcccttccaggcttgtctcaaggtggagaagtttggggatctcatccttaaagccaccgagccccagatggtccttttcaacctctatgatgactggctcaagactatctcctcctacacggtaattagatgcttaggaagagggcctctctggggtgaatgtggagtcaggagaggagcctgtgtgcctcagggttctccagaagccacttgatgaggtcagtttaaaatctgaacctatgtatacaaagagcaggaactcttgcagaggggttggcaccttaagcaactggggacagtgaggctgtgaggctagggtaaaggaggagagagcctcacaaaactgatgtcatgctttgcacgtcttttcccaggctttctcccgtctcattctgattctgcgggctttgcatgtgaacaatgatagagcaaaggtgatcctgaagccagacaagactactgttacggaaccccaccacatctggcccacgctgactgacgaggaatggatcaaggtggaggtacagctcaaggatctgatcttggctgactacggcaagaaaaacaagtgagtaggggccaggtgtcccagtgcagcgaggggaagcctggctcaggacataggctctggagtttggaaacatttaggcttatcagtttctcagatattttacctgtgtttggtaatgcatgcctataatcccagcactcgggaggcagaggcaggtggatttctgagttcgaggccagcctggtctacaaagtgagttccaggacatccagggctacacagagaaaccctgtcttgaaaaaccaaaaaaaaaaaaaaaaaaagaaaaaaaagaaaaagaaaaataacatcttggaaacttaggaagaaacacagatctcagtgaaggcattgaagccattttgaacagattcactctctttttttgttccttctgtctacatttctcttgtgttttgagacaggatttcattctgtatcccaggctggccttaaagcttccaacaaccctcttaaccttgtagctgctgaa

SEQ ID NO: 20143 - DNA, 2206 bp, Mus musculus
caagctgagtttgatgctccagaacccctgtataggtgaaaggagagcctgtcccatagaattttcctctgaccttcacatacactcagtgccatacagaataataatacattaaaaacatttttgtttttgagacagggtttctctgtgtagccctggctgtcctggaactcgctttgtagaccaggcgggtctcgaactcagaaatccacctgcctctgcctcccaagtgctgggattaaaggtgtgtgacaccacgcccggctaaaaatatttttgtatgtaggagttttttctgtacaccatattcaggcagtacctgtagagagcaaaagaaggtcctaaaactggagttgcagacagttgtaggccaccatgtggcaggtcctctggaagagcaaccagtactcttaaccagtgagccatctctccagccccaacaataaaattttaaaaacttctggcattctgggttggtactaagaataccttctgatctcatctctagattgcaggatacctgtatggggtgagccctccagataaccctcaggtgaaggagatccgttgtattgtgatggtgccgcagtggggcacgcaccagactgtgcacctgcccagccagctgccccagcatgagtacctcaaggttagtggtggtggagcctgggagtgcactcactgtcgtgctaccctaatgggggacatttgtctgcagatgggttgaacatctctttattgctgtttgcctacaggagatggaacccttaggttggatccacactcagcccaatgaatccccccagctatcaccccaagatgtcaccactcatgccaaaatcatggctgacaacccatcttgggatggggagaagactattatcatcacgtgcaggttggtgtgggcctcttgggtggaaatattatagagcaggcattgcaggccaggacctggattggtggcttgagcgcttaccctgtccctgtcccccccaccccagcttcacaccaggctcctgcacactgacagcctacaagctgacacccagtgggtatgagtggggccggcagaacacagacaaaggcaacaaccccaaaggctacctaccctcgcactacgagagggttcagatgctcctgtctgaccgattcctcggcttcttcatggtccccgcccagtcctcctggaactacaactttatgggtacgtggttgtgtgtgcctaggaagtgtggggtagagacaggtgaccagcatgcttggtcatcttgtcatcttgaggtctggctgccttggaaacggtccaggggcccaggctgggtgaggcaggcagaaccttattaacttctgatgtttcccctcccattaggtgttcgacatgatcccaacatgaaatacgagctgcagctggcaaaccccaaggaattctaccatgaggtccacaggccctcccacttcctcaacttcgcccttctgcaggagggtgaggtctactctgcagacagagaggacctctatgcctagttacttccttctgcttcagatccccaaagcctggagcctcttgaacgccctccccagacaagctgctgacattcagcagtcagcccctttgcgttctgtgcttgtgttgttgatagattgtaatcctgaacaaaatgtaataaattttataaatagtgcttttgttttcttgctgttatgaggtcaaattctgggcataggcgtttgaggattggggactagcttgggcagttgacagcaaggtactgggccctgccttcagagccttgaggccttctccgctggaggcttagaggctccctagactcagggagctgagttggggctggcttattactttgagcatatttgctggtttctctgtaaaagtacttggagtctacctattttcaacatcacttcttggactgtgtggtcctcctatagctgtagtgcccggtctcgttcatttttgtaaactgtgtggttcctagtgggggaacatacttaagtgactgtccctgcagtccagtagaggctgtttgctgaccttcagtctttcacctcttggcagccaagtccaggggtggagcccgggtcaggcgctatggggagggcttgcctgaagtgaccacttacagctctagtcctcaactcttggatacctgcctggaagttggccgacctgtatccagtgaccttg

SEQ ID NO: 20144 - DNA, 1214 bp, Mus musculus
tcgctagcctagaatttgccgagtaaggttaggctggccaaccactgagagtcaagggtccacttttctctgtctcctccacttgacaccatgctacatgtccctcccctcccctctccttttctgttgagacacggtttctctgtagccctgactgtactggaacttactctgtaaaccagttggcctcaaactcagatagcctcccgcctctgcctcccgagtgctgggattgaagtatccacagcttcaaccctgcttcattatgcttatgtagtgtatgtgtgtgtgcacgcaggacataagtcaaggttagaggacggcttttgggaattggtactcacctgctaatatgagggtgaggatccaatttaggtcatcaggcttggtggcagatgccattacctgctaagccatcttgtccctccacccaccctccctttccacacagggtctcttgtagcctagactgccctcagactccttatctgtggatgactttggcctcctgatccgcctgcattcagctctaaagtacttacttagatagtaggcatctaccctccagtagaatgagaatcctaatctgggactgatgtcgtgtcaaggcacgggtgaaacccttgaaagtgtagacaggactgtgttttttgaggaatggcttctttattgaattctttgactggtctctggtttctacaaatactgaaaacatctgcattaaggggtctgggtgaaccagccacatcttgtcagttgccagagccttaaggcactcacagtgagctttggctttcttggtggtaaaatcccaaaggcgagtctgtgtctccaatctttggggaagcctacctgttctctttctttatacacacagagaatgtcactaacagcacggtcgggggcagcgcagagccggaacccgaggagttgagcctggtgaatggctggctcagctgtaaggcccaggatgagattctgaatttggccttcaccgtgggctccttcctgctcagtgccatcaccctgcctctgggcatcatcatggacaagtatggtccaaggaagctcaggctgctgggcaggtcagtgtgggatccgtgagggctgggtcagcataagtgatgccttgagctgcattccctgctgtagggaaccttggactgtggtagcagtgcaccatgggactccctaaattcccaccctggacagga

SEQ ID NO: 20145 - DNA, 1217 bp, Mus musculus
tctgttcaaacagtaatcacataaccccaacagtgagctagtggaagccctttgaggcttctcatggctcagtggtagagctcactcttaacatggctaagaccctaggttctgtttcccaagagagctattgtgtattttccaaaccatctctcagaacacttgtctgtgaaaaggtctagtggggtacgctgagttaaagtcagacctgccacttcacagcagggatccacagccctttccccatgttcctgagcattggagctgggggtagcaccaggtgtagtgtcaggaggacctctttgagttcaagcccagcctcctgtacatttcgagttccaggctagccgggactattcaatgagaccctgtccaaaaaaaaatccaaaaacctgtttgcaaggatgtggagaaaaattggaagttttaggcattgctgtctgagtggtggagctgagagctgtggaaacatggcacagtcccgtaatgccagcaccaaaaggcaaagggtgacatctttcagcatgagctgcaaccctgctcacacacaaggttgtgacatgctgagtggtgacaaatcatagccatgtgcgacatggtggctacttggctgaaatgtggattggctccaggcctgggtgtggatgtagctcagttggtagcatgtttgcctagcttacccaaagccctgggtttgaataaacctggcatggtagtgcagcacttggaaggtggtgacatcaggatcaaaagtccctcttggtcagatagtgagtttgatgccaacctggaatccaagaactctcatcttcggaaaaaagaatgacaaaatcagatggcagaccactggtctcacctatgtctcgatttgattctggtgctgcccagaggttaagatgcccctgtgaggaagagaagaggttgagggaatgtcccttcctgctagggatatagcctgcagacacaacctgtgcagttcccagcaacactgaggggcccacacttttgatcgtgatgctgtaagggtatatatcctaggattgagacactagaaaactaaatgtgggatggaaaagagccaacggtactggaagatgagagacgtccactggtagcagagaacaggtgtggcaagccagatgagctctccctaatcaagggccatcctgcgctgacttggcagacatgtcagtgtctttgaatcacggtgacagcct

SEQ ID NO: 20146 - DNA, 1419 bp, Mus musculus
tggttttacccgtcaaggacagtctcaccagaagcccctcctttgtggtcttggcgttcatcaaggatggattcccctgggactctacccttacgactctgccgggacctattcacagctggctccaaccttcattaaagccaaggtacaggccctcgggaccacctcctgtgctctgtcccctacacccacatccagaagttctgatcaaaacttgtacatagccagccagtggtgctggtgcacacctttaaccccagctctcccctgctcaaagctcagcgcttgtctccacagagcccagccacaggggctgttatagcctcaacactgttccctaggaagggcagtaaggtagttgtgggttttatggcagtgacagtgccttatctgtgaagctactaggcacaacctaaaattgagtaatatacatatatatatatatatatatatatatatatatagagagagagagagagagagagagagagagagagtgtattgactcagctgtgtggaaagagcacccaagggttacaggagggctggcttctcctcgggctgtagctcttccctggattgagggtcaagatgaggctgtgtccccatgctctaacctgccttgggccctagagtgtggacagagcctcctgagctgaggagagtccgtgtcctctatgaggaaggtatcatggctctgtcagcacagccaccaactatgccccttggtccctgcagtgagtcattcttccatggatagatccaagacaggaccacaggtcacttcctaaccttgactgttctctgaggggaggcatgtgggttagcagccactccacattctcagggaaagctcctgccatttcctcacgtgaaatggaggcttctgtgctctcacgaggtggctaaggggacctgtaggtaaatcgcaagaacagcagtgtgtgtagctcacagcagaaacttaacaccaggaccctggagaaaggcagacagcacgggagccaggcaccccccccccctcctatgacaggaccctgacacaaggggactgaccatgtcagactggtggccagataaagatggtactgacctcagtctcttcagaagtcgtcttacagagaagccttaagttccccccttgcctacttttctattttgtccttcacgtttttggtaagaggcttggccaaagagtcttgatgtcaaaagtcccagcagcccgtaccgcctttttgaatgactacttggccaggctgtgtgtgtgtgtgtgtgtgtgtgtgtgtgtgtgtgtgtgtgtgtgagagagagagagagagagagagagagagagagagagaggtgtgttggagagaggtgtgttctggtgtgtctgttgagagagatgtataagtgtgcctatgtgctgtaatactggga

SEQ ID NO: 20147 - DNA, 1208 bp, Mus musculus
tggttttctctcctggaccagggttttacctcaaactcagaggtctccctgcctcttctccgcccaccaagtactttctttttaaaaaaattttatttgacttttagttatgtgtatgcatacatgtctgtacacataggtgcaggtgcctagggtagccagaagacactgacttgtttggagctggagttataggcagctgcgagtgacctcttgtgggtgctgggcaccaagctctggtattctacaaggcagcatgtaagctttctctgcagcccaccgacttccgttcaggctggtacaagcttactgctggtttgaaggtcttgcgggccagctcacagttagctgtgaaattatttggattttggaatcagcaaatgtgtctggtttaatcctaagttctagtacacaaatgatttccaaagttatttgaaaatactggacaaaaaaattcttttactagcagagcaaggtcgtgtagaaaggggagttaggtggtacggccatttcttccgccttccgtgtctgcggccctcgcagaacttccagcagcgacatgttgggccagagtatccggaggttcacgacctccgtggtccgtcgcagccactatgaggagggtccggggaagaatttgccattttcagtggaaaacaagtggcggttgctggctatgatgaccgtgtactttggatctgggtttgccgcacctttctttatagtaagacaccagctacttaaaaaataaggatatttaattcatccctttaacagaatgaagaaagtttaagagatgatctgaaaattggattaaactcttgaactcttatactagaaaaaattgtaaataaactaatgacataaaaaaaaaaaaaaaattcttttactaatgttaaaaagggggttggctagagaggtggctcagaagttaagagtaattgctgcttttctagaagacccaagttcagttccctccaaaagcacacacatgcacatgcatgcacacaaaattgctataacttttaaaaaatattgatacacacacacacaccttttatcaaacgagagttactaaagatttctctggcatctgattctacaaaatttgaatgtaaatactacttgacctaacaactacactttctactacatttaccacacgtatagatgtaagtgcatcaaaagacgtgttctgcatctggaaa

SEQ ID NO: 20148 - DNA, 3008 bp, Mus musculus
gtcactgccgtgctaacgaggggactcctgggtttccatagaaacaaattatggacattgtttatttcaggggctggaagactttttacccaggtcatagggctaacttggggtgtcccttgttatgctgagaggaagttatctgctcaaagagcaccttctagcaccaagaggctaagaaaacctaggacctttattctctggctttcccatggttctttttcacccaggcctgtgtgcgtgctagctaggcaagcactatatccccagcccaacccatgttcttaagcagcttctggggatggaagaggaggattaagcagatgccagttttgtagtcagtgccagaaccttagtactctctctccaaggcccccaccaactggcacgcctcctcctgggatctctccacttgtcatgatttactgtgtgcttctggttgcccttgttgcttccttaataatttctatttcttttctagttttgcaagacagtggtcaacaggaaggcccagcagctccaccctcctgagtggcaggccatcttcggacgcagcctttctgtgctcattcttcaggcaactttcaatcccttactatagctatttctagatgccctttaacattgtgaacaaatagaccgtctggtattataaagcctgtgtgtgcgggagcctgatcctctaagatacatggtgtagctgctgtgtttacagctcatcctctctccactgtgctctgacccatttctgtatgccctccccttttatttccaagtgatggtctcagtcttcccaatgagctgccttttgtgatgtgattatttaagctcatttatttcagccttgggataaactgagctattttgcttcctgggcagatctttggcaatgctgaatattcacttggggagagaggaggagttaaaaatacagagacacctacccccagctcctcacaataggaatgtggcttcagacccctgacctctgctcctagtaacctcttgtttgcgtgctctaagcaccaagaaggcacccaaggcccagccagtctcagaaaatttagcaaataataaataacccctactcgagtcattgcatctctggttaatattcttagaaatcttggcttctcagccctcctgttgcccactctgtctggatctctctgtagagcctacaagaccccaccactgcccagctggagaactgtccagtatggcctgttgacaccattcagaccccacaggagcgctgtatgtccgtgctccttttcccttttgggctggtgctgccactcagcaataatcctctctgtgctttcttagacccctgtcctctgtgaggctggctaggatgcaagagtcctggtcttttcatgctgcacaaacaagcatgcaaaaagctttttatccctagcaaaacatgtaccttcctgtttctaatcactggacaagaatttgcagataaagaactcagctcatcctgccccacactgagttctgtcctggacaatcaaaagcaagccgtgactgtagcctggaacagttagcacagcaggctggggaagcccaggctccaagggagtggaagctgcaaagcactggcttttctagatgggcagaaactgaggatgcctttctggtgggagagtgggatagaattgtgtcacctgacatttcccaagccttcttcagtcagtcagcccagtgtgtagtgatccaagcccatgattgccagggtacctgttagagaccaaatctctactaggggagtgagaagtaggatggatcgttctccttgtttttgtctgtgttggccttactcatttctaagtgcaataaggcagtgtctcagggactgcacctgtgacatcctgactggatgcttccctgtggtcctcctggaataagggtagacagatttgggcccctcagcatggttagctctgaccttccttgaggttcttttaagaccaggagatgtctggttactgacacctttcaaggtattagtctcctcaccttgtagagtctttaggcatgcacttggggcatcttggtgattagcatatcagctgctagtagcatgggaaagttggagaagaggcattcctaatggaaatggaaaaaacataaatgttctcatataagctctgtattacctatcaaatcctatttgtgcttaaagatcttccttcagtaactaggttaaagttcagatgtgttatcttgagagaagttgatagtctacgcagatagtttacatgatatgagggtcaaaagatatttgtctccttcagcacttcataagatctatacatatcagtcacattggcctcaatcctggcctgctcttacctgccttgcgcccctgctgttgcccacatttgaaagcatccaaatgatccgaactagaatttcctgagaccagcctggatttagggctcctgcccacataaacacaaaggaggaatgtccctgtcttgttccatccccatgggtggtgttgctgctggacaagtgttggcttttaagtatcccctttttttacccacccccaaaattaactagcactcaagagggctggtgatgaaaggctcacctctggtgagaatccctgagagtgcgacatgcttcttcagactggctgcttccattacatttccagggtctgctttactcccagcgggagcagcagtgtctctgcacaaggcctgctgggctccagccttcttgtggagagacactggggagggacaggtcagggtcactgctgtgggcatgtgtgtatccttccacattcttcctttcagtcccccctggacctctgacgtccttgggttggttcttagtgctacttcttttacagactacactttatagaactgattagatttcctgtttatttaatgtgagtttgtgcctttttgtctcaatcttccaatacaggtatattggggggaaaaaagcagtctaataaaatcctagacagagttttttggagt

SEQ ID NO: 20149 - DNA, 1124 bp, Mus musculus
tcattttcagaggatcttccctgtgcacttttccttagactgatcagtcgtctcaaacataaggaaggggttggaggtatctcagagatataggatgctctcctaatgggcaccaggaaaaagaagggggcgggctgatggggtgtgatgtcaccaggacctttgaggaggagagctgggtttctaagctgaggtctctaacgggctgaaaggaagtagggtgaactccagtcccttctggtatgaagcaggggtgatgggaggtagtaggggacagaggggacatgcagggttcagtggcctcagcccagctctagccaacctcctatactcctttggttcatcaggtggccacccagttcaagatgagcctcctgcagctcgtggagatcctgaggtctaaggagcctgcctatatccggtgcatcaagccaaacgacgccaagcagccgggtaggtcctctggccccatgagttgtgaactgtgcctctgggatgggaacacttcctctcaggaagagcctaaggaccacctttgttactctccggtcactttgttactttgtttcctctcaggtcgctttgatgaggtgctcatccgacatcaggtgaagtacctgggactgatggagaatctgcgcgtgcgcagagctggctttgcctatcgtcgcaaatatgaggctttcctgcagaggtgggtgtggtcggcccaccagtgaatgaatgaactaggccagtgagcacttcctggaacctgtgagggaggagggacggttgtagctctagtttagagggtgcagagaccctcagctgctgtgagacccagaccaggaatcgttttatgctacaggcctaatgttagtcttggaaaagacaatgtaagtcatgtacacagccccaccctccctgaagcccctggtgagagacacaggaggagcacgttgacaggctgctaccagagatggtgtgatcagggctcagagaggaagttgtggctgtatagctattcagatgacagaacctgagccaaccagaatatgaatcccgtctctgctctaggaagataggaatacttcagtcctccatctctaaaatggggacctcaggcatgtgtagcatgtgcc

SEQ ID NO: 20150 - DNA, 1574 bp, Mus musculus
cgtgtgggaggttcactctggcaagcaggtattgccatggaaacagaaaagtcttcaggacctagactcctgtaggactgctaggggaccatctagcctgagcctgtaagcccctgcagctcctccacttactcctgggcttctccccctaggtggccccacggctgaattctcggtgatgaaggcttcagtggacccctcctgactcctgatgcttcgcttagtcccctcctcccctcccagttaccaaagactcaagcttccagacagggatccatggacaccctcaaaacccacctgcaaactcctgcctcctgctcgccccctctcgaggtgatcaggagccagggagctaccccatgagtgggccaggccgggccacagcaatagaaaagcagaggcctgagcaggccaggccagccctctgctgatgccaaatatctaagagaagggaattttaactgaggttttctctgagattttttgatgctttataggaaactatttttttaagaaagccattttcctaccctaaacacactggatgtgtttttccctgcctcgaacagggcaaggaatgtaactgaaagactgactgggctgggctggaaggtcctcttctctggccaagcctctcctcattcccttgtctgtctgtccatccacctgcaccttttgcagcccactatgacctccaccaaaaggctgaggccacctctgcctaccccatattcctgccttaagaatgtccttttaggggctggggtatagcccagtggtagaactggtgctaagcatgtgtgagaccctgggctcaatccccagcattaaaaaataaaaaataggtttttaatattttcaccccagtctgagggcatccctaaagtgggggaaaagtcttaagagtttggaagtcttcagagacagtgtctggtccaggctcctggaatctacagagctggagacagaggcacacagagggagggaagacttgcctagtagaagactgaagcaaatcctaaagtgaagcccgccctcagcacatctcactgcctttcccagggacagggaggcccataaggcaagggtcgcgtctcatgtatgcacctggctctctgaccagcaatcacccttgggagctaccgggtgggagggactcttctgcctgggtctatgccttaggatgacaacctccatacacatacatactttcgacccaatttaagaatggtagggtcttttattggccttgggtgcctctgtgacctgggagcctagggacagggctggccttggaggaactgcaggggcatcacctctttctgctgcttctctccaccccagaggtccttgggtttgcccagctccctctgtgccctctggggctctcagcccactgctgacacttctgcaatccagagaaacactaaataaagcaatatgtatttgccaacacagtcttcctgtgagtgtggaaaaggggccctagaaggtagacattcttaaggggcttggcactacagaagaaaggagacagacctacttaggagcaatagagagaaaccaagttaggt

SEQ ID NO: 20151 - DNA, 1123 bp, Mus musculus
ccactttaaattggtacttcttggccaggttttttgtttttgtttttaaagatttcttttatttgacatgtatgaatgttttgcctgtttgtatatatcaggtcagaactggagttatgggtggttgtgggttctgggaactgaatctgggtcctctgcaagagcagctgctgagccatcatctcaccagcccaaagagagatgatttttaaggctgtctctggtaattagaggcatcagtgatttaaaatggttgaattgttttctcagttttgaaatactatacaaatcttgcctcccaaatttggggattaaatgtgtgtgctaccatacctagcctttttaagacaggatcctggtatgtagctcaggctggcctcacactagtgctgggagtagaggcctgcgttaccatattgttcgataaatctcaacttctaagagtagatcccaaagcttactttatgcttctgtagactacccagaacagtggtgttttctttacatgtagtctccattttctgatttagcctgatagataaggcttgagatgacttggatagtttcgtacttggagacctttttggaaggggggggtctcactgtgtacctctggctggtcagtaatttgttatgtagactaagcctgcctttgacttgtagagatcatctcactaccattgcctcctagggcaccgtgctcagtgggaacctgcttttcaggatacagatgagacagataagagtatgctgctgagaggctattggcctaactctgcatctctatttgggcccacattgatggtgccttttttttttccctatagtttatttataggggagggagttgagggagtagatcagagaaagggtgtgtatgtggggaagaagagtagaggccagccatgagcatgtggatagaactcggggaggggaatggagagagggggaaagagggtaaaagtgagaagagacaagagtgatggtgctttttgactcgttcatccctgtggtatttgagattatgaagagcaggctaaatcaggctgatctggatatcagctggccttgaacattatcttcctccttaaccttcaaatacttttttgatgtttttcttgtt

SEQ ID NO: 20152 - DNA, 3012 bp, Mus musculus
ggcaaacgaggtcacttcccattcacacatgtccgtctgctggatcaacagaatcccgatgaggacttcagctgagtatagctcgacagtttgctgacagatggaacaatctgtttccccccaattgccatctatacaattttcttacaggtgtcaaagcagtctagtttatataagcattctgttacctgggatcttttttaagactgaactactccattctcacttgtatttaccatattcagggtacgaaaccggagggcttatgtggttaacttctgagttggcagttttaggtggtagttgccgtgcctgtatgagaagacgtaaatacattgcctcctttcttttgggcaaaacagatcaacctgtggaaagctgatgggcaggaaaagaatgttactcactgctgaccctgatttcttcagaggttctgttttcatcctgaatccatactgtcaagtggcagcagactgttccccactcccatgacgtaatcatgcactgtgtgaatattacccagtggggttgcatttgcatttatggaccatgaccattgtatgactcattctgacatttcaaatcctgaggattctgagaacactactagaggcatttgtcttccttggatttttcttggattctttccttgttactctcctcccctgtacctataagtggcttgattcttaggataatgtatatcttcattccagatgagaagcaggatgtacagagcactttattcagtgcatagctttaagccagtattggattcactcagtggataaactcccagctctctgccttcccccaagggggcatcgtaggttcacactgctaccacagctcaagactcaccttactgatgggacagatctggcagggccatttttcctgattgctagtatcctaatgggatgctcaaagttctcagattctacttggagtggaaggaccaatcacttactgtatcctatagaaggtatcaagggccaaactttgccctctgcatcatgtgcaagttgtataaaaggcaggttagaattctatgcatttgggtaggattgatactttgaaaactattccagtcgtaaattacttatgtatcattttacatggtttaatagttggtgaagtatattacactataaattgccttcatttgggttctcctttgtccagatttagtttacaaccctttaaagtagagaatgatttatacgaggtcagatgctccagagactaggcctctgaggccacaaattatagggtttctttagactgtaacatgagactttcaggtgataaaggcacttgctggtctctggtgtaggtgaccaatagaaacaccttatactttgctttgaacctcattttagaaaaataatttaccttcttagttgtcttgtgtagattaatatgatgaatttgcattcattgaacatataccaaatcatgtgactgaagtgactagcacattgctgagcacgtgtgtagagattttgtacgaaagaatgagcagagtgcagaagcgtgttgtatggcccagggacgccagttggcatacattaccacaggcagatttaatgagttgatgctaatttaatacattttttacctcactgtagcttgataaaaacagtaatactcaactttagagatgttggcccagttctgagctcataataggtggtcagtgatactgaatggacaggtttgtagcacgtgacttactgcacctgactgcttgtttcacttttcagttagcatagattgtgtaaatccaaatgcacagtcaatcctgtttccctaagccttgtgtgatggtgaatgtctttagtcctagcccttgggagacaaaggcaagtggatctctgagttcaagaccaacctggtctacagagctacttccagaacagtcaggagttagaaagtgagaccttgtttcaaaaacaaaaacaaaaacaaaaaagaatctgttcctgaaattatggcatcgaaaacacttcttagaaaatcatcgtcacaactgatttgaatgctggtattttcttttgcctttgatgctggcttgtattgtctcttcactatatgtggtgggaatgggatctgcagctctccgtgaagcctacgaactcctcagtgattagttattcagagccattacgtgaactgtttggttggatttggctgggtgtagcagttattggacctcaagagatcaaaggacttcttacaaatatcttccaaaaatagcaagtgctataatcctagtcagatgcgtatgtacattgtcacagagcaaagtaaactgaaattggctgctatgttttatataatcacttctgcaagagcccatttttggatactaatatttgacatggttaattcttattaatttgttgaaaatgtttattaataatgcaaatagataattttaattttccacaagtaacatttcactattaatggtttgaaatgggtgataagcaaaccaatttgaaataaaatatgaacatgtgccattgtattataacactattcactttcttgacagttaaattttaaaaatgtttttttttttgtagcatgtattgtatatgtttatagtatatgtagtaaataaaagtatggccaaatgtttggcttggtgatcttttgagaaagtaatcttgaaatatttttcacaaaagtgagtttttgtgtttttaaggaatagaaggtatgtgtctcagctgttcattagtagttacgtaaactgttacatggtgggtatgctataagatctctagaaagtatgacactactgttaggaaacatgaaaatcatatatatggaatataaaggaagcacattgtgaacagagaacaccagacttgcctggaaatgggtctctgtgagtgtaagatggcagtgtgatagggaactctgcaaacttgagactgcattctctgttgtgagaatgctgctgtggatacgccattcatttctcctttttaatgtaagtag

SEQ ID NO: 20153 - DNA, 1208 bp, Mus musculus
ctgtttgagcgcttggtgctaaggttataggcaagagccactgttccatagcttatttaatttagactaggttccctggcatctcattgatggctttgccttctgagattgcaggcgtgcatatgcactcttcccctccccattgcttgacttgactcatttgatgattataaagttatttttaattggaaaggatatgtgctccagattaaacccagggcttttgtgttctggctgggccagacaggatcttcctctgtagctttggttggtcccatacttttgtagctcatagtggattttgaacttaaggcaatcttcctgcatcagcctcccacctctggatttctagccccctaattatctcttgttttctattagctttgcagggggaaaaagataaccatgaaagggatgggtcaacaaaacttgttaaatctatagtctccttttaccatttcctgcatagaaatggtggaatcaatgaagaaagtagcagggatggacgtggagctgacagttgaagaacgaaaccttttatctgttgcatataaaaatgtgattggagccagaagagcatcctggagaataatcagcagcattgaacagaaggaagaaaacaagggaggagaggacaaattaaagatgattcgggagtaccggcaaatggtgagattgttaactgttttgatacggtaccgtgttttgttttgttgagtatatatgggcattttgtcttacctatctctgtatcatgtgtgtgcctggtacccttgaaagccagaagaaggtgtcagatctctagtactggaaatagattacttctcaaatataggtggcattgagttaatttgcagttttagtaccattaatttctgtatctctgttaaaagtgattaacttacatagagaacaggtttattttgctcataggattgaagtaatattgaatctcttattgggcattttggatggcagtggcagggtacatacatgtctgatagcaaaactgcttttatgttgagccaggatagaagacatccaggatagaagacatccaagccaaagtagtgtccagaaacagtaacatttgtgacagaagtaacagggtgtcttttacctgaattgttgccttttatgttcatatttaatacctggtggagaaaggagacttgtttcttgtgagtatctggcaaaatcgcaggcct

SEQ ID NO: 20154 - DNA, 1168 bp, Mus musculus
gccagttttcagtccacattggaacatcagagcatacgttctaacaccaggaagaaatggttcaggatagatgaagttgccagtgagagtgggggcagagaaagcgacatccttcttcattcttgtcttaaatgagctgccgccagaaggggtagcccaggtttaggtgaatctcttaactccacacgatttgggatgggtttcccaccttaagttggctgcttgggatttagttattccaagtatagtcaagcagacaaccaagagtagccatcacagttggtaccttacaatgggaattaattcatgtaagtgcttggttagtctttaggtgaactgtggggggttgtgtatgctttaaagaagaggctttctatactcttaccagttttctatcaacttttaaggactaggtctaaggatttggagacatacatgctttaagacttggttcttcagatattatatttagaatataataaagacttttgaattgccaaagttaattggatgttttccctccctaggttgaaactgagctcaagttaatctgttgtgacattctggatgtactggacaaacacctcattccagcagctaacactggcgagtccaaggttttctattataaaatgtaggttctatactagaagggaaaatgtaagatttaaagttggctttagaaccataactttttaaatgtagattttcaacttttatttaaaaatagctgagaatttggagggttagttatcagaacttacagttttaattagttgaaaaaacaatactaatgaagaattaattgtatttgagattgtctgactgttgtgcaaagtacctgtacaaaatacacagcttttcattgttgagctgaccctcctttcccccacccattgtcctggaactcactaatggcagaccatgctagcctagaatttagagatctgccagcttcctgagtgagattaaggttgtcaggtttatttgagaagaggtctttatatttctgattggcctggaactctgtagattgggatcgtctcagatttggggtgatcttgtcaacttccaaagtgctaggattatatgttaccacaccctgcctgggtttttgattttgtggcttccttcttagctaaagtttcccattttacagtataatctt

SEQ ID NO: 20155 - DNA, 1055 bp, Mus musculus
tttaaaacaggaagtccgcccgggcagtggtggtgcatgcctttattcccagcgcttgggaggcagaggcaggtggatttctgagttcgaggccagcctgctctacagagtgagttccaggacagcccgggctacacagagaaacactgtcttgaaaaaaaccaaaaaaaaaaaaataataaaaataaaaataaaaaaaaagcaaagacaacaacagcaaaaagccaggaagtccttaagaaagaaggatttccaacctgatggatactgaattttgtaaaaaaatctatatcttaagtgttaactgtattttgttatgtactgcatggtagagaaaatttccatgctgtaaggactattttctaactgtgttttttgtctactattgtattgtaggaaaggggactaccacaggtatctggctgagtttgccacaggaaatgacaggaaggaggcagcagagaacagcctcgtggcttacaaagctgctagtgacattgcgatgacagaacttcctccaacgcaccccattcgtttaggtcttgctctcaacttttccgtattctactatgaaattcttaattcccccgaccgtgcctgcaggtaagtagtggacaaaatttctcattgtggagtgcaaacgttctagaggagggagctaccttctgttttcttgtaggttgtcacaggattctcttaacataaattttggggttgcttgctttgtttgaggcagggtcttggtactagatatctaacctagcctctcctctccacctcacctcgccttgtcttgtcttgcctagcctagcctaggcttgaatggattataaatgtttaccacctcaacatcctgggaatgcttttttttttgttttttgtttttcgagacagggtttctctgtatagccctggctgtcctggaactcactctgtagaccaggctggccttgaactcagaaatctgcctgcctctgcctcctgagtgctgggattaaaggtgtaggccacaccatgcctggcttcattttaccttttgtaaagtacattggtgt

SEQ ID NO: 20156 - DNA, 1957 bp, Mus musculus
gtacagtagcacatcttcctaaacaccatagaactctgtggagcttacattccctggaaggatagctgatgttgagcttgtgggtaaataactcccacctcaaggtccaaagcaaggtactgttggttcttgaagaggtgaggttattgagaaagaacattgaccctagaaacacaggaagagcattttaagagtagtatttgtatgtgctcttgaaagacttgtttaacagagacacttgattcctgagcctttaaattttttaattatatcgtcctataacacttgattatttcaggaccgtggttggtagctcttggtttaagcacctcagctgtgaggattagaagacctttttgcctgctgatgtttgctaacagttgtagtgaaactagggacccttagcttggaatgatatctttgtgaccatatgtgagcatatgacagtaactgtgccttattccttacaggtgaagagcagaataaagaagcgctgcaggatgtggaagatgagaatcagtgagacgaaataaaagccaacaagagaaaccatctctgactaccccttccccccctccccttggaagttccccattgtcactgagaaccaccaaatttgactttcacatttggtctcagaatttaggttcctgccctgttgtttttctttctttttcttttttttttttctcccctccccttttttaaaacaaacaaacaaacaaacagttttcagaagttcttaaggcaagagtgaatttctgtggattttactggtcccagctttaggttctttacgacactaacaggactgcatagaggctttttcagcattactgtattgtctccggccacactggcaagatcatcattagaaatggaaatgacatttgaaagccattagacttctaggtgatgcatctaagaaagattaatcacacaatagaggcatatgcgctgtcatttttcctttttttaattgttaaattgaattttataccaatgtttaaacttaaattgggtgttagcttgaggtgttttgggggagtttgttgtaatggttttgctgtaaactgtgtttggaactctgctgaagtgttgctgaaaagcatggtgctggtaacagttcaacaatccgtggctgctcattcttgccgactcctccccctctgaagcaggttagcattgaaggtggtatggaagcctgcatgcgtgttcaactctgttcctcctccctcctcctcggcctccctcctcccctccttcgctcgctcaacctcttttgttcagtacgtgtaacttgaagctaatttgtactactggatatctgactggagccgcaggtacagatctgtattgttcttactgaaacacagcatggaattaacattaaacttaaataaaacaaacctaaattaaaaatgccaaatatatcatgcctccatcctttatacttctaaaataaaatctctagtccagacatatttgacagtattgtttgtctgaatgtgaaatatcccccattttatcccataaatcatttgttttccaatgatgtgtatttggggggaagggaggattgcttgtaatctggtgttgaacaactaagtcagtaattgtcctgtctttcaaaccagttagcaacacaatatttatgtttaaatttatcattaaagtacaacagtcatttaacacaggtgtaactatggatcattttctaatgtgtaattttgacttctgcaattagataaggctcagtgtgtcgaaataatccttgattattagaagtagaattacacttctcactgtataagtcagcggcaagaacagtattggttgaatcccttgtcaatatcccccgttaacagaaacagctacaccatgtgcctaatttcttcagaagcaggtcatgtggtagtgtgagtgggtacttctgtctccttgagcaggtaaacgc

SEQ ID NO: 20157 - DNA, 1187 bp, Mus musculus
gggctggaagggataatggtccagtgagtaagagcacactacagtggacttgttcccagaactcagttgagacgttccccattgcctgtaactccagttctagcagagttgacacctggcctccacaagtaccagcaaacacgagtatatattcaggcaaaaaaattttttttaaatagtgaagctaaaaaaacccaaaacaagaaattctgacatgcaggtgagttcaaggtcagccaggtcagcatatgagttccaggacagacagggctacacatacaaaccctgtcttaaaaaagcaaaaacaatgaattagaaatatttaaaaacaaaaaaaccctttggccatccagccttagagcctgatgctgagttcatccttactgtgaagtaatacctaattctgatttgttgtgaggttgggtctcatattactcaggctggcctgggaattcagcccaggagggctttcaagttcctccatctcccgggtgctgggaggacaggtgtgtccttgaggacaaaacctggagcctatttactgagaagtgttgtaccaactgagcttttactctaagcctggccatacaggtgtcactgtcacaaagttggcttctccagaatggacttctgtgtagccagcaaacctaagtaataaacaatgactcttgtttttgttttccggagacagggtttttcttcttagccctggctgatctgaggccagttggctggcctcagcctcggaggtctgcctgcctctgtcttccaagtgcagagtattaagtgtttttcctgcgtgttactatgtctgtgcaacaggtatgtaagcaagtgttcctccctgaagaatctgatcccttcggactgaagttacaggcagttgtgagctgccatgtagttaaacagaagtcaggtcttgtgtaagaacaatagttctctaaactgcaacacatctccacccagtgcttcatgagcatatccaagtaaatttgatactgaaaaaacaaaacaacaacaaaaaaaacccaacctgtctagagcttcaggaagtacggatcaagagtcgaaggcccgcctgtaaccatgaggtcatggagaaatctgctaaagtcaagagggggcttttcagagttttagagctgctaaaagcaggaaaggctgtgaaggtgattagcccttgcaag

SEQ ID NO: 20158 - DNA, 1172 bp, Mus musculus
gcacttggcgaaactataaggcggaagtgcgcttcgagccacgccccaagcccgcgcgtttcctcagcaccaccatcgtctaccccaagtaccccaaaaccgtctacaccaccactctggattacaactgccacaagaagctgaggaggtttctgtccagtgtggagctcgaggccacggagttcctgggcagcgatgggctagccgatgaatgttgactcagctagcttgaggttggaccagctgttcatacactgccctggtccccagaccaccctggacaagctgggtagcattgctcttgcacatcaccccagccccagagggatctaacctggagatacctctaagcctagccgggggaagatgtatttaaaaaaaaaaaaatcactgcatcttataataatagagaaactcggcttccttaaaaatttttccagatagttaaaaaaaaaaaaagtgtgtgtgtgtgtgtgtgtgtgtgtgtgtgtgtgtgtattctggttggttgatgcagtttccccaaagtctcaagttgatgagaaaatagaggcagaacaaaaggacaatgataggacagtgatatctgggcaggtggaggtgagcttgtcctccattttctgatgaacaaagtaggaaagtctctggaatacagaaggtgcgttaagaaatttcagccatgcatatgtttattgctgggggcggggagggggagaagccagagttaacttgggtagactgtgatgcccatatgtgctcaatctgttctgggccagctttttttgtttgtttgtttctgcttctatttgtttttcctgttaacccaaactcttagatttatcaaaaatctttttcatgatattaggggagaaaaacaaaaacaaaaaaaaacacaaaaggagatgcctttaaaacaaactctgtgccttccgctgttgtcggttgggtaaacagctagcctggtccgaggcaccgcagccctgtggttccagagggttggtttcaggcccaggctctggtgcagcccgagcatgcttggcgtctggttaacgtctccccgggcttgtgtaactctgctcataggtatttggggttttgaaatacttttccttttttttttttcatgcaaaatgcagcagagagctcttttttagaagaacggcattctgaaa

SEQ ID NO: 20159 - DNA, 1099 bp, Mus musculus
tgagagatgatctgtgctacaccacatgctacagcacacagctaacaaacagcactggtccacaggacatgctctggctcgtctggcttctctctcctgttttcaagctttctgtggctagaacattcaacacagaaatgggtctgtcttagcaggaagcactggcctacaggacacctggagagcagacgtctgtgtccattttgtatgaaagggcagtgtcagtgtgggattacccagtaagctgctatagaagccatcactccaccttgtccctggagtttcaggccagtttttggtgtgtgtggacacagaaaactggtcatgagaggccatgctaaaaaggagaaatggtgtaggtaactgctttcaagaagctcacaagtttgatactggtctttatacaaagcctgcaaagatgctggcctctgctggcctcctgacctactcaagtgcttcaggttctcagccctgcctcctgcccattgtcagtgagcccttctgactagaagtcagcaggcatgagaattcattgttgatatacagataaggacaagggctgtctagtaaacggtaaaagacatacccacgatgtctttcctagtattggaaaatgacacagtttcaagaaccaagttgtcacttgcttctgacccagtatgggtgttgccgggtgttgccctgagtgggtgggaaggggagaacagtgcttcacctcccaaaactctttcccaggcccaaggaaggctcctcaggcttgctggtaaaactactgcagtggggctttgacaggatccaagttatcaccagaaaacaaaacaaaaagtgcttttgcaaaaggctggttagaaggaggaggtaatggggatttttaaaaaagaagaccaaaaatccagaggtttatcaacatccagaaggcagagactaccccaggcatgatttggtccttggaatactgaggcagctagtgtgagtgcctgacccctgagagtaattaaccatcctttttggctttggcagtgtcaaagagccgggccgccttcttgcacagcagtgagaaccagtagagctggggagagatgaggacggcattggccat

SEQ ID NO: 20160 - DNA, 1211 bp, Mus musculus
tcatggtgtcttgcctcaaagaaactgtctggaccaagttctccacacccaaagaagagaagcagtttctggagctggtaagctgcctgacgaatcctgtgaagccacaggggattccagtggctgctcttctggagccagatgaggtgctcaaggagtttgtcctgcctttcttgatgttggacatggaggaggtgggcctgagtctgaagctcttcatccagaccctcgaagccaatgcaggcctggaagagtattggctgcagacctgctccccattccctctgctcttcagcctgtgccagctcctggacagcttcagcaagttctggcagctcccccgggagaagcgctacctcacgctggacagcaaggatcttgtgacccacattctggaactcctctgtgagatcgtgctagccaacacagaaaccttctccccagacacctgggccaagtccctgtcctggctccaccgcaaattagaccagctagattggactgtgggcctgagactaaagaacttctttgaaggccacttcaagtgtgaggtgccagctaccctttttgatatctgtaagctctctgaggcccagtggacctcacaggtccacgaagggtatgggcctggcacgggccttctcgcctggatggagtgctgttcagtctccagcagtatctctgaccagatgctttcccttctggtgatggatgtgggcaatcctgaggaggtcagactgtttagcaagggctttctggtggccctggtacaagtcatgccttggtgtagcccccaggaatggcagtaccttcagcagctgaccaggaagctattggagaaacagcttcttcatgtcccttacagtctagagtatattcagtttgttcccctgctcaacctgaagccttttgcccaggaacttcagctctctgttctttctttgagagtgttccagtttctctgcagccagagctgttgtaactggcttcctttggacggttggagccatgtggtcaaactcctctgtaacagtctgaccagtgtcctggatgcagtcaggttgatgcagtcggtgggtccctgggcccaaggacaagaaggggatcttactcaggaaaccctgtttgtctatacccagatgttctgtcatgttctgcatatcatggccatgctccctcaggaggtctgtgaacccctctacgtgctggcc

SEQ ID NO: 20161 - DNA, 1907 bp, Mus musculus
gtattccaccactgggctgcattcattttgtttggtctcagattaagctcatgagcattgagggttcctgttctgccaaggactcggtagttgcacagtccctggtctttcatcagcggccaggctctctggccagctgtgcaaatcaccaagcaactgtttgctgctcaccagctctcctgtgagtgaacaacattctccacacagatggactgctttagcattaatgcacggtggagaatgcagacttggagtaacatttgtccctctgtttcctaggcaatggaagcagacaaaagtgacgagtggtttgctacgaggaataaaccaaaggcttcgggttagtggaagacacatgaagagcacttacatctccagtccagtctgttatcagtctggcacttatgttttgagaaatgctcccaccacttggctgtgtcctgcataggaggtctgtgcagtagtttcactcttcaaagctctgtttttagaaatgaaatatttttatcactcttggtagaggcaaattcctactgtgtgtaattgtattaaatttggtaacaaatttattgtccagactgagacaactatatggaatattactcttggttggggctggaggaaaatctgattacctgttaatcatgtagatactattgaaacaaatgtcagaatgaagccaaaccagctaggcatgggggtgcacgcctttaatcccagcacttgggatacagagacaggagagtgtctgagttagaggccagccaggactatagagaccctgtctcaaaacaaacaaacaaacaaaaaaaaaacaaaagctaaatctactgcttagagtactcatttccaggacccgatggtaagattctgttctgttatcttaccacagaaggtcttgacgtttagaaacttttcccattggctttctgagacagtctcacctgatagctctgggtaacctattaattcaccatgtaactcaaggcagcttttaacttcgtaactggaactcggtaggctagattggtctcaaactcaagagaccaacccacccctgcctcttgctgagatcaaatgcacaggatactgtacccagtggttttgaatgtttgtcctgcttcagcctccagtgttaggactatagatgtgggccactattccatgtggtggattgaacatggttggcccatggaaagtggcactattggaggtgtggccttattggaggaggtgtagcattgttagaggaactgtgtcactgtggagatctcttatatgtgctcaagtctggacaatgtagcagtctcctcctggctggttttcgattaagatgtcaaacttttggctccttcagtaccaagtccacttgcataatgccatgtttccaaccataatgataatggactgaccttctgaaactgtaagctaggcccaattaaatgccattttaagagttgctgtggggctggcgagatggctcagcaggtaagagcacccgactgctcttccaaaggtccttagttcaaatcccagcaaccacgtggtggctcacaaccatccgtaacaagatctgactccctcttctggtgtgtctgaagacagctacggtgtacttacatgtaataaataaataaatctgaaaagaaccttaaaaaaaaaaaaaaaaagagttgctgtgatcatggtgtctcttcacagcagtagaactcctaaatcagacaccaggcttgatgtttcaaagaattttttggctatgtatggacagaatccaactcctagctggcacatcatcacccctcacctaaactctgtaaaaaccccttgctttagcctgcatgtgtgacttcactgatcctgtgaggtcagtgaacccacccaagagctgcctcctaataaacctgcct

SEQ ID NO: 20162 - DNA, 1118 bp, Mus musculus
tgagcaacagtatactgagtaatagtaatactgagcaacagtatactgagtaatagtaatactgagcttagtatctatggcaagttggaaactttcaaggtccctggaatttgcatgcttgctgactgctaggcaaagaaactattttgaggttagactatagaactgtctttaggattccttctcctacattgtttttaaaagtaagtctttccttaaataagtgccaaatggttggtgtgtgcagtgtgtggtgggggtgtccacagctgctgtcagcaccttcggaggtcatctcatccttatttggaatgtatgggactgaaagggactggccaccatgtgttctaaagcaggaagcagagtttcctgcgctcactgagttcacttgctctcattcttttaggccttatgatgggaagtggagtaaaacaatggtgggatttgggcccgaggatgatcattttgttgcagaattgacatacaattatggcatcggagactacaagcttggcaatgacttcatggtaaatatcactctgtctcagtggatctggatgaggctgagacagttataatagtccaagttagaaacaaagttggctttaaaaaatgaaagattgtatgtgtatgaaggttctgcctgtatatatgtatgtgcaccacatgtgtgcagtatctgaagaggtcaggagagggtgacgatccccttgaactgcagttagggatggttatgagctgcccgtgtggtcctctgcaagaatatctaatacttttaactattgagttatttctccagtcctaaacaactttttaaaatttgaagttgaaaatagtggttagtgaggaggtgacattggaggaggttcagaggagggaagggacctagggcagcatgtggatagaggggaattctaggtggaggaaagagcctgtgtgcaggcccagaccctgacttgagagttgtaaggaatcgctgattagagaggtaaggtaaaggtggtaggagaggggtaagaagtgacatgatagctgggtatggtggcacatgaccaaaatcccagcatttagaaggctgaggcaggggggttatgagttcttgagcccaaccagtgcta

SEQ ID NO: 20163 - DNA, 1176 bp, Mus musculus
tgagacctatagccctggaaagtctagaacttattatatagaccagggtggccttgagcatagagacccaccagcctctgcttccagagtgtaggaccaaggtgtgcaccaccatgcctagctctacaggcatctttttgaggattctgtatgaaaagaggtgagaccctgagtccactttgcagcataacctgctgctggaagtgccagcttgcttaccagctccttgctgctagtcatggttttagtggcacttgattaaatgctgtgatttaggggaacagcaagatgacccagggagtaaaagcacttgctgtccaagcctggtgacctgagttcaatccctggaatccatataaaggagaaaaccaactccacagagtctttctctgacctccacacacagcaatgatctaaggggctgccgaaatggcccagcatctaactgatatttcagagatcccagttgaattcccagggctcatgtttggtggatcatgttgggtggctacctttaatttcatctccaagtgatctgctccttctggcctcagatatgtatactcagatgtgcataaacagacacattcatatacatgtaattaaaaataaaaaaatgtacatttcatttttagatcaggaagcatcactgggtgttgtgagccgaggaccttacaaggtcagggtgcggaggctctaatcatactgcctcagcactgagctctcagatccccagggataggctggatccttaaaccccaaaatacagtgaggtcagagaagaccaaagcaggtagttgcacctgctgagtaaccatgggaaggagtgggggtgctggagtttggaatccgttctaaacactacttctgcaaccacaaacaattggtttagagttgaggttccaagcaagtatttgtgctacatcttcaagcccagcagctccaatgactaggttcctgtcggactcctttgctgcttattctaggaaggctgaacaagttgctgcacgtacaacagaaaccatagagccaacccttccctttccattccttcagctctagtaaaactcttgggagaatcaactgggcaagctgcccatgtaccaggtggcagatgccagggctttggggtgctttaggagagattactggtagtgtttggttttgttggctgtg

SEQ ID NO: 20164 - DNA, 1203 bp, Mus musculus
aagacattcctgtcagtgagtgagttgttatttgaaattacatactggccagcaagctgaacatccagagaactttctagatgcagagtgtcaagttgtccttaagtaatagtgagagaggaattcatttaacgccgagtggaagaaatcgttgctggtcaccagggacgaggcattaggaagctgataggttgcactgtcggtaatttctccatttcctttccatgtcggcggaagcatgcggagtatcaacgaggctgcctggcacttctcttccttcccttattaagttaagtgattgcttttctctgtctgactgataagctaaaactgtggctgaccctgcaaggtgcttttaagaagaaattaagcaccacccccatcgtgtgctttcttttgcttgtcatttgtccattttagaaagccaggccaccgctgcctgttattgtctccctgcctttcccagtctcagtgacaggattttgacgagaactcttgcccatgctgaacaagtactctcccacaaagcccagccaatgcccagcccagttcaacatctccaggtctcctccaagctgcttttcccaccagaaccctcactgtacctccctttccccaaaactgaccattctcgctctcaggtgagccaaacttgggcttgcctccagcctggcctctcagcttctgacggcagtttgcattctcccacagcaattagtttgcccggcacggcagccctgggtttcccatggctttcctgaaagctcgtgtgtgtgtgtgtgtgtgtgtgtgtgtgtgtgtgtgtgtgtgtgtgtgtgtgtgtgtgtgtgaccagtgacagcattgctgcccaggctgcagtttccattgctgatctgtattcacctaccatggggacggctccatgaaaggtgtaagttaggtagtcaagctttgaagaaaaggagagactgatatgtagcatttggaggtcaggaggatgtgtgtgaataatcaggacaggcgggtccataacattgtctcagaagcctggcgaggttccagtgtctgttggccaaaggtatagcatttgaaactggataagaaaggcaatcactgggaacccagttcactgaacccaattccgattccataccgtactggtgtgagcgaggtgaggtagagggctcaacggttccgtgactgcagatttcagcctaaagt

SEQ ID NO: 20165 - DNA, 1220 bp, Mus musculus
ttttttgttttttttttttttgtctgagatctgccattttttagctgtgtgtcctgtgtaggatactctgcatctctgtgccgtaggtccctcattgtaaaattgggataatagcacctgcctcataggattgttgtagggtctgtatgatatgcatactcaataagcgctgctatcatttattaacaaattgttacaacattgagtaatctgttattacaaacctgttgtgagggctttcttcttcctctttttctttctttctctttttttttggttttggttttggtttttcaagacaaggtttctctgtgtaaccctggctgtcttggaactccctcagtagaccagactagccttgaactcaacagaggtctgcctgcctctgcctccccagtggccaccacctggtggttcctttcttaagatcccactgtagcccagaagggtcttgaactcaccacagggttgaaaaggactttgaagttctcacccttcagtcttggcctcctggtgctgggattacaggcatgcatacctggtcctgtctatgtggtacaagcgagaaacgtgaggcttacagcatgctaggcaagcaccccaccaactgctctatcatctttgatgtatttttaagacttttctgaactaccacttatactgtgtgtcttagtcagggtttctattcctgcacaaacatcatgaccaagaagcaagttggggaggaaagagtttattcagcttacatttccgcattgctgttcatcactaaaggaagtcaggactggaactcaagcaggtcagaaagcaggagctgatgcagaggccatggagggatgttccttgctggcttgctcagcctgctttcttatagaaccaagattaccagcccagagatggtcccacccacaaggggcctttcccccttgatcactaattgagaaaatgccttacagttgtatctcatggaggcatttcctcaatggaagctcctttttctgtgataactccagctgtgtcaagttgacacaaaactagccaatacactgtgtaagggggtacagtgaaggagttcagggaactgccctgtaagagctaactaaccagggaagagaaagatttggttgactgcaactgcataagcaaatgagggtctgataacactggagagacccaaagacactcgcctgccctacacctgccgccacagggactgatcc

SEQ ID NO: 20166 - DNA, 1831 bp, Mus musculus
ggcacagacagattgctttgttctttcatttctcccagcactcactttctgcctgagtccggtccaaggacttttactttgcgcttcgtaactactgccagcttctcctctcctggccctgctcccagattgcagcctccctgcagtgtctgcccttgccacctcccagcctgctgcatgcatgtgcagcatgggcttttgctccatcaccgcaaagttctgcaggggccctgggcagtgctggcctgtctgacgtgctgcccttggcctccttgctctccacgtgtggaagcgcatctgctttccttgctgtctgtgcaaatgctgaacaaggagacagacacacactaatcctcagcacagagctggaaagctcatttctggaatgttctatttgagaattgccatttctggggtttgtctgttctatctcctgcctaccagtcggtatcttcagctgtttcttctattgctggattttctgttccttttccccagtgttctgttttctttgagtgtaatgacccacaagtgtcctgccattaagagaggtcaggattgcacctgaagggtatggtgggcacccaggctgtgaaggaacaagatgagtggagcggccagcagtggcaagtcaagggaagccagtcttcagtgtaaggacccgcagtggctatcctagtgtacattctcctggagagcagcttctgtggctgaatcaggtgtccaggtgaagacaggccctgtcctggaacctggaatcacacatacctcgtggtacttttgccttagattttacactctcaacagccaagcactgccacggggcagccacaatgccatgcgtgctccagagcctaggaacagcagacagaacccagttggaatgcttctaccctggcttctaaattcaggcctgtgggtaatcccaagtatacaggaaattgtggggtaggctgtctctcgtgaattgagttctgctggggctatagagcatcgggtcggcagctgtcattcccagctctgtgacctactgcttggtactaaaaaggagttttcttccaaaagcactgtttccagtctgagtaggagctaccagcctgtggcaatcagcagggaaagacaggtgctcctgtcataggggcttgagctaccacagctaccacacagctttctggatcttctatatggcagttcattcttggccctcaggattggggagaccagctctcattgtgtgtgctcagggctaagtctaaacaagggtttgctggcccccaagctgttgtttgttaggtgaggttaagtagggctcttctggtcctgtgcatacctattgcctttgacagaacggtacagtttgtttatgcaggaggatggcatgccaacttcccagctgcctactagcagtttaacaaggagccttgctgtctcagacaggtgaaagaaaatgtcatgcatgtaaagatcacatctgccactaccttggcactcaggtgctggtatgtgcattcttgcttccaaaggattgacagtaacaaattctcaaagcttgactggagctggctgcagctcaaaacagtgcctcctgcctctttagagcggggctgctcggcagcagtgactgcagccccagcttgcttaagcagtgtaacagcagggaagcgggaggagctgagaactattagaagttcctattatttataaattccacccaaagtggacagagtcaggtgccagacctgatctgaagtgcaccaaggaagtatctggtggttctcctgagatgggggccttgcagcccagcaccccctcactgccagcagggcaccag

SEQ ID NO: 20167 - DNA, 1199 bp, Mus musculus
gaccaggctggtcttgaactcacagagatctgcccacctctgcttcctgactactgggattaaaagtacatacgtttggtgaagcagggtctcttaatgaccctgcaggtcgctgattggctggatgggattgccctattccccagggatcctcctatttctgctccccattgctaggattatatgtgcatgacaccgcggtttgctttccaagtggatgctggagatctgaactcaagttcttgtccttatgcagcaactactttatcctctgagccgtctctccagtccctacataaagacttactttggctcaaggtttcagagcttcagtccattgactacatgtttctggatctatggtgacattacgtgtagttttaggctaaccacctttgctctgggactggccgtgctaccagctcccacacggcttcccttttgctctgcctgcctttgctcggggaagtgggctgcactaccagcccccacctagcttcccttgaatccttggacaaaagacacacacagtttgttcctttgcaacttgcttttttggcacaattgctgggctctagtcccaactagcccctgtcaaacattcctgaccacccgcctgtagtagtagccacaggctccccttgagacctcacatggttgctgtgttcttctccctccaaagcatggcagaaactccctctctctttccttgtgtttcctttacctcctggtacctggaagtcccgcccataccttccacccagcaattggtccctggctttctttactgacagatcaaggaccaattgaggaacaggaccttagcatcagaactacccccttcatggtgaggcagagtacatggtaagaaaatatggcaaggagaagctgaaatgagatacacccctggtaacctacctcctgatttttaccatctcccaaaagccatcaagttatgagtccatcagtggagtactctggtcttgaatttagagccctcatggtccattcacctcccagaagcctgtcaaccagcaaccaagcaaaccttcattcagtacatgagtctgagagagacttcattctatggaaggttgttgcccctgttttaagggtgaaaggggaactgtcattgtgattagtcactgctggtaacttctgccttggggcaccctctataagaggcatgcagggtctcc

SEQ ID NO: 20168 - DNA, 1228 bp, Mus musculus
cagagaacccatgtttgagtcccagcatttgcatggtggctcacaattgtctgtaatcccatgtctaggggatccaattactctcttctggccttcacagggaccaggcatgcatgtggtacacagaagacatacacataccaaggaactgaaaactcccttctcccgtgcgtacactgcagccctgtacctccacagtagccatgataggcaaaattttggtcctcaaagaggatcctaattcctgacccttgtatataaaacaaagagactttgaagatgagagtaagctagggactttggtgtgtgtgtgtgtgtgtgtgtgtgtgtgtgtgtgtgtgtgtgtgttggtcagggtgatataaccccttgctactgattttgaatatgaagaaagaaatgactagccaagaaatgtgagtggtgtctggaagccagagaatgcaagaaaatgatgagttctccattctccagaaaggaatttgtccctgccagcacctccatgttagtgtgtaagccctaggctggcctgggctacagagtaagaactgcttcaggtttccaaggtacagaaccataagacaattgagttggtgctattttaggtgtcattcactatagtgacttcgtgggctaggggtttgttttcctcccattggggggactggctcagcaggaacttcagtttcaaatcctcccattgtcttacagtgggaagatgtttgccctcttgcttgtgacatcacagtttgaaatgtgtgtatgctgagttacctgtgtgtgcttgggatttagggagggaaggaaacaaaggattcaagctaatcattggctgggtgtccctgtaagaatggagccaagtatggtggtttgtgttcattatcctagcatcaggattggtctcagtgagttctagacctggctgggctacagaataaaaaacccgttttaaaactaaattaaaaaaaaagtgttcatggaagtcctacctgacaactcctaattggtcacactttgggaccaagctgggtcatatgaccatctttagctgcaagggagtctgatcgggaatcttggctcttcagctcactgtgaaggatgttaggggaagggaactgtgaatggcttttggaaaacagctcagtattggctccaccatccttccccgaactttgcacgcttgtaagttagggcatctatataactgtaagtcaccctctccattcct

SEQ ID NO: 20169 - DNA, 1620 bp, Mus musculus
tgggccgccccaggacgctgcactcagatgaacagatggaattatgttgcttgtcttctttttgagagtagatcagttctttcaaggaacgctagctgtagcggctggggtccgaccttccattgtggtgccgtggagggaagagtgcccctccctttccagttctgccctgtacaggacccccttggaacctcggttttgtgtcattcaatatttttttcaagttcgtttctcccattttgggcttaccccagttatcaggcttaggcatggacagggagggatgtcttgtcagagcctgaggtaagatttgtgaccccagtgaactgttgctccccggccacagtttttaacagaatacctttttttaaaaatatatatttttagtaacagttcaaaacttcccacttcacaaaaagatatgaaaaacgggaataaacagcagaaaattccaagtgtatttgtctgccctggcttgagaggtctcactgtttagctccggctggccttgagttcctgcctcggcttcctgagaccctgggactactatctgatgtataccaccaaccctggctccaaacagtaccttcctccagtttcccatgtgtcccagtgactcagtgaagatgtgcagtccattgctactgagatctacaaacccataccaaaggatgctctgcctcctgccctgctcacctctgcttgttcccttccccttgataccagcattgacatttattgagaatgtctttctgcttcttcctggtactcggatcagaaatggggacaggtgaggaagagccactctagaggacacttttgtactgggacccagatagctgagggcctccatgctggtcgtggataagtgagtgggaagcacagtcattgctctgccgccctgtgagccctgtggagttgaggcaccttggccttcaccacatcactgtcctgtcttactgctgatgacctcggcctgagggggtggcttctaagaatgggtctagcctttccgacttctctttatcttctgtctttaaccaggtaagagttttgggattcattgagcttttgaacttgttatattaagtggttgggatgcatggccatacccaggtcatctgtggcagatgcggcagaggaaacaaacctacccaaatgacggattgtgcactgtccttattttaccgtagagggcatcctttggcctgatctccaaaaggatgcagcatttcccactgcgggccccaaactcattcatccccctgagtgcccatatgtccctttctcagagagaatgggggacgagaaacaaggtcttaacgtgataatctggtgagaagctgggaaagttgagtcatgtcttaaagaatgtgtttttttttttttcaatctgatctaaaatcttagtaccaaaatatttgtaccacaccctagtagctctcagtgatgggaaatcagttcttaccatactttattccgatggaagacgattgacgcctggtgaaaaatgccaatacagattttttttaatctattcttttccaaatgcactttctaattttttgcttttaaaatagagacttggaaccaatattattgtatttttacttaattttt

SEQ ID NO: 20170 - DNA, 1206 bp, Mus musculus
gtgagatgttggtaggccagcttcatgtttgaggtggtctgaaatggagagtgctgtagaaagggcgtctcgtctctgcgtcagctgtgagcgctgcgtcagctgtaccgccgccaacacatcagaatggcagaccttgccattgctttattattttttccactgggctaatatttgcttgtacatgataaaattgcatttccactgacaggcaatcagcacctgtcattgcccctagcggtcccatatcatgtgaagcttaatactaggaagtgagggaggggacttggttctcagtgaggtctgctcatgagccactgcaaggagacagtgagagggtggctctctggccttcctgtctgtcagtgtggtgccgcctggagcaagggtagcactgtgacctgatgtcacagtattcgtgccctgtgcagatctatcccttcctcctctgttggcgccttccttcctactcctaggccgccggataaccactgagggggcctgggactcctgcctgcacctctctattactttgggcagtgacagaattgtgaatgtttctcaaggttagccacttctcagcatctgtaaattggtaacttgtcgtactgaactagcggatagtgtaaagactccaacatctgtgctctgctggtcctaccctggagtggcctccagcacattgtccaggggcagtgagtggatattagagctcttcaccattctatggtgggggacggtgcctctgggccaccttgatacacttactgcgcatggacagactgacacccagtctgggactgactgacagttttgacatcctgctgttgaagtgttagtacattctaggtatgaaaggcatttgatatatttttcttaattatggggtttatttttctaaatatgggttaatcagcttgttgactgggcatgcccttaaaaggaatttaaatttccctctatagaccttaaagaatcagggaagttcatttgttaaattctccttgagagaacagaacttctcttccctgacacttctattatctttgattttttcaaagggccttgattggcatttgtgcctcagctagactttatgggactttggttgttatatagtgggcatatatgaaatctgaagtatcgtaaataaagttatttatttaaatatacagccagtcttttctactggtttgatgacatgtt

SEQ ID NO: 20171 - DNA, 3812 bp, Mus musculus
gcatcatttggtgcatctgctccatcaagtctaatagacacaaagatggcttccaccggctgcggcagcatcatgatgaatatgaagatgaaattcgcatgatgtcaactggctctaagaagtccctcctaagccatgagttccaggatgaaacggacacagaggaggaaacattatattctagcaaacattgaaaagcacggtttgcatatctccctgtatacgtaccaggcaaaatgacagctcttcttgggagacactgcagtaagaagagaaattccttccgccttcaaagagctttgggaagttagcctgctaaattcatactctctgaatgtcacaggcagttttgaacttcccttccttaaagtactcttaaccttttctttaaaaaaaaaaatctgatttctatttatgcagcagaagatggggcagccgctttgtttccctttttaatttaagacgagctgttcagagactctatagagacagcataaagccagctagtagatgttgtatcttgcacatcagacatttactagtggctttagttttgttctctttaatttaaaggccaaaagaatccagaaacattaaggcagggacaccagtcagactctgacacaaagctttaaaaactcgagatttttctccatctactgaggagttctcttctccagttagcacatagctggggtttctcttattcaggtctaatggaggctggatgatgcttagacagatctgacattaggaaatggaataaacgggcttccgtatttgtctttctacctgtttccaagctgggtcagaactggtgggctgtgctctcagcaggattttactacctctcttgtaaggtttagcaaagttctagatatctttatcctagaggagaactcactggctttgctgtggaggcaccagatgtcccatgagtagaggtgaaagggagatggagcagaagcaaggacgttgtctgtcttatcctggtaaaacccataggtgctgctgctttatctgtgaagcactcattctcctaggaacgcctgttccttagcatttcctacatttcagcccttctgtgtgtacacctgcggtttccatatgacccacacctaaaggttctgaattctactgctgaaactatctaaaagtggaagaaacctacttgcacattctcagtacacttggatccaaaatgtctacacttgatgctccggcccaagcctctgccctgtgatggcatactgtcatggagatagtgtggcctctgcacatgggcctccaaaagtaattcagtcctttgtcctatgattcccttgacagtctttttctttttctttttttgatcaagcaattatgttaaaattttcagttctaagctttgaaatatggttctttccatgtaaaaaagtcaactgaaggactgccatgtgatagaacattggtatgaaggtgtcctcttcaatgccagtcaggcctaaaagattggtattttattgtgtctgtctgaatgctgttcagtggaatgatgctttttgtaagtgtgagtcttaccaatgacgtaacagtttaatatctttgaatgtttttaatggccaagttgctgctgaacttgtactaaatcaggggatcacaaaactagctcttacctttccaaactgcattcatgccattgatgtatcagttaccctaaggctcgactcacccaggtcactcggccacacttggtgaggaatgcacccaagtggctgtgtaaagttgagatcttagttgatggaaggggctaatgagatcttggtatctgttagtcacggtcacttaggtggcttaggtccagctgttctggaatctgtcctggtatcagcatatctgaaccttgcttctctgcatgaacagaacaattagtggcagttaatgctaatgaagagcacatgactccatctcttccggtaatgctttgttttcctaaatgatgtgtattgttctttttcagctttatttttaaaagtgccaagtcagaaaaccaacaagtggcctgtggctgggccctgcttgggacaaatagaaaccaagttcatgtgacagccttcacgttactagagttcactaaaggacactttccacttgttctctggcattaagtgtgtctttaacagttcatctcagcagtcacaggccatgccttggtcacaggccatgccttcttaagtatgtatgaaacctttttagagatgaatatatagaatagttctcttagtcatcttttcctgaaatgaaacccaaattctgctctaagttttgagtctttaatgaacttctaatgtactgaggcggaaaatccggcctccccagcctgccacctatgaacatgaatgtacaagacccatgactacaagactttgttcttagcccagccttctttgggttgtgaaaccgatctaatcctacactacttcggcagccgaggacactgaagccatatggggtgggcagtgcatgcctccagtgtttctcctggagaccttccatttcttcagagtcctggactcaagtgtcacagtattagaagtttgccccagtctgagatgtgcctttcctttgctcacaaggtgttgctttgtcctcgtgatgagtttataagccttcttccctccctgctccttaacaaaaacaatgtgatggatcggtgatgttcacagttctccctgtgcggatgcacttgtgctcatagggtttggtaagatgatctcaagtaactacaccagctttggtgtagcagtgaactccgggtggtgctgggatctgatccaacgaaaaacacttgccattctcaccgaagagaactggctttgggactctgttaactttggggaaggaaacattgtatgtttggctcagtgtgcttggctggttaatctttggtaatttcacctgaatgagatttgatgaattaatgaatattgaatttaaaactaattatgagtgaaaaataaaagggtcgtgcttatgtctgaacttgctgcgtttctgagctagcaccagctcaccaggaaccacggctcaatactccattcatttccacctgtccccagcattagaggtttctcgtctgccagactcacactcctgccaggtttggtccctgctctctcagaagcttcttggctatgaacatgtcatggtgtcctgcagtgtgggtctctggtggattgttttatggtagcacccaagtatcttcccccaatttttcctttattgttattactaaaattccactaatggttaaatattcaatgatctttctgtctagcaacttgttgataactttaggtttctgatttgttttaattatagcagttttggggggtgaatagggccttcgattaatgtcaattgaatttgggtttctagttttttgaagaaaaccctcccaaatacacttttcctttatacttggaaaaacttcattaatagttccacttaactctcaaagtattatcctggttgattttgaaatttgaaaataggttaccattttgaggcaattagataaaaattatgtaaatacagacaattacaatgtttataaatagtgtaacatgaatgtactagctacattcaatgctgcagattttttggaagtgtgacatggtatttttttatgttccttttacctctttttttttccaaatacttccccagatccaaaattctccacaacaatttctatgacataacacccatttgtcttaagtgcttcagtcttttgttttatttcatgcactgtgccttcaaaatgaaaactt

SEQ ID NO: 20172 - DNA, 1213 bp, Mus musculus
aatttgactagaatcttggccgcagtgataggagaggaagaaaaagacaagatctagacaggaaatctgggcaacagaagacagagcctcagctaaaaaggctcagctgtgtcagattgaagttacttatttgagatacatccttcaaggtgggaaacagtggctaaagaaaaccagaaaaaagattgtaactcagatccccaccccaactacaccaaggctagtaagaaaattcttgggtaccgctggtttctgcaggctttggatacctgggttggtgactttagctgcccgttgtaccccctaaccaaggaaggggaagtgtttgtgtggaccccagatcaccagaaagcctttaaagaaatgaaaaaggccctactgattgccagcctttgcctgacctaaccaagcctttcactctttatgtgaaagagaatcaggggttgccagaagagtccttactcagactttgggactttaaaaaaggccaatggcttatctatccaagaagttagaccctgttgccaggaggtgtttttcttgcctgaaagctattgctgccatagctctgcatgtcaaggatgctgataagctcagtctgggacagcaaataactgtagtggaaccccacactcttgaaagcattatctgaaagccccctgactgatggatgacgaccaatgctcctgtgacacattatcagagctttttttgttgactgaatgagtgaccttcgctcccgttgctgttctcaagctaccctactgcctgagacttcacctactcatcactgcgctgacattctggcagaagaaactggtactcgaaatgatctgaaggaacagatcagccttggcctgagagtttgagctggtacatggatggcagtagccttgcagttgaaggactgaaatggccaatgtgatagccaagaagatcctagaagaaatcttcccaaggtaatggacctgcctttgttgcccaggtaaatcagtgactggcaaagatactagagatcggttagaagttacattgtgcatacaggctccaaagttcaggacaggttaaaaaaaatgaatagaattctaaaagagaccttgacaaaactaaccaaagagactggtgcagacttggtgctccttccccttgccctatttagaactagaaatactccctcttgattcagtcttactctttttaggatcctctatgg

SEQ ID NO: 20173 - DNA, 1868 bp, Mus musculus
ccgctgaccatagtggcatgcccttagcagcttagctggttgctctcagagtgtgagagtgggggctgctgtgcttgccgtactgccctagagacaagtcctcccgggtgactatgagccagacgctcggcactgacctgctggtgtacaagtcagcaccacagaggcagctgcgcgtgggccagcacggggcctgcagagctgtagggcctctctgaacccccttttcatagttggtgaaaacacagcagtgtctatcctgtctgcttcacagattgctagtaaactggagctcaaatgagctcagtgggcagtgctgggaacttggtgtttttgtagaagacctttttacactagcaagaagttctcctttctgcctgccctctgaactcaggagtgtttcttctctcctttccaggctacctgtgcatgaccgatgagtggttctcggagtacgtctacgaggtggtggtggacaagaagcatgtcccggaagaggtgctggctgtgttagagcaggagcccattgtcctgccggcatgggaccccatgggggctttggctgagtgagtgcgtggactgcctcctgctctcctcctcccatgggatcggatggagctgccaaggacagacccggggactgaaaccaaagttacatggatggctgttcccacaggatacagtcagactcttgggtttccagtctcctccaggaacctctttgagaaaaatgctttatgctgaaacaaaatattcataaaggaaaaaataaaggggaaggatcggggcatccgttgctctcctcatctctgacggctcaggatctcgtagcattttaattggatgtcattgtcctctgtcacagtctttgtgtttgtagtaagacggagtaagatgagcagctgaggtgtacggagaacaaacagtcctgggctccttgttcctagagtagattaggggagggttagctaggatttgaactctcaacgctgcatgctgcctcacaggtcactgtccttcctacctggcagtcgctgaattcaacttctgccgagttgtttcctgtgacaggaaaggggaggttgatcggtctgagatgactccttctcttcctggtctgagctgtggggctccctcgggccaggttaaacggggttcgagaaaaccttgtcaggggctcagctgtaatcacgagggtcacccactgagtgctttaatgtctgtgtgcgttggggttgggcggggagaggcagcgatgctcgttctttctgataactgatggtgctgagaagctttggaataaaaccctttgctaactgagagcaagccggcgtgtctggtctgtaaacgttctctaagaaggggttattgggctacagtgggagcagccgagctgctgagactctttcttcaaagtgaagaaaaggaggagagctcgggttctcctcctcagctgctctgcaggcctcgatcgcggcctgagcctgcccacccccacctcccaaagggctcctgcagaagccttcatgccccaactctgggggccctgtccctgccatccagcactgtctcacccagaccccgtgtctctaaggtggggactctggtggtctcgccgtagaaggggctaagtcgcatgggtggacggacggcatcgctgttttgttgaacactgagcagagctcctagttagcatttacagcagggtttgtgcccaggtgttcctggctccccagaattcttctcagagcttgcaggggatgttgtttgtcatgacacttcccaaggtcaaattagataaagactcaagccttagccagtgtgttcacagtatttaaggcatcctataccagggtgataatccatct

SEQ ID NO: 20174 - DNA, 1172 bp, Mus musculus
tagtgataattgaatattttaaaaaatagttataggccatttgtgtttcttcttttgaaaactgtctaatttattagcccatttgttgattggcagttttattttcttgctaattaacttctggtcttttaaaattatgggtattagtcccttgtcagaaataaagctgcttggtaaagatgccctgccattctgtgggttgtgtgctctgcttgagatacaactttaccccagagagaatggctgccatccagaaatctaacaacaaatgttagaaccgccatgggagataggaaccttactcagtgttgataggagtacaaattaatacataaatgaaaatcagtttggaagttcatcaaaaattaaaaattgaactcccatatgacctagctgttccattcctgccatatacctaacaaactccatgtcttaccatagatatacttaaacacatttattgctgttctgtttaatagcaagggaatagaaccaaccaaccaagatgtctgtcaatagatagtcaaaatggtgtgtgtgtgattaaatattgtttagctcttgaagaaaactgaaatcacaaaattacagaaaaatgggtggatttattatgtataatattatgtaatggtcacccaaccttagaaagagaaaaacttcacattctcccacatttgtggatcctacatgtatatatgtaaacagctgtgtggctgtgctacaacatttagagagagaggaatattaggtgataaggaaggatggagtgttgtcaaaaagacatgcaaatcatgaaataggtttataaagccaattgttcttctatttctgtagtgtataagtgcataaaaatgtaactggtagagtgttaaaccccaatgaagttccatggcttcagaatggctactctaactgtataggttcactaagatgtgtagcgtttgagacagagtaagagtttatgtagcttgcttgcttgcttgcttttttattagacgttttcttcatttacatttcaaatgctatcccctttcctactttcctctctgaaaatctcctataccctctcctctccccctgctccccaacccacccactcccacttcctggccctggaattcctctatactggggcatagaatctctgcaagaccaagggcttctcctcccat

SEQ ID NO: 20175 - DNA, 3301 bp, Mus musculus
gtcctggtgcggagcgtcacgtctcgtgcgtgttcattcagccacgatgcctgaggaaacccagacccaagaccaaccaatggaggaggaggaggtcgagacctttgcctttcaggcagaaattgcccagttaatgtccttaatcatcaataccttctactcgaacaaagagatctttctgagggagctcatctccaattcatcggacgctctggataaaatcccttacgagagcctgacggaccccagtaaactggactcggggaaagagctgcacatcaatctcattcccagcaaataggaccgaaccctgaccattgtggataccgggattggaatgaccaaggccgacttgatcaataaccttggcaccattgccaagtcgggcaccaaagccttcatggaggctttgcaggctggtgcagatatctctatgattggccagtttggtgttggtttttactctgcctatttggttgctgagaaagtgactgtcatcacgaagcataacgacgatgagcagtatgcctgggagtcctcagctgggggatccttcacagtgaggactgacacaggtgaaccaatgggtcgtggaacaaaggttatcttgcatctgaaagaagaccaaactgagtatttggaggaaaggagaataaaggagatcgtgaagaagcattctcagttcattggctatcccattactctctttgtggagaaggaacgagataaggaagtcagtgatgatgaggctgaagaaaaggaagagaaagaggaagataaagaaaaagaagaaaaggagtctgatgataaacctgaaatagaagatgttggctctgatgaagaagaggaggagaagaaggatggtgacaagaagaaaaagaagaagataaaggaaaagtatattgatcaagaagaactcaacaaaacaaagccgatttggacgagaaatcctgatgacatcactaatgaggaatatggagagttctacaagagcttaactaacgattgggaagaacacttggcagtaaagcatttttctgttgaaggacaattagaattccgggcccttctttttgtcccaagacgcgctccttttgatctgtttgaaaacagaaagaaaaagaacaacatcaagttgtatgttcgcagagtttttatcatggataactgtgaggaattaatccctgagtatctgaatttcattagaggggtagtggattctgaggatctccctctaaatatttcccgtgaaatgctgcaacaaagtaaaattctgaaagttatcagaaagaatttggtcaagaaatgcttagaactatttactgaactagcagaagataaagagaactacaaaaagttttatgagcagttctcaaaaaatataaagcttggaattcacgaggactctcagaatcggaagaagcttttcttttttttttttttttatttatttattatatgtaagtacactgtagctgtcttcagacactccagaagagggagtcagatcatgttacagatggttgtgagccaccatgtggttgctgggatttgaacttcagaccttcggaagagcagtcgggtgctcttacccactgagccatttcaccagccccggaagaagctttcagagctgttgcggtactacacatctgcttctagggacgagatggtttctctgaaggactactgcaccagaatgaaggaaaaccagaagcacatctattttatcacaggtgagaccaaggaccaggttgctaactccgcctttgtggaacgtctccgaaagcatggcttagaagtaatttatatgattgagcccattgatgagtattgtgtgcaacagctgaaggaatttgagggcaagaccttggtgtctgttaccaaagaaggactggaacttccagaagatgaagaggaaaagaagaaacaggaagagaaaaagacaaaatttgagaacctctgcaaaattatgaaagatattttggagaagaaggttgaaaaggtggttgtgtcaaaccgactggtgacatccccgtgctgtattgtcacaagcacatatgggtggacagcaaacatggagagaatcatgaaagctcaagccctcagagacaactcaacaatgggttacatggcagcaaagaaacacctggagataaatcctgatcactccattattgaaaccttaaggcaaaaggcagaggctgacaagaatgacaaatcagtgaaggatctggtcatcttgctgtatgaaactgcactcctatcttctggcttcagtctggaagatccccatacccatgctaacaggatctacaggatgatcaagcttggtctaggtattgatgaggatgatcctactgtggatgacaccagtgctgctgtaactgaagaaatgcctcccctggaaggagatgacgacacatcacgcatggaagaagtagactaagtcaccagaactatgtgtttgcttaccttcattccttctgataatatattttccatgatttttgtttatttttgttaacatttaaaacatctgtgtggcatgaaaactaaggggaagataaaatttctacatgtgatactgtgatactataggtttaactcaagaggttgatagagcgtttgttataagacgtaacgtaacctactgttcatgttagctctggtctgaagtgtttagctgttgagctggattccttaggagaccaaattaagatggcttaaattacatcttaaaattttcatttcctgtagttaattctgcatgtattagtcttagaagtaaacacaagttaaaacaacctgacaggaattccccaagtggcttgttttccaaagtcccgagaacaaccctaagtttcctaggtcttgtaactcagcaaggcttgtgaatggaaataacagtgcccaatcacattctgctttaaaagataaatgcagaggagataaaaaaaaaaaaaaaaaaaaaaaagaatgagttgcaggtggccaaagagatggctaaaagtgcttgctgctggtacatagctttaattccagctctcaggaggcaggtggatctctgagttcaaggccagcctggtttacagcctggtttcaggtgatctgacatccctttctggcctgcaaggggacccacacacaaacacagcatgcatttgcaaagacatgtagacatatatataaataaaaataaactgggctggagagatggctcatcggtaaagagcactgactgttcttccagaggtcctgagttcaattcctagcaaccacatggtggctcacaaccatc

SEQ ID NO: 20176 - DNA, 1851 bp, Mus musculus
cgctaacttcggctaaagagtgagaccctgtctcaaaaaaagtagcatccatatgccacacattatcaccaatggacactgctctctcatctcccggtgtagaatatcctcactgcatctctcttagcagagactgagaaaatgcccaatgagggcactggggagcggacggacaaatgacaacacctgattttgttttcaagatttaaagaatggaagaaaccatcttctgctgtcttccttcttaattgtatttcctatcatttaactcacctgcctaggtatcttccacacagggtctataattcagctatgccaaagggtcttgccagccctccaaaccccaacacttgggttgttcctaagtcatgcttatggctaaggcaggtgcataataagctgttgaagactttttactttagcatttgataatttcagattgtctgtctgtttttttttctgttcatggaaagcctggacctaactctgacgaactgttaagcaggaaaaatcttgacctcctgactagtgcttaacctcttgctcaatgcctctgtctctctttactgtttttaagaccacagtagtcctgtcagtaggtctggaaaagtgtataagcatacatgtgggcacttagacagaggagctgacatttcagtgcctgggctaacagccccaggagcaggcaggattggagctacagcctgactacattgagctatacctgactatagggagaggaccctagccctttgttgtttttggaaacagcagcagtgggtggtgtgggcacagtatagtagggagcacttcatctcagtttagttgcctcttgttcttcttaacatattcgttcctgttcctgcatccccacctcttcagcatcttagtgttttcctgctctgtacctttgtctctactgctatttccttctttctcattctgagaactaccaagagctccagggacagcctggggacacatcccaggttccaaggtctcctgctcctgagcccagatgtttcctctgaaggcctctgacagtggctcacaggattctgcacctgaggttctctttcagtaaagatgttctgtgggagttgggttttttggggttttttgtttttgtttttttctaagcattatgcaaaaagttttaagggcattttaaagaaaagccagtttttcttggcttttccaaacaactatctgtggatactttgtttactttgtgagtattaaaatatgcatcatcgctgtggcctcaggctctgaagccatggttgtcctatgagtcctcccccagagaaaatgccatattattgtcagcccttgtggataagtgggtcagctgtggagccgatctccttctgtgtcctgcactcgcatccagcagtcctttcttagtgctgatgtgtctccatagtgatggtcgtgatggtgaatggatagtatgattgtttggtttttgatttttaacggtagacaaggtgacattccgttgtttcagcaccaatccaacttaaaagatcatagacttcgttatcccttccaaactaaaagatcaagcatgtattggacataagtgtatgcgttgcctcgactcatctggcacccatattaggaaaaggcctgccaccaaagcaggaagctgcacgctgctctccccagggctttgggacctcttgatgccatgaagagctattgcaaggtgcttctgtactgctccagcctgaagcagaggtgactaggcctgcttctgctaggaagagaaccagcctcatctcagtgccccagagatctaggacaggatttctaaactggaatcacctcttaccaacttgaagagcc

SEQ ID NO: 20177 - DNA, 1173 bp, Mus musculus
ggggagagcggcgagcggcggcggggcggcgcggggcggcgcggggcggcgcggggcggagggcgcccgagggcgagcgggcgggcgggcacggcgggttccgggccagccccgggggcggacggttggccgcgcgcgcggagcctcgccggggccttgcgggagccgggccgggccgcagggccgccgccgccgcccgggcccgccgcccgcgccccccacgctggcccagagggctgcggccgcgtcgccgctgaggatgtcccggaaggggccgcgagcggaggtgtgtgcggactgcagcgctccgggtaagcggcgggatcgggtcgggggcgggaccgcgccgcaggccgccgccgggcgggcgccgaggcctggcgggagcgctgtgccgggccggagggcggggcgggggccactgcggagcggcgtccttggcgggagggccggctgcggggggcgctgtgcgttggagccggtgaacgggagggaaccgcctcccacctccatcgcggcatccagacggaagcgccagcctggtgtggcaggagggctgtggcggaggccggcaggctgtgggaggtgggcgctaggatggtttgtgtcatccctgccacccccgcgtcttgcacctgctgctcacatggcccgcgtgcccgccggagcggtggagggcaaggggcctggatacgagctcctagggagcacctgacaggggcagctactcttaagactccccgcccctgcttcccaaggctggggctgcttagagggcccggtgttcaggaacaatctaagcatgggcatcttccccggaagcatctccaggcctgctggtgtctgggaacatctagactcagcttttcctgttccgggtaggcctgttggagaaggtgtgctaggtattggttcagtctagacgccgatccctcctggtctctagctcattggataggagaaagcggtgaggttgcttatgctcccctggtccagctgactcctgagcgaactggacttacacactgcttcctccctactaaccagcagagtgagtcggtctgagctgctgtgaaagcccccttggcttgctgaggaagtgaagggagggcaacaactcaccaggctggtcccttctctgggaggacacagccgttgatgggactcagcagc

SEQ ID NO: 20178 - DNA, 1212 bp, Mus musculus
ctctgtcctattcttccctttgctgccttcctggattagatctcggcaaaagtgcatgtctcagaggtacccacacctgttggctgcaggctgtgacgtttgggtgggggaggcttggtgtgtgacctcggggtctcatctccctgagccccctgcatgcttgggaggcaaccagcaggggccaggccatccctcatgtctggcctctctcctccctcctgtccacagcttggatctgtctgaattggccaaagctgccaagaagaagctgcaagcggtgagtctgcctcaacaagctgggactacttagagcagccctctcctgtcttgccagcctcgcccctcccatcacctccccatgcccttttctttgatcctggttctgccctccaagtggtgtgtccagagcctcatctctgagaggaggaaatggcctggactctcttccttgcacagtaaaccttacctatccctcagttctaaaatgagctgggtaacacgggtcatgagacttgcccacatcacacggcatcctgacagaccctgggtcccctctctgcctccagctcagcaaccggctttttgaggaacttgccatggatgtgtatgatgaggtggatcggagagaaaatgatgctggtgagtggtaagagatctgctgtaaagagcaaggacacagtagacgtaagggacctgctgcaaagagcaaggacccagggaaccaggggaacggggtactgctctgagacctactggggtgagtccctgccatcccccactgggcagtaggagccagctgcctccctacccaccaggcactggagctcatgttgctctggctgcctcccattctggctgtctccccagccatgctccacccctaccctgcatcactccttcctggccacagccagattccaacccaaactctgggtctggcctggtgggccctgccttgttgtgttgtcagtgggcggggctcacagggtgtggcccagcttttgtgttcgtggagaccctgcttcctgtgacactgacccagtcagaatagagggcctggggggctctgctcagtgcttctctgagggcccattcaccatgggtgatctgctccctgcccttcccccacagtgtggctagctacccaaaatcatagcaccctggtgacggagcgcagtgctgtgcccttcctgccagtcaaccctgaatact

SEQ ID NO: 20179 - DNA, 2299 bp, Mus musculus
gagctggagagcttagatggagacctcgaccccgggctccccagcaccgaagacgtcatcctaaagacagagcaggtcaccaagaacattcaggaactattgcgggcagcccaggagttcaaacatgacaggtagggtgggcacaagttcttgttaacttctgagaattggggtggagggtattgctagggtcctctggctctggaactcagaaatctctcatctaactaccccctttccctgacagctttgtaccctgttcagaaaagatacatttggctgtgactgagatggcttctctcttcccaaaggtacaggggccaccgagaagcagagtgggagggccttggggtggggcagatgcaggtaagctgactgctgcctgggtggaggtgagcacagtgagccagtcagaagcccggcttaaagtccagagctcatcggctcctcactcctccctccagaggccagccctggagcctgtgcgcagttcactgcggctgctcaacgccagcgcctaccggcttcagagcgagtgccggaagacagtgcctccagagccgggcgcccctgtggacttccagctgctgactcagcaggtgatccagtgcgcctatgacatcgccaaggctgccaagcagctggtcaccatcaccacccgagagaagaaacagtgaccactttccctgcccttacccacaccctgggacctcactggccatgggagctgggccactccagacactaacccacccccaacagagccactggcacaagtgcccttagtgccaccgttttcctctggcatccaggtgccctggtgccctcccctcaagccccaaggacagaaatgtgaggtgacaggagcctctgtctcccacattccataccctccctctgtacatagcatccctgccctgctgatgtgcaggagcctcaaggaacccctcccagctcttcacctgccttccaggcgccctcagcaaagggtgtggggcagggacactccagatggggcagctccgcctactgcaccctatccccatgagccagtttagccctggggggccgagcaggggcaccccctcctttgtacattatctctggatgtctctgtcctgtagccagcagcccccccttgctgctctttcatgccaaacggcccctgcctagagcacaggccccaacttgtgtgccagggtccccagcagcaaacactggaaagtcttttcctctccctaccccttaattttaactctgtggtaactgagtgtccctgcgttcctgcaactgaggatgtgagcggcagtgccgttccagagacctggcccacctggagctctgaggagcaggggaaccagagtagtggaaccagcattggaagtcagcccctctccccccacctgggacagggagactgtcagggtcaccagctgtggtccagttgctgcccctacttgtatccctgtcctataaacttaaaaggaaaaccacttccctccatctctccccgacccctatgggaagtgtgctggccaggcagaggacagcacctgcgcctggggctggctccccagggtccccaactcagctggtggctgtggaactgagcccctccccctagcctctgcaaggccagcacccacatcactacctgcacctacagtgacccacccctgaaggcctggggatctggctgcagctgggaaggccggcaaggcactgacagcacccaccagctcttctccccaaccaccttccctagcctgtggtggtgggtagctgtcagaacgtgtgtcatgtacatttgtatcaaaaataaataagtgaccatgtgccacttctgatgtctagaggttggaggtggggcttagcccagtattcagttcttggttcaggtcattgttgctgctacttaccatgtcctctctctgcaatccttgcaaggctgaggcaggacagcaagcttaaggttgggggtgaagagtcaggagtgtgtgttgggcggagagacttgcagaaaggtgagctagtgagaggagtgccagcacctgagcaccaagccacttgattagaaaccggcctgatgtgattcgaatagccctgggccactgactagagacctgaaaggagtgtgactgagggcaagagacaatctcccaacgactccgaattctactaaaataatttaattagaaacaggaatttgtatcaggaaagctacaaggctactcttccaggaaccaggtgaagcctccagggcctctcggcccgccgccagggggcgcccgcggacggc

SEQ ID NO: 20180 - DNA, 1186 bp, Mus musculus
ggtagtgtggggtcaggggttctgttgagtagctagatgcatggcaagtaactccaagttactctgaaggtagcaaaaacaacctatatcccaatgctggtgtgatttggattctcttgtctttcttggctctgattttcttctgcaagagatggcattctgtcccttcagctttgagaagtgagtgaatagtgcttggattgcaaaacactatatcatgttagcaatgtgtgctttaatgtgttgtaaacagttcaatttttaatgaatgctctttttaaaaattgtttatatttattttatgggtatgaattttgcctgtggggtattttttgttgttgttgtttttaactttggttagttttggttttttgatttttttttttaagatagcacttcttcatgtagcattgactgtcttggaactcactctacatacactacagtagacctggctggccttgaactcacagacatccacttgcctttgcctccagagtactgggattaaaaccctgtgccactgcctgaggcctgtgtgtttgtatattcagaagagatggatctggagatataggttgtgagctgtcatttgagtactgggaactgagcctctggaagaggagcaaaagctcttaaccactgagctgtgtctccagccctccacctctctctgacacagggtctcatgtagcccaaactggtttcaaccttcttctatagccaagaatggtcttatttattttattttatttttactgtgttcctttttttttttttaagatttatttatcattatatgtaagtacactgtagtgtatgtaagacactccagaagagggtgtcagatctcattaccaccatgtggttgctgggattgagctcttaaccgctgagccatctctccagccccctccaagaatggccttaaagctctgatcttcctgcccgttgaagggctaggattacagcaggtacaccaccggacgtggctgtctctttgttgcatgtaatccttctgtttaagttatttcattgttcagaatccatctgactttatgacttatttatttttagttatgtttacaatccacctgttatggctgatttcccctgtctgacttaagacttgcattatcttcatctgatttcttgattcgtttttctccagcatcacaggccctca

SEQ ID NO: 20181 - DNA, 1209 bp, Mus musculus
tccccttcttccaatctggaggagattttcaactggaagcgttcatacaccaggtgaggctcgcctggggaagccccttggacttgtgagaaagacccccacaaggtatcacagcgagggggggcctctgtgttcctctcttgctaactggagaaagaacttcaccctgtgctacgctaccttgagaagagttgccctggctctaagaaacattgctcagccctgggccactatttcctgtcatcaaagtcccaagcagaatagcagccctggcgaagtccatagaccagagagaaattccggctcacccagctgggagtccaggcaggatgaacttgtgagagtcaatgggtggttctgtcccacataaatatcatcttggtgactctatgtctcgagctggagccacttggtacagaaaggacaggatgtttgtgtctctgtcccatttccctcatgtgctctgcggttgtggttctgctctgacttgcatatcagcagctggggaagcaggctgtcggttgcctagctctcccctggctgagaagccagcagaggcaggagatgctgggctgaggccagggtggaaagagctagcaagggtagaatgtgtgtgtctgtccctgcctctcatggtagatggaagctctgatctaggccaggctctcaagctggtacagctcatctcctaaaagttattttaggagtaagaggtgctattgcccagggtctaagggttccgttaggtcatggttgtggtagccaggttaggccagatacacacacaccttcagttctgatcctggagcttcctccagagagccgcagccagccagatgcgttcctcctgaagggtgggctttctcacagtcagtgggaagggtggcaaccgtcacaatagtctctgatcagttttcttctggtactagcttcttctccctttccacagccaggcaagaggtctgggagcggagcggagaaaacccgagggcttagtgaaggcaatccaactatttctgagtgtctcacattacagctttgtctgctcaattattcaaaagacagaagcctgttttccgaatctgttcactcagccactaagtgggcatttggttttgaggaagaatgctgaaggcccaagaacaataagccatagctcccaggatgacttacatggcttgggttggattaagcctttacaaatcattt

SEQ ID NO: 20182 - DNA, 4390 bp, Mus musculus
aactactaccagaaacacattttatcacccattgtgagagtcacttggtcaaatttagttaatgagtccattttgatcataatgcactcacactagtgtgtttgaatactgactgtctgtctgtccagtaaggatttctgcccccatctaattgtgtggcacccagtttttccatgtaggtcattatacctggatgataacatcaatttagttacaatgcatgtagtttgcacaatgattaaaatgaataggtttgtgtttatagcctataataactctagttgaatcatgtacacagcaggagtggtcacagtaaaaactggtagcaggaaaatttgaaagggtttgaaatgccctgaaatcagggcaagtacttaatggggaaaaaaaagcagaaatgtcaacatttgaccaaattaacactacctcctccccagttgttggtattcattcattatatgtgtgtttaacaggatgagagcatggcgagcttgtagcacaccagaggttgtagacctatatctggtatccagaacctgacagggaaacagttcttggtcccccttttttggggtcagcattttaaaaatgcaaagcctatatgttgagacattgtattcctaattagattctctgtcctttgcacataactttcttttaaacttagttctaaccctaaatcttgacatcagaaagtgtttgcactgtataaacaatgttagctgaaagcatgtttattttttaaggagctcctgctcttctgcacatttccatatctagagatggatagtcctgaacttgacgtcacacccacaggtgaaacagcccgaagtcaaggccttgctagtaaatggagctttgtacatagtcattgtgatgtcttggctgcccggacaccacgtaaacataacactaaagaaactgtcctggagatcccatcctgctactaagaagttttctgtacatcacttccaaacattggaaactttcagatcataaggcagaatttagtaattttgtgcttctgttaatgtctagcattttaaacataggataacattgttttggacactggaataatatgatttattttcacctgtaaaaatgacttcattgtacttgaacacctttgcatttctccatttgtgccatttacaagtggaaataaattttattataccatgatctactggcgttttaaaactgttaaatgtgcacattttgggtatagctattttcacttgtatgtatatattgtatatacatataagtgtctgtatgtgtgtatagatggattggtataactcattctaaacgtgtctgccagggctcaagttttattgttcttgccccactcccaccccatgttacagcaagactggtcttacagagtgagtactctgggtgatgcttacgggaaggagattggtagatgcagtctttttttcccccttagcacttgtatgagtgaggagaaagttaggtaaagattgaaactataaattacagtgcagtaaactgtgctagggaaggaatcagttactatttaagtttgttttacaatgcaataaaagatacaagctgcagagaaaagtaaactctgcaaagaacactggtaataattgttctgcaaaggttaagaaagccactgagtcacagtcttcatggacttttggggtttcttagtgttggatttttggggtttctcatttactttttactcttaatactaatgcttatgtgtttcactgagtatcaaaactgccaagaagggtaactaaggttcctaaactgtaagatgagcaggagatgatcactgggagagaaagcatactggattgaaggaagggctgtctccttttaacttcttgttgatagttgcaagttctttatgcaccttctaccccttctgagccactactattcaagcagagattttgtctaatagaacatgcctttcttgcttttgcttcttttcttttgagacatgtaccctttctgattggataattgatgtttagccaaggctggcctcaaaatactagtaatctttctgtaagcctctcaagtactgggattacaggcatgaaccaccatgcctatagccacagcaacccattcttttggaggttttatagttctccatttgtctcatgttccgaatgtgaagtgtcctaatgtgtattaaagtcagaaaataatatatttaaggtatactaagtatgaatctgctatgataaaagaaattctcacttctcaaatagtcttcttgtaaggagcattgggctgtcatctttgagctgcttatcaaaatacagatcattattgcatatatgcaaattctgttttattttatccctaataacagaagtctcccttccatggttttagcgttgcctttttaaaaaggcactcaccctgagttgttaagaactggacctgccccaccctcagattccttaaaggatgaagagtgtgctgtacactcagcatatgtgcctcttgtatgcaaggactactgattgaagtctgttttgctgtgtctggttatgttgtctgcacttttatgaaatcactacaatagatctacgttggaaataactatcaatttgtaaagaaatttttattaaacactgtagaaaaagtgaagctgagaactcttttgtgcatttatatttcctactgaattctggtagcccacttttaacattgtattgactttttttttttttttttgattatattcagatttccaaacaagtgctggccttcagatcataagtataagaaatatgcatcatatctgcctattgcaggcttctgaaacttgcactgcccatccatgcaaaaataagtatcttaaataaaagcagagagcaaaaactggggagccatgtactatgtcaccacatctgttaactgtttcctgcaatctaaactgaagtgtgtgtgtgggtgtgtgtatgtgtattgggggttttgttttgctttgcttttaaatatacaaggggttcttctttaaatagaggaaaaggttaatcctctccagcaggatgcccactggatatattaacatctgtaggtagttggaagtgtagagagaagagaaggtaagacttctcagtgaatggaaggatgtcttgatgctcaagagtccccgcccccaaagtacgggtaattcagcctgcacagtttcctttcactcatagtttcacaattacgagtgaaaaatcatgtaattatctgtaaatatgtagctaacaaattgacctagtttctgtacttttttggttttgtactaaagtttataggtctgtgccagctagagaggagttgctgtcattgctagtcgtgctctagcatacaaccctgaaaccatcctaggtgacattttagaattaatacttaagtgttgttaaatggggacatggagcttaatcattggtcaggtttgaagtcttttgaagctaagtaattttatttaatatgattacatgtcgtcagtcatgagtgaggtgtagggagtctccctccccaagtggccatgtttacagagtgttgtctacaaagtgcaagtgtgttaatgtttatgtaaattatgcaggtgataactttatggtttgggactgtttatgggctcttttaagtgaattttcaaatgaaatgaactatgcttattgctggcacattgatcccatttctggaacatttcctacttccagaattccgtatgttccttagacattacccccacttaacctcccttcctctgatatgccttgtagctaagatttaaaagactgttgaacatagatgaggggtatgcatttcttaaaaatccatgaaccctcaattgtatgctttcagtattgtgttatatgtttctatggcaactttgaagtcagtggtttagaaatgagataccaatgttaatgaaaagtatgtactctttgcttttgcatggcttggcttagtatccaaggtatattagagccacttgaaagcatgaagaccagttatatggaaacaggtttctctcagtggcacattttgctttttcttagccctcaaatacattgcctcggcatgaacattattgttaatataaattgcacatggtcatcgagtgaattataaaattttgaaaagatgcagctgcccaatattaacagttttagttggtctctatctcaaataacagtgtaggtattggaacccttgtagcccttttgggggtcaaacaggtatatggatttatcaaggagggcattggctgcccctggggtattgccacgctgttgtcttgctgcccattcactccatgtgctgctgtccttccttcacttcatactctcaaagaaaccatcaccctttcttcctattttttttt

SEQ ID NO: 20183 - DNA, 2120 bp, Mus musculus
ccctgaggcattcagccacagctacccaggagcttctagttggtctcacaatcctactgggggtccaggacctcactggggtcatcccatgggtggcacaccacaagcttggggtcatccgatgcaaggtggaccccaaccatggggtcatccctcagggccaatgcaaggggtacctcgaggtagcagtatgggagtccgcaatagcccccaggctttgaggcggacagcttctgggggacggacggaacagggcatgagcagaagcacgagtgtcacttcacaaatatccaatgggtcacacatgtcttacacataataattgaaagtggcaattcctctggagctgtctgccaaaagaaactgcctacagacatcatcacagcagcctcctcacttgggtactaccgtgtggaagctgtgcatatggtatattttatttgtctttgtaaagcgttatgttttgtgtttactaattgggatgtcatagtatttggctgccggggtttttgtggttggctttttgtttttgtttaacttttggaaaatttttaaagtgataatagataagtatttcatgtatgtggcaaaaaaaaaaaattggcttaattagaaggggtattatctgaacaatataaaaacagaatgaagcaagctaatctgaatcatcactttagggtatccatagcctaagaaatgtgtcagaagatctaaagccttccttcatattccagttctgtgagtccctaacagcaggcagcatccatgctgaagcacatacacctccgctcctcaccagtgggttttctttatttatgaattgatctgatttctcaacctcatttgaactaaaaaacaagaccatgaacattaaaagattgcatttaccttttcagtggtagaaaatcatttagttctttgctataaatgattcagaattttgtcagattttgtaggttgtatcatcgtaagacggagttgcataaggagatcataagctgtgtggctattgcactaacaagcctgtgagctttcagaggggaaaaactagagggcgagaggggcccctgaaagttcctgtgacagggatgctcagcagggaggagggaaagcctgtatagctagcctgacattttgtttcttgtacaatatctcatgtgacccaaacttgagactccaaacagtacctttgctttgtttgtacaaaaatgaagacctatagccaacacaaagcaaatgccagaggtattggatgatgccatatttgaactgccatctattagcatattcatcacactacatagacatagttttactgccccctttttagctcatgggatttcctgtttacaggtagcaatagtcaattatttaactacttagttgccaccaggagtcactgagccaatgactatcagctgctgactaatcttcacactgtagttattgcttcatttacaggtcctctgtgcttaattgctgtttttgttgctgtagtaccttatgaattcttaattcattgagacttagtgaccatctgggtccatgttaatatcatataatagcaaattcctttcagaagtctctagctttagtgctaaaatactactgagaaaggaactaggtagtttggtgaatgaaagaaaacaaaatttgaagatattatgtagtggtcaaggaccactaatatttggggagtgtgttttgtctgttcttcaatgaaggatcaatccagtgttcttcatcaatgttagttaatatcccattgcttgtgtggcgccttgagttggtggtagactagggcaaatgccctctttagtgagagaccagaggttttgtataagttattgtcctgctcccttttcagttgtcttgaagagctcttgctactaactttgggtcctgcttttcatttaggtagatggtaagcattctcttaatcataattagaacaaactagtgaccaaattgtcatctgctagtatggaagttcttagttttcttaaccatgctttatgtcttgtccaggtatgtcagtccagtttccatgacgtacccccttcagaagtttctgacattggtttgaggttttctgacactaattaaaagaaaaattagat

SEQ ID NO: 20184 - DNA, 1164 bp, Mus musculus
caaagtgagttccaggacagccagggctacacagagaaaccctgtctggaaaaaccaagagagagagggagggagggagggagggagggagggaggagaggaggaggaggaggaggaggaggaggaggaggaggaggagggggaggagggggaggaggaggaggaggaggaggagagaaaaggaaagaaaagaaaagaagcatagttatccaggtatcttcagaacagcttatgataggatcttttgtcacataatattggttattatctttttcttttagggatgttcacaccaggctacaaagagagacgttatatagcatacaaaaacttaatctgtcttctctcattcttcttttctataagtcatgaatgggtatttcacagtagaatgtatcagtttctcctctttctctcagctgcgtttggatgaagcacaggaagcagaatgccaggttctgaagatgcagctgcagcaggaactggagctgctgaatgcttatcagagcaaaataaagatgcaagctgaggcccaacatgatcgagagcttcgagagctggaacagagggtctcccttcgcagagcgctcttagaacaaaaggtatagataataggaggaggaggaggagagcttcttttttttttcttttaaatcaaaagaactaaatatatgtatgtgcccataagcttggtattgagtgggtatttttcttttattatattgtgtatgatgcatgtatgggatgtgtgtgtgtgtgtgtgtgtgtgtgtgtgtgtgtgtgtgtgtgtgtacatgttcatgtgaacccaggttcacagctttttctttcttttttttaagatttatttattttatataagtacactgtggatgtcttcagatacaccagaagagggcatcaaatcccattatagatggttgtgagctaccgtgtggttgctgggaattgaactcagggcttctggaagaggagtcagtgtccttaacagctgaaccatctctccagccccgttcacagcttttattttaattttttggcctgaggattgagcctacgacctcacatttgcaagacaagaactctactgatatcagtagggcttgtattagatttctttcataatgttttttagttctaatttagtaggtttgttgttgtttt

SEQ ID NO: 20185 - DNA, 1216 bp, Mus musculus
tatttaatatgaatgcaatgagtgccttatatcacatagcccaaaatgaatcccctacactacaatctaatgaatggtgagtattcccataagatatgattaatgttttgaaaagtttgtaaatattgatgcaataataaatcattatcaaaatgacttaattttatataaataaaagaaaggttacttttagttttaggaacacaaataaccctcctaatttaatagctttttaagcattaatattttgtaattaaaatgaatagattgttgtaactgtttaaaaaatagacatgtaaaagacatgagtaaaatgttttaattcttctttcaaaattattatgtctagctaaatatgttagtcatgttgctctgatttctcttctggtgtattaattactaataaaacttcatgtaaaacagtatatggaaaagagattgaccgttttggactagaattgttatgaattgaagaaatcatgcgttagttacttttctcattgctgtagcaatgtacctgacaaaagcaacttaaggagagcttattacagtttgagtgtacagtccaccatgatgtggaaggcatggtagtaggaacaggaggcagctggttacatcgtgtaactttttgagggaggaattggaaagagttagatgctggaggaccacttgattcatcccatttattcattctgggaccccagcccatgggttggtgctatctactaacctacattcagcatctgactttctcagttaatactttctgggagcatcatcatagactcactaagaggcatatttccagggtgattctaaatcctgtccagttgatagggttaagtcattactattctgtcctttctcagaattaaacttgcccctcagttgcattttcatttcataatatatattagtccatctctgagagttcccatagtctttaacagtcccaacattatacataatgtatgaagtctattcagacttgtaaactctcatttttgaccatttgtgcaacaaaaacaggtctcattttttatagtctcagagtttgggaggcaggagtattgctgcaagttcaaagccagcctggactacattgtgaaaccctatctcaaaaagcaacaaaaatgtgttgtcctttttgaatattggaattaactgttgattaattattatgtaatcactgagctcccatgaataatgctattat

SEQ ID NO: 20186 - DNA, 1175 bp, Mus musculus
ctagatactttccttaaaacacctcaggtttgggtgaaagaggttcactataaatatagtaagttcttttatcataccgtctgttctggaggttgcttgcatcgaagtacaaaattccaagtattttaccaagatatgagtttagggaaataaaaatataccaccctgaatatatcttttggcaagatttgtgttagttattctgttggggtaaatctccaaccccagtaagcccatgcaaagaacacacaactcaattataatatgataaacaacacacctagattgggcaaatataccaccatactactctgtttcccagctatgaaatcccttgctacttgtggttcctccaggccacgtgctactgccccatctttcttccctcttccttttttttttttttttttaaagacttatttagggggctggagagatggctcagtggttaagagcaccggctgcagtgtacttagatatagtaataaatgtttagaaaaaaaatatttatttaactgaactgagttcactgtcgctgtcttcagacacacgagaagagggcagtagatcccattacagatggttttgagccaccatgtggttgctgggaattgaactcaggaccttcagaagaacagtcagtgctcttaagccatctctccagcctccaattcttcctttttagtccttctttctctcctctgtctcctcttcctttttcccctctctccctctccaaaactttcatccccaccttttccttacactgcccaatcagacgctctagcctttatttgaccaggtaaggtggagagaaggtacacactaagtcgcctgagtcacctgtgattgatctactcctcctccaaaacaacccctcgtgagaaagcagaattagcatcaaaatccaaacagcaccaagtccattcacaacattattctgcagaccctggaatgactctgaaatgcaatcttcctaggaaaactgtcattttaatagaacagtctttgtcttgctgccttactgtagtctccttactttcccatagcctgcttgtttaaatcaccatcagaaagcttcaggacccccattctgtaatacagaatgctattttaaggtcaaccatatgaccattcttttgagtttttgttctttgtacacattaataatttgt

SEQ ID NO: 20187 - DNA, 1548 bp, Mus musculus
gcaaaggagcagataatgatggtagtggatctgagagtggatataccactcctaaaaaaaggaaagctaggcgcaatagtgccaagggttgtgaaaaccttaatttagtgcaggacaaaataatgcaagagactagtgtcccagcattaaaacagggacttgaaactttaaagcctgactatagtgaacaaaagggaatgcgagtagatggttcaaagcctatttggaaatatgaaactggacctggaggaacaagtcgtggaaaacctgctatgggtgacgtgcttcgtaaaagctctgatattaaacctggtttgagtagcaaaaaatttgatgatcggcctaaaggaaagcatgcctcagctgctgcctccaaagaggactcatggaccttgtttaagccacccccagtttttccagtggacaatagcagtgcaaaaatagttcctaaaataagttatgcaagcaaagttaaggaaaacctcaacaaaactgtacagaactcctccgtgtcaccatcttcatcttcatcatcatcatctactggggaaactcagacccagtcttcaagtcggttatcccaggtcccgatgtcagctctgaaatctgttacttctgccagtttttctaatgggcctgttttagcaggaactgatggaagtgtgtacccatctgggggtcagccactgctaacgactgctgctaatactttaacacccatctctactgggactgattctgttcttcaggacatgagtctggcttcagcagccgttgaacaaattaaatctagcctttttatctacccttcaaatatgcaaacagtgctgttaagtgcacaagtagatctgccctctcagacagatcagcaaaacctgggggatatcttccagaatcaatggggtttatcatttataaatgagcccagtgctggcccagagactgttattggaaagtcatcagatcataaagtgatggaagtgacatttcaaggagaatatcctgccactttggtttcacagggtgctgaaataattccctcaggaactgagcatcctgtgtttcccaaggcttatgagctggaaaaacggactagtcctcaagttctgggtcacattctaaaacctgggactactgagagtggagccttatccttggaccccagtcatataggtgacctgcaaaaagcagacaccagtagtcaaggtgctttagtgtttctctcaaaggactacgaaatagaaaatcaaaatcccctggcctctcctacgaacactttgttaggctccgccaaagaacagagataccagagaggcctagaaaggaatgatagctggggttcttttgacctgagggctgctattgtatatcacactaaaggtaactcatttgttttttttctaagattccaatgggctgattgtgtgtgtgtgtgtgtgtgtgtgtgtgtgtgtgtgtgtacatgtatatttgatattctatattatgaatgactgggtaagaattagtatcaattaattgttaattgatttgaaatttttgaaaatt

SEQ ID NO: 20188 - DNA, 1101 bp, Mus musculus
ctgaatagcataactttcctttttttggagacaggattttttttgtctagccctggctatgctggaactgtttttgtagaccagagacccacctgcctctgcctccagaatgctgagattgaaggtgtcgggtcctccatcacaccaagagaaaacagtagtttttatttgcatcctttcatctctttttttactcttttgggtataaacaaacatctagtacatactgcaggtggtaatttgtttttagagacaatatatatatattcctggctatcctggaactagcaatgtagattaggctggccttgaactcaaatacctgcctgtctctgccttctgagtgctaatattaaaggtgtatgctgctttttaataaaatactggttcattttggtagtgagttttttaatctgtaggaaaaaggagcccatcatattgaagggatgaagaactacattttttctagaagaataactgacttatttagttagttttttgagacagggtttttctgtgtagccctggctgtcctggaacccactctgtagaccaggctcatgaccaggcaggctcaaactcagaaatctgcctgccactgcctcctgagtgctgggattaaaggcatgagcccaccactgcctgactaagaagatgaatttgtgttttgaactttttagtctgcttttctgtttgcaccacaccagtccctgtaaattttagaagagtgtgtcagatcttctggatctgtggttacagatgtctgtgagccaccatgaaggtactgggaaccaaattgggaagaacacaagtatacttaactactagccttatttccagcccaggtttttttttcctatcaaagaatttttatatgtatgtattgtctgtctgattgtctgtgttggtgtacacgagcttttgggcgctaacaggatattgggtcctctggaggaggagttataggcagttgtgaactgttcagtgtaggttctgggaatctaatttggggtccactgcaagtgcaggaggtgctcctaaaggctgagccatctcacagccttttataaagtgaaatactgtgacagtattttcacatca

SEQ ID NO: 20189 - DNA, 1153 bp, Mus musculus
ggcatcggatcccattacagatggttgtgagctaccatgtggttgctgggaattgaactcaggacctctggaagagcagtcagtgcttttaacctactgatagtagtataaatggttttgaagatctgtgtgccagctagtttagagtatctgatctttttagtcacccaaagctaatgtcttttctgtaggtagagaagctaatagtataaaaatatatttcagataactgttgagttcaatttgtagcaggttattagcatagataatttggtcctccagtttcaggttttgcaatacaagagacttcttcctcaaaaacacataggtgaaggaaaaaaagcacaaacatgtattgaaagattataaatgtcaggaggaggctacacctcagtggaggtaggtggatttccagtatagaaagaataaatataacagcctgtattatggagcatttaaactggattttgatggacgagattttgcttgtatgttggttttttttttttttttgcaaaaagggtctttctatgttgccttggacttttagaccaggctggcctgaaattcagagatccacctgcctctgactcctgagtgccgtcacacctgatggtcttttaaaaagttttggttatgtatatacgtacttgtgcacataggaacctatggaggccagaagagggtatcaaagcccctggatactaacagttgtgagctgctatgtgggtgctgggaattgatcttgggacctctggaagaacagtcagtgctaagccattcagtccttatttttattttttactgtgaaagtgactgttgagttttttatggatttgggaaattaccaattccagaccagcagtttacattataactcagacttgtaagaactggagccaggtcaaaattggttagacaaaaaagcagggcctgatatggtagtacatcaatctgtttgagaggctaagacagtggattacaaactcaatataattctaaatttgtctgaaatcaaaaggaggactgaggatatatagcttgctaatatatataaaaacacttaagtttaatcaatccccaatgcagaaaaaaaaaatagaatatgaacagtgggaatgtgcatgtagaggggcaataagaggctttgaga

SEQ ID NO: 20190 - DNA, 6138 bp, Mus musculus
caagcgtggttctaaagttcctgctgtcatctacttgggcaacaaatgacccactggaaaggcaaatccacttacttctaggtatctgtaccttgttctgtgactaaagtgatacactaatcacggggaacccagaatgattcaacattttcccctactccacccttgatcttttagttttgagccctgcgagaatgctggataaatgccttgaagtttgcagggatgttttttgttgtttgttttttgttggtttttttttgtttgttttaatacaatgatttgcatgtcttgccaagagttctgcagcctatgtggggtgttggggaaatagttcctttccttttattttttgttgggtggggacagggggagggcattgaagttctacaatcctggaatagtttgtgggtatatagttaacttactttggttacatgtttggacttttaacatctaagagtgtcattcaaaaaaaagttgcagaacaagtaattggctgataattacccattgtaattgtgtaactgggagcaaaaatatattctgcttttctgctgtaggtgctctgacttgctctctgtcactaacactaagtgtatactcttgtttttcatcaaccatttaagagaaacgtatgtacctttctgtaaattcttttaatttcagtttctcagcaaaatcgaaaaaagaaaaaaaaaattaatgaaaactgtcttgtttttttagccagtgaggaggtaataaatcctgattgtagaaggtgtgttttcaggcaaattctgcttctgagcttacttgtttctgattatatcttaatatattttatcattagagcaagattgggttcctttggttatttttttctttctttctttctttttttttttttttaagaaaaataatgtgaaattctgaattttgttttgggcagaaagagcattagccctgtcttatcatcgcattaccatcctgttgtgctgcagcttgtgtatagcatgcgcgcgcgtgtctgtgtgtctgtgtctgtgtgtgtgtgtgtgtgtgtgtgtgtgtgtgtgtgtgtgtgtgtgtgtgtgtgtgtgtagaaacgaagggtccaatataagactgggtgatgttagtggcataaaaacaagttctctggcctgatgtagcaacacatcacacacataacacatacagagaaatcaatgtatccatgtatgtcaaatacaagttaaactagcagggcatttatacagttgcagtcttctaacaaaggcaaactggatcccctagacacttttgggggagaaagtagttactttttactcttgttttctaagaaatgtccagttttgagcgattgtagtgtggatggattttctggttttgttaactatttcaggtttttaacaaatgttcatgaaagaagctatttgatttactgcagagaaaaatactttttagtctggatttctgccctgcttagattttttttttttaagtataagcatggattgccaattccacttgatgtaaacaaaactttttatacataatatatataataacttattgtatcagtccaggttcagaaacttgtggtaggccagtttcagatagtttcatttcacctgtaaactgtatcacttttactgatattgtaattttcaaatgtataatatgtttacagatgtgccctgcatttagtcgctttgttcctattttgattttttgtttttgttgtttgtttttgttgttgagtctcctgcctgcttgccaaaagctaggatgcttcaggccggtgtacatcagtgaggcatccttgagctttaaagcattgaacaaactggaaaatgcaacacgccacatattgaactgagtctgtgttttgtgttctttttttttttttttaataaaaattttcagaaaatttaaaaaaaaaatcttgattaaagaaaaacgaggctccagtttgttttataggttttaaagttctgctgtgtgtttaattgccttgtgtgaccacttgtcgccttagggctgaatccttaccccacttttttttaaatgtccattttgcttgcctggaatttaaaagttcttctgttgcacaaatcacaaaaacaaaacaaaaatatatttccttggtttatgtcgtacaaggttgaatgaacatagtcaaaatgaaaagaaaattctagtttcctgaattgggattttttaacttagaagtaatacttagtacctttaaggccttcactttcatagttccttttccataacttcaggcctctgcaaaggagctaaagagagtttatttctccttctctgtccaaggcttgagaatctcacttcttctaaatgaaacaatgcaacatttcactttgatttgtccactgaaattttctcaatgtggttagaggtatatatatatatatacatatatatatatatatatatagtagttagaaatgtctcttaactttctgggatccctagtggcccatcatattaactgtcagtattttttggacattgggttaatggacttaattgcctcagtacgagcaggactttgggacagatatcttttgtgctgtttgatacttgtctcaatctttctccttaggtcctcacacaattccttacagagcacttattaaaaaagtcttacgagttcatctgttttctgattttttgtgtgtgtgtgtaagcttctaaaagaaatatcagttgtgatttaatttagcacatttaaataacaatatgttggtataaagaattttccttcaactcagagtattagtactgtagcataaaccaaatacagtctagaggggatttttaacatccctccatttaaaagactgaaaaaagatgtgtgtgtgtggatgtatgtattttgggatgcttgtatgttggggaaagatgaagatactaagaaatagtaaatgaatgtgtaagacattatattagtattcagagaatgaaacttgtatttattttgtgccatttgttttcattacatgggataaagtcaggtagtttaaatccttcaagggtagtactagaaaaatggcactacggatgaaatcatgacctatttttttaatggctaagaaactaattatgggtgatgatttccttttcagttcgtcttgattgtaggttttatgtcacacaccactcaattttgtggaaaagtcttgaataatctcccttcctcacaaaagacagggtgtatttatcttttctccattctcacttcaacaacctgaagttaattgcatagtatttcctctaaccttagtagtgaaccttcacatcaataaagtttttatggtgtctatagtagcctgcccttctctactttctaggaggggataaccaatatctaaaaacttggtagtgacaccttctccccccccccccatcctccacccgatttcctagttaccactcaatctgcaattgtttcaaatgacagtttgtggagaaaataaggcaaacctcaattgatagggcagtttcttcacaaaattggacatgtcagcagtagctgaacacttggtagacttgttgccagccttcaccaaaagctttttttttttgaggtcagtgaaaaggcatgtaatgtgaacttgaactagatgggcacatgcaaaggatattgaagacttggctcaatttaaaaacctgtctaaataggtggtggtaaggtgtctctcaacttacttagtgtgcagaagggtttgataccacttcaccatattttaaaaatacacgcctccttttatatattaaccaaccgaactagtaatgtagtgggccaaatatgtgaacaaaaaattctgtgatgtttgcctgccagagtggactttgataggactgtattaagatgggacttatttccccggcttctagaagcttggtaggaaagcacaggacaagagtaaaagtcaaagtagctgcttaaaggtggccagaagaacacatggcctgacaagtcactgatttttctctttggcaccagtagacttctgtgttgaaggtgggcttctgctgtgggtatcttaaaatgcttatgaacacttagctatatatgtcagtgagtggcaaggctattctggtcgtgtaaagaatgatatcattaactccactcaagaactgatctactgagttttaagaaaggtcttaaagcagttaatgccagcagtagttgagttttaagttctccatcataaaatgcccagcaaagcagcagtagtgtaatactattctattatgaggactgtcaaatatggattagaaactcaaaagacaccctaaactgtagtgggattgctggtttaaacatttcctatttagaacattttgttctgaagtcataacaattagatgtctgaatttttttgtttgttttttttgttttgttttgttttttgttttttggtttttttttttttttttacttttttttaggtggggtgggggatgttgttacagggtttctcagtgtagtactgactggcctggaacttgctctgtatactaggctggcttggaacttagatctgcctgcctctgcctccgattgccaccaagcctggcaatgtctgttatttaacagccttatttgaaatagttagaattgtttcccccagttcagtttggctttccttgtaatctgttttaatcttcagaccaaacaacttagattaacattacaatagctttctgtatatatatcccctttcctcaggtgctaaacaaaggctccaaaatgaatactgctttagtaacatctcttattaaaatgcacatttcttttactaattgtaaagatttggtgttaacaaaatggttttaatatgtaaatatgaacaaataccttaagttctacttgtctattaagtgtgtttgcatttatcttttgtagataatttttcacaatctttaatacatttcattaggtattattgcatctttagaatgaaaacaactgttttgtcttagattacgcctgctgctgctgctgctatgggaaactgagaaatcaagaatgtgatgcactttttaaacattactatataccataggttgcgttaataccttttttttttttttttttttttggtagcacagccactaacaaaaatgaacagagtttaatattctcttcaggtgtgagtagtaaagtagtctgtagtttgtgttgatttatgaaggggacaataacttagaagtaaatttttggttaatattatattttggccttaaaatgtcttctactactgaaaatattttaaatcatagctttgtttctattccctctgcttcaaaaagacttgggaaggattagaggaagtcatttcattgttttctttttagttgtcagtaagctgggttttttattacatttatttcagagaagtaatgctaccctaaaccaatcatacctagtttagttaacaagctcccaactattccacttctctagtatatattcaaagataaacaaggtgtaagaatgcaacttgacaaaggaaaaatatctttgcaagcacatactcaaagatgaaggaggaaaagtatagaggaaggacaccaaatgaggtggaggaatatgagaatgatgtgtggtccaaagctatctggttatattttgatgttgccaatattgcagagccaaatttttaatttgcttactaatatatttgttggccagagatctatttttatatcagtgtgccttgcatgtatattaactttggaaaggccatgtagtaaatgcctgagatgttgatggttcttaccacctcactgatttttatgcagttgaaatgttcattctattgcccaactggtgctctctgtttaaagttatagatcttgtcaaactggaactcttttataaactggggaagtgacttgttttttcactaatccccctacccccatagtctgttagtggctggtctgtagggaaatagtaaaaattattcactacctacccctacccttaacaccaccttcaagtaatgtgataataccatttctttgtgcgctttgaaaaaagtttcagcttgctgcctcctttagtgttatgaaaggtattattaaaagcattgtttgcaaaaatgcaggaag

SEQ ID NO: 20191 - DNA, 1197 bp, Mus musculus
ttaccaaaagtaatctgtcattattttgctgttcttagctttaccatctttggaaacatggttcaaagttataatctgggctagctcatcagtggaactaaaatgaaggaaaactggcacccactgaataaagttgaattgtaatgagagcctgacttgtatctgttaaagggcttttcttcaacaggacagttgtatcagctttataaaccattggacccaatgttcttctcagtgaaattttaaatatttatgaaaaagaaatggaaagtcattcaaactgaaatgaaggatagacctttgccatatgaagctctgacaattttatgtcttaagtctggtttaaagttaggatagcctttttattaacctttattttaacatgaatttgattaactggatgatttgaaattaaagtcattaagtttaaagggcaaagcacaagattgttttaaagatatattgaaaagcccaagttgatctgagcaagttcatgatctgggcgtgtttggttaattcaccgcagttgcatgttctaagtagtttcacttacttgaagtgtgcactcacaaagttgtgtagatgtgctggccagatcttgtcattcatcttctaatagatagctttgctcatttcctttaggacatttgtagacgagtagaagatattatcaatggtgttttccccaggctcccagatacaagatatatttcattttatagctttgtctagtaaagattcttcaaaatatggttaatgatgcataaccttataaacacaggtagtagcgaacagcttggatggctttggctgctcttgaatatctgtcattagtttgattcacatcttagttgattacacttgtaatcctggcaaccagaaggctgaagcaagcggattgagtccaaagccagactggcctgcatggcaacaacatagtgtattggagaagtaaagtaatctattgtgtgcagatttatttatgagctgggttgccttttaattttggaaaaggagaattactgcattatagttagaagatgttggcccttttcctgctgaaatttttttcaatacttgttttgcccagtttaaaaaataataaaagtaggtcttttttagatagaacagtgaccagaagtttattgttttgctaaataactgactgcttagttatactaaagctgttgatgttat

SEQ ID NO: 20192 - DNA, 1152 bp, Mus musculus
tggcgtccaataaagttctctttctcgaagatggtaatcttagactctttatgattctataatacataagtttaaagactttgctagtatagttattctaacttaacaaattagtactatactaattttttggcataacatcattgttgagcttaacagggattttataagagaaaatccagctgggttgttatggtgtacatgtttagtcccagcaaagatagacgttttgagttggaaatatagaactaaatttagggaagaatcataagatagaatatttggtgagtatctagcccaggcaagtgccattccaaaactcagaaccattttaaactcacatcaaatggttggtttgtttctgcttaagcatttttattcaaaatttgctgggtacgctagactggcctcatgttcaagagtgccttttaaatttcctgggtgctagaattacaagtatatactaccatgtccagctctcacagactaaatgcagcctcttggaggcttctatttccaactggggtcaccatgttggaggaggaatgtggagatttggtattgaaaagggtagttctgcaaaccttactcctgaattaaaatatttacttgtttatggataattggctgtgatctgccgttgatgttcttagatccaaattcctgccactatgctttcttgtttgccttgctccagagtcagatccagatccacagctccagattcagtctactgaaaacagtctgaagccatgagctggaacataaatgtcctttaagtcagttactctctctctctctctctctctctcttttttttttttttttttttttgagacagggtttctctgtatagccctggctgtcctggaacttactctgtagaccaggctggcctcgaactcagaaatccacctgcctctgcctcccaagtgctgggattaaaggcgtatgccaccattgcccggctctaaataggtactcttgtcaacaacgagtaaatggcaatacaaaaaaaaaatttttttcctccagccccactagggtttttcaaaattagaaaaacggaccaagtttggccagttcagttgtatcctaaacaagagcttaatcgaaaactggatattattaagtaaaagaaatgaattgctc

SEQ ID NO: 20193 - DNA, 1170 bp, Mus musculus
gctgctggtgcccgtcttttccccacccccacccccaggctgggagagccggatgacccaagagtggaccatccccagggagaacaaaatctaagtcagggggtgtcaccaacttgacaggtccttccctatgggctgatgtgggcagagtacatgccagtcaggctgatataactggacgatgggtcatttgtaataggcagaatttctaccttctcattagccttgaaagaattgccagaaagcagctaacaattagctcccagaagccccagggtcctcctgtcccatacaaacagctctgtccctcatctcactgcccagaacccaccaggtagcttctctggttctggaacccactccaacacgatctccccaccaaggagaggcgggatgggtgggacaggtttggacttgctgccccagggcctgcagacacaggcctgatgccctctgatctacccttgccccaaccagctggaggagcaactgagtcgacttcagcgtgagaaaaacgagattcaaaaccggctggaagaggatcaggaggacatgaatgagctgatgaagaagcacaaggcagctgtggcccaggtaccctgacaggaatgacaacagagtgaacatcctcggggcctgaaccacctcacaaatccctggctagattcctcctcctcctcctcctcctcttcctctcctattcttcctcttcctcctcctcttcctcttcctcctcctcgtcctcctcctcctcttcctcctctcctcttcctcctcctcctcctcttcctctcctcttcttcctcttcctcttcctcctctcctcttcttcctcctcctcctctcctcttcctcctctcttcttcctcttcttcctcctcctcctcttcctcctcctcctcttcttcctccttctcctcttcctcctccttttcctcttcctcctcctcttcctcctcctcctctcctcttcctcctctcttcttcttcctcttcctcctcctcctcctcctcctcttcttcctcctcttcttcctcctcctcctctcttcttcctcttcttcctcctccccctcttcctcctcttcttccttttcctttttttgatatctgtaaccctggctggcctagagctccccatgtagaccttgtagactatgtagttcaggc

SEQ ID NO: 20194 - DNA, 1247 bp, Mus musculus
tccaagcaccatcaggcctgcctgagagcgtgttcagtgcggtggatggagagcttctctgttgcccctcccccagcaccctctctgtcagcagagcaggcagtaggagggggtggaaacaggtgggcagccaagggcatcacccacctggacatgggaagccagagagaactagagggagcgttatgccttctttactacccccaggaccccaggacaggtggtgacatttcaggccccacagcacatacagaatagggtttgtgcagctgctggggaccagaagaagccattggtggtggatgaaggctctgcctcctgcatctgtcacctcacttatctctcagagttccttctactcaaaagggcaatattgtggtttggactcctgagagataaatacagatgccccccgagtgaccctgtagcccaggctgtcactttgcagagccaggctggggtagatagtcattggaatgacactgacttggttctccctcacactctaacctctgctccaaatcatttcctgcctagcatcctaccgctgccaaggagaacacattcgtgtttctgaagtagacagattcacgaggctgagagagagagagagctctgcctgggtcttttaatcaaacactctcagcagaaccagttacctctgaacactggctgtagctctgggagcttctgggttcaatgtctctgaaaaagcccagatgaccatgagaacattcacatgacaggccagcctctgtgtagagctgccagagtctctgcagtaacagtcacccccgcctttcctcttccagattacctcttccaaagacccctgcagagatgcaggtgtcatctcccccctggaaggacagcaaagctcagagggagtcagatcagttggctaaccctacatggaaggagacctgagtttgctcagcacttatgtaaaaagccagatgcagtggtacttccttataatcccagaaatgaggagtaaagacaggaggattaccagggctaggtgggcagacagacagacagcctaattggtgagctctaggtcttaatgagagaccatatctcaaaggacaagatggatactacctaaggaataatacaggttgacttttaaaaaaagattttatatatgtgtgtgtgtgtgtgtgtatgtatatatatatatatatatatatatatatatatatatatatatagctgtcttcagacacaccaaaagagggtatcag

SEQ ID NO: 20195 - DNA, 1196 bp, Mus musculus
ttatttcactgctgcttcataactgtaatgttgctactgttatgaatcgtaatgtcaatatctgatatgcaggatatttgatatgtgaccccaaagggtcatccaaggggctcgggcagtgcttacgacaggaggacttttggtggaacctttacctctgcacctccactgccacctccagggaaacctaaactactgtctgctccctcatcttactttaaagatttatttatttattttatgtagctgtattgatggttgtgagccaccatgtggttgctgggatttgaactcaggaccttcgaaagagcagtcaatgttcttaaccactgagccatctctccagctcctcatcttactttaaaaggaccagtaaaggggcaccctcaggtttctagttcagaatatagtagacctagcaattgttgacacttaccttgtccaagtagaaggtcaccaggacctgtatcccttgtctcttggaacacaggcacccccgggtacaaacaaagctgggtccagggcaccagtagaggtaatgctgtgttgggctgtgtcttctccagggacattagactgtactgcatgggcttagggacagtggggacaggaggaggctctgggaaagaatgagagtggatggagccagagaatgtagtcctgtctgctctgttggatgttacagtccttctccctccaggggatcatacttcttcatatctttggagggacagccttccagagccaggggcccgattgaagactccaaggagttgttaaggacccctcccattggcccatcctcaaacaggtcctgccagcctctgtcccgagcctccgttccttttccagtagaggatgccatggtcaaggactgaagtcttccaggcccagggaaaccctgattaggggaaatagatcagacctggggtcctgccaggagtaatctacctgagagtttcctccttggacaggttgtagtcaagtagtcacctgccttaaaccttcatccgtgtgctcttggactgcttacacgggagcaagagagctgaaaactccgagtcccagggttcctccctcaggactcagtctaagcttctcaggggaaggagacaggaatgcacttcttaggcttatggaagcctggcccttgctgccaccagccttcccatcatgttagtctgaaaagcttacca

SEQ ID NO: 20196 - DNA, 1150 bp, Mus musculus
cgcatacacagcgcaagggaaaataccagtacatacaaaataaaatttcaattttaataattgttatgtgtaaggggctttataatttttataagtgatctagtaagacatatagccatctctgttttgttcttttcatgatggcccacctattcatttgcgcagaaacgagagcagaaaaaggagcttggccatgtcaatggactggtggacaagtctagcaaacggactacatcccccagcagtgacactgacttgttggacagaccagctagcaaaactgaactcaaggccattgcccatgcccggatcctggaaaggagagccagccggcctggcacccccacatccaacgccagcacagagacccccacctctgagcataatgacgtcgatgaggacatcgttgacgtggacgaggagccagtcgcagcagagccggactatgtgcagccccagctgcggcggccttttgagctgctgattgctgctgccatggagcggaaccctacccagtttcagttgcccaacgaactgacctgtaccactgcactaccaggttagcgacatcatcatcataaccctctcttaccctggcttcccaagggattactactgcccgtagccagttttttgttcctgttcctgattttgcctggagaagcgcatcaaaggttgtaattgttatagtacttattctgttttctgagtcgtctatctcctatcttgttattcccctgcatcttttgttttctgtttaagatatatgccaaatatcacacaccagtaatcttagcacttgtgaggataaagcaagaggatcatgagtttgaggccagcctgagctacctatctcaaaaacataggaggatttgagaaggtggcccaatccttaagaacactggctgcccctgcagaaaggactgaggtttagttcccagcctttgcatagtgattcacaaccatcaatatctccagtttcaagggatcttctggcctttataggcaccaggcgagcgcatagtgcacatgtgtacttgctggcaagcattcatattcataaaagaataaatgaaaaaaaaacttaattaaatagggggctagagcagtggctcagcagttaagggtacttgttcttggacttccagag

SEQ ID NO: 20197 - DNA, 1229 bp, Mus musculus
cagaaagactgctcatgcattattcttttcacatttgtttgtatgacagacgatacacaattgccacaacataagtatacagatcagaggacaacttgaacaagttggttctccctttatcatgggtctgacgaattgaactcagcaggcaggcttgttgggaggtgcctcttgttgatttatgtatttatttttaagtgagaattccttaaagaacaggggcagagagcggagctgagtactaagcattggtcatttttgctctaacagctactttagccgtactccaaacatttagattcacaagatacattcttcgtataagataaaataatgaagaacctggttttcatcttccttgctgactgagtgtgacagagcctagagggagggaagatggacaggacaggctgtgaggactgactgaggaggaaaggatctttttagagtagaatggtcttgaattttgccccagaaatcacccatcacatctcgttcctctgcaggagttgtcgagtggcccccctcatccagtgtgactattgcccgcttctgtttcacatggactgcctcgagcccccgctcactgccatgcccctgggcagatggatgtgtccgaatcacatcgaacatgtggtggtaagcacactagtgtttagtgagctctctacaggcccagctggagcagggaccaatcccctagaaacagtaacatccccttgtgcagagctcagtataatcttgcaggtgctgggttcagcagaccatcctaattatgcttggtttatctcccctgcgcatcttgcctttccccagtaccttcttcagctgtacaggcaggcttgacttgcttgcttataatttttactccacagtgaattaaacaattgctattatagccatagagactgagtattagagccaaccttaaaaaaataaatggttggctgtcaggagtccgtgtggcccatgcgtccagtgagtttgttgccctcttgcattagttctttataacgaccctgtgtcagtcatcctgggtttcagtgagttgttgaatggcacctttatacactgagccatctcacaggctctcttcagacactgcttcctacactagaacagatctgctctttgcaggacagatagtccttctatacagtcacccaaaaggtcgtagagggcaacttcatgaaaaggtattccctcacaaaaacagcctttccaaatta

SEQ ID NO: 20198 - DNA, 1173 bp, Mus musculus
tcacaggttctgggtttctgaatgatcctatccctatgtttgtcttgtagtgcaaagaaaggaggtacaggcccgagctgtgttctgccccctcttagggttgggaggagctgtgaacatgtgctatcgaaccctctacatcgggacaggtgagccagccaggagtctgggaggggtactggaccttcagcctaaaggtggacacttagagaaacccttttgaggttgatagatctaacaacaccccactggggtgtccaggcaagagagactgagaacccagacaatccaatggggtacttccttggctcaggccttttgctttaactgcctctcagtagcttctgaaacactgtaaggaaagacttaaaaagagaacacttctttattctcaggtgtgataagctcacacataaccttcctttatttgttagtttatttttggtcatcaagatgatttaagataggatctcctctgtagttcagggtggccttgaactccagtctgttctcttgcctcaacctctcaggtactacatctatgagtattgcccaccacacctctgatcacccctagaaattgccctttaaagtgccctacactattgtgttcacatggatataccatcctcttcagtagcttactgtctgtctgggtggcagccatgtattctaatgcagattagctttagaacaacaaaaggaattgctgaacttgccaacatatatctataatctcagtacttcagtacttacggaatggaggcagggagatcaagagttcaaagctataccccattactataaaggggaaaaaaaagagaaaaaaaaaaaagaggccttgagctaccttgaagtttctactagcacccacccactcccctctctttcacctccccaacacatacaccttacagtctgttctctaccttttccttgactcctgccaccttgcaggagctgacatggatgtgtgccttacaaactatggtcactgtaactacgtgtccgggaaacatgcctgcatattctacgatgaggtgaggggcagagatgggtgggagggagctttcctagcctgaggtccttccccagcactgggttctggacacaggcagaggcaaggatgaaaggcttgtcctttttcttcctgtccatcttggaaggaaagac

SEQ ID NO: 20199 - DNA, 1178 bp, Mus musculus
agcttggcctcctctaagccttccaggagtcagaggctgcagctcctctccctcagctggggcctgggagggggtcccaccctaagccacctcaccttcacagggcagtgaggttctacctgttatagtctctgacacgggagttgacaacacctgcggaggcagagagactgtgggttgcatcctgtctcctaccccgtctactctctgcaactccatgtgcctgtctgtgtccttttcatactcgctgcccctaaacctgaaggtctcccctctgtaggaaggcgggaaaaggtgggtagtgtgggggcagtagactggaggagtgggaagatgagccccaagtgtgtgggaatcagggccagtgaagatagaatcctcgctgtaggagctccctgtgctgcagatcttcctccagagcgctcagaagtccccttgcagctccagggccagcagatctaagaggggtagacaagactgccagcccctgcatcccgggggctggggcctccagctggctcaggtgtctgtgtcctcgacaggtgaagatcatgacggagaaggagctcctggctgtagcctgtgaacagttcctgggcaagaacgtacaggacattaagaacgtcgtgctgcagaccctggaggggcatctacgctctatcctaggtgaggccccgcccagactctgagccagggccaggaacttgtgcatggtaggggctgggagtatgtcccactgaggtttgagtaaaatatttttctagtttttaatttcaaaactcaaagtggactgaagatatagttcagtgataaagcttagcatgcaaaagaccctgggtttaatccccagtgctagaagaaaaaaaagaaaggaagagaaaaagaaggaaagaaagaggtagacttggggaaatagttcagatggtaaagtgcttgcctacaagcaagaggaccccaggttccatcctcagaacccaagggttttggttttgttttttttttaagatttatatatttatgtattttatgtgtatgagtgctgtcttcatgcacaccagaaaagggccccagttcccattacagatggttgtgaacccccattaggctgctgggaattgaacccatgtcctctggaagagcagccagtgctcttaacctctgaaccatttctctagccc

SEQ ID NO: 20200 - DNA, 1880 bp, Mus musculus
taaagtcgatgagattgtggttctcagtggggacaacagcaaggtgacatcagaagtaaaccggctgctagcagaactgccagcctctgtgcacgccctcaccggtgtggacctttcaaaggtatgcaccttcctagcggtgctgggaatccctagacagcccagactggagaggctggtggcttcagggaagtagccctcaccatctgtcatccttgcagatacccctgatcaagaacgccactggtgcacaggtgtgaggctcctgcacactcagcctccagcagctgcctgcccttccagcgcctgttttaacgtcacagggacagcgagaacatttctgactctggtgccttattttgtagggaccagaagtgctgcgtgttcaggccatctctggctatcttcctttctctcctgtctgccttcctctctcccatgccctcacattaatggccaccttcatccagcctgtctcctcatctgccatatgtgcctcttcctctggctatctgtttctctcccctttctccccaacttcacacacatcatctactttaactgaagttgaagttgtgtatgataatcactgtctgtctgtgaggagtggcctcgctgctcctcagaatcctggtgccttcaagttctacatgtatctgtctgtcctccctggccctggcagagcccagcatgggtacaagggtcctaggtaggacacccactctcctctctcctggtctgaatctccgagtgctgaacgctgttgcgggaagcccacaacccacacgctcttgccctttgaggcctgagtggccatggcctattggccctagagtaatgcccttgacatgccgaggcccaggcctgctgtcatacctgcccctgtcccctgcaccatcacggaggcacagaagcaaggcctcctgtctatagcagcttcctcagcttactactgccttaggaggccctgcttgtgctcagggacatcccttcccttggcttgtccttgattggtgggtgggtcttagtctgatcccattaagtgtttctggggtcaatgtctagctctgttggggacaagtaaggtttataggccttcttcctgctagtgcatggagctctcccaggaggccagggctgtgccaaccctaagagaatcaagtgctgtagactggccaaacctcattccctcaatgccattttcttggccagaataatggggacatgggaagcagctaaatattctatacctttgcaccactggtggctgaagaggccaatgccctggtgtcctagtaggggtacaagggtgtcccgtgggccccgtccccacccctggccctgcccagcctgtgtagctgttctgcatgtgaatgctgcatgtctggtccgggatttggatgttgcactaccccactgcctgtccccctctggtgaaaataaagatctcttatacccacacctttcatcgtatattctgtgaggagagaaagtaaggaccaagaaccagccacattaatcactttggcatccgggttgctctttccttccttagccactgggaggcatcagcacactggccttgccctcagtagagactgaccttggcactgaggcaagggggcggaggatgcagagtgggtaacaggtcctctgccagtcctgagtctgctcagcagtacagcccgattctcgggcttaagagcatgaactctgatagggatgcctgtattctaagttaaattttagttttgttgttggtaaacaacttaatcttgaagacctcagtaatgtatgaggggtttgctttgagacagggtctcatgcagcccatgctggtctcaagtttgctatgttatatatctggccttgaactccat

SEQ ID NO: 20201 - DNA, 1203 bp, Mus musculus
tccagttgtacctttcatccttctttctgtctctgcatctcatccctgcagctggttaaggagattcaggacacttctctttttaccgacgtgtagatgtcggccgcgtagtaaattgcacagatgggaaaaagaggagcctttttcatgtggcatctgatgcagtaaaccggagggggaaagatagaacccaggattggcttttttaaactatacagcatctgtgttcattacggctgcccttattctcctctttgggtcggtcttaatcagcagcagtaatcttaaagaggcggaggttttggttggaaggaggagcagccctccggccttggtagttaaaagcaatcctgataattgttagtgattaactctggtaaagtctctttcttgagaacactgtcacaggctttgtgtattggctcagccctaaaggagaaagagctggagccgggaaacttaccttcttactgaacttgaaggccttacttaccagcctctccattgctgtatgtcttatagtcataggtttcatgactataaagtatatagtcatatatatactatacatagtattcatgggctcgtgaagggatttgtttctgtcaccaaagctgcatcttttaaaaaaatgtagtctgatttgtctttttaagagttcttcttaatcttttaataatttgggtggctgaataattacaatttagacaatttttatttttggagttctttgcctttgaaacttaataatttttttttaagaggaactccctctatagtttaggttcagcctgccatggaattcctatcatcctgctttagcttcctgcaaactactggcaattaacaggtgtgcaccactgtgctagatctgaatcctttctgaaatacatgggtctctccagctccaattagggaattctttacatattttaagtagaaggaaagttaccaatcgaaggtgaaatgcccagaaattacagtattagggacaaagggtgtgcttttggatgtcagtgtccatgttatctttgctttttgttttgttgttattttttgaagacagagtctccctgtgtagttggcctggtagccaggttgtcctggagtttacagcagtccacctaagctgcctttgcctcagcagtgctgggataacagccaccatccccggcttctcttcatgttgcgcattttcgatca

SEQ ID NO: 20202 - DNA, 1178 bp, Mus musculus
taggagggagcctggcatccttaaagaggtcttgttatggaaaatgttccctttggattggaaacccagcatccgctggagtcccctgatgggaggcacccggagatgagaacaaggagactgttaacattaatgaagcacactgagtgggtattcctgcagtctccaaaggaaggcaaatctttccttctcctttttggaaagtgacagttgccatggatgaaatacagatggtgtttgccacccaggacttagagatggcctgtgtcgtcttctcagtccctccctgctgtcctccacataggcaaataaataaagccttttgatcttcagccagtcaggcccccagtaaactgtaaacagacgtgaacttgtgagtgggagagttggcagcttcctccttctctcctgagaaagcatcttattccctgtgccagatgggcctgtacacccatggccgaagcaccccagctgcctcgctagccactgcagactgaatgtctgcctagggactaagagtgtccccttaaccagtgtcaggaatgactgaggagggcactggcaggcggctctgcttaaagctttaaccctgcaccgtccgggcaggtgggaacttggagcctcatgctgtactcttggtgatgtccatgagaaccggctacactctagatttccaagctagagacttggaaagttgtttttccaccctgatccatagagacctctgaaacaggctcccagtggtcctgccccctgcagtagtagtgagggttactcccaggcctggcctagtgtgcgtccccagtgagtgtcagctgtgcttgtggttgtggggactgtggttttatctagagtgaatgctgtagatgacagccccctgccccatctcttcagtagggcgtctaggaaggctggttggcttggcatcctgtcgtcatggcttcagtagggcgtctaggaaggctggttggcttggcactgatgagcccttcctctctgctctccttccctctctttctctctctctctctttctctctctctaggggacactacacagaaaatgagaactgctcactatcccaccccagccgaattggacgcgtatgctaagaaggtcgcaaacaacccactgactataaaaatcttccccaacagtgtgaaggttccccagcggaa

SEQ ID NO: 20203 - DNA, 1237 bp, Mus musculus
ggctttacagagaaaccctgtctccaaaaaccaaaacaaacaaagaagctattactggcttacaggcacagccagctcagttgagagtggggtggatagcaactccagcaggctctgatagcaactccaccgtcctctgcccacagatctacccagacccagagctggaggtccaggtgttaggcttggctatccgctgcatccacagtgaggagggctgccgctggagcgggccacttcgtcatctacaggtgaggctcgggtggggagctagaactaacccttccttggcagatactgactgttatctgtcccaccagggccacttgaacacttgcagcttcaatgtagtcccctgccctaatcgctgcccagccaagctgagccggcgtgacctgcctgcccacctgcagcacgactgccctaagcgccgcctcaagtgtgaattctgtggctgtgacttcagtggggaggcctacgaggtacatgggtccaggctgacggtggaaggagggtgaggcacctgggaccccaggcatcccatcccctaacttaacccctgtggtgatttcagagtcacgagggcgtgtgcccccaagagagtgtgtactgtgagaacaagtgtggggcccgcatgatgaggcgactgttggcccagcatgccacgtctgagtgccccaagcgcacccagccctgtgcctactgtaccaaggaatttgtttatgacaccatccaggtgaggcccttgctgacctgtagtctgtgagactgtgtaccagggagttggggtactgaccactcttgctatttctggtcctagagccaccagtaccagtgcccacgcctgcctgttccctgccccaaccaatgtggagtgggcactgtggcccgggaagacctgcccacccatctgaaggatagctgcagcactgcctttgttctctgccctttcaaagagtctggctgcaagcacagggtgagatgccccttcttcctcagccccttagcccttgaggtccttgacagagcatcagttgctgccatagttgaggcctcgatgggtcctgctagtcaactcctgctcattcccagtgccctccgccattgtcctgttcctgtggaactaggtgcctgccaccccgacctgcttctcctctcccttgggccttcctcttttggtaactttttccttctcccatggctttgggttttgccaacagtgccctaagctggcaat

SEQ ID NO: 20204 - DNA, 1604 bp, Mus musculus
cgcctttaaccccagcactccgcaggcagaggcagaggcaggcagatttgagtttgaggtcagcctggtttacagagtgagttccaagacagccaatctacacagaaaaaccttgtctcgaaaaacaagaaaacaaacaacaaaaaaattaattcctgacaatcacatgaagactcaaccatctgtacagctacagtgtactcatatacataaagtaaataaatctttagaaaaaaacaaaaacaaaaagccaaaacctacaattcccccagagaaaccctgtgtcggaaaaccaaactaaaccaaaccaaaaaacgccacatttcccaagaagccctttcaaagggaaaggtggcgcatgcttggtctcccactctagggaattaaatggaactacaattcccaagaagcctcatattacagttcatccaatcagtgctatatataagctatcgcgagacttttatgagcctccattctataagctcatgggaattgggctgggccatccttttcagccaagatggcgccgaaagcgaagaaggaaggtatgttgcggtatgggaatctgtcaggtcggtcttggatacccgcagagcgaactcgcggggaagaagaatgcccggctaagccatggggggcttgttctgtggctactgtcgcgactaggccccgctgcggggtatgaggaccgcgtgggccaagccgcatgggctggttccagtgcaggggattggcaaagccaccgggccggcagcggccgccactgatggccaagcatttgactttgggaagctccttaacatccacagggtggcgctccgggtctccagacctataagggattaaaagtagtccttattcgccctttccccacgttaaatggggttatacgcacccacgtgatggtacaacgggttaattatctttgcctgtggtatcgtgcatatgatggaaaaaatctgaagtctcctgagacctgtgatgtcttcaaaggaaccactgatgcacatgctggcaggacggccggaaggggtcactttacgaatgccacacttaattttaattgtcctctcccagctcctgcccctcccaaagccgaagccaaagcgaaggccttgaaagctaagaaggcggtgctgaaaggcgtccacagccacaaaaagaagaagatccgaacgtcacccaccttccggcggcccaagaccctgcggctccggaggcagccaaaatatcctcggaagagtgcgcccaggagaaacaagtcagtagggaccctggacccagtagcatgtagtagggcattaggagttcttaacgtagcttcccttataaaacacaattgttgaaggagctggtgcggtggaagtgtgaggttatttagtcagtgtttgaaagttgacttcaaagagatgttgcttatcttggttccaagtgataggggacttgttggaacacaggagagtgttgattaagatgtccaattggggagtgatggccttcgaatagtgttatgaaacacacttttttttttaagatttatttgtttttttatttacatgagtacactgcagcagtcttcagatacactcactagaaggggg

SEQ ID NO: 20205 - DNA, 1604 bp, Mus musculus; identical to SEQ ID NO: 20204

SEQ ID NO: 20206 - DNA, 1147 bp, Mus musculus
taagcctggtccagtgttctatagtgttcccctgaggtttctgctcctcatgtcaggtgagaatgtccgggaattcttcttccgtgtggcagcactaacctttgaggccaatgtcctggcggagctggagaaatccggggctcggcacattgcagatgttgttcgtaagttaaccacctggttaacagtggcagagagcggaggtggggtggttaccttcaatccatggttcatatatttcccatcccttttcaggcatcaacagcgatgacaaaaacctgtacctaactgccagcaagaaaaaggccacatgttgtccctgagcagtgaggactgtccagagacttcccatttccggggtaccgtgctacctgcaactgctccagaactcaacccctggacatttgcactgactttttccagaccaaagagctatccattgatgtcagtgccccccagaaggtgacagggaccatgctagtcatttgctgcccccaggcaccatgccaaagactggatgaccctctgttcctctggggctctccagggtgcctggtgaggggcagtgttcttgctgcttttgctcagcctgctgggcctttcatgtataaaaatgcttaatgattttagccttacactgtgccttatgcattaaagtccattattagcattttctttctttctttaaagatttatttattttatgtatatgagtacactgtagctatctttagacacaccagaagagggcatcagatcccattacagatggttgtgagccaccatgtggttgctgggaattgaactcaggacctttggaagagtaatcagtgctcttaaccgctgagccatctctccagccccgttattagcattttctaggctggagtccttactagagataataggtgtagtgggggcatgtagcgatttggggattggagcccctatggggattctgttcattcctggctcctaaaacagggctcacactggctgacgtctcagagatcaggttttggagactaactatatcttctagattctctgggttaaaatctgagtaactaccctttccttgctgttttctttcctctctgtctccctctccctttcttcttgaggtagggtctcttgtaggccagcc

SEQ ID NO: 20207 - DNA, 1440 bp, Mus musculus
tggtgccatgtggcctgaggacttcacataagcaggtattatgtctcttcttgaaagccaagacctatgaagtgttcccatgggcattggtttctggggaagaatgcaagaccgaggtgggttgcttcctgtaaatgtcaggttctgtctgtgaaggtggtctctcaccagtggctagcaggaaggcttctcaggattccagaagactcctagtctctgagacttaccctttgtgttccaggtccaacagccatgcagctatcgactggggcaagatggccgagcagtggctacaggaaaaggaggcagaacgacggaaacagaaacagcggctgaccccacgaccctctcccagccccatgatcgagagcacccccatgtccattgctggcgatgcgaccccactcctggacgagatggatcggtagggggcctgttcctcggactctggttacctctgaagctcccaagaggcctggccacttatggcctcactccctgcccctcttttttttttgtccataaagtggcgtgaaatgacgttctttttagtggtcagcctggctggatggtggccttgtgagctggtgtgcaccgagcagcagctgttccactccgggcttgtgctaaccacctgttctggggccaggctgggagagcagtatggcagggaggagagcaaaggtggagcagtctgtaatgtctctggaagccctcacctgagacaggccctcatgaggcatgcagctcaattgtctatgtccccagcctgtgtggggacaccgatgctatttattcagtttggggcaggagggaaagtagctctgatcctgatggcaagaccttggctgtcaaagcaggactgtgagggccatgtggagcagtgctgagctgccagcccctgcctgcctgcctgcctgccttccctcatcacctaacctcacctgcttctcgcctgtcatttgaataaacagtgtttgtacagagcgcttgccgaggcctccagctccctcgctctgtagggctgcttcagcagtttgaagctccaaaaacttcctctcataatctaccagagaatccaggattcacattgcctggggttacctcctacctgctctgagccctgtgaccctgtgtggacttcttccatctgttgtttgccgtgttgaagtggagtctctaacccagactggccttggccttacagcagccctgcctcagcctcctgaaggctggaattacataaatgatacacgtgcacttaaggggtttattgttttttttgttttgttttgttttgtttgcttttgagggtttccctgtgtagctttgtttgtccaggaactcactctgtagaccaggctggcctcgaactcagagatcaactgcctctgcctcccaagagctggggttaaaggcctgtgttaccaccactgggct

SEQ ID NO: 20208 - DNA, 1163 bp, Mus musculus
actcaggacctctggaagagcagtcagtgctcttaaacactgagccatctctccagcccccatgcctttgcttcttgagtgttaggattcaggacctatactaccacctctggattaaatgcttttaattttttctttctttcccagtctcatctgtaaagtgaacctatcaaagatcaatagcaaagtcctgaagagtggtcagctggtgagtacgtcagggtgattgtggggcttcatagcctcttgagcatgggtatgaaggagcttagggtccttgtgttgttagattctgtgcctttaaaggtttttcccaaggcaatgctcaaccagtattcctaaccattgtagctttgtttgttttgtgggagacgattttgtcatgtgtagctatggctggcctgatatgtagcccagtctggctttgaactcatggtgggcctcctgctttagtcttgagaactaggattataggtgtgaaataccacactggttccagaccattccaatttgatctaaaactttaaacctcccttcacaggaggatacatgtctggtagagctctcactggccctggacctgcgcctacaggtcagcgtcagcagttggcatctgacggctgtcactgtggatgtgtggacactccatgctgagctgcatgaaggtctcttccatagtcagctactgtgtcatgccccaggccggatttccaaatcagtttcttgttcaggtaaagcctcggtcattgagtttcttggctgctgtagtcttggggattattttggaagtagaaaaaccagtgacttggccccttgttgaggtgtgagtcattagacacaatggcctttgattaggtagagggagaggaaataggtatttccgtgttctgagtcaaagaacttaaacctaatggttactgtgagttagcactgcatgttttatgtatgtttttactatcttttttttttcaaataaagaaacaggcctagaacattttagttagctgacttggctgatgtcttatagttagtgaaagtaagtgtaaattatttgacagttaagtccatatcttctccattatacctaactattcactttactgtttatgcttttagcgttttagagtctgggaacggaagtatatcagatacctgggtctgtg

SEQ ID NO: 20209 - DNA, 1618 bp, Mus musculus
gctgtcctagaactcactctgtagaccaggctggcctgaaactcagaaattggcctgcctctgcctcctgagtgctgggattaaaggcatgtgccaccactgccggacaattttggttttttttttttaaactttgtcttcatatctttctgctgttccttcagaataccattgggaggaacagcaatctgaaggacttcactttttactttgtagctgtggccaggcccaaaactaaactgtcagcagttttgagaactctgttccttgacaggaagtggctattataatgatgtcagtcttatccctgtgtagaaccttccctcagatcctggctcccattatcttcagcacctcagtctccaatgtcagcatttccattcagcttggagatacaccaccgtttgctttggggttcaattccatctccctgggtaaggctcagggatgggaagggaatgaggatttgccctttggttatagctatgcctgtttcatggccacggtgccttaattgactacctccttaccatgtatttcagactaccagcacctccggccacaaagtatccatcagcgagcagtgctaactgtagatcatctctgctggcgtgtgggcagtgactcccacattcagcgggcaccacatccacctaatatgcatgtttggggcgaagcacttgttctggattccttcacactacaggtaggtgggtgctgtgtggtgagtcagggcccacggagtgccctgtcctgacacgcatctgaggctggagtgtgcccttggtgtgggggctgcatcagggtctcctaactgcatcggcatggtttcagtgggtttcctttcttttctagggaagttataaccagcccctgggcttgtccagcacccagtccaatactctttttcttgactgtactattcgaggacttcaggtagaaatatcagacatctgtgcccagtgtctgtctcgagtcctctccttggtgattccacaatctgaaaggtcagctgtctctaggaagtcgtcacttggggagtctgtgaccttactgtggaaggtcgacttgaaggtggaagacatgaacctgttcactctttccgcactggttggtaagtggaacaagaagtctgctgaaattcttcttttcattaaggaagcttattatctgggtagcctccttgttagagggacaaaacgttagaaaggcttggatgacaaactttgttctacttcttagtgtctattgaagaaggaagtatttaaaaaagacacaatgggaaaaacttaaccttggcgtgatcagaggatgaggcctgtgtggtgtgtcttttgatttttttttctcaagacagtgtttctttgtgtagctctggctgttctagaactgaagtagaccaggctggcctcaaactcagattctcctgactctgcctccccatgctggaattaaaggcatgcaaccagctttttattttcttgtgtatagttctggagagtaaatgatgtatggataattctagacactgagaaagttcattgactttgccaggtctagttaggtaagagaagagaaagttttcctaacatactaggaatcacttaggagaagtgtt

SEQ ID NO: 20210 - DNA, 3414 bp, Mus musculus
aagaaaacatgcctcaaacttaaggcattttagaatctactagaagaaaatccaaaagtgtaagtacttacaagtgacagctattaacttagcactttagtgctaaggggaaccaagcaaggcagtagttaatgtagtttcttaggaaggacttatgaattataattcatgaacctggtaggcatgtgtgatagtcctgttccttctactgtcctgagacatagtgacgtgcattcttttcttataccctaaaggttcagtgtggtgcagggctgactttactctggagccccccagatcacatgtatctgtaccaacatgtcagggccactctacagtgccgagacctcttacgagctactgtgtttcctgagattattgagtcccattcactaaacactccacagtccacttgggagccagaagaccatctccctgagtcatccctgcctaggcggctgctcaccctgaccctggaggtgagcactgccaagctaacagctttcgtggctgaggacaagttcattaccctggctgcagagagtgtgtcgctgaaccggcatggaggttcactgcaggcttactgccccgagttggctgctggctttgatggcaatagcatcttcaacttgaaggaggtagaggtgcagcttctgcctgagctagaagagatgatccttcacaggaaccccttccctgcgctgcagaccctccgcaatcgggtttggcttctttccctcggatcagtctcagtggagtttccttatcagtatgacttctctcgaactctggatgaggctgtgggagttcagaaatggctaaaggggctgcatcgagggactcatgcttgggcttctccaagccctgcccctcttccacctgatttactcctaaaggttcagcacttttcttgggttttcctggatgacatctttgaggtgaaacttcatgataactacgaactgatgaaggatgaaagtaaggagagtgccaaaaggctgcagttgctagatgccaaagtggctgccctgcgaaagcagcatggagagctattgccagctcggaaaattgaggagctctacgcctctttggaacgcaaaaacattgaaatctacatccagcgctctcgtcgtctctatggcaacacacccatgcgccgtgcactgctcacttggagcctggcagggctagagctggtggctctagcagatgcatcctttcatgggcccgagcatgtgatagagcaggttcgagaacttgatcctggaagcccttttcctgctgaaggaatggatcttgtcactcagtggtgtcgtatgctcaagtgcaatgtcaaaacttttctgggtaagtgcatcttattggtggagcctggtatctgtcctgtgagtgccagggagctctctgagtgattgcaaaggagctaggtttaggctgtattgggaactacacttggtttgagtagacagctctgctttcctttctttgttcctgatttccaccctgaaactactctgctgacatattaatgagcacaggcttttgtgaggctagtgtggctcttgaatttcatgttctctctgtccctcacctttgcctagtggtctctgtgacctgttttatctttgctacataattgccagcccttgttctctagattgactataaatgggtaaaacaagcaagggggaaaccatgtgtgaacgtaaacaaccagtgttcatctgctgtctaataatagttcggatcagagactatccacggtacctgtttgagatccgggactggcggctaatgggtcgacttgcgggcactgagcagagtggccagccatgctcccgtcgacgtcagatcctgcacttggggcttccctggggtaacgtggcagtagaaagaaacatgcccccactcaagttttaccatgacttccactgtgagtaaaggaaacagttggtttggctgaggggtatttatgggccttgggtagacgataatctgaggaccttttggagcaaaggaagaccagagaggtgtagtaagcctgcattcctctaccctagcggaaatcttccagtacacagtggtgtggggcccatgttgggatccagcctggacactgattggtcagtgtgtggacctcttgactaagccttcagctgaccccagcccacctttgccctggtgggataagagccgtcttctgttccatggggactggcatatggatattgaacaagcaaacctgcatcagctggccactgaggtgaggggctccgtggagtcatttccttgttgggatggtgtagttgggacctgcacagcatgtggggtgtgaagagaaaggttggtcttttgtctgtctgtagctcaccctcgttctttgggctcgggcgggtcattgtaggacccctataatacaactgagaacatgcactgggagtggagccacctttcttttcattggaaacctggtcagtttgtgttcagaggggacctggatgtcaacgtaagaacagcttctaagtgagtagtggagtgaagggtgggggccttaactggatgggggagttggggtgggggagagggaagagccaaggggaacaagtgaccaagtctctgagggctggggctccgttgtgaggcaggtatgacgactgctgcttccttcacctgcctgacctctgcatgacactggacctacagtggctgtgccacgggaatcctcatgatcatcacagtgtcactctgagggccccagagttcctgcctgaggtacccttgggccagctccatgactcctaccgggccttccgctctgagaacctcaatctctccatcaagatggatttgactcgccatagtgggagtgagacttgggcctgggacagtgggaggatgggcttgggtcctgaccacttagagtgaaagagggatgggacagaaggacagaacagagtttaggttgggacctttgcaggaggattggtggttttggactgctgttaacaataaaaccataagttgtgttgcttatgagcagtggatattctcaaagttgtatagtctaggaagttaaagatgcaagttgtctggtgaaggtcctcagctgacccagtgcaccctttgtcatcaatatcataaggtctttgtccttgctgtcagcttcctttatcaattccatcaccttggagtttaggattttaacctaaatatctggctgtcggagtcgagtagggggatgaacagacaaacgtttagaccatggcagtaggtgacagcagagagcttagatccttgaaagaagtgctagggacactgcatatgaggagggtgtgtgggttttgtaatctctaaaagtgaagctagggaagcgcttcctcacctacgtgtcaaccacagcttgaatacgtctgt

SEQ ID NO: 20211 - DNA, 1135 bp, Mus musculus
gcagccctggctgtcctggaactcactttgtagaccaggctggcttcaaacacagaaattcgcccacctctgcctcctgagtgctgggattaaaggcgtgcgccaccacgcctggctgagtaaaagttcttttttttttttttccattttttattaggtatttagctcatttacatttccaatgctataccaaaagtcccccatacccacccacctgagtaaaagttcttaacactttgtttagtgctggctttctccatctttcccagttaagtatagcatttgaaattaactgattcattaaaactgcattaagtgcagttaggatgtaaagtaatgtacaaactaagacgacttaatatttctcgagggtcttgccatttctccctctgtttatagcaagtttgtctctgcatttctgttcaggaatagaggtgggaatgtctgtgtgaccctggtacccttttcctgtttctcaggagctttctgctcgagatggtgatcctgcctttcatacacaccagctgtatttggtagatttacggatttcctggacaaccaccaatagggacattgcctttggcttatatgatggctacaaaaaagcagctgtactcaaacgtaatctctctactgaggccctgaaaggtttgaagattgatcctcagatgtcagccaaaaagccaaagcggggtatcccacctagtgcccaagtcccacctcatgtcagcactcccagcttcagtggacggcctgataagggatcatcaggaggtaggctgggacagatgagactatgggtttacatttagaacgtgaacatgtgcttggaaaaggccttaagaatgactcagttatgactggttccatctcgatacagacacagagatgcaagtgtcatttatttatattcggccatcttgggtttatattgctaaaaatgaggaagctttgaaagtctgtcctgtggccagaagatcagcaagaattggaatcagaagagaaagggaaagaagcagagttaagaatgctttattgctgatgtagttgaacacatttttaatctcagcactcaaggcagaggacagcctggtctgtacaaattctaggccagccaaggctgtagagtgatact

SEQ ID NO: 20212 - DNA, 1099 bp, Mus musculus
gaggcagcaaggactggaaggaggtggaacagctgggatgcgtaagaaggacagaacgtcactgtgcatataggagacttggctgctggaaggagttaaaatggggaaagtataagcctgttctatagcactgtagaagcggagacaagcggacacacctgggttcagttcctgccattgtctggatgtggaccctaggaacaaaaataacaccatttaaactggtatttctatttttattggaaatcgttcacttttatttttagtaacactgaggggaactaaatagcttttatcttatcctttgggtcaagggttggatagagtgaactgcacccgtgttccaggttgaagatgtagctcagtccttacctagacaggaagtaatagaagctcagtgtggtcctgcatgtgttctccttcccttcgagacgctgacctttccccatttccgatttccttgccaggtgcttacatgttgcagaagctgattgaagagacagacagatttgtagtattcacagaagaggaatccggtatgagtgaccaattgtgtggcattgctgcctgccagacagatgacatatacaaccgaaactgccttattgagctggttaactgccaggtatctttttttaataggaaaccagtacgaagatagatcccaaataaaaatgtttacttccctatcatttttttaaaaatacaaaaaaaaaattaggattctacaagttggatgtggcggctcacacctttaacccaaggaaggctcttgggaggcagagccagggggaatctttgagtttgaagacaatatagtgagaccctgcctcaaaaaggggggctgggagggggtcccactgtgtggctcaggctggtctcaaacttggctgtctttgccttggtttcctgagtgctgagggcttgttattgctaaactcaatgtttctccacgtataactgaagaatgggtggcgagaactcagctttgtacctttctgtaggtttcctgagtaacacttccacgtataaaacccaataaagcttgctctgtaagctagagttagcagtgatctgaatacccttctcagcccccttt

SEQ ID NO: 20213 - DNA, 1095 bp, Mus musculus
tgtgaaagtagttatttcctgcatggttttaattaaaggggttcctgtgcgctattgatactaacatttgcttggccgttagtaagtccggccattagaacagcctgtgctcttagaggaaactgggacagtggttattacttaggactctgaaagaagtctatttctactcctgcgtgcctcctcttccctttgtgaaggattgactaacatgagtggttccacatgttcgttaggctgggtatggtggtgcacaactttaatctccacaccagaaggcagaggcaggtggagtgagttccaggccagccaggactacatagcagaaccctgtctcgggggaaaaaaaaaatatatatatatatatatgttaggagattgaatatttaggggagaaacctgaacctgttatttaactgcttacaattctgtaggggctgtggatacttttactctcatccaccacgaattggaaatttctaccaacccagctcagtatgctatgattctggacattgtcaacaacctgcttctccacgtagaacccaagcggaaggtgagcgtgagcctttctagaattcaggttagactcacctgaactttgatcttgccgtttacttagatcccagttaagtaaagtagtgctgggctggtgagatggcagagtgggtaagaaagaaactaatacctcaccctggaaggggcttatgattggtacatcttctcagtcaattacagctgttggaattcctattgtttatgtttacgtgtcccaagactgtatggcttgttctagacaggtcacctaaacatcactaacagtggcacctacacatttttgcctccatctctaccctgtgggtctagcttatgaaatcttaggaatgtggattgcagatcttttatactgacctaccccttattcttgctactgcgtgattggtaaaggtcagctttccagaagagagcaccattcacttttctgcaagacttaactttttaaaaaacatgaattcaaggggctgcggatattccttccattagtaaagcctgtgcttagcatgtgtgaaactgtgggttttattcgcagcacca

SEQ ID NO: 20214 - DNA, 1156 bp, Mus musculus
aaagttaaagatatagaaatcataggagttagtgggaaaacagtgctttactaagaagccatagaactaaaggacccatggccgggtgtggtggcgctcacctttaatcccggcacttgggaggcagaggcaggtggatttctgagttcgaggccagcctggtctacaaagtgagttccaggacagccggggctatacagagaaaccctgtctcggggaaaaaaaaacaaaacccaacaacaacaacaaaaacctcaaaaaaaaaaaaaaaaaaaaaaaaaagaactaaaggacccatagctcagggtgtcagaaacaagacatgggggggggggtcgttattaactaagccagagtaagttggtttctgggcttacagggcactccggctgtgtgtttttttccttacccctttgaatcttctattcatgcatagatgttttaaggatttccaactgcagcgagccaataaaatggagcttcgaaaacaacaggaagatgtgagtgtggtccgtcgcaccgagttttactttgctcaggcacgttggcgcctgacagaagaagatggacagctgggcatcgctgagctggagctacagaggttcctttacagcaaggtattagggtggcacagtcacagcagcagccaagtctcaggcgtggcctgattcaatccatagagaaaaaagggggctaattgtatttattaatgatggtcatgattggagacacatcagcctgtaataaatgatgtagttatatagataattaaataaggcccagactgaagtaattaccaagttgagttggaatagtgctgttctgatactgacagcatttctgtagttgcccaaggagaaatattccaattacaaaagatattgaaaatgaataagaaatttaaatgccacaataactaggaagttacttaaccgttactggtttagctagttttacttagaagaaacactggtttagagggtatgttggttgcatatgagattgaaagaggtgttagcagggtgtgatggtgcttatgtttaatcccagcattccagatgtgaagttaaggagggttaggaggccaaagctagccacaggcacactttgaggactagcctggactttacaagatcctgatttacagaggaaagag

SEQ ID NO: 20215 - DNA, 1176 bp, Mus musculus
catccccacatttatacagcaagacttatttttccatccctagccacttagcttctgaccagagggagggcattgtgatttgagctggaacagcttgcctagcttagcaaagaccgttgcttcagttccctcttgcttcaattcttctacagaagacctgtgatttacttttaagttgtttttttaagagatgtatagttgagttattggccgctctatcctataggtggttctaaggccccagagttcctgccagtctgggagacagctagccctccgcctcttcagcaaagtccggccacctgttggtggtatctctgttaaggaacactttgaggttagtaaacaatgccttgggaactcttggtcaaaggttagctcaaaactaactagttataactgttaaactagttagtaatcaaagacagggctagtacttgagcttaattgtttcttcacctctttccctctcaggtaaatgtggtgcctctcaccatccagctgtcccaccggttcttccatagaatgatgggctttttctttcctggtcgaaatgtagaagatgatgaagttggtgatgaagaggataagtccaaactggtgactactggtaagaattggttatgttggaatgccaggaatatggagtggcagcctaaagcagcttcaggaagagagtcactgttggtttgcatgctttttcacaggaataccagttgtaaagcctcggcagctgatagcaacagatgatgcagtaccactgggctccgggaagggcgtggcacagggcttgaccaggagttctggagtcagaagatcatttcgcaaattacctgaggtatggcatatgaaaatcagagaacctaaatgtggtggtccactataatttcaacacttgaggacaggagctggaagataagtccaagggcagcttggactgtatgagatcctatctcaaaaaaggcaaaagaagcctagcatgggggcacacacctttaatctcagcacttgggaagcagaggcaggccaggaatgatatacaaagaaaccctgttgctaccaaaacaaaacaacaaaaagcaaaagaaacaaaaaggtaggggctggtgagatggctcagtgggtaagagcacccgactgctcttccgaaggtccagagttcaaatcccagcaacc

SEQ ID NO: 20216 - DNA, 1676 bp, Mus musculus
aagggacagccgaaaagctctggttgcccaggtatctcgccagggctcatggctgtttcgttagcagggactggcaagcacattgcctttttaagagccttctcttctgtgctgtattaagagatggccaggaaaggggcagataatgactgatctgtccttgtttgtccatgcctttgccctggtatgctagtgactcattaattttgagggaattaagggcttctacaacatcagctttatgatggttctgattagattgtaagcttcttacaagcagactattatctatatactttgaagtgcccttttgtgtttacatataagcttaataaatctttgaattggttcactttaaattgtacaccccgtttcactaatttttcctttccttttattcctttccactgccaggtaatcaaagaaaaactaaggctgaaacctgcaacggggtctgaggtccggggaaagctagaaacaaagtgtgacctgaacatgcaacagcaggaagaagagaaagctcggctcctcattggtttaagtgtgggcgacaagaaccctggcaagaagtccatcttcggcaggcgcaagtgatgtggagacccaagtgactacagtatagaattgactctggctcaggatccagggacttgagggtgggcagagcttcccttcatcctgcaggatttgtggggcatatgggaactgagagacattgttcaacagctggcctgtccctgcagggcatggtggacaaagcgctgggttccctctcatgggattagacccagggccacaggggcaagaaaaccagaagacccagggattgtgtccaagcctagtatcctgctctttcggggcaacagaaagggttgggggatagttttgatcaagtatgataaatttttataaagatatatatatataaaacatatatatatatttctaaatgtaattgctctccctttgtgccaataagctaagggaaggagtctgatcctctgtgcctcactccactgccttgttgtctaagaggtgttgggtttgggggataaacttcccagtctgtgctcacttgggaggatggcattaggagccagggctggccatgggtaccttactttcctccctggggtatgcccaggagaatggagaaaaaagagatttaaagaaaaaatattttaaatttgatgttggccttttttaattgtattgagtaaaagcgttcaagttgtctgtgtccttccctcctcactaacccaacacattttttaactgccccagtaatgactggtcttgtctttctcctctgccttgaagtcttaccacaatcacatatacttcccagtttgggtatgatgctgacctaaagctgatgggtctgtgtacactggaagaggtggggctcatgggtaatgcagcatcagagggaggaattgcttatgtaacttggacaacagatttagcagcgcgaaaagaggcagaggctggaaatgggagcagtaagctgtcggcagggacaacacacccgggtgtctgctcctcagaaggtagggtatggggctctggtataggctctggctgcctatgggagggaaatgaaagatgtaggggcctgaggctagaaagtgcccagttaggagactgtcactgatatccattgttggggtgggcat

SEQ ID NO: 20217 - DNA, 1186 bp, Mus musculus
gtaaaacttgtcaagagaggagtttgacccactgggttctttaaagacattttgtagaacttacttgggaaattgtcctgaagaaattgctatcatttcctcttcctatagggagaaccaggaagcctaccattctttcaaaatatgaaagtttgcttttttttttctttgaccatgattttgttattttatggtgctgggtattaaacctaggtctttgtgcttgctagatggatactacactactactaaactatacccgcaatcctatttcattaactttattctgtctttagtaactcaagatttttgtttgtttggttggctttggttttttaaaaaatatttatttatttatttatttattatatgtaaatacactgtagctgtcttcagacactccagaagagggaatcagatctcattacagatggttgtgagccaccatgtggttgctgggatttgaactccggacctttggaagagcagtcgggtgctcttacccactgagccatctcaccagcccagctttggttttttttgagacagggtttctcagtgtagacttggctgtcccagaactcactctgaagaccaggctggccactcagagatccacctgcctctgcctcttgagtgctaggattaaaggtatgtgccaccaccagctggcattcctggagtgatctctgagttattctggtgtaactctagattctgagagcacttgaaacatttcccatcctctgttcagtctctcctaccccccactctttctctcttaagagttatctatttattttatctatacgaatacactgtagctgttttcagtcacaccagaagggggcatcggatctcattacagatggttgtgagccaccatgtggttgctgggatttgaactcaggacctctggaagagcagtcagtgctcttaaccgctgagccatctctccagcccctaccatatctcttaagatgttggttggaattagaaaaggacgtggcagggtcatagtcaaggtagagtctcccattggcataaatagatttgcttagtctgtttatactatgggctgcatcccctatatgtacgggatgcataaggatccaaagtggtttcctatctttcttttcctactagtagttctgtgtagtaaccagcaaggattagctaacttctt

SEQ ID NO: 20218 - DNA, 1748 bp, Mus musculus
ccttcagctgtcctggcccaggatttctctgtcgatcatgtcgatccaggggaggaaaccgtagagaacagagtcctacaggaaatggaaacgagcttccccacattccctgaggaggccgaattgggagaccaagcacctgctgcaaatgcagaagccgtctcacccttgtacctgacatcaagtctagtggagatggggccccgggaagccccaggcccaacagtagaagacgccagtaggattcctggccttgagtcagagacttggatgtccccattggcctggctagaaaagggtgtgaatacatcggtcatgctacaaaacctccgccagagcttatccttttcttctgtgcttcaggatgctgccgttggcaacacacccctcgccacgtgttctgtgggcacttcctttactcctccagcaccactggaggtaggcaccaaggacagtacttcagagacagagcgcctcctcttggggtaagtgacctctaagcctgtgcctctggggctccaatattgtgcacctgccactcgaatctcttccccttcctgtcatcttttcttcttttcctgtggtagctgccgtcctccagatctggctaccttgtcccgacacgacttggaagagaacctgttgaactctcttgtcttgctggaagttctttcccaccagctacaagcctggaagagccagttgactgtccctcaccgggaagctcgagacagtagtacacagactgacagctctccttgtggggtaagaagctgctccatagaacttggaggatcccagtggaccctctgcctcagaaactaagctgagaagctaccagaggagaaataggatgccttgatcacaggcttagtcatagcatatttgtagaagctgagaacttgagccacgtgtggtggtgtatgccatccaaggacggaactgaggtaggatgacctcaaattcaagggtaaacaggactagagagtttgaggctagcttgtctgttttttgtttttgttttaaaaaagctaaagattgctgggcaatggctgtgtacatttttaattccagtactcaggagataaaggcaggtggatttctgaggccagcctgatctacagagtaagtttcaggacagccagggctacacagagagactgtttcaggaaaaagagaaaaagctgaaactctggacatatcttaaaccgtttggcatttcctggactgagtacatccagaccgtccaaggcaagaaatgtaagcagagatcttcatttctctggagctcagaattgaacccagagcctctgtgtgctaggcaaatccagagcagtatctttagcccaaagcagggaagttttataagaatcattttctttttttttttttggtttttcgagtcggggtttctctgtgtagccctggctgtcctggcactcactttgtagaccaggctggcctcgaactcagaaatccgcctgcctctgcctcccgagtgctgggattaaaggcgtgcgccaccacgcccagctaagaatcattttctaagtcattatcttacagatattttatttactaattattttttttcctatttttcctttgtcagttctcagcccctcttgactaaggaagagcatatttatacttcctgttcccataatttatttttggtttttcaagacagggtttttctgtgtagccttgctgtcctagaacttactctgtagaataggctggcctta

SEQ ID NO: 20219 - DNA, 1202 bp, Mus musculus
atggacaagtatctgagccatgtaagcagttctgtttccttccaccacagaagcaccctgccatatatatttcctctgttctctctagctgtgttctttacgtgtagggttcatgaagcctgtttgcattgtagaggcacatcctggaggagaatcttcggcgctctgacacagagttaaagaaactcgatgacacaattcagcatgtctatgaggtaaaagtgaaggaggtagtgggacctggctgccggaggggctgaggagcatggctccggttctcagcctgactacttttttttttttttaaagatttatttatttattatatgaaagtacactgtagctgtcctctgagggagtcagatctcattacagatggttgtgagccaccatgtggctgctgggacttgaactcaggatcttcggaagaacaggcagtgctcctaaccgctgagccatctctccagccctcagcctgacttcttacagtggcttcattttcacttttccagcatcacaggccaggagctttggcttcaggcttgtgattcagaactgttttctgtctcttcccagactctgttgtctatcccagagactatgaagagttgcaaggagttacaaggattgctagaatttctgagctaagaaactgaaaatattggaatgcagtggtgtgcacctgtagttccagctgctccagacgccaaagttggagtgctgccaaatcccaggaatttgggaacctaacacagacaacacagcaaaaaccctgaaaaatgaattccactccactccagtttccttcagggctctttatcccaacccttatcccaataataagaccaattggcatagagccgaccatgttttatgttatttaaataaagtgtatttaatgtagtccttccagtccactgaatcttattttgggggtaggagtgggcagatcagcacttcagcctaggcacccttcaccacttcctgctgcagctaaagccaaggctgactgcttttctttgcttgattctcttcttctaccaacaaaaaaagggggtgggggggagggcaatggactgcctgttccctggaccactgcctggggggaacagaaaagactccattcacttactttccccatcccccttgggggtaggcactggtaaatatggggcagagcacagaaactcaattccattatt

SEQ ID NO: 20220 - DNA, 1213 bp, Mus musculus
acactgaggaggcagaggcaggtggatcttttgagttcaaggccagcctggtctacagaatgagttccaggacagccagggatacacagaaaagccttgtcttgggagaaaaaaatgaaaaacagaaaaaaaaaaaaaaagctcactacaagcccagagagtggtgcaaccttttagctgatggtaataggccagattccttaagacaggaaccagaactgggcttatgtaatggtgcatgcttataattccatcatttggaaagctgaggcaggagaatctcaaattttagcctgagttatgtcaagaggctatctcaaaaaaaaaaaaaaaaaaaaaaaaaagaaagaaagaaaaagaaagaaaaagaaagaaaaagaaaagaaggatagagtgcctttatgctttcttcactgagccatggcgctccatccctctgtccccccgcacaggacatgatgagctacattgggcctgagaggacggcagttgtccgggggctgatccacagggaagccttcaacatcatcggccgtcgcatagtccaggtcgcccaggccatgtccttgacggaggatgtgcttgctgctgccttggccgaccacctgcccgaggacaagtggagctctgacaagaggcggccgctcaagtccagcttaggtagggcttgggctttgttttaggaagggagaagacgtgagtccggcggaagatttacttatttatgtgtatgagtgtgttgtctgcgtgcatgcatgtgtacggcatgcatgcttggaggtcagaagagggcgtcagatccccagggactggagtgaagatggttgtgagtcaccatgtgggtgctgggaattgaacctggatcttctgcaagaacaaatactttaaagctctaaaccatctctcctccctctgttttttctttcttttttttttttggtatttcaagacagggtttctctgtgtagccctggctgtactggaactcactttgtagcccaggctggactcgaactcagaaatctgcctgactctgcctcccaagtgctgggattaaaggcatgcgccaccatgcctggcctttttctttttttttttttttgagacagggtttccctgtgtagctctggctgtcctggaacttgctctatagatcaggctaaccttgaatttaagagatttgccaatgtctgcctctggggtgctgggatta

SEQ ID NO: 20221 - DNA, 1555 bp, Mus musculus
ctgctaaccccatccctcaccctcctaggtatatagggctgtggctgccgtccagaaggcagcaaaggccttagcccttgggcacctgtcgtccgcctttgctgccagccaggaagccgtgacctcctccgagcgcgccttttttgacccctccctcctccacctcttgtatttccccgacgaccagaagtttgctatctacattcccctcttcctgcccatggctgtgcccatcctcctgtccctggttaagatctttcaggaaactcgcaagtcctggaaaaagcctgagaagatagactgatccgggcagcatgtcagagggagccctcctctctagccacgctgggagggtgttgggccaagagaccaaggcaaggtctgctggtgatgacatgtcttcactctcgcccgtgggctctctacggatggcactccacgatgggctcccttcccctcctagtccactggcttgctcctccatgcctacaagcctcagaaggtacccttcctgatctccatatctggctcgaacttgaaagcctttgtgtgcctacctctggacaggggtactttgtccttgcagcctgtcagcacagcatacaaacgcactgagaggtgaatttaggggagtacttgagttgaattgtagccctgtcctctccacttctgagaccacctccctccttcctcagcttcttgactggcgtcacccactggggacagcctggtctaggaggcagtggcttaggatcttctaccttgtggctaaggttcccctctaccctttcagagaggtagtgtggaacaggagaaaacatttctgacttggaacccaacaggcctgaatcagactccggcttctgcacttaacagactagagagcatcagctaagccgctcctcgctcctcacctgagcctcaggtttccattggtgggaaagcactgatgatgtcaccctcagaaaggggctggattaaatgtgataagcctgtaaaagtgttctgtatattgggctctttaaaaacatacattagactgttattaaacgttggttgaatatgagttgatatggatgaccataactcgttcttgtgtgagaagcagactgacctgttctagctcaccatgtgttcttcctgcctcccgtcctgagcatcctggggacggctcgacacctgggctgtgctgcctgcatgttgtagggtgcctgcggattgtagggtgcctgaagcagcttttagcaggagttctagtggggagtagcttgagccagtgacagccctgggatagcaactcaattcaacaaaggaaaatactgggtgggtactggctgcaaggagctgtgtggtagtgctagggtgttacgaggaacagtgtatagagcatctctgctttcatagagctgacctttgaggaggaagggtcagggaacaagcaagaatttcacttaatgtattacaaaaaaaaaagggctggttagctggaaattgagaagaagtactttagaactgggtgggttgagacctgggctgaagtcaggacaaaggtatc

SEQ ID NO: 20222 - DNA, 1230 bp, Mus musculus
agtggttcctctgtccctgcctccctctctcccagttctgaagtccctacagggtctggctcagggtcctgacctttgccctggatgggcctctcttgcagtcagtgagatgattcgtcacccgtatgagacccagtctgacagcttctacttcgtggatgaccggctggtgatgcataacaaagcagactattcctacagtgggacaccctgacccctaatgctgcccctgaggctctggcctagaccctgtgctgtaacctctccgacatcatctccacttggggatggatccggtggctctggaccctgagtcagtctcgagaggaaaggtgtccagcatccctaggcaaacctctggagctagtgggaggggcagcagggggaggctggctgtccccatgttcaggaaggcctcctgcaagaggaggactcctggatgcctcgctaggtccactgggcctgagtttcagagtagtgcccccttcttgaccgtgactagatcaggttagggaccatttcctgtcccttgcccaccacctccaggctatttatagttgtcggttcacagacaaagatccacagtgggtaccctgctctgagccctggcctcctccatcaggggccaagaaactacccgaggtgtgagaggggcgggtccagatcgcagcctgtaagacctggacaaactgtatatagttttcaataaaccttttctgttcttgggtgcggccagcctgtgtgtctatagggaaggtaaggggtggagtggagtgagaggggtttgtcttagttgctttttatcatgacgaaagtacatgagaaaatcaacttaaaagaggcaagattttcccttcagttcagaggtttcagtccatggccaccgagtgggcctctggtgaggcagagcatcatgggaaagtgtgcagaggtagaaactgctcacctggaagcagaagtggggggggtgtattaagggggggagagggagaggaacaagatactccttgcaaacatttgttcgtctccctcatccaagccctcatggtcacctcagtattgccactggctggggacctaagcctttggggcaatgcttatgtccagccatactgatcaagagaataaaaccccccatgtcccagggcctctggccagtggcttttcctggcctcagattctcaacatctaagtgagtatttagggcatggttcaagataggactcctcc

SEQ ID NO: 20223 - DNA, 1175 bp, Mus musculus
tacgccaatgggtctgccttaacctgtccccagttcccgtgccctactgtgactcctgatttagttccctgcccttaaaggaatagctcctctagatgccaccctgactgaggcaaaccagactgttctcaggcaatggctttcccggctgccactctgtggcccacttctaatccagagatgccaggcacaggttagatgagaggacactcctgtgtcaggccctgccatcaggacccagctcccatgcagaaccatgtccctgcttagttctggacatccaagacaggggaagaacatttccccatctcctgacctgagagcagccagcttgagtaaggtgaggttgccagcctcccataagggtcaatacaacgcctggatccccaaacctgtgctcaggaggaagctggggctgagaatcccccaaggctatctactcacattgtgcctggacccgggctcacctggcttcctcctgcctcatggccttgctctgtaactacctggtaccccttctagacttcctttaggcagcctcctttggcatattgggagtcagggtgtggctgaactggacctctgcctggccttgttgctcctcctggtgcaagaaggggtgctttgcttatgcaaggagaccataagagctcactctagcccaaacctttgtgcgtgcctaaggctcttacctagcctgctccatctgacttccccagctcctcacccacacagagcttgtcacccacctgctcagggaagccccaacaccaccagtagcccgagcagaacctgcaccatgggaaaaaggcaagccatccacaggcaagggctaattcctggggcagtttctcccaccgaagtgtgtcaaatccattgggaatctcatcaaaattcagagcaggccacctgggaagcacctgggcctctgcatttttcagattcccaggagagctgatgaaagagagccctcactaatccagccattccaaacacccccaccctggtccctgatcatcacaacagccttttcctctctccagttttacagagctgagtggctgagtgatgggatcaggtccccaagttattggtggcagcctcaggatcttgccttagtcctggtacccagatctgttctcctgagactcatccaagaggctgtggcccatgct

SEQ ID NO: 20224 - DNA, 1240 bp, Mus musculus
taagggcaatggaaggagaactgggcgagctgtaactggtgtttcaccatcagagtctggaagaagtgtggggagccccagactccattgcccatcacagactctcagtcaacccacaatgctctttgtattcagctccagttagtcagaggaccaggtcaggttctttggggagcctgtctgctgtgaatttccttggggaggagtagaggagattcagacagtgtttctgtaaaactaaaaagactgatctcagtaacttctgaatccagtgcccatcatctgcctttgctggtccattttggggtctactgagtctggtttttctcataaaagtaagtagaacccaggcctttaccccaaatggactctactgccttgaactggcccaatagtcagaagacaggcatccatagaagaaaaaccagttgatacaggatggtggaactagaagccaggcagctaactctgtagaaaaggaaatggtatcaggccattttccagagcttatatggcctgagagaaatcagatgatcagtatggccctcatgttaaaaggagccaaagatgtctgcattgtcctactgtcttgttacgttacactgttcagaacttagataagttaaagaatctgtctaaggcacttgaaagatgttatttattcaataaatatttatcgtgttcactgtatttttatctttggtcttaaaacacaaagcacaaaaacttgcataattctgtgaattgctcaatatctgcccttttgtttgtgacagggttttgctatatagttctggctgacttctgcctctgcctcctgggttctaggattcagacataggccatcatggctggtcttgggggtctgtttgtcctgccagcctgcccacctgcctgctttccctgtgtatgtctgactgtatgtatgtataccgtatacgtacaggagcctgaggaggtgagaagtggaactagagttgagctattgtgtgggtgctgggaattgcacctccattctctgcaagagttgtaactgctcttacccactgagccatcacttcagcccctcaagccctctggtcctaattgtgactttgtttcttagaagtgcgctcatactgttttctctcttcattttgtaaaatatattttacatcctgaggtgaatataagtacaggaacacatgtgccagagttttcacatggagatcagagggcaaccttcaggagtccgttgttg

SEQ ID NO: 20225 - DNA, 1213 bp, Mus musculus
tcaaatcccagcactccagaagcaggggcagaaggatcacttcaagttggaggtctagtgtagtgatactcttaaaacacagtaagaagcaggcgatgtggctcgactggtcaaggcacttgctgaggaagcctagaagtaaaggtgaggacagaactgactccagagtcacatagccccaggtaacccaatgcctctgacttccttgggtccctgcactcaagtgcatggtacccagatacagatccacacatataactaaagtaaaacaaatccttaaagcagacagttataatcagtggctctgcgctgcagtaagaggagggcagggcaaggaaagttccctggaggccaaaggtgatctgaaaggttggggtcagcctggtgacaggcatgagaatacttcagtagtttgagggcaaagctggggagactgctgtagttgcttctacccaggccgctatggtcggggcccacttggatggatcttcgagacagcaggctcatcgagatctctctcctcctagctattcctccatagtgtttttggctaccgaggggtcgtcctgtttccctggcaggccagactgtatgaccgggatgtggcttctgcaactccagaaaagtaagtttctctatcttatctcatggtgtcctcaggtggcctgacttgtggcagacacatgcagttggggtaaaaacagcatcccttgggctttagaaataaccccaagccaggcgtggtactgtacactttaatcccagcacttgggaggcagaaacaggagggtctctgagttcaaagccagcttggtttacagagtgagctccagaactgcaaaagagccaggcctttgtagagagaccctgtttcagaaaacaaaacaaacaggaacaaaacaaaacaacccaaccaactaaaataaaggaaataatcccagagtgtttctttggcactcatccccatggagacaaaagtgctatggggtctctgtgggcctccccagaactgtctgtccttcctttttataatctgaaccccagagaatgttttagggaacagttttcttgatttattttcttacttttttttacttcttttcttttaaaaaagtttgtttttattttgtgtatatggatgttttgcctggaagtgtctgtgtacagtactcagggaggccagaagagggcgctgggtcctgagactggaatt

SEQ ID NO: 20226 - DNA, 1925 bp, Mus musculus
ttttggctcatgccaacaataacaaaaacacctgagtaagctgaacttgtggtcagttcagcaaaggccctgggatgagcacagatgggtgctattctttgctgtgtggcactatctggtttttatgactcttagttccttacaatttgtggcctaaggacttaggtcccaagacttgagactgaattgctagtttagttgggttcccccttaatcttgagtgtggtgggacacttctgtagcccagtggccgtgcttactgtgtgtgggcagaggttcttgggtctcttagattataaccccagctcgggctccatcagaggccatgggaccacacagttcaagaggcttcagttcagaccttactccctctaaacccgcttctccaatcctcaggggcacatttcgttttgagagaccggatggctcccactttgatgtccggatcccaccattctccttggaaagcaataaagatgagaagaccccaccctcaggccttcactggtaggccagctgaggcccaggttggccctaagaacaacagctctcaacccataattgctgcagaactctaaacctctccctactgtgaaattctttttttggagggagattgtaacttttcttggaagacccacataagactcctccaaggttggccttggccgctgtccaggacaccacgttccagcaaagctgtcagggaactgttcagttgtcccatgttttctggaatgtgaggtgtggtcaataaaccagtgctcacttggccaccacggccatttttgtctccagggtctcaggcccccttgctggccctttaggaactcttagttgcttttcatgcaaagtttcttctagggagctgctggccctgctagggtgcgccttcctcagaggctggacatcttggggcactggtaacagtgagcagcactggactaagttccgggtctctctaccctccgcccagtgtagaggaggccagtgtagagttggactgacctgactatagacacggattacccaccagcacttctggcttcactaggcctggagaagagtgaggcaaaaccagtcaggtttctgggaactgtgggcttctgagcattgagcaaagcctgtcaagcatccagaccacaggggcaggaattcagccaagaagcagcttaagttatggtcagtgaccaagtcaagctgcttttggagcttctttcaggccaacaggagccagagaattggactgcattttgccccaggtcttaggattccttcaccactatagttactgttagaggtcctttcattcttgcattattaaatctcagttctagtccttctgagtattgttcttaatcttccaccagggggagtgtgggtctgtaggattatagaggaatgagtctcttgactacctagaacacaaggtcatggagggaacagaaataaaagaactgagcccacagctgtgagctggccaggctctgctcactggaaacatggctcagcagtgtaaaacaactttattagaagttagtgtttacttccatcacttaaggtaagcaactgagaccgcaggtatgtagtaaagggcacattctttcctgccagaacctgtgttacccttcaggccaaccagtcacatgtcccaggttcaacagcacacagctggtgtttgtgagcagcgtccagtctgaccctcatgcatgttttatgtttaagtcccctggactgcctgtgatcaaaaaacccatcctgctacaactcctttaggacagggctggtaaatctcacgagtccagatcacttcagtattatttccttaaaccaaggagaaattttcagtcaaagaagatgaatgcccaacccgggactcctgctatgtttcctcagcccatgactagacagcactgaacagcaga

SEQ ID NO: 20227 - DNA, 1965 bp, Mus musculus
actttgtatgtctatcattcaggggaatctattctgccttgacccaaagctttttctgacactgatcccctcctgcacaatcttaaggaaaggctgagacaggaggatcacaagtttgagaccagcctgtgctatgtagttaaaagttccaggccagcctgggctacataggctttgtttcaaaaaaaaaaaaaaaaaaaaaagtagactgaccagctttggcttgtcagcctgactacccaaagaataccaagagggaaaggacgtccaagttgaaaatggttttaatagcatcctgtggggaaagggtagggtcacatcactgactcagacttaacaggattctttggtgtgagcctcatacttgggtatgttcagctctaagacacagatgtgctgcagcccctgatactatgtctcagtttatgtcctggttctgcctagtgatgcatctccaaatacatagtaactaggaccacctaagcctttgaaagacctttcttctgggtcactgaccacggatgtaccaagatctagacctggtgtcaattcttcctttgcgctttggtttccctccctttctttgttgggactggctctcttacctggattctatccagaggaatgttgtcactggagggggctgtttgtaagcctaaggaagtgtgtacccatcaacagtgcccaagaagggccacagattatcagctgtatcccttgactactcttatgattgccacatgggcacacaaaggctcacctcttagagcctatgggcagatgccaagcccagggttgggctctcacaaggatctagcctgacagggcaaggggaaatgggaaatgtgacttaataatcaggcatgttatgttaatcacgatcttgaatgtataaatagctctaagatgcttgggtcaggcaccttagtgacgagcaactattagttcgtccagatctcgctggaactaagatgacaatccaacttttttggccaaatagaggctttggctttcagtctttcccacagactttggaatgtgacagcatgaggccaccaatctgttttctcagctgtcccctagaagcctttaacactcagattctcagacccctgcggtgtttccagtttgtctctttaccgccacaccccctttagcctccatgaggcgctttgacatccatctcctctgctgttcagtgctgtctagtcatgggctgaggaaacatagcaggagtcccgggttgggcattcatcttctttgactgaaaatttctccttggtttaaggaaataatactgaagtgatctggactcgtgagatttaccagccctgtcctaaaggagttgtagcaggatgggttttttgatcacaggcagtccaggggacttaaacataaaacatgcatgagggtcagactggacgctgctcacaaacaccagctgtgtgctgttgaacctgggacatgtgactggttggcctgaagggtaacacaggttctggcaggaaagaatgtgccctttactacatacctgcggtctcagttgcttaccttaagtgatggaagtaaacactaacttctaataaagttgttttacactgctgagccatgtttccagtgagcagagcctggccagctcacagctgtgggctcagttcttttatttctgttccctccatgaccttgtgttctaggtagtcaagagactcattcctctataatcctacagacccacactccccctggtggaagattaagaacaatactcagaaggactagaactgagatttaataatgcaagaatgaaaggacctctaacagtaactatagtggtgaaggaatcctaagacctggggcaaaatgcagtccaattctctggctcctgttggcctgaaagaagctccaaaagcagcttgacttggtcactgaccataacttaagctgcttcttggctgaattcctgcc

SEQ ID NO: 20228 - DNA, 1583 bp, Mus musculus
cctcgtaggtgtctacgccccctatttaataatccccctcatactcctcctgttcatgcttcggaacccgtactacaagtatgaggagaaaagaaagaaaaaatagggacggccaccagcctggtggggaagaccccacagcacagttgccttttggacaacacaggaaaactgccccaaacatgtttcagcagcatttgaaacaccaacagcagtgcatacaaacaagacagtggtgggagacgtgccaggccttcacctttcagcaggggtgtgaccaagttacagcaaaatggtgccaaagcgctaccacagcactgctaaaaaggccaggtgggaagccggttagctcctgacctggaatgcacacacctgaccaagtcctcacctcgaccttgatagtcaacaaatgagcagtattttgtctctttagcactttttaacatggtttcctgcccacacctccacctctgggagaaaaatatattatagcctcacatgagtccaagccagaaatgggttacagggaaggaaggtgcctccatttctatcttgaacagatagcctgctctgggttattctggtgctggttctatgaacggctctcatgtccctactctggcacctcaccccactgggcttcctagtacgcaggcttgtgagggtgactggactgtccagtgtatgtctgctgcttgttccactgactctacagaaacaaaacccggtgggtgctagacagtgctggctctgcttgcaagccatgttgctgtggttgttacttatgtgtctggtccaaataaaggcagctgctgatttgttgttagcctggtttgttgtgtggatggggggggggtagaacaactctgttctcagagggactggaaataatgcacacagcaccatagaagaaagaccaagccacttgcaaatggtatttattgcttttccttgagagctttgtgaatgtaccaaagtttacagacactgagtttgtgctgagaagtcgagctgaagccctgtgctgcctggccactagcagaggctgtgcactgtttatcagctgcccccgtaacactgcatgcgcacatcagtgacatcactggaatggtacagaggtttgtttttttggttggggtgcttttttttttttttttttttttttttttgccttcctgctataaaactgaaattttcagttcatttctgaaaaataaattggtcaataaattcattttgttctgcttctactttacacaaagcttcatattcaacccgatacctgaaaaacaaaattgttagaagccctgaaaagaatgaaataaaaacataattctttgagtgtatagagctttaaaacagatgcaagaaaccatgaattgagaaggcagggccagagtgtcagataagcaaagccctgtttagagccacctgggagaacactctaccccagggaaggcacgggaggtggcctcagtccttgttataagaaccagtgctcacaccatggaggcaatttggaattaaccaagtccccactttcttctatcaatttttaaagtgagatgctctacctgggaaat

SEQ ID NO: 20229 - DNA, 1132 bp, Mus musculus
cccaagtcctgtgttccctattctcatcgaatggcagcccccatcttgtcccaggcctatcagggtccatcatataaaatcattatttgtgggctgagcagtgattttggagccagcaggaaagtccggctcgcagcgctcctaaactgccactgcgggttctggttttactggcccggggtcccaatacggaacagaacccagcgaataaaacactcgtggcacagggaagaccagcgcacgcagcccgaggctgcacacgcgcacccgccgacgtggaccgctcagagccacgccccctcacgcggtactcccagcagccaatggaaacaacaggtaggccatcattcaaactatagccccgctatatgggcgggccacgagggcctccacccactcacgagccgcttctgtttttccccttcgaccaataggtacggcctgtgtgagccgggggcgggacggcacagctcgggcgcggggcttctaaccacgtagcaggcttctatcaccggcttgccagtcgtagcccaacggacaggagggaacatgggggccctggcagctaggcgctgtgtcgagtggctcttgggcctctacttcgtctcgcacatccccatcacgctgttcatcgacctgcaggcggtgctgccgcccgaactatacccgcaggaggtgaggctcaggggtccccacgtggccgtcctgatttctgttggctccgtgcctgacttcggccccagccggctgtccccagccgttgaccaccgctttgtttttttcagagcggaactgagggtgcaacccaatggtagggcgcatgcctaggaggtcctgggtttgagccccatgtactcgccaatcctttgcaaaacctttgcctgggtgtgtttcgctcccatggttttaactacggcagttggctgagggaagttgcctgggtgaaccagtgtctgtcacgtgttgaatctattgcgtttggatggactttaaaagtccagtgtaagccgagaaagaaaaaaaagtcctgcgtagtagaataaaatgactgaagggttagcccttggttagtgctcgtggcattcatacactccttctgggtctggatctagcttgaggagcagttgaggaa

SEQ ID NO: 20230 - DNA, 2622 bp, Mus musculus
tactgcaccagtaatgctcgcacggccccttcagataggtccccacccaccaatactagtttgaggggccgtttcttaagggcattttctgattgaatatgagaaaccttatttataacagctccccatcacttaacatcatgaagtaggctccatggatggcactgtacatatattacctcagttattttccacaccactctgaggtaggccacaggatccttcccactcccactcaatatcgtggccctctcccatccctgaagctcactgcctcgctctgggtaacagatccctaagtgaacggtttgcaaccaactcagtgtagatacaaaagcacagaaatgctctgcacaggcccctcctaagcggggagggttgccaggtggtagtggagtgccctgtcgcactgactcccagtctccctttccttccagttccaccgtcgctcagccgtctgagatgccgccgtctcctctggtgtgggagtgactgtggaagacactgtactactgaagatgtaatgtagctttcactggagtctgggatttgcaattctggagggttaatcatgcttgtactgtaattttactaatgaagttttaaattaacaaccactacttgtatgatatgaataatatttagaaatgttactagacttttaatcttgtaaagtggttgtgcttttagaagaaaaaaaaatattttacccagagttgcacatggttaaagaattcagtgcagctgttgcggctcacctcagaacaaatgaaaattgaaccaaatttgggcatttggggtttatgtttttattttattattattttttttaatgaagtaagattgttcacatgtatacactcagacacagaggacagtcatacattttgatatttgagccattcctaaagattaagggttttctaaaactaaagaatctagaaagcttgccagtgaccaatcatggagcctcgtgagctaactgtggccgcgcctggggcatgggcaggaggggccacctaatgatgaagccagtgattggcttctcattagagccgtgctggtggtgtgtgcggtctaacctccaatgctgtgcgtagaaagaatgagtttgtggctaggagaaactaaccctctgtttcccttacccggtataaatatatatatacatatatatatttaatctatttttattagaagtttttctgctctttcttacataaaaaaaaaaaaagacccaagcatgcatctttcatgtatgtaaataattcatttctgggctaatttcaaaagaatcccaacactgctgtatagagaactagcttgcacattttaggtctgtgaaattctgtgagacttttcctgcactggacagtgaaaaataataaataaaagacaaaaagaaattttaaaaaaaattacagccacaaaggcacatagggaatcatgtcaaatgtgtttgtgtccttaggcaaagctgtgggagtcttgagatgtcacagtagtaaataacttattacttttttgacaaattctttttcctgctggaacactgaactctgtgcatatgtaaatatgagcaccaatcgaaggcctctacctcctggagttacacaacttggcttgttacctccacacgctgatgatgactctttttttttttttttaagttcaatgtggagacttgaaacttgaatgtcccttccaacttttatattaaaaataaaaagacaagaaaattgaagagcgtttttcacctgtacgaggagtactaacggatcgtcttaaaactggtctaggaaaaagcttggtgtgtgtgttacggacaattaactgttaaagttactgtaagttatctgtatttagcagagtattttcatcttgagtgatctgagctgaatttgaagactattaagttatatttggaagttttaacttcaatgaagtaattatttgctgtgaaagaaacaaacattgaattactaaacaaagatggtgcaatatctttgttgtcgttgttgttgttgttgtttttatgaggctcctgagaagctacccaaccgaagcatttcagtccccttgactgagcatcaaaagagcccgagaagacactggtgtgaaaggttggtgtgaaaggtacaatctcagaggtcggtcagttaccgtggcacacttcctggtcactttgtacaatgtagatttgaagtacagtggtgagaacattaaacgtgacatttgaaaacaatacgtcgctgtcttatttccactcctcccatggcttgctcttcagtacagcctctgtcctgtcctgactttgcaaagtctggagacacatgctgatgtttctactcttatctttgaggaaattacttgtttgtttttagttcttcccaggaagttaagattgccaagaatgtgtcagaagctcggttaaaccggcatcagaggcagttgatctaaacatatccaggaggacatcttgtcctctggtgggatctaaccctagtatatgggattcaaagagagtaaatgagggggttgctgtggctaaagcaggctagatgagtcatgtgaccctccctcccgctttctgcttcacggccctagaagccctagctgctt

SEQ ID NO: 20231 - DNA, 1226 bp, Mus musculus
ggtataggcagtacagtgacaggccaggtagtattgtgacacatccaggcagtacggtgacaggtccaggctgaattgtaacaggccaggtgatactatgacaggtccaggcagtactgtgacagatccagtcagtactatgacaggccagacagtggtgtgacagatccagtcagtactgtgacaggacaggcagtactgtgaaaggtccaggccagactgtaacaggccagatgatactatgacaggtccaggcagtactatgataggccaggcagtactgtgacagatctaggctgtactgtgacagatttaggcagtacagtaacagatgtaggcagtactgtgacaggtccaggcagtactctgacaggacaggcagtactgtgacaggtccaggcagtactgtgacaaccaggcagtactgtgacagatccaggcagtactgtgacacatccagggagtactgtgacagatccaggctgtactgtgacagatctaggcagtactgtgacagatccaggctgtactgtgacagatctaggcagtactgtgacagatccaggcagtgctgtgacagattcaggcagtactagacaggccaggcagtactgtgaaagatccaggcagtactgtgacaagacaggcagtattgtgatagatccaagcagtactgtgacagatccaggcagtactgtgacagatccaggcagtactgtgacaggtccaggcagaactgtgacaggccaggcactattgtgacagatccagtcagtactgtgacagatccaggcagtactgtgacacatccaggcagtactgtgacagatccaggctgtactgtgacagatctaggcagtattgtgacagatccaggcagtgctgtgacaggctagacaggactgttataagccaggcaggactgtgacaggttcggcattactagacaggccaggcagtattttgacagatccagacagtactgtgatatatctaggcagtactgtgacagatccaggcagttatgtgacaggtccaggcagtactgtgacaggtccaggcaggactgtgaaaggaccaggcagtactgtgactggccaggcaggactgtgacaggtccaggcaggactgacaggtccaggcagtactgtgacagatccaggcagtactgtgacatgtccagtcagtactgtgacaggccaggcactattgtgacagatccagtc

SEQ ID NO: 20232 - DNA, 1197 bp, Mus musculus
ttcccttcacttttgccggggttttctctctcctcttctgtcctgcctgtcgcctcttcgcctcactctcttcctccagcctccttccctggctcattctgcctaggaaagtttggtacatctcctcagtccccccaatcaggtcaaccagactcggagtagggggcgatgtaggaaggcctgagagttcgaggggagggaagctggaagctggtttccctgataatttcccctcatcttttttgatttagagtggttggaatttttttttaattgtgtttttgaggaggtgggaggtgtttagaaaaggatgtgggaatggaaggggtagatgagtcaaccctcttacaagattccaagggtggcgtgttaccagatccttttcgtgtgcggagttcagggggtcgggaggtttggcctttattcccacattcaaagttggaacctcccccccattaagaatggagttttagtatccacttgtggcaggaatcctggggggaaggggcccttttccctttttcttttccttttttttttcttcttattttatgttcttaacttttattttgacaacccatacccttccacacactctcacccccaaatcgaacacccaagattgtcaaacttgtctggattgaccgatgaagacataaagccagttccgctctatgttttttgaggtggagtgagtggtttttcttcatttttttaaatggccaaatgacagcttgacccagtttgctttccaatcaaagggcatttttttgaatgtctctttgtggcacaagagccaacgcaaaaatgatggcggcttacaatggcggtacatctgcagctgcagcaggtcaccaccaccaccatcatcaccaccttccacaccttcctcctcctcaccttcaccaccaccaccaccctcaacaccaccttcatccggggtcggctgctgccgtacacccagtccagcagcatacgtcttcggcagctgcggcagccgccgcagcagctgcagccgcagccatgttaaaccctgggcaacaacagccatatttcccatccccggcaccgggtcaggctcctgggccagccgcagcagccccagctcaggtacaggctgctgcagctgctacagttaaggcgcaccatcatcagcactcgcatcatccgcaacagcagctggacattgagccggat

SEQ ID NO: 20233 - DNA, 1105 bp, Mus musculus
ccaggtgggcgaagtagccagaagatgcagagaggccacactgggggttgaatgttcgtggggcactcaggtgagctagtgcctgtctgtgcccttgcagttctgcgggatgatgtgacctctgtctaagcagaaggggcggacagtcccgaagcacgtgtgtccacttgtgaaagctcacagttttcttcctcctcttttgatttatttcagacaggatctcagtgtatacactggcaggccttgaacttttgaactttcagcagtctttctgtctctgcctcccaagcacttagatacaggtgtgccacaacacattgctgctgctgctgctgctgataaatgctcgtcaggacagtttgcaggatgcagctcacttcttcctctatgtgggtcccagagactgaactcgggctatcaggcttggtggcaaatgcctctatctgttgagtcatctgttggctcttattatttcttctttaaaaaaagaagatctttattttatttgtgtgtaccacgtgtgtgcaggtgccctcagaggcctgaggacattgggctccctggaactgaagttataggcagtatgagctgtctgatgtaagtgttaggaaccaaacctgagtcttctgcaagcagttagcgctcacactcacgcacacactcacgctcacgctgagccatctctctagccctctattgtttctccctgactgctgttctctgaataggattgttccctcgacacgtgtgtcaaacaacgctaaggacttgggtaagtcagacacccacttgcctggaaggatcattcctcagagacaagcagagccacaggtttgggctcccagatgactgccaggcaaagggcaagagcaaagccgcagtccctccatccccactgctgctgtccagtccatctgagcccagggaccaatccttacctggtggtgttcgtggcagtagagtagccatgtgtgccaccatgcctggccttaggcagagttgttcattagaatggggctgaggagaaaggactaacactgatttgaggagctggggctgccactcacagggagtgtgagaggggtgtggggtcccgttgttatga

SEQ ID NO: 20234 - DNA, 1227 bp, Mus musculus
ctccgagcacccaagtctgctccagccgtctcttaaaacaggccactctctgagaagttgtggaaatccccttcccctaggccccagcacagttattcacactaccggagagctgggacagtagcattctgaccctacctccgggtggggaggaagagccgtgagcctctgttcagatctgcgtgggctctccaatcatttctctaccccttcagctttccacattagcccttgacgtgacctccctactccaaaaccgagttgtgtgtgccccctgcctctggcagtctcatgcctgcaccatcccagaggccacagtgcctgaggctcaggccggtctctcactgtgtaagtgttgtgatgttggcctcccctcatggtagaatgtgaaccgtcaggctgccagctgagttaacccttttcagttatcccctgacaccaaatcacagcaagcggcacacagcctactgacagcagcaagcctgggtcttgctttgtgctgtgaacatcacagttgagaaagctttgagccctgcattgaatatggtcttgtgcattggctgagaaccagataggaatagtagtggcccctggctgaaggagctgaccatcttctgggggccagtgtgctggggctgccatctgccccagtggagctatagttctagggccctcctccttgcttcccaagtcctgcctctgctcggcccttcctgtaagagagttcccaccgtggcccccacttccttttctacttaagtgactgtgaattgaagttaggaaagcttgcctcctgcgcactctcctcgtctcctgggagacacatgaaggatgacagatactgtgaattcagcccgcgtagccactatgaaggcagtgaaaaaggcccaagcatcggagaacctgcccacctaaggtgtgatgccctttaccaggcaccctgggttcccagcctcaccccgagggaggccttttcccatcagagtggcaagtagtgaatcctagctagtgctgggctgctctaatgcatccagtcagagccctcggccattgtcttcctggtccaggcagggagtggcaaacctgtgttgctctgtagtgacagggtggggtgggacagccacgctgtgctgcagcgctggccaggatatcatcagtgtgtacacctagcgtcttctgtggccacgaggcagacatttatttgcttattttgaatgtgatgtaaaa

SEQ ID NO: 20235 - DNA, 1502 bp, Mus musculus
tgtgccttttctactgatggcagtgttttagctgctgggtaaatacatttttcttgtttctttttcttttgaaaacttatttttcttttatgtatgattctgtaaatttcctagacaaactctttatataatcctgctacttgccttgccttggagttcttattagagtctaaggtgagatgtatggatctgatctacagctgtagggacataggacaagtgtagttgtgtaaccatgattttgtttttccatttctctgaaggacacatgatggaagtgtgtatttttgggccactccaaggcaagtccctagccttcaacatatatgtcgcatgtcaatccgaagagtgatgtccacccaagaagtccaaaaactgcctgttccttccaaaatattggcgtttctctcctaccgcggttagactgaagactgcctttcctggtaggcctgccagacagagcgccctttacaagacacacctcaagctttaccagctcaagcgtctgtccttggaggctcagcagatttatttaattggaatccactcttattcttcatttcattagttggacttttaaagcattatttatacaccatagaaatatttctgaacatatcatgtaatttttttaagataactgtgaaaacattacatacatgtatatatttagacatgagctgctgctatatattgaatgggccctttagttttctcttagttctgacctgtatatattgctttaatagagccacgatttgtatatgtgctgttcattagagcaaattcaggggaatttttgttctttttttttttatttgggggcactaagtttagatgagatgaattgcctcataggaaatggaattggtcaggatagatggtgtgaaactgataagaggttttggatgtgaaaaagagtttccaaaagaatggtgtctgggagtttgaatgtgatgattaaaaaaagagccaaggaaaaaggtagctagaaaaaaaggttggctctcatcagccttaattttggaaagcagctacttacccctcagagaataaagtattatgcattcttgtcaatttgaaaactacatctactgtattattgctgaatattttgttaatactaagggacaattattttaagaccatgggttttgtttttaacatattttatttctgcagaggatattggtaacttaccaaagagaagcaatacacagtatgtctgctttagccttcttttatttatctcatctgcagatgttgagaatgtatgcattatgtaaaatgcttgtttttttatccctgttgagtttttttaattaaacgacacaaaactactacattgccgatatttctttcatgggttgcattgtgtagtccttttgtctagctgtactgtaaggttgctggtgggtccacagatgctcagtgcagaaggcagtgaggaaggatggaagcatgtacaggaagcatcactttgtgcgagcatgtgtgcggtg

SEQ ID NO: 20236 - DNA, 1178 bp, Mus musculus
taaaaaactggcctagcatggtgcacaacttgaatcccattaaccaggaggaaggaacaagaagatctctatgagttcaaggtcagcctggtctacacagtgagttccaggacagccaaggctaccagtgaccctgtctgtaaacagacaaacaagcaagcaagcaaacagaaccaaagcagaaatataaaacctagagagctgggtgggaagggtggctcagtggtttacagcaccggctggtcttccatgggacctaggtttaatttccaggcctctgtggtaaccaggcatacatgtgattgatacccagacattaggcatgcaaaacactcatagacataaaacataaaaatctagagttgacataacatgcaaaatgaaaattgcttcagccaggctgtggtggtaaatttgcatctgtctatcctcatcaggcttaggttatcacaaggatcttcagacaagagctacgtttatggaagttctgacaaaaatccttcaacaaggaacagaattcgatacacttgcggaaacggtgttggcagatcgatttgagagacttgtggaactggtcacaatgatgggagaccagggagaactccctatagctatggctcttgccaatgtggtcccttgttctcagtgggtaagtttattgagaaagtagggtaatagaatgcttgacatacagctagtgcttcaaaataagtatcctcagaagtgtttattaagtgaattgacaaaatttaagaactggaaaaaattacataatggagagctgagactgtagctcattggtagaatgctttccctagcaccacagaaaatccatcatgattgtgcttgcctgtaatctcagcagcttggagggtgaaagcaggaggttcagaagttcaaggtcctctttgttaatagtgagtttcaagccagttagagcactgtaagactgtctaaaaaaataattaaccaacttgagtcattaaaccttttttcttaatgtgttttgcttctaactattgagaagtggttggtactcctacccctgactagttctttctttccaacccagtgacaaacgttcatggaatcaccaatgggaagaaatgtaaaacagcgttgtctcttatctttacgtatatataaagtaatagttaacctaactattagttgttaat

SEQ ID NO: 20237 - DNA, 1132 bp, Mus musculus
cactttagtggtaagtccctaggaggtgatctcgcttcaccagttctttctcagctttaccttaccagactgctataggtttctcactgtaatagtattgactcaccaggcctacaagcaggaatttgaaattttatcaaacaagaaaataataaaaataacttgcacaccatagaaagctacaataagggctttctttgtcatgcagatacttgtaattatcatataacctaaaagtttattattagttgatagtgttggcattactagtgcaggtttattatatagccactaatgtaatgcatcaggaatttgatttagggagcatggttgtgtgatttttgcatgatatttacattttatttagttgaagatgaaacatactactttagagttaaaatattggaattttctttttcttttacagaagagaccaagcaagttttgaggctcagtctaacagagttctcgttacccaaattttacttactgtttggcattagcaaagtcaagtcggctgctgtcattgccttccgttccagttaccgggaccgctccttctcccctggctcctatgagagggagacttttgctttgacgtccctggaaacagtcacagaagctttgttggagatcatggaggtatagaaagaaaaatgacaagaaaccaaattaaaatcgtatttaaaatgtgtaatatgaaaggtataatgtcacaggagggagagacaggtagattgtgtgaacttgaagccagctgaatctatgtagggaattctaggccagccaagcctacataataacacctcatctgaaaaaaaaaattctgtaatatacagaagaaatactggtttattctgttacagtacacactgtcctttagaatgtgttctttctttacatttatcttactttatgtatctgaatgttttgctggcatgtatgtgtgtacaccacatgtgtgcctgttgtccaaggttgagagaagaatccagaagaggacatcaaattccccagaaccaaagttacggatggatatgaaccagtctgtggattctagaaacagaagtcatatctttcctctgccacaacaagtactcttaactgcctagccatgtctctagcccctaga

SEQ ID NO: 20238 - DNA, 3119 bp, Mus musculus
agccaagtgcagaagcaaagaagtgctggcagtttcaaacgtaatagcattaagaagatcgtgtgaagcgttctttgtttcactcttcaaaccaacctaacatggcttctcactagtgacccctcaccttgcactgctgcacttcgtgtcttatgatcccatctggtcgccgtgtcgccagacggtcatctcttggagcattgcctaagtttaatgctgcttttctttgatgtttttccttctactttggcatgtgtctggttgagcacttgttctgaggacagcagagacagcaggcggtcaggaggcctgactgagagcgtggaccgtgggtgtggatgaaccctgcagtgctgccgctgccgcaagccacgggccgtacgcggaggacggccttctgtgttcccgtcttgcagagtgaaggggtcgtcttagttacacacttataagtttgggggagaaatcatattttaaccccagtgtatttaatcttctagctgtggacttttttttttttttttttttaccttatgtagttgaaggaaccacagaggccaagcctcaataaagccacaggccagggactgagggaggggcaaactaatattttgtaacgaattcttaagaaatactaacatttgagtcttagcaataagtacaggaaaataagcgtgacacacacatcttaacattgctgaattaaagctattggttctgaggccttatacatacttggtcatccaacctgggtaatttttttccagttgattatcttttaatttttacatatgaaggtgttctgttctttttttttttttttaagccaagactatactaagtatagaaactacacttgtgtttgcacttgctttctcctctttcctaagtgattctaagcagggtaatttgcagacagagtggtgagactcgtttccacaaggtaattttcatagctctttccattggctccgtagcaaaatggaatggtacgtgacatagggtaggtgatatttttattttgttaaataattttccaagaaacagaatatgctgtatattatcataaatttctttgataagatgtatttttaaaatcttttaatcttactcctctcctccaaataaaatcaggaatctctagcaaaacatttggattctatctgataggattgcatttagtcactgtgaagtctggccggcctgtgtggtatggacacaggacctctaggatcgctgctgtgcagagtggctggaccagtgggactcaggcccttccaagggatgcacacccagctgcttcatggtacccgcaggatgcaagacagtttgactttagtgagcacagtagtacatggatgctctcagttaagattgaactatatttatttttaaaaggtattatccctctacttccaggttcccttcatgtattaagacataatggctttgggagggaccaaaagaaacccagtagggtgtggacaggtcctgtagtgctggctcactagtggatttcagtaagttaaactccacagctaagtcaataaataatggtacatttaagtattctgactttaataatataacacgtttcacacttatccatacagtaacaatgtaatatgttaatgtaaataaaattgcttttgatattcagaaataacaatttaatttttttaatttgtttacagccctgggaaaagtaagaaccatttgccaaaataaaaggaaaccccttagtgttagtagtgattttaacatagaatcactggagactactggagacagatgcagcaaactgagctcttgtaaaggctgccttagaataactgtcagagcagataaccaaggctgggaggctgagatgccagctgagtttagccgcaggaggcccgtggcttagctgccaggcccggctccccaccgcagtactgctggggtgcaccccgctctggctcctgcaaccgtgggcagcacagactgaggctgctgtaactctagttgcttggcttttttaaagtcattgagttccattactggcccattactgttttgcttcccccatcaaaacaggacaacttataaatgtgcactcttcctgtagcgggtttccccatagttcttaaactgccccacttgagctcctatggaaagatcaaacggagccacttctgaccagtacatcccaggaaactggggcagcattccagttttatctaatagacagaacttccagcttttgaggaaagtctatctttgcaagcaactgaacctacagagcttaaagtatcactagctgcccctcccccaaaggagactctaattacaggagcagctgaaggtctgagtaatgtcccattttacacaatttggtgtgagttctgtgattcattttcaatttgtgtttccctgacttaaaagaaaacaaaaaaacactaacggctgtgtttgtgcgtttggctggtactcctcccctgggctcccatgccctcactgtggggacactgcactctgctggacagttactcttgcctgcatagtgctgaggccggagcctggacagtgcagactgccacagccccagtggggggactcgccccagcaaccacttccttggggggtttaaggttgcaagtttcctctgggagatctggcttttgttttccaggtttggaggagtttccccccccccctttttttttctacattactccccaagcatattgaagcatgtcttattcaatgttatgcaatggacttccacaaaaattcacttagtgtcagccacacaatttttttttaatgcggtatattcccctgtaaatagtttgtgtaaaatttgacagaaaagtctatttactacattgtaaatacatgtgatgatatattgtattattttgcttttttgtaaagcagttagttgctgtacatggataacaaacaaaaatttgattattcttgtgttcgtattgttaacttcttcctgcgactgcgttccatcatttaaagaaaatgctgtgtattgtgaactgaccttgtatatgattaacttactcccctccccaaccaggggttccctgcctacaaccttgttgataatgtaaccagcaggagaacct

SEQ ID NO: 20239 - DNA, 1173 bp, Mus musculus
tgaggactcttgccctatttggtgttgcagtacctgccggggaagggtttgcatctgcagagagcccttggtagaacagacctgaactttttctagtccctaaggaacttccccagccggcttcattgcctccggctatggaggaaaaaggcagccacaaagaggcagccctgggcctgaccctggtcccctgctctggccagggctgtaagagagctgcagccattttggggagtccaaagctgcttcttcacttaggacgttgcttgaggacagagctcacctaggttccgcccttctgaggcgcgtgtcaggtacagtctgggaggaagcatccctaagaggctctggcagcaggggatgggcaggtggattgtgtgtcctcactaaggaccggaaacccctctcacccagattctgtctctgctgccaacatggccgacttagtgtcatgtgcaaagcagcacagcagtaaagggcagcgcccaggacgtgaggaatcctggtccttcggaagtcagagggaagcttcatgagcagggacagggggtgggggagccagtggaagctgacaggcctgtgtgtctcagactgactgatctgagagggctgtgtgtgtgtacatatgtgtgtatgtatatgtgtatgtacatgtgtgtgtttgtgtctgtacttttgtataggtgtgtgtgtacgcacgcgcccacacacacacacacacacacacacacacacacacacatgctcatgttaaacccgactgtcacatattccggatcctttctctgtcactcctcacttctctttctttctctaagctgattaactagaacattgctgtcacagagaagagcagtaaaggacctgaggacacatttcagtttacaactgaggacgctaggcagactgaacctgccacacttgctgcagctcttgttactcctggcagtgtacaattaggacttctgtaagaagtggaagagagggctggagggatggctcagtggttaagagcactgactgctcttccagaggtcctgagttcaaatcccacaaccacatggtggctcacaaccatctgttggggatccgatgccctcttctggtgtgtctgaagacagctacagtgtactcatatacataaaataaattaaaaattctgaaaaaaaagta

SEQ ID NO: 20240 - DNA, 1165 bp, Mus musculus
tctctctctctttttttcttccaaaattccaaaggcagttttaagaactcacagaatactcagcttttctgtcaagttcccccaagcccccgaggaaatgaagctgaggaagcccaggcgcccctaagattttctggaggcatttgtttgtttgattctctgtgctgagcagggggtaggagcctcctgacctcctaagagtggccctatctagggctggggggttgctagagaaccttgtgggcggcccctgtgcagagggaagtaccttttagcctggtgcttccctgcgtgcgcccagcatgcttctgtatatgtgagtgtctcctctcttagtccccgctgctgaggttcatctcatggaagaagttcttctcatcaggtgcctttctgacaccttgagtggggccctggaccaggcccatgcagctggctgtctcctcccctgccacccgttcttccagctcttccctccaaggcccattagtcagaagaacagccttatggactgaggctcagaccactcactgcccgtttatctgtctgtccacagggtgtgaggagctgctgaaggacgtgctgtcggtggagagcgcagggaccctgccatgttctccagacatcccagactgtgtggagcaggtaagggcccctgcctcagcgcctgctgccttccgccaccctctgcatttgcacctgggctcagctttggaaggtctggaaggactgggctttccactaatgatcttctggcatcaaagtcaaaagacagctacaggattgctgagtaaggtagcacctgcctctaatcgtaatcctcaggaggctgaggcagggggactgccacaggtttgaggccagcctgggccacatagcaagactgtctcaaaataatcaagaaaagaaaaaaatatcactttggaatcggtacagtgaagcccttaggaagtctagtgtgtacacacacacactaaatatgtaattaattttttttaattttaaagttagttttcataacccagtctctagcccctccttccgtctagaggtggggagttagaggggctgagagtcccaagtgtgatatttctgtgaccagcaccatcatggggcacctagaaacaccctaagtcatctcagtgacataaactcgggtgtgggtacc

SEQ ID NO: 20241 - DNA, 5436 bp, Mus musculus
gctgcagagcggccgtcggacctgggacctaagggcaggcctgcctgaggacgaagaaagatgcaggctttgcccacatgcactctgtgattgtacctctgagcaccctctctgtgtgtgctggtgtccgtgcaaggagtgagcttggggccatggctgtgggtgacaacccacggtgagctgtgtgtgcactttgtagcccctttgtgaggggcagagggggctggatgtgggggagacactctcaggagttaacagcaaggcctggaagcttgcatttaggatactgatgaaatgattctacctctgggataagggttagaagatactctcaggagatgggttctctcccctcccccactgaagtggggacaaaactgttacattctccagaatttggtgtccttgccaacctttcaggccacctttcaagccgggtttttttgttttgttttctttagctcagaggaggaaggggtattggagaggcccctgaggtctagccccctggggtgcagataagcaggtccagtggactcggacttacagagcagttagagtgcactgtccatgcctttgggctaagtccatcgtagttttctgagcccctcccagtcttgcttgcctacctcccctttctggtttggctttgctttgttttgaagatggaaaatacaagcagcattcagctgggggtggaaggaaggccaagaagggtagggtgccccaaggcaggtgtgtgttagcactgggggccaaaaggagtgattgcctgggagagaggtgtgttttcatggctgcatcgtcacacatgacctctctgggttccatgctccttggtgaggacaggcctagggaagggtttgcaggactgatacccttgcctcggctttcagacccatctgaatcaggtccccagttagagagccgacacggctggcaggaggtccagtggagaatactgggggaaccttagtcttcggttccgtcaatacatgatgggaattcacatacacacacccgtgttgggggttgagggagggttaaaatgtgatctgggagtaggtactgtatagaacattccggtttatctcagttttatacagcttgtgattggttggcttccttaccccagctcctataaaggtgtatggttcaagtttccccttcagtttgttttcttgagcacatcttgtgtaaaaaggaaggtttagggatgctggggaggctagcgaacagaaaggaggcacagttgaaagaaaataggggatctagggtgtgtgccccggggtgtgtgcctgcttggcagagacggggcttcggtcagtttcagtccagtcatggtgctttctttggcttttgagactccctgtaatcatgtgcttggaattcatctcatgctgcatagatagtgcgtgggcctggtctgcctggatgagccacaccaggaagacaggaaggcttgatctggggatacggggtttccttccctggcgtctgggaagatagagaaaaagggggctgggtagggagtcttgtgaggaacaatgggaagataaccatggcttgaggttggtccgtgtgccgtgctagcagaatgcagaggccagctgaatataggtcctggtaagaggggcctacgctcaggtgagcagttcagacttgaagttgtatgggccgcccgcttcacttgtatgtgggtttccagagaaggccacagagaccagagtcagtgtcacagaagaggaaggagtctgtcagggaaacaggcagggaaggaaggctttaggcccaagttgtagggctggaagagtggactccctgaggacatgaccaggtttggaggcccctgtggatctggacgcttgctatctaggcctctggaagaatgatttctgaatgtggtctgacttccatgtaacacacctcaggcgaaatccagccttcttacagaatacacttagaaaactctgtcaacttccccataagatcatgtttgctgtttgctgtttcttgtagtggtgacagtaggtttctggttttttttttttttttttctgttctgggttagaaggcccaggggtcccagtgccacaccacccatgggaggttccagaacttcccttgcttggcaagaatctaatctctctttctactgcctccctggctctcgctccagttgagctcccagagactttcgggagtctagagcttacacttggcattcagttacatttggattgcagataaacaagaggttttagaatcaccgtgttccatgctatacctggttagaaagcgtttttaccattctgatcctcacgtgttctgacagttggtagaggtgtggcccaggccttggaatgctttaagaatgccacaggtgacgctaatttagttaggtctcctgtgaagagggtgtggctctttctaagttgaagggtctgcagtgatttgccaaggtccaggaaggttggggccgtgaaggaagtacacctttcatgtgacacttagccatccttgtattccactgggagccaaacaagatgagcttctgtctccctgatttgtttccttttatttttgaattagccacttttttttagaccagtagttttctttgagactctacagaggaagttccttttgaaaattttatttctgatatactaaaaccacaaatctcaaggaccaagcagaacgccaggccttgagcctgagtctgccagtttggcagtgtgctggtgtcatacctgatgctggagggcctgggagtggaacacaggagtggcgtgcctggcatgaggttcagtccctggcagcatggaagaaagttgatgacagaaccacctctgacttccatatataattggtagcacagtgtggcccggcacctgtgtcttcaatggccttcccaagtgttgttcatgcacagatcaaggtggaggcccgtaaatcatgtgaaatgtctgctgaggtcagcagggctggagaagcttgtgtgtggcccagaggatgggtaattatgccactgagtggtccttgccctgagagtccagctgttcccactactctgaaagtctcaccctagacggacaggatataagtgccagcatttgactgggcataggcccattaggaattggaggcaggtaggcgggaagagctggaccttgagagcagcctagacgcagtggccacttgtctccgcgggctttgtccatttcataagggtgtctcagttgcttccctgtcagtgccaaatcagcagcacccagcccacactctggagaactctaggtgatggtctgatagctagttagtcctgagttgtggtccttctgcttctgatggtcctggggctgttggtacataccgggctgtgtaagggatccagagactctacagcaaggcctaaagaataaggaggacttcactcatctgaggggcattggcaaatctacacctgtctagataggactgatgggagtgggaaaggtacagggtggtcaccaggctagtcaccaggatgtccagtgactctgtcgaggtccaggtgaagctctttagggcctcagtgatgcctgttatccccagtctttcctcactggggcccagcgcttccctctggtggctcctcaggctggtatcactagcatgcgcttgacgaggggcctccagttagagcagccagatcttggaaaggacctccctgtcctgacttggaccctgacagaacgtacttgcaatgggtttatcaggaaagggtagaggtagcaccttcagggcggggcagctctgtggctctgtcgctctgtcatcgttagctctgtggctctgacatcgttagctctgtggctctgacatcgtttagctgctctgctaagaaaaaaagccacttgcagaaaaggctttgtttctggaagcatagtcaggttaccagccttgtcgctctgtgcactaggggctgggtagctttggtgttccttccttgtggactcctcctcttcccattgtgactgtatcgtagggatgtgcattcctgaggtaccatatggaggacagagtcccaggccacctctcctgcaggcctaacttctggtggccctgtctcgtgttgggactgtcttctttaccgttctgcactgtttcttgtctgcatggtttggggtcctcgtgcctttttaccttgttaccaccacacaggattctctgttacccactgcccccttttgtacgtccccttcccccatctcccccagtcctgtgcgtactcacgtgtgcagccatatggctcaactgaggccagctggcaaacactttaccccacaccaggccgacttcccatagctccccagctctgttgacttggtaacttttgtacaggattttgttacaatcttaagcatagggaccacttaatccccatgtacctgcagctagtttagaagccctgcatcccagacaagggtagctttgtgcagaccagcctctcccgcaaacctcttcctcgtgggttcaggtatttataaaagacagatttcctttaaaatgaggccctggccctagcagggaggtgacaggtctacaaagctctgtgcatggctcttctggaggaagccccagccatgtggtttccagtgcttggcaatacatctgggtttagggccattgcctctcgtgtctcccctgatttgtgctgaaggaagtcacttgccactgtccctgcctgctgtcactacctgtccagcccttccttgtttgctggtgctcagaccagagtgccattaatcaccagaccaacgtcaggacctgcacaggacagagtgcgctgaggactctcggccggctgcctcccagcttcagctcccatggggctgggccttctggggtccaggtggaagaagctataggcagataggctctgcctttccagggattacatctggggctttgcctcagaagccagtggttgcagatggccttagctttgggcttgggaaggagcttccactttaggccccagggaagggagaatggggtacagcccaggccctgaactgtttgtttccactctgttctctccagaaacaggctttcagtggggggcaccttccaaggaactgtattgtacagaccacagtgtaaataaaaagttggctttttgtgcctgacttgtgtgaacttctgtgggggactgggagagggaatggaggtgatgcaggggagaaaggcaggacccaaatacggtcatgttcagttcacaggtacattatctttagaagctgcaactcacacacccccagccccactgaagaaattgtcacctgtactacagtgctggaaggcgtgggagtaaacacaactggaaatgtacccctccagccccacccctgccacccacatgctcaccaggtcctcccgtgtggttagtat

SEQ ID NO: 20242 - DNA, 1140 bp, Mus musculus
ttctttgagaaactgtcctcgagccaagagcgggcggcgggactcatgccctgggcagcccgtcgtcgggggacgcacggcatccggaactccaagacggacgggagctgagagctgggtctttgcgggcaagatgagagtgtcagttcaactggcctacaaagtcccagtcctcggtccccaggaccggcattttcttcactctcctcgccgcccgcagcccgccccttcttggtcctcgtgcgctccggctgggcccccccctcccatgtccatcgggatagaagcgactggaaaggcgtgcgccgcgggatgtctgtgcggttttggggggaatctcttgcttcggcagagaaaccgcaacgtgcttgaatgtcctggggtgggggagaaaggacgtttttcttctgtaccggcctgccttgctgtatggcgccaaccttgagtttgggggtggggaagctagagcctggtttctggacttactcctggggaggtggcctcgatgcggagcccaactccaggtcctaagtggagtctgtggacacttctctaaccagtcttttgccctctttaataacccattactgacccccatcaagttttatgctgaaaaagcccccccccccagttctattgctcttaaaactttgcttaccacccccacccccacacaaaattccatacaaagccctgaaatctcgagttcctgaccttggtcccttttgtcattttgtgttgtgtgactgttctaggagcacttagcagacttgaactccgtgtatgaagggcaagctgaccaatagggcacctcctgcccccttcttcctggcattaggaaatgagagaggtttctagaagctgggaggctggagacagagaaactaggttggtccaccactttgtacaaagttgcacaaagaccatataagaggtattccccccccccccggctccccgtgcttgtgaaccacgtgcaaagtagtccctgtgcaaatcacactcgggctgctgtccctgtcccttgctggcatgtagcagtagggacaggagagggagccaggtgtggagagaagtctcagaaatgtggtgtcgggccggctgatgagccccagcaaggatcatagcccgagctgtgtc

SEQ ID NO: 20243 - DNA, 1164 bp, Mus musculus
ccctgctctggactcctcagatccctttggctccacactccctcatatatacaacagaaaccttccactttatcttggacgggtcatggacagtgtgtatgcctatgtatatgggtatatctctgggtgtgtatgctgtgagcatgtgggagcctgaggaagccagaagagggcatcagactcccaggagctggaattataggcagttatgagctggccaagtagggtagatgctgaattcccgttctctggaagagcagaaagtactctttaaccacggagccatctctccagcctataaaagctgatttaaaatatccattacataattttctaattaaaaataaaatattattattatatcatctaaattttggaatataaagaaaaacagaaagaaaaagttattgtactgtatgtcacaatgtatgtacagtatgagtgtactgactgtcagttaattatgaaatgtttaattgcatttcccttgagttcagggcatggtgatcgatccaggtgaagaatagaatagcatttagtaaacttaggacttataaaggttggaccgattggagatggaggtgattgtaacatggaggtcaaagcctacaataccacaaatgggcaggaggtggtgggagcaacgtggagccatagaagagtggtgctcggccctccttccaggatgagagcctctggatgaagcatcttagcagcctctagttgaccaaggctgtgggagctctgcatcttatctcagccctgaccctgctcccccaaccccacccctttccttccacaggatcagatctagtgtgctttctctcctgggtcccactttgcacctccccctttttttccttttccatttttttcaagacagagtttcactgggcagccccagttgtcctggaactcattctgtagatcaggctggccttaaacatatagagatcccctctgcatcagcctcccaagttctgggactaaccatgtgcgcggccacttccctgcactcccccctcctttgtttttgacatcactgtcctcaatagatcttccactactgatgcctgcttggcctctgcttcccagaggccccagtggctgccagtgagatgctctgcatttctaagttttaaagttatctttaagaagttagta

SEQ ID NO: 20244 - DNA, 1197 bp, Mus musculus
tggagcagtccaagagactagatagctctttctcatgccaacccagatgattcggacattttccaccataggagagatggcgtgctccctccctcccaccttgaggatccttaggagagctttaacagcgtttcttgaaacattttggcatgttaataccacaccatctgtgttggcccgaggccaggccacatgaaccatctgtgcatagctccacctcacccagcctcgggcctcagatacaaaagtgatgacggagccagtccgaccagctcaagacagcctgggaacccagctcctcatgtgttctcctccctgtaagacactcccgtttaggtggcagcggcaccaggagtggcagcccatgtgtgaatctcaaagtttctggttttttcttaccaatgcagactgacctgccttagactcgtcgctttgtcagtttccaactttggtatctctagcgctggtgactcaacctcccttagctgcttataccttatttgaacagggaggacacagtttaaacggacagggttattacacaagaacacgcatagaagatgctatcattctttctggcatacacgacgcaggattgctttgggtagttaaggggatacggtggagagcgctgggcttcagttctgatcctgccaactctcaggatgccatttcaacctctctgagcctcatcttcccctgcttgcaaaatggttataagggtttccccttggttcattgaatcaaaatatagaatataaagtataaggcataaaatagctgttcagtagatgttaatgtccttctttaaaaagatttattcatttattttatgtgtctgagttcactgtagctgtacagatggttgtgagccttcatgtggttactgaggattgaattaaggccctctgctctctccagtcggccctgctcgctccgaccctgctcagagtccaaagatttattgattattatatctaagtacattacagatgtcttcagacacactagaagagagtgtcagatctcattatggttgtgagccaccatgtcgttgctgggatttgaactcaggacctctggaagaataagcagtcagtgctcttaacagctgagccacctctccagcccccaaaatatttgttattattattagatttacttatttatatataagcataactatactaacatatt

SEQ ID NO: 20245 - DNA, 2839 bp, Mus musculus
tcagtgcttagtcagttacaacagggctagcttgctgaggcacagtgtggggctgactagatgataacatggtacacgtaccgtgtcttttaaaaagtagggaggaaaccaggcagtggtggtgcacgcctttaatcccagcactcgggaggcagaggcaggtggatttctgagttcaaggccagcctagtctacagagtgagttccaggacagccagggctacacagagaaaccctgtcttggaaaaaaaaattagagaggatagaaaggaatttgaaagtttttactgtaaaggcatgataatgtttgaggcaatagataggctgaactttaacactacacagtgcttaaatgtgtcagagtaccttattttattcatatatatttacattctcttaattttatgtgcggaagtttctcagaactttttaactggcttagtattaatagttaaatttgcttaattaaagccttcccagttttctagctacgtttacagtagttttttggttccttttgaagatctttggatggattacatcaaggaagaattgaaccatcccttcggtaaacctgagaactgcggacagatctattggcgagccatgaaaatgttgcagggacagtcagcagagctgtttgtagctaaacacgccatgcaccaggctggccactagtggtcgagcaccaccagttggctgaagttgtgatgcaagtctcggggcaggtttgtgatgagctggtgtgtgaattgtcgagagctggcagaagaacggattgatttttgtaacatacttttacttggtgttaatctttggttccagaaatgagtactgctagtgcctgttaaatctaaaatacacagaaatcatatgattcagcttcaattcttgttccaggctaagcatatacagctctaatctagactaggtgtgagggacccagttcaaacccaagagaaagtatagttttgtgtgttctcttcttgttgtgaaagcctgcatgatacctgtggagataggagggacgagggtgtggatggactgcctcaaccctccagctcccgaatactgattaagagactttatttatgaaagcttagtccttatggcttagccatgtttaccacctggctgatcacctctcctcagccccgtacattcaagttccaagtctggccggcagatctcccacctctcaattcttcccagagttccgatctcttcttggatgtcccacctttactctcctgcccagccatcagctgtttatcaaacaaatcagaagtgatagaggagaatgtgtacaatcttcgatgcaggtgatgcttcataaaaataacagtaccaaagtccggacagtactctactggttcaaaaatcaacactgaatactacaaagacagcctttacagtgcccaagattatcccaacactagggcagagcagagcagaaagtcacttagatcaccgaagtgaggctgaacagtgacttcttttcctgtatctgaattggatctgtacttttaaatcaatcattcaagaaatagcgccttccttcacctgcaggaaaaagggagacttggaagatgagtgacagagaaggaggcgctgggtattgggagaagtttgtcttttaagaaggttgaggtggcacaggaaacgatttaccccaaggatggacaggccaagaatggcatggaggatgcccagctttgtggcgggggagggagtgggaagtgcctcagtagggggtggaggggcagattggcacaaaggagggcatttggggagtaagggaggaagctgaaataaatcctttcattttttttgatactgggtatttgtttgtttgtgataaacctaaatttgcatttgaggcaagagctttaccactgagacagaccccaggcatctttttattttctgttttgagcaggtctcactaagttttggctggcctgaaaagttctcaggtctaggcaggccttgaactttgaatgctcttgcctcagcctctcaagtggctgaggttacaggcctcaacagctggaccttaacattttgatatcattgggaaagtattttgaacaagttacttaatagtaagccttaattaatattaagttcatttaataacatggaaaacacctaatgaattcatagcattcccttgtcttaattaatctcctgtggctatagttttttaaaagtataaacgatattggtgaagattcttgtcaatctttggttacattcactggcacttccttaggggacttacttgacagtggaattactgaattaggtaaaagaacaaaatttgccaatttgctctttccagcatcacatgcaggaggcaacgcccttgtctgcactggggattacgtacttccttttcatcattttataattcaccactcagtagatgaaagcggtacatcatcacttaagctactttttcttattaatttttgtcttaaaaatacattgagagagccaggggagatggctcagcggttaagactgactgctcttccagatgtcccaagttcaattcccagcaaccacatggtggctcacaaccatctgtaatgggatccgatatcctcttctggtgtgtctgaagacagtgtagtcatagacataaaatgaataaataaatctttaaaaaaacaactcattgagaatgttaatcttttgtttgtcgttcatttcttacagataagtttatgcttctcttccctttgtttgctgtttttgatgcgggaagatttgttttgttttggtttttatgagacagggtttctctgtgtagccctggctgtcctggaagtca

SEQ ID NO: 20246 - DNA, 1225 bp, Mus musculus
tcagttcctgctctctgctgtctgcctctccacactgaagatcaggcaggccagcctatgtcagttcttatgccgtggctcccagactgcagacagaaggcctgagtagtgtggggctgattggctgtgggcttttgctcgcttcactgacagatgatggctgatgatggctacggttgggttccccactggaattggactaaattatcaaactgttgctctggatgacgtggctgggggctgtaacccatctttatagtggtgagtctctcagagcacttctgcatagtcacatctaatggcttcctttttgtgagcaggtttgtctgcccttgtggatttcttgggcagagtggagtgaaagtgctaaaagccaggaggacacggaagccatctttaaggtacaagctcccatttctgtcccttgtgcagggattggttattttatatcctaagtcacgatgacctagtagctcgggtgggtcttcataatatgttttatatctctaagttccttttgtttttttcttttaaatgtagaaagctattatagctgtcacaggtgccagttcagtaactctgaaggagaaatacctggattgggcctatcggagtggaggctacaaaaaggccagagcagtgtttaaaaggtaccacactctaatcctagttttgaatacagttgaaaagcattagatagcctttttcccttgtcgccaggctactttgtgggttcctttttcttccacccttctctacccctcttcttttctcttttagccccctcaacactaggtaggagagaaaaaaggacagagggcaaaggggacaacaatatccttagactgcttcctactgattaagggcatcgagtttcttggggcgagtttgatcttcaccagtaggatatctaatttcttcttttcttctctgcacacaactacttgacaaagaacaacaaattagagccaaccagcagtctctgtcagggctctagcatttatatctcctttgaagagtcccggataccaaatgtcacacactggcagaaacttatctgcagctgtcaaaactacgacactgctagagcacgagacaaatcatagtcagctgctgtgacagatctgaagcagccaagcctcatatcctataccagggaattaaaacgaaaacatattcttacaatatttctgtgtttttaaagaaaccaaaattcacactacat

SEQ ID NO: 20247 - DNA, 1185 bp, Mus musculus
ctatggtgaggccaacatgtctgcttctggtctgtgattaagatctaaggctgggggaagaggaaaagaatatacaccgggcagtggtggtgcgagcctttaatcccagcacttgggaagcaaatgcagatggatctctgagttccaagccagtctcgtctacagagtgagctctgagacagctagacctccacagagaaaccctgtctcaaaaaaccagaacaagggctggagagatggctcagcggttaagagttttggctgttcttccagaggctctgagttcaattcccagcatcacatggtggctcacaaccatctgtaatgggatctaatgccttcttttggcatgcaggtgtacatgcacatagagcactcatataaataaataagtaaatcttaatgaagaaaagccaaaacaaaacaaaataagaagaaaaagaaaaaggatatcctttacaaaccctccacgggcctttgggcgtgctgctcacccagtccactgcataacgtttacattcggcacctttgttcttgggttccacttcttcatgtcgtaggagagaagctagaacatgcatcagtttgttctttgaattcttcagcgttttggtagagagttccgttgtgttttttctctgcctctgttagaagaatttaagagaccaggctctgcagggctcatggaggtgtctgtggccacagataactactgatgtgatttggagagctataataattttaaagataatatttgttggggttttgtttgtttatttttaagaagggtaggctggccttgaatgtgtgggaatcattctgcctcaggcttctgaatgctgtgccaccacgcccagctaaaagttaatatctgtaaatgatgcctgaaacattctgcaatctaattgatatataacaactttggtccattgattagtctatttgttaagctattctggaacgcctgttaggaaattactctttttttttttttttaaattacatatttaccattatgattgttactgagtattttctttttttaaattttattagatatgttctttatatacatttcaaatgctatcccgaaagttccctaatccctccccccgccctgctgtcctacccacccactcctgcttcttggcactggaattcccctgtactggggcatataaagtt

SEQ ID NO: 20248 - DNA, 1207 bp, Mus musculus
taatttgctctctctgcagggctatcatcaagaaggcttccgacctagaatacaaaatacatcggagaacccttctcaaggaagactttatcaactatgttcaagtgagtgagtctatagctttttaattcccttcaagaattttttttttttttggtttttcgagacaggatttctctgtgtagccctggaactcactttgtagaccaggccggcctcgaactcagaaatccacctgcctctacctcccaagtgctgggactaaaggcgtgcgccaccacgcccagctcccttcaagaattttaaatcagacagtggtgagcttcacagcagttttctacagaaatccagaattctatgattgtgtgcacgttttttaaaattaggatcagagatgactgtgtggagggcaattgcccaataaggcttggtccttgtcagagtgaactatttcctcctgttgggtcagtagatcagcaacatcattgtgtatcaggattttagcaggaaacttgtcttctggcagtgggcctgctagaggagtttgacaacggcaggcggttggaaggtctgtagagggcttgcttagcactgtcaacctgcaaaagaggtttgctttgagattttttccatcttctaaatggacaagagattgatgttgagattaaacatataggatgaattgtcaaaggagggagaatggctactatgtacagagtcagaccagaaagatgaaaaaaaatatctgcagaggccccaagagagtgttgggtctggaagtgttacagatggttgtgaatgtgggttcgggggactgaactcccccccttttggaattatagccactgagccatcgcttcagtccccagaaaggtaggatgttagccatgatggtgctgcctagaatcctaacgcttaatgaggctgaggcaggaggatcttgagtttgagatcagcctggatacacagtgagacttgtctcacaaaaatcaaaacaaaaacataagacttaaagctttgctggatctgatggcttgcacttagaatctgaggcaggaggcatggcggtacagacttttagatacactactcagaaagtgagtagagacagatttttttttttcgaggcagggtttctctgtgtagccctggctgtcctggaactcactctgtagaccaggctggcctcgaactcagaaattcgcct

SEQ ID NO: 20249 - DNA, 1151 bp, Mus musculus
gggacgtgaaaatgcacggttaccatactggtttcgtgaagccagccgactaagaccagggcagctggtccgcagccttagagcctcatcgaatttgcataattaacaatatcgtcttcagttacattttttagttttcagtgttctcggtgacgagaagcgagaacctgcgacaggagcatgataaaaacaaatgacttccaggtagcgtacttaaagctcctatcaggtattccgggaggagctttttccggtctccgaggcgcgaggatttagccccgcccccagccccgcccccgcaaaagatgcattcccagaccggaaaaggttcttgctgcaatcctatagtcaaccacagggaggcgacagcggcttcgctagaaaagaggggctccccaatggcggaagcggaaaaggcgggacttacgaagcacgttcagtcaatcactaagagtgaggctgaaaggtggctgttctctacgcttatcggccgcccggctgcttgtgaagttccagcctcatggcggagataattcaggaacgtatagaagatcgaatcccggagttggaacagctggagcgcatcggactcttcagtcacgcggagattaagtgagagaggatcagggaagaggaaggagcggggaggccggaggggagcttgaggccagtgtgtggcggggaccggcgtgctgacttttctgagtttgtttgtagctaccatgctagcagagggaaaagtccgtggctggaatttgaccacggtcagaattcaactttaacgtattgcaatgcgatccataatcagtccgtttacccttcctactgaccgtcatccaatggtcagggtcttgcggccgtaaaggtgatccagccaggatcctagcccgtcaaggatactgggcagtgtgaatggcgggagaattccgattagaaaatggttatagtttaaaagtttggggtatacagctttagatagtcgagtacagcgccacggaagcccagggggagtgggtaggtctccctaactaaacttatagactgaagaccattcaattcatttcctatgcttctttagcgctctgccacagggcacggaatatagttggcatttggtaatttggtaaaatcagttacttttagtgattttc

SEQ ID NO: 20250 - DNA, 1148 bp, Mus musculus
gcggcttcgggggttcggcggcggcggtggcggcggcggcttcgggcggcaaatccggcggcgggggctgtggaggcggcggcagttactcggcctcctcctcctcggcggcggccgcggcggcggcggcgggggccgcggtgttgccggtgaagaagccgaaaatggagcacgtccaggctgaccacgagcttttcctccaggcctttgagagtgagtgtgagcggcttcgagggcaggggtgcccctctccggcgttcggggcacggggcactccgccgggttctcggagagtccacttgctttgggagtggagggaggactcgctggggaacgccggggtcccgagcaggtccctgactcccggaagggtcgccccggggcccccaggttcagagcagccttggaggtggggacgtgacggttgaactgagcgcatatagatcccgagacgagttggtgttttcgtttgtgtcttccttactccacaagtacagggattatagttgtaggtttcggggggacgagacacagcctgtccggagatgagtgttgtaaagccgaggaaattgtcatgggtctgaaatgcgttcgtacccactctggctgcgtgtgagtgaacacgcagcatttgaaaccttttaagcttttcaaacctttccgcccattttatgggtgcgtagactgagagagacagaatggggcaagcgtcctctccgtggacaaccttggagttgtttcttaattccagaacattttttttttaaatcccggtttttcgttttaaaagatgcgtggagggcgaaactgacttttttggaaaggggatcacacagtgcctggaaacaaacaatagaatttataaacattatgactataaataaaattgttactaagtgggcattatatcctgatggttttgcacctcttttgtgtagatagtggaatttagcaatcttctagctgggtattttacggcaacttgaatgaagtcagctttgccgttgaatctctttatttacactatatccgtggcatatgttatgggctttggtatcagctgtgcttggaaagacgttttacattgttttaatactcttccttcattttcattgattcttcgtgaaattcttattggaatttaatac

SEQ ID NO: 20251 - DNA, 1127 bp, Mus musculus
atttacttattagggtgtgtatacatgtgtgtcactgcacaactggaggtcagaggaaaacttgtgtagtcatttttcactgcctcatgcttgtcctcttttgctgtttaaaattactacaaaagcctgttgatgtttctgttgataatccattctaaacatttcttttttttttttttaagaatttattttatgtatatgagtggattgtagctgtctttagacacaccagaagaggccattggatcccattgcagatggttataagccaccatgtggttgctgggaattaaactcaggagcactggaagagcagttagtgcgcttaaccaccgagccagccatctctccagcccctaatggtttttctttattagctaatatatcagattaaaagttacaagtagttcatgcttgattttcttattgtagaggttctaactcatatgtaaaaatggcattttaaaatagtaaattatatatctacagtaattttgggacttttttttaacttttaatttgagagtaaagctctactttgaataatcttttaggaagaatgagtttccattgctttaatgtatttgaaagactggggaggtaaaaaacttgctgaacatgtcctagcaccatgggaaagatatttaatactacttaaattgatttagcttctattggcaaccttttttgataacatggaatgataaaccttccacttgccgaacagtggtggcgcactcctttaatcccagcacttgggagacagaggcaggtggatatctgagttcaaggccagcctggtctagagagtgagttccaggacacacaaaaaccttgtctcggaaaaaaaaggaaaaaaataaccttccactttataacaaagccaataaagcactgtgattatgggatatttgtgtattgtagtagaattggcttattattttgattaatacacttaagaggagaagcacattgggttcccaagccacagtagttaaagagagaatcaaacatttatcagttacttctcctctctgaggttttgtttgtttgttgttttgagacagggtttctctgtgtagccttggctgtcctggaactcagaaatccgcctgcctctgactccc

SEQ ID NO: 20252 - DNA, 1437 bp, Mus musculus
aatggccttgtgcatacagggcaattctaccaactacactaccttcccagtcttgttttatttatgctttttctcttgatggtagttgaaaccgaagccttgtacatataggcatgtattttaaccacttctctgtacttgttgctccacgtctccattcccaagccatttattccatgatgatagtacaaaaaccttggaagtaatttcagctcaatactggataaactgtatcatcatttccattatattgtccttatcttcaatttctttaatattgggaatcttaactgtacaattttaattttttctttctaattttcagcagtatgttagtttcacattccattttgtacttgtggctttataatttattgttgttgatatgtaagtataatttatcaatcttttctttgccaggatgtaagttgtccaataagacaagtccctactggtaaaaagcaggtgcctttgaatcctgacctcaatcaaacaaaaccaggaaattttccatccctggcagtttccagtaatgaatttgaacctagtaacagccatatggtgaagtcctactcgttgctgtttagagtaactcgtccaggaagaagagaatttaatggaatgattaatggagaaaccaatgaaaatattggtaattttatttctgtaatttcactaggttttattattagagattaaagtggtcactgaaaatgtttgatttagtatttctaacatttagaaatgtttttgaagctttcctttttttttttaaaccttgactttttgctggccatggtagtttgttcctttaatccaggtcttcgaatgctgagtcagtagaacatgagtttaaggctagcctaggctatatagtgtaaaaagatggtctcaaggataaagtaaaccagatgataataaataaattaaaacaactcaccaaaccttgtttctttccaaagttggaaagcctgttatcttactttactggacattgaccgtgggccttccttaggttaggtgtctgctcactgcttagcttaaccaggagctttccccctttttgcctcactgcttctccttctccctctctttctctcttctttaattctgtcttgatgcagtctcttcattgcctagcttggactcatggtccgtaggctcagattcactggtgatactattggtgcatgagcagtaaaacatattacaagtttatccctgtacccatttctttatttttccagcagatctgaattcatttttgaggtaatcattcaattgatgtatagttactgccattacaaagataattaaacaagaagtgctcttctcagaagatttaatactcagtttaggagagataggaattttaaaattgaattgaaatgaccagcagtataatagaggtactgtttgaaacttagaaggagatag

SEQ ID NO: 20253 - DNA, 3215 bp, Mus musculus
accatccttgatttcttgatttctttctcctttatattgccagtgcatacaaagatatgtgatgtacttaaaggttatgaaagtcacatagtgagcgttagccccacaatcctgattgcctcagatgaagccatgaaacctacggaaacttaagggagttaagtaactccacaagatgacctggtgtgcagatgcacatgcacaatactaaaaataaactttacaaaacaagtgatggaagagtggacaaatgattcagtggttaagagccaagcattaaggttcaattcccatctttcacagtagttcattcctgtctgtcattccaggcacacatgtggtatgttaatgcatgtgcaggcaaaaaattcatatacatatattatacattcatagggattggattaaatgtttgcctcctaccccctgatatgcccatttaaatgtaatcaacgttttaaaagtagattgcttacctacaatgtatagagtagtattcctcacatcccagaattcatgactttagtcaggtctcagtctgacagctcttacggttcctttattgaggctcctatcagatcttaatattagttactggctattaagtaacttgctcggacttgtttgtcatgttacacagtgcttatctcttgttgttttcccaaagaatttgtatcattaatgctttgtttttcttgaatagatttattgctgacaatcaaatgaatcatgcctgtatgctgtttgtagaaaattatggacagaaaataattaagaagaatttatgtcgaaacttcatgcttcatctagtcagcatgcatgactttaatcttattagcataatgtcaatagataaagctgttaccaagctccgagaaatgcagcaaaaactagaaaaaggagaatctgcgaccccttcaaatgaagaaatagctgaggaacaaaatggaacagcaaatggattcagtgaaactaactcaaaagagaaagctttggaaactgacggtgtctcaggggttccaaaacagagcaagaaacaaaaactctgagaacttgccccatgttttgaacagacactgaagttgcttctagggaattcagcctctaggaagagttttggttttaggttgtttggcttttaatcatggattgggaacaggcagtgttcgatgatgtcattgatttcagcacggaggttctgtgggtctgcttggctgcttctcctcacgtgcttatcaactttagtgatgtcctcaatttggttttagcctgaaaagcagtttttcaaatagttaattttttcttagctatgacacacatcttattaaatatattgggttaatctagaaatttcacacctaaattttaatgcttatttcatttgtgactttttctgctttgtaattatgagacattttctgggaaagggatgttgggatgttatgctgtcttagagatggagaatttttgtgaaattgttacttacattgccactttcccccaaacgttgacccttgattcagaaatcatgcatctgggatgagaagttacaaagcaagttctgcatcagttgtgttacaagttcaaaacagcaccagttggtctcctgtcggaggcagtgtgactgccttccatgcagccatgcagtgccgtcccgtgcgcactgagggagctcgctgttccttttcaagtgaatggttttagtgcttgttttcccagtttaggtttttacttgaacatgtttttagtttttccttttaattaggtaaccccatgggaaattgttctgtgcacgtcttttgcactaggatggtaaagcaagagaaacagttggagattcagaagatgccactgtggggagggtgtctctgagtgtaaaccagaagatgtcacaccttgtttcctttgtgacatccttcttgattagaatatccatacagataagctgacttgaattgttgtgagcaattttccctgtgttctgtgttttatgcacatattcgtggttgggttttctccaacagaaagtggtttcactactggcacggatagctttttattccagctccaagcactgtggttgaataacatcacctcaattttttattatcctttaaagatattgcattttcatattctttatttataaaggatcaatgctgctgtaaatactggtatttttaatgttttaatttcattccaccaccatcagatgcagttccctgttttgtttggttaagggacataagctttctcatggtgtcttcagagatttataagtgtaaatactgatttggctggtctttatgatgtgtttaactgtgaggctatttaaatagtgtggatgtgacttgtcatccagtattaagttcttagttactggtttttgtgttaaaaaaaaataagaaagagggaagctgcagttttcgttgtaggctccctagctggtaaactctcctcacgagttcactgaactctgatttttgcctctgggtagtgggttctgagcatttctcctgggctttaatttgctaaagctgtgcacatatgtaaaaatcaaaaaaatagattattttagggaagatgtaggtgtagaattattgcttatgtcatttcttaaagcagttatgctcttaatgcttaaaagaaggctagcattgtttgcacaaaaaattggtgatttccctcccctgaacagtaatgaaattacttctgttgagtaaactttttatgtcatcttataataaaagctaaaaatgccctttggttctatttataaaaaaaaaaaagcttttctatatgtacccttgaaaacagattttgaagaaatcatgtaagatgataaagcatttgaatggtacaatagatgtaaaaaaattcagtttaaaagaaacgtttgtttttacattaaatgtttatttgaaatcaaatgattttgtacataaagttcaataatataaagctgtcttctgcttttcttcattcatggtctgcattgttattactgtgtgcttttgcttagatggcttaggaaggatccagaaaagaacactggtttgatgagagcttaatatgaaatcaaggaaattgaaagtctgccttcaacactcacaggtgacccactgtcatttacagtgattctgacctgctgtgtgtggtgtgctgctaggcggtggctctaccacttagataaatgctattcttctgattcattt

SEQ ID NO: 20254 - DNA, 1232 bp, Mus musculus
ttttttttgtaatttgtgggtctaagcccaattctttgttgttaaatatttattaaatttagccaagatctttctaagtagctactgtcactcagttctattcaatgtgtgtatcccttgaaaagatcattataattttttttgtgtctttgtcttgaaagagtggacaactggctttgagggatacagtctgagcagtcgaagaaatatagccctccggaatgatgccgagtcctcgggtgttctctactccagcgctccaacctacttctgtgggcagacgctgacattcaggcaagtggattgggacatgcctggcatgcctctggctgtgtactggagcgtgtggggtgtgcctgagtctgagcttggcacgccccagctttagtccatctcttacagggtcagcttggcaacgcttttgttttgtgttgttttattaaaacagggttttactgtgtaaccctggctggcttggagctcacaaagaccagactgggctcaaacttagagaagtctgcttgcctcttttccaagtgctggaattaaaggcgtgcctaaccacaccaggcttttgacaaggcttcattcagacttttcctgtttcagttgtctgtgtctgtggggttctgtataaaagcttggtacttgatttgtttgtctcttttgctctggtaagtaaggatgaatagaatacctgttagaagtttttaaaagtcagaggcatggtggtgcaaatctgtcactccagaactcaggagatggaggaattcaagatggcctcagcacaaagcaagtcagcatgggctgtgtaagaccctgtctgtacaacaaagcaaactgctcggaggccaagaattatttttccctttgtctctgaaaagcagcttactgttaagagcacggcgtgtgtgtaactctgtaaaatataactgaaagcacgccttccctgccatcagctctcctttacctgctttcttgttagccgagcagtgtgttctatggtcgtatttctaaatagctctttgtagaaaaccaaagcccagatgctttggtttggtttggttttggctaagccctgttttggtttgagtgattaaacgtgtgcctggcttttaccatgcgtacttcagggtaacagaatctccgcaagattttaagtctcaagattatcaaatatttttatttctttaaaaatgttcttaattgggctggagagatgactcagcagt

SEQ ID NO: 20255 - DNA, 1154 bp, Mus musculus
gtgaatatactttttttacatatattctttaaatctgtatatctgagttactatattttaattagaaaccatgtccaaattagccattgtatcttggctgttgataaatcattcagagcaagaaggaaggaaccaggcacgctaacatagcattgggataccacggcaggggggtggtcagttcaaggacaggctggaaaatagaataagactcactctcagagaagaaggaaaggagaagcaactgggtgtgataatgcaaacctgtaatctggaagttgaggcaggaagatcaccatgaattcaaggccagcctgggatacatatagtaagaccctatctcaggtcaaacaaaaggaaaggaaaggaaatactgatagcatgttgtctgtgccttctcccagaatggtccatactgcccctgttcagcacatagacctgtgtgttggtctagatgtcctggttctgtggattttacctaacttaaaaatccttctccataggtggatgatgacttcacagcccaagattacaggcttcagttccgcaaatgtactgcaaatcattttgaagacgtgtatgtaggttctgaaacggagttcatagtgttgcacatagaccccaatgtagattatcaattcagagtctgcgcccgaggagacggcaggcaggaatggagtccttggagtgttccccagacaggccactccacactggtgcctcatggtatgtatgctcttaccatgtcagacctgaagctccatggggtatagaaactttttttcaccttctgctgggattcctagccacttttcctaaggataatcctgaattgagagactgtggaacctgcctttccttagatcactcatggaaatgattttcatcacatctgtgtagtagattggcctttggactcacaattgagtatcacctaaaaccacacactgaaaatggtgccgaggacactgacttttctagaccctctaaaagtcttacaaacttgatgttggtctttctcctccattactgatttaaagggcatactcctttttcctagaatagttaggatcttgctgtgttgcccaacattattttgaacacaacaagactcatttcagcttcccaggtagctgggctacagccatgagcca

SEQ ID NO: 20256 - DNA, 1124 bp, Mus musculus
tgtgtggtcctgatgactctagagtatggtgactttaaagaagagcttatttctcttaatgtaaattttgaaagacttttgtatttttgtggttcaagtttaaaatgaaaaatttgagttacaaattgtatatatgactgtgacattttttctgaatgtttggattatctatttttgctttattgtatactttctgtatgtgtgaactgtttgtagaataattttcacttatagatttctagagctgtttcagttctaagcttacctgtcatttttcccttttcctgtaattgtcctctcctgccaagcagcagagctgtgccactgtaaataggcagtctctaaagttacacaatggaaaacagttatgtacagggtattttaaaatgtcctaggaagtaaattatgcctcggttgtgaaaagcattgcctttgtttcttgtgccttcttccaccacgttttacatgtaatcattgagtcattagcactggcagagtaaagccttctgaattctagcatttgcctagataagaccatctgtcactcactccctgtagttacacagtccagtgaatcttgccaactcaagtcgtttgtacattttctggtacttttatatcattgttttatttcataaagtaatgacactgtttatctgttgtggacaacttgttgatggttcaagaagtaatgacggattctaccatggggcttctacctgactgctgttcccatttgagtatggcgtttgttgttggtttttgtttttggtgctgaggattaaatttaagggtttttgtattataggcaaatgtcttgtatcctagtatatacacaggcgttgtgttttactaattatttgcagtggtacgtatcaaatccaagatctcgtgcattctatgaacatgctaaaccacagagcgagaacccccatcctgtttttgaggcagggtctggtatattgcttaggctactcctaatctccttccagaattttgtaatccccgtctcaagctccttcagtacttacaggtatttgctaccacactgagcaaggtcatcttttaatattttttgagtacctatttttaactttagtagcaagtttttaaaatgcacattt

SEQ ID NO: 20257 - DNA, 3024 bp, Mus musculus
ggagtttggtcctagcagaatagtagaggctggctctaccctctgggcagattccctcacacccttgtcctttttctcacaagaaaaccctgtcctgggatccttagcagaggtcaccctgcctgccgggaacccacagggattctggattcctccccacccagagggaaggctatttttagtgttctctttttcctcagccctctctgtctccctcctcttcaccccagatgtgtttgtcacaaggagactcttcccatctgttgacaaccctatgaacactgagttagggaggaagctctggcccagggctgagcttatagggcataaaggaaaaaaacgaacaggtgaccccaatggcgggggggtggggggagccctggtgcctccctagactcaccagtatggctacaactacctcagcctggtgtggtaactagcccaggcctttgatctcagtgttgggggcagaggcaggtagaactctgtgtgttccaagccagcctggtatacatagtgagttccaggacagctgcagctacataacaggactgtttctaaaacctaaaacacaaacaaaacaaacaaacaaaaaaaacctaacccacaactgtctttaccatccagttcccaagcccaaggacacagaagccaattgactgagcactctgacagctgttctctgctctccgtggggctgaatccccgagtctctgccactcctttcctctctgtcttctgtctttctcctttggtctgtttttttttttcttctctctctcatttaaagtttcagtgttgtcctggctccctccgtcagaacacacatgtcccgccggggaaccgcaccagcatggctgcctttcccaaccccccttttccccttgcagccacatcagcagagactggctgtggcctggggtgacccatctcggaggatctggctggctactgtgcatctgaagttctggagaagtgttcacctcagccctagttgtccagaaggaagccctgaggccagcagctgccccactagtgaactccagggtgtggttgatcctacgactccccgtgctccttccagcaaactctcctcagtcttgaggagctggtatggagaagaattcagctctccaagcttagaagtcctgaagggttcctcataactgcaccaagagctggccatggtgacgcatgccaggcaagaggcgagggtgccatgagcccagtgacaacctggactacactgggggttcagttcagcctgagttacatagcaagaccttgtctcagaaacaaacaaacaaacaaaccaaaaaccagaacagaaaaaaacagcactcaggaggcagagactggcagatctgggacagtcacagccagggcaggttacactgagaaaccctgtctagaaaaactaaaaacaaaaaacagaaacaaaagcaagcaagcaaacaacaacaaaaactacagataggggtggatgttgcaattaaaaaaaaaaaagtgcccacagcatccagacaaaatttttaaagtttaatctaaacctaactatgaagaaatcctcagacattcatttattacttacatgttgctatacagccagcctggattcttcaaatgacacgattataaaaggtaaaatgggccaggcatggtggtaaacacctttaggtctgtgcactcagcaggcaaaagcaggtgcatctctttgagtttaaggccagcctggtctacatagttgagttctaagacaaccagagctacatatagagaatttgtttcaaacaaacaaacaacaacaaaaaacgaggagaggggatgatacagacagacagaccaaagccaggggtgatactacctataattttagcattagggaagtagaggcaggacgatcagaggttctgctattatacacagagagtaaagggctaacctgggctacatgaaaccctcattcaaagaagaaaaaaacaaagcctgtaccaagttatggcaacaaatgcaatttgggattcttgtttggaacctggattttaaaaagagagaaaccttaatgttgggtggcattggtagtgcatgcctttaatcccagtgcttgggaagtagaggcaggctaatctttgtgagttcaaggccagcctggtctacaaagtgagttccaggacagccagcattacacagaaattctgtttcaaaaagatgggagaaggactggagagatgactcaaaggttgagagcactggctgttcttccagaggtcctgagttcaattcccagcaaccacatggtgactcacaaccatctgtaatgggatccggtgccctcttctggctttcaggcatatatgcaggcagaacactacataataaataaataaataaatcttattttaaaaaatgggagcgagatggagagaaaccttgaagctgggtaaatggctcaatagttaagagcactggctgctcttgcagaggacctgtcacccatacgacagcttacaactatttgtaactctagttccagaggatcagacactctcacaacaatacacaaaataaaaatttaaaagacgccactgtaaaggacataattggttttggagaaattagggcctggatgtatattagatgacaatattgtaaaattgtaacaatcatgatgtgtttgtatagaatgttcctgtcctttgggacacatactgaagtaaaatgtagtgatgtctatggccaattttttttttttttttttttttggtttttcaagacagggtttctctttatagccctggctgtcctggagctcactctgtagaccaggctggcctcgaactcagaaatccgcctgtctctgcctcccgagtgctgggattaaaggcgtgcgccaccacgcccggcttatggccaatttttaaatggttcaattgaaaaaaaatcagatatacatatgtatatatgtacatgaatggaatgtatgtgtgtgtatttctgtatctatatacagagagcataccactg

SEQ ID NO: 20258 - DNA, 1227 bp, Mus musculus
aggaaatgttaatgttggtgagagcatattaccttactatcattgtaaagtacaggagggaaactggctagatcagcactacagagatctatatgagggaagagagacctggaacaaacatctagtactctaagcaatcttttgacaaacttactctgagagacgtaaatatgagtcagatttaccaattttagtgttccttgttgagtatgttactgaaccatggtgtaataaaaccatgaactgagaacctagaatttttcattatagaagtaagccaggagacttgtccactatcctcattttcagcctgttccttggggtataactctgtccctttgtctgtcgcctgctcttgctgagctgggtgtttatggaaagtgagtctggaatgagttctctttagaccccagggacttttgctgtctgtgaatccagtgtaccagttctcccaggcctagctcccgacgtttgcttttctccctggcaggcacagctgcagtgttcgcatcaactgtatttactgatttactttatttcaggttttctctttttacatacactttttatccagagggggaggcatgagactacttggactgtgcttcgacgatttggttatgacgatgacctggacctgacgcctgagtatttattccccctgtatgtacctcagcgctctcatttcgtttactttctaagttatttcactttatagtgttttatttaatagatgcatatttttaagtgtctcatgactaatttaaaattataggtagtttctcaactttggcactctgaacttttgagtctgtctattgtgtagctctggctgacttagaactcactctgtagaccaggctggcctggaactcatagagatccgcctgcctctgcctaactgagtgctgggattaatggtgtgtgccaacactgccaggcctgaaaattctttattgtggatattgtctgtcctccccactacaggatggtgagctgatccttcagtgacagcagtcctcttcttttatttgtgatgagtaaaaatgtcctctcatgagaaaaatcactcacagttgaaagccagtacttactatagcagaaacactatttatttacttagttgaatttttttgttgttttaaggcaggtttcttactgtacggagcaggtcagccttgaactcacagagatctgtctgcctctgttttccaagtgttgagatta

SEQ ID NO: 20259 - DNA, 1606 bp, Mus musculus
tgacattaaaaatattcagctgatttatctgacttcatttcccacgtgacaaaaatatagaaaattttaggtgttagcttctgactagtcgctaactgtaagacatttgtctctcctgaagcctgttttgtagtattcgctatatcgaccagggttttggggaagcactactgtatgcagttagcctgacaagtgtgctaacacttcccccagatggacagttagatgagtactgtaactttttcctactaacaatgttttcaatattaattgtattttctgactgcaggcacgtgacacaagctgacctcaagagctcaacgttctggcttcgcgcaagctttggtgctacggtctttgcagtcgtgggctttgctatgtacagagcactactgaaacagcgatgattaagggaggcaccggcctaccaaaacacatacttctatgtacattctgaatgctttaaattctgctagaatattgagatatttatacatgcagagttactttattaatatttgtaattcatgcataagagtattttactcctagtaatgactgcagtattgactggcatgtggaaagaaaacatcttaggagccaaatataagtggctaaatttcagaggccaaaagggaatattttgtaaataatgtacatattcaagcaagatacggtctcctgaactgacttcagaaatgtgtttccaggcatttctacagtagtgttctagtgttcacttggctcaccctgctaggtttcagtcacccagagattgtgtttactcaggcatcacgtatttatttcaaggtgactcagaacaatccttcggcttctgtagccgtttctctccatttttaagatcacacaggagacgaggtcagctttccaaaaccactctgtttccgtcacttgcggtaggccggcttcaaagccatcatgaaacctagaaagttgtggagctgagtatgtggctgagggcctgaggcaggagcaggtggcggaggttacctgtgtcaccacattgcttctttgtcagagtgtggattttatagccctttcaatcaaatggggaaaacagtttgtatattatcaatgtttttagttacaataaagaagccgccctgaccactgctgaattcccacctgaagtgaaaccgtcctcgaatggccgtgtctgtgtagttattgccgtagctgcatgtgtcatgatgtgttctgtatctggccaggataacctagaggcaacacttttttaatggtaaaataaatctaatgaatataaactctcacaataaacctattttttccatcattgaccttttcaagtatttaaataaataactgctgtgtactgtgatcttgaggttttttgtcttctgaggtaaatatctctgtccagatgtgagtgtgctcctttggtttctacctttcttagtttagacattatttttatacaaaaaagtactactcggtaggaaggaagttgtaggatgtgtgtaggagatctacttagagggctgtgacggcgatctctgaggtctgcctgccctgcctgcccttctgactctgtcatggtcgtctactccttgtcatgatggcgctt

SEQ ID NO: 20260 - DNA, 1206 bp, Mus musculus
ctaagatgactggaaacaccccagcttcttccttttgtgctttttttgtttaatttaattaaacacaacaatcagaggaatgtcttcaccaggtcctaggcagacgctgtgttacagctggggaattttgctgtctcataaatcctaagcacgtgctgcctaaagagctctggagatgagttttggcttcttgggagtttaccgtagtgtttagcaggatttcctcctccaaaagaaacatagtatgcctttctcagtacaatgtagaagtttgtaaagtacatgatcctagcaagatgtgatgacacatgcctataatcccagctactcaggaggttgaggcaggaggttgtgaggttccaggccagcctgagctactgagtaagtttatgtccagcttggactacagggcagtcatcaccttcctggtcttactgcaccatcagctcgcttcattgacagcctgttcatcctctgagtgcctgatacaaaccaatgggcaggaatgacgaagccaccttttgaagcgaatatacacacgaattatgagtgtataagcacttaaaaatgagctttatgtatagaaacttgtgggctggcaaggtggctcagaaggtaaagaaacctgccaccaagtctgacaacctatgttcaatccccaaactcacttggtaggagagaaccaactccacaagttgcctctgacccatacagagctacatactcaataaataaatacatgaagatatggtgggctggagaggcagctcagcagttaagagcattgttgctcttggagaggagccggcacctacctggtggctcaatttcaggggatttgacaccctgttctgacctcctcaagcgtcaggcacacatgtagtgtatagatatacatgcagacaaaacatacacataaaataatctaaaaccagtaagaaagaaaagaaagaggaagagagagaagaaagggtatactagcttcaagatgaaacattctctctgactaaaaagctcttgtggcaatttacacaataggtatttatttgccaggagcctgtatttttttcttccttatttctagataaaaatgctggaattcttaagcagtattaagaaaaagggaaataaaacagttaatataggaaatatcctttacaagcaaatataagaatgcacatgtggtgattcatgtctttgaatgta

SEQ ID NO: 20261 - DNA, 1202 bp, Mus musculus
ggccttgaactcagaaatccacctgcctctgcctctcaagtgctgggattaaaggcatgcgccacaattgcccagctttaaaactgaatttatattaagttccctccttttttattagaagtgtgtgtgtgtgtgtgtgtgtgtgtgtggtgttttgcctacataggtatgctgtatacctagtgctctaggaggacagaagagcattagaatcaccgggaactgtcattctggttgtgagctgccttatagatgtgggaaaagaatctgggtattctgaaagagcagcaaatgctcttaaccttggagtcattttaacatttcctgttagatgagatgaaaggcatttgttatattatttatattgaggcagaatctcactatgtaattacttttgtttcctttagttggcaggagggcaattttgtgcagttttttaaccttaatgatgaccaggtattgtaacagagattttgatgatgagaagatccttatacagcaccaaaaagcaaagcattttaaatgccatatttgtcataagaaattatacacaggacctggtttagcaattcattgcatgcaggtaagaatttctcttctgttttgaccttgtcccattgtgatttgtaaccacatgaataatattgaatttgtctttggttgtttatatattgggtaaatagccaaatctacttaaaactcaggtatgtgttctattctctttttttggtaggtggtagggatagaacccaattgataagcacaagctttggcacaggagtacctacctagaattcacgtctgttctgtggccattaagaagataagtggacttgactgttaattttgagacagttcttacttagtatttattctagctgactgacctagaatgttgttatgtagattcggctaccctcaaattcacaaagatactctttcctctgcctcataagtgtattcagttttttgtgtgatgagtatacaagaacacaccctatttggaagtattgttgtgttcaatgtccaaattgcttgcttgctggtgcccccgttttttttttttttttttttgtgtgtgtggatttggacgcatagtttgagtacatgaggctgggaggtgttctttggagctgaattttcaggcagctgtgagctcttatttgggtggcagaaattaaactcaagtcatctggaagatc

SEQ ID NO: 20262 - DNA, 3417 bp, Mus musculus
tacctaaatatcagagaaatcttcctcgaccaggacaaactccaattggtaatccaccagttggaccaattgggggtatgatgccaccacagccaggcctgccacagcagcaggcaatgcgacctccaatgccacctcatggtactttttttccccttcctttcttttagtgacttaaaagtggtatgtgtgtgtgtgtgtgtgtgtgtgtgtataaaatgtttaaaagcgaaagacagactaactttatatattgtggtgttttttaggtcagtatggtggtcatcatcaaggcatgccaggttatcttcctggcgctatgccaccgtatggacagggaccaccaatggtgcccccttaccaaggtgggcctcctcgacctccaatgggaatgagacctcctgtaatgtcgcaaggtggccgttactgatcttacttcatcaagtctaataggtttggagattaaaccttttctcaacttgtgctgtttatatagacaagcttccgtcattaaggcttcattgtgacttttaacaaacataatcttcccacataccaggaactattggacatttatttgacatgggagaaattatttggaataataaaacaggaacttttcctgaagttgcaatttatactgtatggcttctttttcatgtttcatctaggtttttagaagtgaagtatagtaaatttggttcgttaaattgtgaaggcgctggaattacatgaacataccaccttaaataaaggcaagttctgtaagattacattgctatttgtaaagttatgccttcgcagcatttccaatgctgttggacttcatgtccccaacctagcttggtgagggttgtaactgtttccaagtacttgtacattggaagtttgaatgtgtaacaatatttaatgtaattagagagagttcctcctgttgcagggtttaagaaaacgggcccattattatggtcatgtgacttttctgtactgttaaacttcattgtaataaaatgagacaaaaatttatgcctttttattcataacccagctgtggaccactgcctgaaaggtttgtatggatgcatgccacggtagatgtccacgtaataaaactcagttaccaatacagttttgatacatgattgaattctttaagctgtagattttagctgcatgttttagtatattacagaatatataaagttcttgttaatgtatctgttgacagaaacaacacatgaatcattacatacgtgtaggaaggctttgtgtatgttttacttctttgggtttcatgttacagaagttcacaatgtaaacttcacattttcatgctaagattgtttagagcctagtgccagatgcattcattttcttgggattaatttagagacttcaggtgccagttgaataatttatgaacctcagaagctatccaggtgcttctagaagcttaggtgctgcatgcttcttgtgttaatgtaggttcacttgttgtactgtgcttctagtacagtgttggaaagtttttattacactccttggaagttatttgagattagctaggtaacctgtgtaaagtcagatagcttgactggaaattaggatcctgggaggtttaggatattgctgtgtcctgtaggaaattttactgtaggggtgattacctaccattggggaatttgtgttggatgtctcaccgtagtcgttcttacagcgtttgtggacatcttttctgggttgggggcacatgaggcttgggtaggtttatggtcagttaagtatcaggtgatctgtacaaagtaattacccatagaacgaatatgggttgatttgatttaacaattctgagcaaatgctgtctttaatagttctaggaagggtattagataaatgatgtgacaatataagttaccttaattttgtaggaatttatattgaaaatatttttggcttgttaacagaggaaagttagaacaagtaaagttcattctgaaatatgacaatttaaatctgaatgtcattttttagtctgatatttactgcactgattgtgtgccgcctctgctgtagttactggtacacagaaagttccagtttgtaatgaaaatattcatatataccagaaatgagttcctgccagctgctaaattagccttcacttcttcatcctgattacctctctagttaattaaagtttcttagactagcagcactgccaaagaaaaccctttattgaaaatattaaagtttagtttgtcagtggtgatgcatacagagacaagtgcatttctccttgaattgtaggaaggccatccagtgctacagagtaagttccagagcagtgagggctacccaaagaaatcctgtccaaaaaaaaacaagcaaaaaaccttttaaaaagatggcaagattacatttagaaatgctttcttttaaaacagaacatttcagaatttcatgaatttgattatcagacaactgaagtattgatagaacttttaagaattatgcaaagcttacatttatattttgttcaaagcacaagatagcaggccttattctttgaagtctacaacttaaaagtaaaagaatcctaatattctaaaagtttgtaacataaggtactctaatgaaatataatttgtgcctcaggagtggggtccatttactatgttgttgaaagtataatttttgcatgcatcaagaataattaaacttctagaaagtactgcttacctaattgcttctggggtccatagtgcggttaaatcacaagtgtaacaaatttggtttatacttgaattcagatggtgttacaaagtctgctttcagttatttgctatgtccctgtacaacattgaatgaagctttaagataaataagcctgtcggcttccatctacttgtgggtcaggtttttaaaagaaaagtctggcactagtttctactctatttagctattgatagaaaaaaagactagcagatgaggatccacttctgagtgacttctgaagttatcacttaatttgacgccttagtattatagtaatctcatgccacttgttagggggagaacacctattcagattacacattgagcttaaactgagtttaatgaatcacttctgggaatctccaagaaataagtttggactcagtgcagctgtagacaaaaagacctgctctttttctattgcttgcttgatcattgggacttaaaaaaaattgatgcatgtcttttttaattaattgggtgatgtttttctaaaattaaaattttcttcttcctatagccctgccataggacaggctgaggctgagtctcagtgttgccctgttcagtctgaggcaagtgggatttattttattacttatgggggctttcacagctttatggctgttggatatttatgtc

SEQ ID NO: 20263 - DNA, 1225 bp, Mus musculus
tatgctctttaatgttctcaaatctcaccacactagagcaaatgttaatgtagagccctgtaatgagtggggaggtcatttgtctgtgcgtgtgtggtgtattatagatgggtgtagactacaggtgtggtattaaagggctttgggtattacatggctcaatggaaagagaactaattttcaggtagccaaactgaaattgggtcatataataaatatgaaactagttcagaatgattttggaagttaaattttcagattttactgagcagtgcttcatgtaatgcacacaccagtagtatatccacatttgttttcaagtagaatttgctttgattttggtgttcagaactagtgtgttgggaaatggggtgatgacagaaagtaggttccaacttgtttattccttacatcagactggaaacagattttaatccttgggggggagttgtggttattttaattttagattttttcaaatgggttttctctgtataaccctagctgtcagtctggaactcttgtttacaagacctcgaactcaggtatctgcctgcctctctgcttccccagtgttgtgattaaaggcctgggccccgacacctgacaagatattaatactttcaggaactactgtttccgtgacaatgttccactggattgctgataacatttagtaaattacagttttgggttttttttttttagacttgttaaatggactttacttcaatcatagggtgcttatctaatgctatgtccaagaccttgaatttcattcccaccaccatttaacaactgtgactgcaggtgtatttttatcttgtgtccaccctactctagtatatgtaaatctcttaaaattgcctgagccgattttaagttaaaataggttcttattttcttgaatataggggtggggaagcgatttactaatcatgatacatttgcttaatgaataccaaatcattctttgcacttggctgtattcctcacagttgggaatttgagttaggaagattgctgtgagtttggagatcagcctgggctacagagtataagaccctgtcagggtggagatgatggctttgtagttcagtgatccagagaaccagttgagaattatgcagttttcaggtttctgtaaaagcacactgataacatttgataaacaatactgacttcgctttgttgagatacagtaagcaaatgaatgtgggatttg

SEQ ID NO: 20264 - DNA, 1197 bp, Mus musculus
ttgccaggatacaatgatgtttgcaaggaatacagggtataaaagattaatatttaagaccaattgtcctgtcatgattccatgccttcttggctactaagggaacaaaccagagaaacacaaagtggtctgagtgcttcactgcctgagggagtgcctcagtctctcaggaattgaaaaacctatggagcatgcctcttaaggcagctaggccaggccttctccatgcttctttgcagaacatattgtcagtatttagtgcttatcttgcaaaaatgtcagtctttcttatttgtttgttgtttgtttgtttgtatatttttttaggcatggttagtccattgtgtctctgttggaactctctctgtagaccaggctgcctttgaactcaacagttctgcttgcctctgcctccaaagtgttgggattaaggctatgtaccactatgtctggccaatagtttcatacgttttaagaagatagtagcttttttgtttgtttgtttgttttttgtttttcgagacagggtttctctgtgtagccctggctgtcctggaactcactctgtagaccaggctgccctggaactcaaaaattcgcctgcctctgcctcccaagtgctgggattaaaggcaagcaccaccaccgcccagcaatagtagctttttaaaaaagctagctttataaagtgtgtgtctgttcctcaggagtgagtattctatcttttttattttatttttttgagacaaggtctcatggagccctagctggcccaagacctttttatgtagaatagctggcctcaactcacaagatccatcagtgtctgcctctgtctcctgagtgctagaactattactgactgcaacttttgagacagggacttagatgttcctgattaggatatactggttggccattgagctcctggggaatcctcctttctctgcctccccagaattgggcaattgggggtttttcttttctttcttttttgttctggggattgaactgagttcctcaggtttgtgtggctggcagatactttaaggactgagttatctaccctaaaattcacttcagagttacatattttagtgttgttgggttttgtttttttttttttttttgtaaaaactgtattcactaagtttgtgcaatgaccagcactaatttcagaacatttctatcacttca

SEQ ID NO: 20265 - DNA, 1211 bp, Mus musculus
agagaagtaggtaggaagtggaagggagatgcctggtatccttttggatacctgtgtatatgtttgcataacatcacaaagtcacacggtcacaaaattaaaacaaactttttttaatataaaaaatgtgtatatgactgtttgtctacatgtatgtatatgactacatgtatacctggtgcagaagagggcattggatcccctggaactggaacttcagatggttatgaaccaccacgtgggtcctgggaattgaactgggtggtctgccagagcaaccagtgttcttaacctttgaaaactctctctagccccaaacaaacctttctttgggggtggggtgagggggctgggtatgacagctcacacccttcgtccagtgtagtcttcatagtacaatccaggccatccagagttacatagtaagttcctatcttaaaaaggggtgtggagtgagggtgatatggagactaacaaacacatatgtgcatatttcttttgcaggttctcagctgcttcgggagttgaaaaagatggatgataaagcccttttggtggaagtacagcttttagaaagcaaaacttaccatgctctgagtaatctgccgaaagcccgagctgccttaacctctgctcgaaccacagcaaatgccatctactgcccccctaaattgcaggccaccctggacatgcagtcaggtaaaggcccagcagtgcataagacatgctttcttactgctcacctcatcttttttttttttttaaagatttatttatttattatatgtaagtacactgtagctgtcctcagacactccagaagagggcatcagattttgttacaggtggttgtgagccactatgtggttgctggggtttgaactccggaccttcggaagagcagtcagtgctctaaaccactgagccatctcgccagccccctgcacacctcatcttaagggtgaaaggatggggattggggactagaaggtggggtaagggtggaactgaggttgggaaacagttgactgatttggtccaatcttcctcaaagaaaccaattacaagggtgcctttctaaccagctttttcctattaactgtctaaagtacttaagaacacagttattagtgcctgactccaaactggctgactggcttaacatacctgtgttaaccaaatctcttagagaagattgtaagttttttttt

SEQ ID NO: 20266 - DNA, 2523 bp, Mus musculus
atttatttatttatttatttatttattacatgtaaatacattgtagctatcttcagacaccccagaagagggcatcagatctcattatggatggttgtgagccaccatgtggttgctgggatttgaacttgggaccttcggaagagcagtcagtgctcttaaccgctgagccatctctccagccccctaaaggacctttttttttttttttttataaagaagagagtaaatagaaaggcgtgctgtgaaaagttgggagaaaatgaggctagggagtgggtcctattgttactatctaatacctccttccacctggtttgtcactgtgtttctttcagggattttggaccagggggagggtgtcctgatcattttcgatgaacccccagtagataaaacttatgaagctgctctggaaactattcagaacatgagtaaagtagtggactccctctacagcaaagccaagaagctgacataggtgagtgctggccctggggccagggtcaggcagcactgtcctctgcctgtcgacactgaacaccgtctggtcctcacggctttcccgattgacactgctctgtcttctcttgcagagttggatctgtagcggtcctttggagagtgtgtgtggcgggagagtgaacccttggggaaatgctaggagattcttttctttctgttccacttttcgctcggaaagtttttaaccctcattggtgcatctgtatccagcgataggcggccagttctcatgtaatccgtactggccaacacgggaatggggaaattgcttaaaaaaaaagaaaaagaaaaaaaaagattctaaataaaaggaaaaaggcttacactacctaaagctgtgctctctgcctcctgggagagggccgcaaagccaggcaccctgccaaccactggggatcctcacccacctgctgggcgccacctctcctcctcttcagaattgggtgtttgctgaccatcaaaagcaacgactttttattctgtttgtactgaaccaaaacaaacaactatgtatagactgctgttttccttttcatttgaaatgaggcgtttggtgttttcccctgccatctggcctgtccacccttccctctctgacattggctccagcaaactagctgaagggtccgctgtgctgccgccgcagtacatgctcggctccgacctgtgaaaaaacggaaagaagtccaggagctagtgtccaccatggccacacggggagcagtgagggcccacagccctcgggggcctgctgtgcatgtggctttttttaacactgtaactagattagactcagtgttttaaccatccctctccaccctctttgctttcctctcctctttcctctcagccatgtcctttctcttttcctctagaggagttgagctgtctaaactccatctgctgcttccctctcccactctttcctgctgtcagatggatttggttgggttctttttttttttttttttttcctttttaaatagtgaacattaggaatgagactggggtgtttttttttttttaattaaaaaatattaattttccttgttgcatttgaagcaccctcatgtctccttcccagtgtctttctctgcctcttgaaagggtgacagacagggtggcgctgttttagcatgctctgtttttggtgcagttacctagcagcaggctttgatgccttgtgggcaggtaagcgcctgcacctttgctgtgcccactgtgctttgtccctgtcccctccctccctccctccctccctccctccctccctccctccctccgcccatctcccgcctccttcctgctggcctctttctcattctttagaacctttctcagattatccttccaggttttggtaataaatttctattttgtaaaaggattttgttgtaccaggttttgcatcttcactgaatctgactggcttttattttccttttcaaaatcaggtttttgttctcaaccctcctctctccccatcatgtccagtccctgttttggttttggcaccatcattatcaaatgtacaaacggttcttgctgaccaacaccaggtatatctgatgttcagatgagttccaataaaataattttttttttcaaaaggtgtcctttcttgagtgctggagggtttccaaacaagttcaggtgctccataaagccttttctggcttggccagagctatcttacctcactgcctactaggagtccttgtagccattctgggtgtccatatttgaaagggaagttgaactgaggagtggcgtcagaaatggagttcagttgtcttttggggcagggtggctgtgaggacttggggaatgggccgtagtcttcaggttgttcctgagggtttgcaggagtgaaggtgcggagtcctggcggccagcatgctgttgtgtgcttgtgtgctcttcaatagcagctcctttcaccgccctcggaacccaagcgtgggcttctgagggacctatctttggctcaggatagca

SEQ ID NO: 20267 - DNA, 1195 bp, Mus musculus
ggccatacttttgaacagttgttttcaagtcattgttttatgtaatttctctccccacaccctgattgatgtatatggttaagtctccattatttgtttcattctgtccccctgtgactcttctctcccctcttactgtacaaatctaatctactgtggatttggcagtcagacaggcacattagaagggagtagagagagagaggagtggtgttctgatgagatagctcttatgtgacagttgtgagatatgagttttaagaagcccgtgtcttgtcttctctgagaaccctttttgattgctttgctaagttagttcaggaggctgagttctaggtaggtgcggtgccacttgaaacttattactgcccttggcatttggattatgtgtgtggctgaacaaaccaaacttaggagtggaattttccatgctatgagcattttgcttgctggctggcttttggcaagcagccgctgtgcttccatttgcatcccctacctcccaggctccggttttatctgaaaccttagatgaacaggaacttctttaacatggtctcagtttgtcctagacaggtgctgctcagagccagggctgtatcagaagtgcctagcttcagagagacgtctgagctccatctcctagagaccagttttcaactctcatggtgcccaggtgattcttgtgtacggtcaggacagcaaccacgatccaagcaagtgtgctggcatcccagggttgtgctttggtgaagcacaatggggcatggctgtcatatgagctgactggaatagtaacaaatgtaacaggcaagtaatcactgtttgccctttccttttactttagttgtttaatagtcatgtgctactcttcatcctcaagttgtgttttctcttctttcatcataagactaggcctctcccaccgcttttgccatgctgtgtgttgttttacgttctgtgtccagcttctcagccctggctgtcctgggactcacagtgtagaccaggatggcctcaaattcctgtctgtccctctggagtactaggattaaaggcatgcaccacacccagtctgtatccaggttcttaattttaaaaattacattttgtgtgtgcatgcacacgcacgcgcgcacacacacacacacactttggcggagggagatgactctgggtaaaatgcctgcctcac

SEQ ID NO: 20268 - DNA, 1184 bp, Mus musculus
aaaaaaaaaaaaaccaacaaaaaccaaagaaacaacaacaaaaccttccttctcaatttgattttcaattacattttctttagcgttgaataagccagccccaggcttattgatttgtgatcaataagggatgctcactgaagagggatatatagcccatctttaagtgggctgcagttagagatctgctcatccaattgaccacatccaaactgtttcataaaacacccttctgggagctgttaatgggtgtgttgcagaaagcctcttctactacccgaaaagctcccgtttccccatggagttatgttaatctcatcaaaggctctgagaccttctgtttaaagccagccatccccctatgtgtggctccattgtgttaagtaactgctcaccttccagggaagggtctccggtttggggaacactaacctagagtgtgtactcatttggacttctgtgcaaagttccccactttctacagagtctgatctcttcctcccccccccccccccaggacaaccgccctgctgctgtccgttagtcacttggtgctagtgaccaggaacgcctgccatctaaccgggggcctggactggattgaccaatcactgtctgccgctgaggagcacctggaagtccttcgagaggcagccctggcttctgagccagataaaagcctccccaaccctgagggcttcctgcaggaacagtcggccatttaatcatctccgaggccccatttccgcccctgggcgagccttctacttcctgtagatttagttgttctctagagctctgtcggccagccctgggtgcagggtaaagccgagagcctcacgctggacaggctctgctgcaatggcaaacagtggctggagagtggcagtgtaatcccacagttaggggagacgctgtgtacctctacagcagagcgcagaaagctgccgggctcgctgctacatttagttcatttaatgtttccaagaaaatcgagttgccctctaagaattgagagacttcatatcaaattagaatttccggcttctgaaaatcaaggcgtggcaacatggacaatcagaactaagtggctaggtcgagatagtctcttcgggtgacccttgtgctccccttgctaatttgtttgtgttcagtgctttggttcctgaagcatcagagctccc

SEQ ID NO: 20269 - DNA, 1214 bp, Mus musculus
tgcacctttaaaataatcagatgtaattctacaattcagttctatctacagacatgttgggtgaattcctttctgtttcctttaggatctgggtttttgttttttttttttttttttttttttttttttgctcttgttacttttggtatccacgttcattctccatggatgattttcagaccgctctccctgctgataaccaagttcatacatattgttcaaggatagcacaatatcccattatgtggacattccactacagcatccccaatgctccacgtggtaggggggggtgcggctccactcctctgccatcactgtctcctgagcagctcttgcccacatgacttcaaggtttcattaggacagattctcagagacagacccttaaagaccaccatctttttttccaatcagcaggttagatgtactctctccagaagcatgtgaggacataccttctctgcatgccatcgttattttaaaatacccatttctattttaactggtgaggaatcacttcatacggctttgtttttaatttttgagtgacgaatgagacggatctttatccatatgttggcttctgtggcgcatttcctcattggtagattggagctgggcttcctcttcatggctataccagctgctcggcagagaaagagcagaagctgctcaggggaacttggtcccccctcaggccacccccccccagctgtttgcctctggggctgtgtttgctgatccctgagctttctgatccctcatctgtgaaatttggttctaatcctaggcccacaggcttgtcctagggattaggtgacaaacatcactcacctaccgcagtcactgacgtgggcagctgcaacagttcagtcaagcctttcccttctagagtccttcagtttctgtctttgtctcagagtgctcccttaagtcctcagggatctgcaacctcgccatcacctgagaagttattagaaattcagtctcgggctctgctgccatttgcctgtaacaaagcaccaacatattccacatacacaatgaaatcagggcatctccagctataagcattgagatttgaaagacatgtatggctgcactgttcatgcacaacagatagcatcagattcaaaaaaggtgggggaaggataagcatttaggagcctgatgcttgggaactctgatgtctactcccttctcatccttga

SEQ ID NO: 20270 - DNA, 1133 bp, Mus musculus
ccaagggaaagaactgtgtgtagtttgctgctgtcttcccagcacagaacctgacacatagtggatgcccaggaaagccttgaaaaatgagtattttcacgaggtatctgcaggatcgtgtcttctggggccttggttgacttcctctagcaaatactgtaaactgcacttccagggggaagctggcggcctgtggcacgagaagcaggctataaattactggacacctgtaattctcacattttaagatggtagagcaacaagtgaagggtggagcgtttatgggggactttcagggaagggagcagctgtctctcgttagtcccatgtctgaaaacaaacaccagtaggagagaaacgtaatgccgagggcagtgtgttgggctaatttgccaggcacactctgggcgtgttcactgatggctctggatttgttgaagccgaggaaggtttcaccattcgacagtcaaatggagcggtgcctgcttcttctgaaagcctgtgttgtttccctggcatcggctgtgaacttcagctctgctctggctcctttgtagctcctggcagtggagagagtagtctgggcatgaggcagagctctgaggcagagctctgagagcccggggtggggtggggggcttaaaagagaaaccaaaaggctggaaataggaacagacaagccattgcatggtaggttctacatcaagaacaaggggtcattgccctctctgggaaacagcatgcttcaggagggcaagtcaaacagacctggtcttgggctttaggtctgttccttcctaccaatattccctgggcagacacttagcttctgagcttccagtaataaggtctctgtcttagaggtaagaagagataacttggatggcagtagatgcttagtattcaggagccattactaaagtattaaaaaaaaataatagctaggcaccatgtgcatggtacatggtggtaagaggttctaagtactatcaccataattaccctgtctttccttggctacttacctgggagagatgggcatgttcgttcttattttagttctcgaatcaaccatgtggactctgtgccgaggtctttattggatgctagaggtataaaataaaataaggctt

SEQ ID NO: 20271 - DNA, 2143 bp, Mus musculus
cttccttggagacagaggctccttgaaggtgaatttgcctcctcaaaatctgactactcttaggagcacaggtccatagctgggaaaatgtacacaccctgcttaccaaggctggctcctgtatcatgtgtggcagatgcacttgaagggtaaagaaggatgattgctgtgtacaagtgcacacaagggtattttgcaacagtggaagtgtcctaaaataggctcatctgattatcaagaccttgaaatgtggctggcatgactggagaaaaccataaacgtttcaagacaacttcaaatggtctcaagttaccagtgacatcacatatcacctgagcatcagttcaagaggagtgggtagagtcactgttgctgaatcactgggcagctgccactaacctcagacaccttgtttaaggtgtgcagcgcacaccctggttcagaggttgtccaggaggaggcctagcttaccaactcatgttaaaagttcgcattcaggtctaagcctggccctcgccaggaactgtgggagactggtttccttgtttatgctgtgccacctcttgagaatcctctctctgttcttaccaactcagcaggcttacatatccacctcctgtgagctaggttactaggatggaacttgtgagcctctaagatacagacccaccaccccatgtaactcctaaagtaagatcccatcaggcggttgcttacttgtctggctctatctttcacctgctctttaagacatggatgtagatgctctgatgagggcagagtaggcaacattcagtctggtaagtaaagcatttaactctagtctcaagcagaagctgctttgcgctttgaacacttggaccaagcagcttggtccagcatcagactattcttcctcatcacacagggccaaaagttcagccctttgtccctttaatgccttactatatatttactccaactcactgtcagatctttgcaaagaggttaaactgtatgaagacctttgtatcttttcccgtctttccacacaaccctaaggaccatcacctgaaacctcccacacggctggaaacgtgccctctgtggcctttgtttacaatagtgccagttgatgacaggcattgttcattgctgggtgctcaataggtccagccatcagcaagagacagggtagaatcctttcatccagttctcccaggggtgatacactcccctcccctcaggcacctcttcaggtaggtgggtacaggccagtgcttactctgtagtctgctctttaggctgggccaacctttgagacacacttgtctgtattcaaaagctacctactgtcagtctttcagggtaacttgttcctttccacttagctcttgaaggcccctctacagtgggaccgtaactaacttcacatggtgcttcccgtctgctcttgagaatcttacacttagctccacttccaactgtcccacagtttctccaatgcattcttgtgatcttgggtgagtcacaccacagagcaagggtaccttgatcaagaccaggtggccaagcacctccagaagcgggatgcagtctctgaagagcaatgttctgcatgtggcctgatgtctgcctgcatttacaagttctctggcattatcccccacacaccagatgggacaggcatctgtatttaaactttattacaaaattataaagcagagctctgtaacaaaaaaatacacatttgggtatgcttttaacacccaggtgagaaaatcttaatgtaagccacttggagctacacatttacatccgagagatctcaacaaatttgtacaacatagactattaattcctttacagcttattagtttagaaccggctatttccaacctatgaaacagcatctttgaaaactaagtctcaactgaaatcttggtgcaatcagcaaaatccacagaataattggaaagattaggtgtttcaacattaagaccaaggatccgtgaagaacaaaaagggggctcaggtatttaaccaaaaaaaaaaaaaaaaaaaattaaggttttctacctgagatgttaactggaatgggttccaactttcatttggtttaacaataaagttgtttgacatgttttggtttttttccccccca

SEQ ID NO: 20272 - DNA, 1169 bp, Mus musculus
taagtcttaagtgatatagaaaaaaattctaggttgagtcacttctgtttagtattggggttggaaagaaccagtctctgacctaactgctgggaagtccttcagagatggtgctgtttctctttgggtttgactttgtatcatccttaactttggattatgaggaaagagaaatcaaggcagcggctttgtctttgtcttctggtcctcattttccagcatgctaaaatactttaaaattttttctcttcctttggtcttaaatttgcttactgaaagcataggaacttcagcaaggagctgttctctagcttggctgtacatggagttcttggaaagcagacacacaggacagtgcatgaggcactggatgtgttagactatgactacggctgctgaaaagtcttaactgcactctgttctcagctgctcgggcaggtcaagacaagcattctttaagtcatgattgcagccctcccaggggctttacaccactgacacagctgagaacagctcaacaaagcacaaaatatactatcagaagagctgtgtgtttctctgtggggtgtacgctcaacttggctaacactacccttcactgtgtagctatgtgagactggaataaccaaccactcactcatgactgacttggaaaagtggagggacgcctcttaggggactattagaaatgcttaggcttctccactgaattccttcagaggatcaagtagttccatgaagctgttgtcagagatgccaggcccacttacctctgcattcgaagtccagatgaccagattttgggtcaaagcttttgtggatgtcagggattcagatccctccacaaagactcccttgccctccctccctgaacagtgaatgctgtcgtttacaatgtttccagattagcatgcccactgattttgctgctcctggactccactgtgaaacaggtctgatcttacagctcagtaagacctaagaataacattaaagccggctggctctccctcataactgctttctcttctgaggccttatctccctacctcctgtacaggaacagaaaatacactgatggctgtggttagcaacccaagtaacaaccagaacccatgccatttaatttggcgatcttacctttaaatctttacccttggtgttctcat

SEQ ID NO: 20273 - DNA, 1235 bp, Mus musculus
attacagcagggtcattggttacatggcttatgtttacatcacataatttcatagtgagtgtaaggcaatagttcacatcataggtggatacggtttaaggagttacagcagaattatttacatgtctttcctttaagcctagtacctgacgaaacatcccttagctattttctagctccgtaagttccttataagtttaaagcttttatggcacaagttagcaaggttttgtcaagagagaaaccatctgccttgtgagttattttgaagtcttgtatagataaactagtcagttatttactttctgtccttatacctaccataagtttctcattcccagtttatgacctttagttactgagattagtagcctcggtcctaacctagaaggaaggttttccttgatcgtaaatttattccaagcctatttgcttttcctggtgcaattagcttgtgacacagaattctatttgcagctttttattctacaggggggaggggggcttaaaattactcaaatcaattcagtagttctataaagtcatcatcataaactatgaaatcatcgattcatctgaacagcattattacatgaaagtacatcttcagattgatctgccggaaatttgccaaagagggtgggctgatattcaggattcagcgggttgtgtgacggtggtaggaaaggcatatcaacatcgagaagccatcctgggatgaagcctctgggatccatgtctctcagctctcacccactgcagccatacaaaacagtggaccatctccagaaaaactcccttgctcgccatagcctttcctgcatagctcttgtcaaattaaaatgctgtccaaatggaatgttagtcaaaggctaggaagggattcagtcaaggggcattcgtgcaatagggcatttatgagaagcagctggtttgctgacccagatgaagagactgggagcaaacatattgactgtcacatcagcttcagcaaatccagggcttgcagctatttggaatagtatatgcagctgattcctggatggcgtctgttagccaattcaaactgctgggacagatataactagggacagaagttaaagcttaggaatttaaaggaagtattacatttggaactctgaggcccatggtactggtagttgggagaagggaagagttccaaaaccaggagagagagaaagatcctaccctccggaggcatggctcccaccctt

SEQ ID NO: 20274 - DNA, 1235 bp, Mus musculus
tgtaggaaaaaattaccaatgtgtatatcgtaactaactgaggctgaaaacaaagctggagagaagactggcaaggcaatgtacacatgacataggctatgggaacgttgagaccataaggactgaaaccagagatgaagacaactcaatacagtaagtcatatccaattcttaaaacagacttccattttaaattggttaatacatttatgaaaatattgtataaggataaagataaagactaaaaacataatattaagtagcactggggtctgcgcctggagctgattttgtgccacagcgctccaatccctaaataccactgggaaagaactggcctcccacaagtgtggacaagcctgtgagcgcaggtaagtccaccacttctgctcagaggtacacacctggaactctcagaacacaggaaccaaatcacatgaggcaacagcaagaacacaagcaacagataccaaggccacttggcatcatcagaacccagttctccctccacagcgagctatcatgggtaccccacacaccagaaaagcaagactctgatttaaaatcagatttcatgatgatgatagactttaagaaggacataagtaactcccttaaagaaatacaggagaacacaggtatacaggtagaagcccttaaagaggaaacataaaattcccttaaagaattgcaggaaaacacaaccaaacaggtgaaggaattgaacaaaaccatccagaatctaaaaatggaaatagaaacaataaagaaatcacaaagggagacaactctggagataaaaaacctaggaaagagatcaggagtcatagatgcaagcatcaccaacagaatactagagagagaagagaatctcaggtaccgaagataacatagaaaacatccagtggaaaaaagacagaatttccaacaaacagtactggtcaactggcagtgaacatgtagaagaatgcaaattgatccattcttatctccctgtacaaatctcaagtccaagtggatcaaggacttccacatcaaaccagacacactgaaactaatagaagagaaggtgggggaaaatctcgaacacatgggcacagggaaaaagttcctgaacaaaataccaatggcttatgctctaaagtcaagaatcaacaaatgggacctcataaaattacaaagcttctgtaaggcagaggacactgtcaaaaggacaaaacgacaatcaacagatt

SEQ ID NO: 20275 - DNA, 1326 bp, Mus musculus
cagaaaaggagcttaaattcagagagtccatctcccaagactctgtccaccccttgagcagatcggaatttgccttcccaggagtcacactcaggaagggcaccggctccctcccctctctcatgaatctcatttcaaggcgtgactcgatgcaggatgaactagatagcagcaggagtcgggagtgaagaacctcttgtggtggatgttgtcaactctaggtctgaaaaattgcgaagaagaacctggacgcactgaggtcctcagtcttgtctagcagcaccgtgaggatattccgcagcacaaacagaaagaggacggcgtgctgggcggggcatgcaaatgaacatggccctgtctcccggaattctgggaaagaaaagagcaactaaaacttctcttcctattcttaatttcacggagttttcatggcgtaaaagatgtgggcttgatagaaactgagagttggtgtctagtgcatgtttataggctcccgagggtttgtgaccataaagtaaaagtgtgtgtgtgagttagtggtgtgagcgtagtggtggtaagagctatcgcttctcggccttttggctaagatcaagtgtagtatctgttcttatcagtttaatatctgatacgtcctctatccgaggacaatatattaaatggatttttggaactaggagttggaataggagcttgctccgtccactccacgcatcgacctggtattgcagtacctccaggaacggtgcaccccctcgggggtttctattactggttaaaaaataaggtgtaactttatggctttttcgtagtctatgttatcttttagttggtctttctcaatggatttttttcttttgtcatagtatgccttataagggtctacgactgcgaaatattaattgggttttcgtcttgatttttctagcaactccccaagacttcataggtcaaatgggatcatcataaattcaaagccagccagcctagggctacggggtgatcataaattcaaagccagccagcctagggctacatataaatggtggagtcctatgacatacaagaggctggaattaaaggtatataccaccatgattggctaaaatattactttttttcccctattttttatttttaaggtcctattcatgaacagtgtcatcttttctctgaaactacttatgcagcatcaagattaaatgattcatgtttctacccacaaatgtccaaatcacttctttgagactcctcttctttgagactctggattacagcgattagtcatacctctacccaacatgctccagagtcaactgtttttga

SEQ ID NO: 20276 - DNA, 1265 bp, Mus musculus
ttaaaagatttttttctctggggctgcagagatagctcagtggttcaaagcacttgctgcttttgcagaagaccaagttctattcccaggttgagcccggggtaattcataaccccttaactccagcttcagggcctctgacacccttttctggcctccgtgggcatgggtacacaaataagcacatagtactgcatacacttataaatctcttacttaatgtatgtgtgttgtttgcatctgtgtcatttggtgcccatggagatcagaagaggacatcagatcccctggaaccagagttatgggtggttgtgagctgccatgtggatgcttggaatcaaacctgagtcctctctagccacctccctagtcctgataagtttctttaaagaaaaaaaaatttccttccaggctctcgagtagacaactaaaacctttaggaaaggaaagaatgccatgagagattggattctcatgtagaatatactagaagcttatggtttatgtcagctggaatgttggcttgtaatcaccttgtattcatatggttggttattttgttgtttttggttttggtaggattgtgaagatcccaatcctttgattcgagccttggcagttagaaccatgggatgcatccgggtggacaagattacagagtatctctgtgaacccctccgcaagtgcttgaaggatgaagacccctatgttcggaaaacggcagcagtatgcgtggcaaaactccatgatatcaatgcccagatggtggaagatcagggatttctggattctctgcgggatctcatagcagattcaaacccaatggtaatactttgtgcttttacaaagagagaagcattgaaagtgagcccgttccaaggcatgcttggcacaagcattgtcttggagacacgactacagggtagttgtaggcaatagttttgtgtaatgtataggttgtatacttcatatccctaggtaattttattttgtttttaggattagttttttcaggtagttgtttgtggtcatttcttctatgaaaaaaactggatcaaagtaatgtttattgaccaactattgtaatgaactctcaaagaactctagggtagaaaatgattctgttctgtgtacttagcagccagagcataacacttacaagttttagttttgcattcctttgtttatgtcggtctgaggattaaacccagagccttgtgtaagtgtgctgctgttcctgagctactttcctgctccctgtgaat

SEQ ID NO: 20277 - DNA, 1098 bp, Mus musculus
ggccaaggaggacatgccagtaaatgcattccgtcaccttcctttcttgtgtttttgtatcacaggcctgaaatcttgaagcaggaaatcaaggtcttctttgtgaagtacaatgatcctatctatgttaaactagagaagttagacatcatgattcgtcttgcatcccaagccaacattgctcaggtcagaccttaagctatcctaagtttgtgccggctgagagcttaagatctggcattcagaaggtcatggaattgctgttgaaactctttaaagggggctgatgagatggctcagttctcttccaaaggtacagagttcaaatcccagcaaccacatggtggctcacaaccacccataatgagatcttgcgccctcctctgacacatctgaagacagctacagtgtacttatgtataataataaataaatcttcttttttttttttaatctttaaaggttatttacttcttggatatttgacaggttctggcggagctgaaggaatatgccactgaagttgatgtggactttgttcgcaaagctgtgagggccattggacggtgtgccatcaaagtggaggtaaggccccccaggagatgagatcgcacatatgggattgtgagtgttcattattttacagtgtgtatacattgaggtttgtcaacatacttaatgagtaaaataatttttaaaaatgtatttaatgtatatgggtgttttgtctgcattatgtctgtatcttgtatgtgtcaactacctgtgtaggccagaaggggttttcgtaccccctggaactagaattcagatggtagattatggaccaccatgtgggtgctgggactctaatccatgtcctctggaagagcagccatcgctcttaatccctaagccttctcaggctcagattaaagaatttttaacaaaacatcactgcccctgcttccttcccttctttacctagatccacttgccaaaaggatggcttttaactcttttgtattagattattttgatacttccatatccataaataattttgttattatttattgatttcttagttatagatttttatcttttcagcataccccc

SEQ ID NO: 20278 - DNA, 1259 bp, Mus musculus
gtgaacatgtctgtctcatgagctcttgtacaagtttaaagcttagttactaaaacataattgaactggctttggtggcacacacctttagtcccatcactcaggaggcagaggcagatgatctctgtgagttcaaggccagcctggtctacagagtgaatcataggacagcaaggtctacatagagagtccctgtctcaacacaacaaaccataattgaagaacagtggttcacagtcatctgtaactccactcccaggggatccaacactgccttctgacctctgcaagtaccaggccttcatgtgatacacacacgtacatgcaagctaaacactcatatatgcaaatttataaaattgtacataaaaaatattttaaagcatatttgaagaaaaatttaagccatgcaattttgacttactacattctgttgactaaaaacctttgcagcttggaatcccttgtgtatggtttttttactttagcttctactgttaaatacagttcttagttttggccttagtaactagtccatttgttacaacaggtatgaaagtattattgccaccctctgtgaaaacttggactccctggatgaacccgatgcccgagcagctatgatttggattgtaggagaatatgctgaaagaatcgataacgcagatgaattactagagagtttcctggaaggttttcatgacgaaagcacccaggtaagtctcttccatcccgtgctctagatctcttcagaacaagagctgagaaggtgaaatgttagctagttttttgtgtatgtttgtttgtcatggtttcttcgtctcaaaagggatgatcgttttggtcagcactgttttctagataacaaagctgcagcgcttagagcagtggtcatagactatgatgggcattggaacatttgggggctgaggagacacagagcgagaagcacctgcacagtcagttcccacctgctgcggtgctgctccagaagagagcgaacttccctgcagtgatgttgagcagtaatcagggtcttattttctgtcacttaaggatgattacaaattgtccttggtatttgctgttgctcattatagtgcagcatagcgaggtttgagaagattctacatagatgattagatttcttcccatctgtccctctctccaactaaaattagagtcagaggctcagagaggcagtcagattattaagccctttctccctggcatttgtgctcatagcaaatagaactttg

SEQ ID NO: 20279 - DNA, 1163 bp, Mus musculus
agacacttttctcatagatgagtttctacgaagtgtgaatatcagttccctcattagaacttcctactagatactaatgcccaaatgagaagtaagacttggccaaacccaagtggaagtggaactatttaagttggatgcttctcccttgttctatagacacaagctcctcttttgttagggtacctgtaggccttttgcacagaatcatggaagctaaaattggaaacaaaccagacaaaatcctggatcactgtgttcttgcatcctacctgtgccttgacaaagcctctaaagcacgtgtacgtttatcagtggtggaagaaagccaccgagacattatgctgatttgtctctcgcaaatcctgtaactgcagtgttttctaactggtttaccaatgctgttaaaacaaagtaacattttaaggacaactaatgtattctttctcatctctgtctgttttttccccaaaggtaggacagtccttcatcccgtcatcagtgcctgcgaccttcgctccttcacctactcctgctgtggtcagcagtggtctgaatgacctgtttgagctttccactgggataggcatggcacctggcggatatgtggctcctaaggcggtaagtaggtagctgagcaacaccttttcagtggacaaaccctagataacttataataagagttacttccactaacacagagggcccatgaggaagataaagggtagcatagaacttagccataggaaacaccattaacatcccccttaaacgtttaggcttaaaattggaaacattaactatttgagtttgggcctcgtgtttagagacatccaatttgtcagcattaaaatacagctagtaaaaaccatcagaaaggacatgtacagtagagaaagtagcagggtttttttgttgttgttgttttttgttttgtttttgttttaacatctgttcattccccctcctcattggtactagataaggattctagagtatagtctctcaaatttgactttcataggttttagtacacctcgtttcttttgtagcccaagctccaactcaaggtcctttgcatcaatttactaggtgctagcattatagtggtgtgccactgttctatacagagaatgacctgtgacagccacctatgacctgtg

SEQ ID NO: 20280 - DNA, 1240 bp, Mus musculus
gtgtgtgtgtgtgtgtgtgtgtgtgtgtattaatgagagagaaagatactcattgaatctgtccctccagcagtataatacacagaagaatctctcaaaatcctagcatcagcaatagttgctgcctataaacaacttctcccttttctaatccatgtaatggaagcggttagaagttctggcataggggctgtgagatggctcagcaggtaagagcactgactgctcttccagaggtcctgaattcaaatcccagaaaccacatggtggcttacaaccactcataatgagatctgaagacagctacagtgtacttacatataataaaataaataaaatctttaaaaaaaaaaaaaagaagttctggcatagattgtgttggagcaggtcaatactgcttcctgctgttccttccatttagttgtctaagttacttcactgtggtagaagctgtacaaactcacaagtgtgtgactcctgcctcttgacgagtgtctgggtgttcctcctctctctctagcttcggtgtcatcccaagcactcccttggccatacatactccactgatgccaaaccagagcattgacgtctctctgccgctcaacaccttgggcccagtcatgaagatggagcccctgaataacctgcaggtcagtttcccttctcttggggagtgtttgtaatgtattgctgacttctccttaggtgtaaagtgatccctctgcagtagctccttttccattgctaacacaatgcccacgtaagaggcttatttagcttacagtttgggatgtgtgcgtgcttggtatcaacattgcatcactctgatgagggtgctttggcttccctgtatcatgcggagaattgtggtagatgatctgtgacagggaaaatcataatggcaacactgggaaaaaggggaggcagaaacagtgattctttaaataaaagcttctaagacaggctctcacaagaactactgtgtgtctacaaaaggccagcattcccactgaccttcccacttcccaccaggccactcccccttctcaacttcagcacgctaaggacacccctctccaccccacacaaacatagttaatacatgaaacctctatggaaaaacctcttttcttgtgataaagttggtaacaaaatagttggaaataactgtgatgaagagtttttatttggttttaattaaaaacaacaacaacaacaaagctgtgcagttacttagagg

SEQ ID NO: 20281 - DNA, 3386 bp, Mus musculus
aatgacagccatacacatatataattttctatgtataagatacattttgcatgctttactgttattactagtaatattttgtttaaccttaatatagttaaaatttgggctttttttttgtcctttcccttgagaatcttttatgttgatgtttagtgtaagcactggttcccttagggtcaaaggctttgtttttagcatgggtcattctcatacttcgttcggaaagccacacaagctgtaggtagacatacagcacaacttgggaccaaccaagctggagttctgaaatccatggtttgtattaatgtgagctctctctttggctgctccagtcatagagtgtcagaatgtcagaaactgtctggatgtgaatgcatagatgcctttggagccaatgctgtctccatgctaatttcttgtctcctcctcttcacagctgtcgctgaagtgtagagcccctgaagtctctcagtacatctatcaggtctacgacagcattttgaaaaactaataaatgggtccagtcagcctgtaatcggtgcaagccaagaactcttaactggaagacgttgtactgttgtgtagagcctgaacccaaaccctgcggtacccaccccggtagtggccagtcatcttgtgctgacattagcattcaccctgttggataggttagcttcccgagacatctccttccaccattccccacttctgccacctgctgctcttctctgtccttagttgtgagcttctccatgctgtgccaatggctagccttttctacaccctcttttgagtgtagtttgatattttgtaatcaaaagctcatttcacaagcagaaaaaggcgacaagttaattaaagcaaggaaaagtgtcactgaaacataaactgcaccttattgttttatatttttgtacagatgagaagttgaggtagaacactgagtagaaagggcgactgaccctcatcaaacacagtcttagcggagatccactgatggccctggcccctgctggggcggggcaggaggcagccctgctccttgccttttgcattgtcattcctcccctctgtccaggtcattccttggctaagccttcgagctcccttatacccatgctatctggtttgacaattccatatatggcagtggtggtcttcactgatggttgcgagtgcagggacactggacatatgggctcagtgctgagaggtggcagagctgcgctcctgcccacagtgctagcccaggaatcctggggaggctgagtagacatgagtaagaacagggcgccgccccgccccttcctcccccaccccccttccctgtgtttttcagggctcattcaaagttaaaatcagagtctcagagttaaaacagacattaatgacttatccaaccctgtttttctaaaaagaaaggtaacaggcaaaaagtgtgttgccgaggcctcttggctcttgagtagcagagctgagactggttccctgatgctccgtcagcttccctatgtggctggctcattattttcctcaaagccttctgtctttcctgtgcctgcctgtgactctttgcacactctgtactgagtttggtgctccacccattcactggggtcaggtggcagttgacatcttggttataagtatgcatgcaggtaacaagagtgaaagcagagctgacatttgccaggctttcctggagcaggccagtgagtgtagacgtgtgtaaagatgtcgccagttctcactgtctgtcagctcactgagctgcccttcatccatggtccttgagctccagagcggagggagattctctcagcaggcccatctcacaaagactggggatgtgaacacattggtgtgagtcatcagaaaccccgtactcatggccctgctcagggctgctgttgactctgcttgagaggtggcacttgtcgaacagcctggcacctggtatccaggctccaacgacctcatgcaggactcagacctgacccactgaatcccgaggagaggctgaaaaaatcagagtagaaaccagcaacatttacaagtgtgtctggagtaatcctgtttcctcccagctgcaaagcttctctcaagttccttaatccttgagaatcttaagaggcttgctggctggtgaaaaagaaatacatccctccctccatcaccatgtggggatgcaggaaatcctgcaggggttgtgtgggaggcagatagatggtggtatgttgggtggaaagacaagttgaccaagttcccttgtcgatgctgattcctggagtcagttggttatgagtagtataagggattcccactacaaatgcagtgttcccatctcaaagcaaaactgtagttcccaaaagaagatgtgtcagggcaagcagaaagggaagtttaggccagaatgtggccatcccagaaactgaggcctctctcagcctcaccagtgacagagaacagctgtggttctctgctggcctcagctgatccatgctgtctgactcccggggagagttaggaagatgcaaggacctctcctcaagagactgttgcctgcctgaagcttctgttcaggctcatgccaagcttgaccggattgggagaactggactcagtttaacctgtatccactctccttagccaaagtgtgcgtctgtcgaaagctgaagtgcagagggcagggaagcaaacacaccagagctctttctggtcagattccccaggtgtttgtccccagccaagcctggtccgtattgtgaagcttgggatgctggagccaatgctgtcccaagaaggcttactttgctgttcttgttgggatctgttgttggggagggtggggtttggggagcctttaccttgtgtactcatcaataaactcatttacacaaaataaagtttgtggtatggactttgttcccaggacaatacatagctggctagagaaaggaccttagtaaccattcttattcttattctttttttttttttttttttttttttgtaaatggccctagccctcccaaggggttcagccagttgaaattagaattcagaaaaaaagtatttatatcaggaagccacctgttgttcaggtctcaagtcccataacttcaggaaggtgtgcatggggagagtcactctgggcagttcccaggacactaggtagaatggcagtgcccttcaggtcccccggggttgtcagtatctgccagcacaaccaaggacagaagcatagctaagctgctactcggtacctgtgcactctagtccaaaagccctttgaacccagggcctgcgtgttcccaagcaaacaggatagccactgccttaaagaaagcatcccaaggagtctataactacttgtattgttt

SEQ ID NO: 20282 - DNA, 1160 bp, Mus musculus
aagtttttaccttttctgttctgctatcaaagtctaactttactttttattcctctagtcttttagttttttctttcttatatttaaaaatagtcctaatactctaatttcatatttttcatgctgtgcctgcagctttaagttatggtttgagtagtaatcttttggcttggggttgggaagatgaattttttttaacataaaaagtaatattagatgtgttataaatgtgagaagacagcttgtggaaataaatccttgggaaagcacttagattgaatcattgaactctgaaatggatttactggaaagttggtgctactatttttctaggcactctacttgtgacagttaagtgtagattgagcccagggctcagcacattagagacttacttaaggaagaaatcatttcttcaatttttcctctgcagtggtggtgaccgcggtggcttcaaaaattttggtggtaagtgctgagtatcccaaaatgtttcagtggaaatgctatataaatctaaaagccaccaatatcccgcagatgcagtctaagcccttcttactctgttgaggctcgtgtgttgtgtgcattacaaagtactctctgtatacactcttatatccaagtacatattaaaagccaaatctgatctcaagtagtccaatgcgttctctacacagtgtattgcatgaaagagtctgtgaccgatgaatgaggaattcactgggttttgacaatagggttttttttccttttataaaggtagctgacgtggtgttttaaattattaggggtttccaatcagccttacaacagtgcttgacagaagtgatactagaataataacaaaagtgggtgctgtcttggacaaggctaaagaaatgttggcattcgtcttgatttcctaaactttaaataataaacatttatgtagttatttttaaacctgtgatggttgactttcaaggatattaagttctgactttacatgctttggttattaccgtttcctttttaatttcaaataagttgtcttagacagcctttccttttcttctcccataggtcacagggattatggacccagaccagatgctggtaagattcttgatagtttggtttcctacctctggaagaggaattaatgtgtttggagggag

SEQ ID NO: 20283 - DNA, 1214 bp, Mus musculus
attcctgtttgtctgtatatatgtggtgcctcgtacctgtggagacctgaagagaagaaggcattagattctaccaaaacaggagtcagagatggccttggactgccatgtgatttcaggaaatcaaatccagctcctctgcaagggcagcaagctgtcttcactgcagaaccatctccccaacccttgacccatgggctcccttgccatcctcagtggcagcaggacgccatttccttcagttgttgcatcgatgcattctttcctgtcattccaatatctttctgccccaccccccttaccaggatgcatggctacattcagggcctgagtagtcaaggtaaactctttatcctaggagccttaatttaatcctatctgcaaagtcccgttttccatgtctggtggtttcaatatgcttggtttagggaatggcactattaggtggtgtggccttgatagagtaggtgtagctttgttggaggaagtgtgtcattgttgggatgagctttgaaaccctccttctagccacatgaaagccaatcttctcctgtttgcctttggaataagatgtagaactcttgagttcctccagtgccatgcctgcctagatgctgccgttctcccaccttgatattaatggactgaacctctgaacctgtaagccagccccacttaaatgttgtccctttcaaaagttgccttagtcatgatgtctcttcacagcaatgaaaccctaactaagacaccatgtgtggtgacaatgactggttctggagattagagtgtggtcacatcaggaagccactgttcaatactctgtaccttgtctcaattccaaggaccatccatttttctccagtaccatccactcagaatggagttgcacatctctgaatctgtactataaccttctccactacccttgtttctctgatcgctactttcaaaaaggtgccatgcaatggaactttctatgacgagaggtaggtgctgcacaggttctgcatagtactttctaacacagtagccatcagcacatgtgaatgatgtgatgaagaagctgaatttaatttttttctgttgcattttattgaaatttaagaagacagctgatcagtggctaatgtatcggacatctcaaatacagacagaagaaaccagaaactaaaagttgtttgttgctagcctgtcagacctgctttagatctgtt

SEQ ID NO: 20284 - DNA, 1177 bp, Mus musculus
acattttttttaaggacaaaagagtaaatggaagaggaaattaaaacacaattaaaatggaagaaacagctgggcagtggtggcgtatacctttaatcccagcacttggagggcagaggcaggcggatttctgagttcgaggctagcttggtctagagaatgagttccaggatagccagggctacacagagaaaccttgtctcaaaaaaaaaaaaatggaagaaacattactgacaggtctgagcagtttcatgtcaagaggcaccagacaagggttggaggagtgtgtgggatgtcgcaggctgctttctgcacctgagatctcattctgtgctgaaattgtgtgtgtgtgtgtgtgtgtgtgtgtgtgtgtgtgtgtgtgtgtatgtgtgtgtgtatgtgtggtgtgtgtgtgtgcgggtgtggtgtggtgtggggctgtgtgggagtgtaggtgtgtgggctgtgtgtgtttcattctctagtcttgctgtccaagtgtatcatctgctccagggctctttaggagcaagcactttcattaacataagctgactattcctgaagtgaggtttataagtgatggcacacagcccacaccatcttattgcttggtaaggaaggcttgctgcccctgtagatgtataaatgagatgcctatgtttatacttagcaaattagaagccagtttgtggtccactgggttgacttttgaggtaaggaaaagaatctgctagtggggcattcactgtggcaacatgagtaatctaaacatgcttaaaaaaaaaaaaaagaaagaaaccaaggtaaaaacctaagaagggttaaagctggacatgtcagcccaatgcctgtgggtgcagacagtgtcctgttgcagtctggcttctggggtctcgtcttttctaagagcttgcctttgcaggcaggggtaatgtggctgcaacaaaggcgcttaggctttgctgacaaggagaatggtgacatccctagcggcctgggcaatgtgaggaaggctataaagccatcagaagactgagccgctgggtgtccacacaaagttaggacctataaacagacatctgtattgtgactgaagggctaataaagttgccttagaaaagagagggtcttccactgtgatctattctaagccattcccccactgagaggggat

SEQ ID NO: 20285 - DNA, 1225 bp, Mus musculus
ggtacagatgacaagggcagggcaaccagggcccagggaagtaaatttcgctgatttagtttttatgtttctgtgggagggcttgtcgttgttgttgttgttgttgttgttgttgttgttgttattgctgctgctgttgttgttgttactgttgctgttgttgttgctgctgttgctgttgctgctgctgctgctgttgttgttactgctgttgctgttgctgttactgttgctgctgctgctgttgctgttactgttgctgctgctgctgttgctgttgctgttggagatagagtctcactatacaggcctggatgacctggaactcactctgttgatcaggttgttacttattttggttcctggatagaaagactagataatttcttcccaagtagagacattagaaattaatctgggtgtgtgtgtgtgtgtgtgtgtgtgtgtgtgtgtgtgtctttttgtgtgtatatctgtgtctgtctatctgtatgtgagtgaatgtctgtgtgtgtctgtctgtctgtgtctctctgtgtgtctatgtgtatgtctgtgtgtctgtttctctctctgtctctgtctctctctctgtctatctctgtctgtctctgtctctctctgtgtgtatgtctgtacctatgtctgtgctatgtgtgtctgtgtgtaagagtatctgtgcgtgtgtgtctgtgtgtctgtgtgtctgtgtgtatgggtgtatatctgtgtgtctgcctgtctgtctgtacctctgtgtatctctcagtgtgtgtgtgtgtgtgtgtgtgtgtgtgtgtgtgtgcaattggatgtcagagggtgatgttgagtctcttcctctgtctctatcttattcccctgaaacatcatccttcactaaacctgagttgcttcacctaggctggctagcccaggagcccccaggatctgtgtgtctctcctccacagtgctgaggacacaggcacacagagtcatgccccagtctttatgtgagtgctagggactcaaactcgggtcctcatgctttcggagaaagctgttttaccactgagccatttccctaactccagaaatgacttttatctatatttttgagaggatgtcattgaaatcagctccactctggactgttctgaggttgagaataagtagatatgtctccagctcaggggtatcttgtctaagttcactctgaaacaaatatgcccaggctcctgacca

SEQ ID NO: 20286 - DNA, 2004 bp, Mus musculus
accacagaaccactgggtcaagaccaaactctctcctttgtgctatgtagtagtgtagttggttataacgtttttcatatggacagtgattttaatgctagaccaagacgtaggaaacatctttgttcccagctcctcggatgctttgctgtatggtaacttttagcacatgtttatttagcctcggttaggttatagaagtaaattcatatggaatttctaattcagtatgtcttccttttcataggaaaaaggttgctggccaaaacagcaagaagaaagaaactctcaaagagaaaagttaaaaaataaataccttagaaggcaatccctgcagtgtaacttatgagcctggcatggattctcatggagtacttacaaccatctttaccaaacatttgaaatccacaaggatatgagaggacagaatggttctgatgtagtgatgcatcaagcttcactttgtaggtgggatttatacaatgaaaataacaggcattggcatttctgcctgaatccagagagatacttcttatagaagaacaagagccgatgctaaaataacacccaagtgtggtgaactcttaaggattttgcccttcaagtgtgaaggaaagtgtgatgcatgctgtggagaggcgtctggaacagaattttaaaataaaaccttgagtttgagtgcaccatccacacttgtgtgtatggagagccagcgctgtgtgggatgcaaacaagagcagcagcacaggccagacacaggaaggagcctagcactccctttagtgtttctttgtggtaggagccacagtaaggaggtcccccatctgtggttatccaaattccagaggattggaaacttgagcctgttgaaattgacctgtactgcactggggaggaagcttatgcttagctgtcataatgttgcaactgtaaggttatgatcagcctttccctgtctgacttcattctccatcatttaaccatgttctttcctgtctctttccaccaagatgactgcctgaaagcagatagcactctatcctatcctgatgaggaagaacattcccgttacacgatacacctcgtttcattgtctcagatgcttatctttgctgagacttgatgggcttcagccaccctccacagagaactgtgatcatttggaccaaggcagtgcacagtatgcaggttttccttaattacctgctttgtacagtggaataaaaaaggcttggtacaagttgaagcacttaagactggagcctagaatttctcagggcctgtgctgccacaggactacaacataagtgactgccagcaactgaattaagcctgtttcctttactctaggcagttgatactttagtctaaaatcagcacagtagacctccttttaaatgtgtatttgttttgaaaagggatctctgtatcccagactggcctggaactcacagcaatcctcctgtttcagcccctttactgctgagaatacagacatgagactgatattgaatagatgggataaagatttaaaaaaaaaatcaggcttcatttaaataaactgctctagagaataaaaactaaaagtttgtaattgttttgttcttgcagagagttgagtcagtgtatatcctgaagtgggtatacacttgaaaccattgcggctgcattttcattttagaccttcagcttttcctgtgttttaagagtaaaagtgcctatctctgtgtctgaagctttgtatgctaacagcaccactctttagcaactaacggcagtgatgaagtatagaaacgattatgtggtatggggctgtgatctcaaagcatcctaacaagactcttaacacaggtggggagtgtccttggacggatgcagatagagatggtaacagatcgtgttgataatccccattcagttattttctctttattttttctgagcaaccacccagtccatgaagtagctacaaaacttgtatcagctttttttttaaaaaaaggg

SEQ ID NO: 20287 - DNA, 1178 bp, Mus musculus
gttgggttttgtctatctcactcctgcttttacgtaattcatcatcttccccgaggggacaaaacctgaggggtctctgtgctcttccttcttgtaccttgtgtattatccccaagctagggatcattttcagctggtgatgcagctctccttggccttgctgtggcccagaaggcagggcgaaaagctggcgagtccagttactcatctgttccaggtgacgtcatctccagctcctgacagtcagaaagctgtctgcattgtgaccacatggcctccccttccccagggctggtggagtgtggagggaggctccacactcagaggtaggctgcttttcagtgcactcttgtaatggcccccagtgtctctccatgccccagagtaacaagtgagccctccagtctatactctagatattagtaacaggattgaccttagcattaggaatggtcccagtttagccacatttataccactgaagcgtttctggaaatgctgtgtgaagtgttttctgcccagtggcctgtatccatgacatctgttaaagtacctgtgagctagatcttctccactcctagttagtcactccttgggaggtgccagaggaaaactcagtaggcgtaggcaaaaagcctttaccatgaaaattattgactgtttaatgcttcaaaggcttagttagaatcctccagcaggggttagggggagtgcgcaacattagccggctgattttctttgcatgcatgtattgaaatgactcatgttgcattcagctttacctcagctcttgttagccaagagcctggtccgtgtccttggaaacagtaaccaaggttaccgttctcaatgctgtacattgtgtcgggcagcttcacccacagattgaatggcgactaatgagcacttgggtttgggtgccgtgccttgccttctgtcctgtggttggtgtgtgacctgtgtggccatgcttgagacagaagggtctcgaggtgcccatggataccatctgagcttccctgtctcagtctgctagttagcataccatctgggaaacacattttaaattggtattttgtgttgctatatgtattttaggtgtttaggtgttttgcttgtttttatttttggtcctatttcctgttttcctatttatgtgtcatcaaaaagatttctca

SEQ ID NO: 20288 - DNA, 1626 bp, Mus musculus
agcctgcctttttcttcctgagcgtctgtctccagagacaggaggaagtggaatgtggtccagccactcaacagctcccataaatagttggaggttgatgtcatatttttttcaaatgcattttgagtgagtggggggaagggagggcatgtgtgtgccatggatgctgtggcggtcagaagacaatgtgaagaagttggtggttttctcttcaccatgtgggtcccagcaatcaagcatgggtcgttagtcatggtggcaaatgcctttacctgctgaacccctccactatcccccttttttactttggggttgctagacctgctggatgaatttgtgagaatgacagtgctaattacgtttgtactgtcttacagctctgtcaggtggtgaggttggtacctggagcctacttggaatataagtctgctctattgaacgagtgtcacaagcaaggaggcttgagactggcacaagcaagggcactcatcaagatagacgtgaacaaaacccggaaaatctatgacttcctcatccgagaagggtacatcacgaaagcctgagactctgctccatagtgcaggccagcgtgaaggaatgtgaacagtcagagggcaatgtacacattccggagacttgtgttggattcttgctgtgagaagaaggagagacactgggagtctaaggatgatgaccgctttcttctctgccctctgtaaagcgctgcttgctgttgtcaggatagtgcgtcagagtgtgtgttcgccaagttattattaaacaccagtgggcatttgttcctagcagctcttgtaagtcaaacaagaaccacgggccctcgcatcatggctttggtggaaggagaagggacccaggccacagcatttcaccccaagaggccagctcagatccatgcactagagagtaaagttcccacactcactctgccttcccctcttgcaggcagattttaaatgaaagtttttagagcacaggaaagccttttcttccaaggagtttttctttttttatgctgacatcttagtttatgagatgaagaggtggagctctcccccatgatggtctgtctgaaacttcattttaactgtaatgtctagctttgtactttgcagtctggctgtctgatgtgcagtcgactcttgaggaggtggcaccggatataaaatgtctctgttatttttagaattaatggattaaaatgttttgctatttaatttgtgggtgtgtcagatattctggtaacttaagcacaacttgggttgttggatgtctgcctcaacacgctgcactgtctctgcttacatgtgtgtcccgtgtcctggtctcacctctttacccgggtttcccaggataccaggcccatgaggatggagatgatgcaactaatcagctctgtttctattcaacctgaagcctaacttctcagtggtgaaaggctagcctgcaataaaagctgctttcaaacacaagtaaagccgctttctgtgagactcagcggctgtggggtgagtcggtctgccacatctgaaacgcggcacagtcatggttatctcactgtaagcagagctgcaggtgggtacagctcagaccgcacagcttaccccc

SEQ ID NO: 20289 - DNA, 1220 bp, Mus musculus
ggcccttttgatgtccttgagaatcaggttttccagaacaaattaagcagttccttctgccccgttccagtgccagccctcataaaacttacctcattgcatccatccccatctgagcattcatcctaagactaaattcagaataaaaccaggcacaggtgatggctccaaggaaaagatgcttggatgcgagactagcaagccactaaagctagaagtggggattaacaccacacagttgtcctctgacctcacatctgtgccttgcaccatacacactttatgcccatcacaatacagtttaaaaaaacaaaacaaaacaaaaccacacattagtctggcctggctgcctcctgcttaggtttctttctcagacatgaagttggtcactgctttactatatagtaactatagcatttggcttgttccagtgtggatcttttgagttaaacatcacccacttcttttcaaagaaaaataaatgaacaagcaagacctttggtggtgactctgcctttgatctgaaggtatatagtacttggttaattaccacgtgtgacttgtcctgctaaagactagtgacaagagagaatatctcctgagggattcctgtctccgtttgtcagctgtcaagacagattagaacatactctttctgttcaggatggacatctggttccagaatttagaggaacctgtttgagagaaacagataactaatgactccactatgccgatcattcattgagacgaaggtgtgcatgatcgtatctgtactttgatagggcagagagcttatagattgttatttttatttcaaatgaatgttagagtgactgtgttggtgactttttctactgctatgataagacaccttgaccaaggcaacttataaatgaaagggtttatttgggctatggttgcaaagaattagactccacgatccagggcaaaggtatggcagcagaaagagccaagggctgtcatcttgacctgcagttaggaagcagagcacacactgggaataactagaggcttttgaaacctcaaagcccaccacctccccccagtgacatatttctattaaggccacacctcctaatctttcccaaacagttccaccaattggggactagacatttaaatatcagcctgttggggctgttctcattcaaaccactttattgactgaggagctagctaaaccagcctacaggagt

SEQ ID NO: 20290 - DNA, 1200 bp, Mus musculus
agagagggagagagagagagagagagagagagagagagagagagagagagagagacaccagcagagaaattggattttgctggccaacacctagctccaggcttactgagagactgtttcaaagaaataaggtggaaaacgatgttacaagaacccatgatgtcgtcctctggcctctctgcatgtgtgcatcacacagacacgcatacacccacatctaacctacatcaaagacaaaaaactttagtaacttacaagttagtagagagttttggtttttatgggggggggttgatttgtttcttttttcgtgtcttttatttttgtctttgttttaaaacaggattttgctgtgtatgtagcctaaaaccttctgagtagtccaagcttaggtctgacttagaatcctcctgccttcaccttcctagaacggcattacaggtgtgtgccgccatgtggagcagttttaacttcttataggacgtgtcaggtatctggagaagcagaggaacatggtgaacgtgtatctgtgtggccatcctcagcggttttcagcacagtggctatccagtgacatctgactgtccgtgccctttcctcttgaccatgagctgcttattctgaagccaattccaaatactgtatttgttttgcctataaatattttagtattaaaactagtttaagtcatgggaagagggttgttgacttgtggaaatggtacttccatcttcctctggcctttctatgatgttcctgagagcattcatctcagctataattggatcgtctattatttaaaaaaaaaaaaaaattgaagcccttaagcagaaaggccaaagactttgaggccgcctgcactgggggcttatttctatataacactcatgagaggtgtatattcatttgtcttcttgccaaggaccagcctcaccatggagaagggttctgagaaatgaggtttctgggagcagtgaaaacaaatgactccaagtcaaatcgtggatcccgactgatgacctgtgttctgcttgatccagcttttctcgtctgctgctctctatgttctgccttctctgtggcgatctctctatattctgcttgcttgctattccaagagatctctctgtccatgtccggcttctttgtgtgggtgtgtctgctgtgtctctgtctctgtttctgtcagttctccaagca

SEQ ID NO: 20291 - DNA, 1320 bp, Mus musculus
gcactctttacccacgctgctacagatgagtcacagtctcacaacagctttgcttacaggaaagtgttcccattggtatagttattccttcagtctcactgaaattgtgaagagattggtaatgcgcatactgtgagaactacttctaaaacttttaatttataagcatagttaccacaacctctcttttcctcccttggaggaaacaaacatactggaatagaatagccatggaagccaggctttaatctcagcacttgggaggcaaaggtaagtggatctctgtgagttcaaggccaggctgatctgtagagtaagttcctggacagccaaggctaaacagacaaaccctgttttaaaaaaaccaaaaaaacccaaaaagagtagccaagcaagccagttcttagactcagacttatttccaagccacttgtggtttatgctttactttcttgtgtgttctcatctataggttattgcttataacctacttttctcttaatttttcccatagctctgagagcttattttgaaagaataatggatgaaccatctccgttggccaaaactctggagctaaaccagcactcccgattcataattgggtctgtgtctgaagacaactcagaagatgagatcagtaacctggtgaagctggacctagaagagaaggagggctccctgtcaccagcctccgtcagctcagatacactttctgatttggggatctctggcttacaggatggtttggcctttcacatgaggtgagaagaattgcttcatggttaatgtgtttaatctgtcttgttattttcactgcttatgttctgaaaggaataagaatatattaatttcacctccattccctggcccatcttctatgactaggaaatgatgcacttttcaggcttggggagtatcttttcctacgtgttctcctcagtttttccatcctttatacatactaggcccttcagtatgacccagtgaaggagagtttggttgaagaatttcagcttctgtagtactttgattaataatgttgcaactctcattgagtgataggaatttggcagacatggccaaatttgtagtctttcctcctctcccgtatcagtgctagcaactgaaaccagagccttatacatgctaggtgaatgaaccgctgatcttcatccttagcccgtggcattttgttttttgtgttttgagtcagggttctgttacccaggttggactggaacttcctatatagaacaggctgacctggagcttgctgagaccttcctgcttttgctacctgagtgctgagactgtaca

SEQ ID NO: 20292 - DNA, 1135 bp, Mus musculus
gactgttctgcatagaatgtgtataagatcttagttctcttgtacttagaaacggctggcccatgtttctgttgtcaacatcatggcggctctggaatgcagtttcctctcaccagtgtgctgctccattttaactcttgcatgtatccagcaacgcaaacactggctttcatgtcagaaacttaaaaaatgggagagatttagtattgttcctctccctccaaaaaataattaaatgcatatggcatcttctttgatttacatgaaaggctatgctcttgtagctatgactctgttcctttgtctccatatctgactaatacatgaaggaggaatggaactggctcccacaagctgggctgagcggcctctaacgctggtgggagtttgcaaagtggcacgttttcatgttgatttcaagttctccactcctagttcttcctggctaagcttgtgtttggagttggggaacagtaggactgttcttagaggccctcctccacgatcccgtgaggctgctgcttgcttgggactgaagtacggctactctctgagctcccttccccagccctttggagaggtcattcttgatactcttacgtccatcatttcttcatggagggaaaaccccatataaatcttgcctaccatttttatataatcccccaaagtgaaaggagatggtcttccttacgtctccggttgatagcagtacaactcattcagccctctgcctcctggttggctctattggatataacgttttataggtagccactctaagaaacgtgtcattataggaagagttcattacctttgctaccctggaatggctgcctggtgaggaaaccaggtctttgagaggggtggaaatattggcacaaaggactattttaacttccccatgagacagctttctgcaaaagagttgtataatctagagctacttgctgtttattttccctcagaaatcctactttctttttcaaattttaatgcaaggattgttaattctcacttggaggaagtcaagactttctggcagaaaggggtaatgattagaggtagaaggatctgccagtatgaaccaaaatggggctggaatttgcctttatagggagctaattatggcaaa

SEQ ID NO: 20293 - DNA, 1257 bp, Mus musculus
caaacacactcaaccacctcagtggcgtctcagtatccctggggagacggtcaccctgccaccaccttatcactatgtaatcacatagtgactatacctaggagctaaaggcctgtgcataagggccctagcctctgcgggtggatggagacaggcaggcagtgcaggagcctgaggtggctaagaggaggctcttttctgttggtgataggggaagagtacttcaaaacaggagaagtctcttctggggacaggttgtcactatggggccatgcctattcctggcagaaggtatggcgggtcacccacctgatgacacctgtgctttcagcaccagaaactggccttcttgatgttaggaggcttccagggaacaagaattcacctgcccttaagataccttacagttcagtctcggtgctggtgtttccagacttctgggccctatgtggccagcaacacggcttcctcaggggtggcctgaaaagtttaactacccatttgtccaagaaagcagctgatggttcagcatttgtgttcataaagcaagaatgaagatgatcataactcgtataacatccagtttcaactttatgactaatacatctgtcgctgaagatcgagaaggaaaaagatacctgccacagaaaccattcaagtgagtacttcagtctgagccttaacctggattccacgaaaagagctgacctccccttcaggagcacctcaagcagatattccagaggaccttctcaatggtgccacattgcaagtggacatccaagggactatagatgcaagttgccccacccccacaagccctggtggaaggaacaggagggccagagctggatcaggtggggagcatccttagtccagaaggaagctccctggcccctggttccctgcttacctggtaggtaaggatgggatttatctctggcctccacttttgctacagcacgtccaatcccacacccccggtggtatgaaagctgctttcctggagaggtggagtgggctgggcttgtataagtcccttttccctgctgccccatccccgggaccgggccgtctcaatacggagaagtcagagccacggcacatgggcagtgtgatggtaccacagcccattacacatgcagggttactgaggaggagggtgaatgatgtattgacccagactggcttgaactgagattgccatattatctgtccacttgttcacaaagcagccttcacacgtgtcagtgagag

SEQ ID NO: 20294 - DNA, 1124 bp, Mus musculus
ttgtcagcagaaataccgtaggctcgttggggctttcgggagatgggaaatattctaggggttctgctggctggtgctgagggtctgacaggatatgcttctgggagaaagtcccaactatgacattgtgccaggatgtaggatggctccaagactgaggattgaacagatggccaaaccactgacatgcggtggtctttgaggacgagcaggtgaacgccttctaacttcttccttcacccgggagcagtccaaggttagctcagcaccagcacagcctctaggctcgcctgcgtcagcggaggcagtgcgactcactcctgtagggggtgcagtggagacgtggttgccgccaagcgcacatgtgcgtcatcggacagggggctgggcctccagaacccggaagctggggacccacgtgggaggctgggaggtgactgtcttggctcgagggtcaggttgtgggcagtccttgtgaggggacgaagtgtgggaggtcaacgggtcctccccagctgtctgtcagtggagtctcgggcgctgctggagcaatgcggcgactctggacggtcgggtgcttcagtcgcctgattgcccgccatttctcctcggtggctcggcgcggggaacggcctggcggggaggagctgagtcgcttgcttctggatgacctggcgccggcccagcggctggaacgtctatttggcttgtccccatgcctcctggccttgcgggctgcccgtcggcgcgtggcccggctcctgctccaggccggtaaggctgggctgcagggggagcgagccgagctgctccgggtggccgaggctcggggcatccctgtcttgaggcccaggcgtcagaaactggatgccttgtgcggctaccaagtgcaccagggcgtgtgcatggaggtgagcccgctgcgaccccggccttgcgatgaggcggcagacacgagctcaggcgacgaccctcagcagctgtggctcgtccttgaggggctccaggatccccgcaatcttggggctgtgatgcgctccgctcacttcctcggcgtagacagagtcatcaccagccagagaaacaggcacggacgtcccttaattcagtttacgcccaatctg

SEQ ID NO: 20295 - DNA, 1436 bp, Mus musculus
taaaggcagagaagtgtggtaaaaggtaggctcataggtatataggaggtaattatagactgaagtgtttgaaaccaagctgagttaggttttattttccggttgcatggtgcttattctgtaagcattccagttagagattgtgtgactgggtaaaaacttaaaaagctaggctgctttaatttttagttgccccaccaagcatagtgttttgcattttttgtcatggtcttaactactgctttaatttgcaggatgagtctgaatgtacttcagatgaggaaatctttatctcacaagatgaaatacagtcatttatggctaataaccagtctttctacagcaatagagaacaataccgacagcatctgaaggagaaatttaataaatactgccgcttaaatgatcacaagaggcccgtttgtagtggctggctgacaacggctggagcaaattaaataaataaaatagctctgtctttcaatgaaacactcaagatgactactgcgccttctcttttaaaaactcctaatttagtgacttctggcaaaattttaccttaaatcttaaatcaatgtgattccttgttttgggagacggtggaggtaacctcattcgtttgttctttcttcaggcttgtgtctttagtttcgtggctgcgcaggcctgcctatgatttaagccatctcttcattaaacgtttctcttcctgtgagacttactaaagcaacttagtggcaaaagtaatgttgtacttacacctctgtacagaaatgacagtgagctggatatatggtttacagtagacatccacttgcaaagcatctggacagaatgttaaaggcaatgtgcaaaatttaaaataaagagtatttattaatacgcatagtagaatgtggtgtacatgtttctactcaccgtggtggtactttagtatttgccactcgtgaactttgtatctaaccattgttgatggagagagcatgaagagcaaatgagggtagagattcagactgcccaagactgaattcttcctttgatgagacttgataactgagaaaagcagttctagtcttgttcttaaagaataaatgcatttaaacactggctagcctcttccttcctcatgagacttgaagttcccaaggaggcaacggaaacaccttaacttaaaagaggttcatattgacataaaagaatgaagacagagtgttggtaatcagcctttaaggctgggaggggaggattcctgagagctgactacattgtactttgttttccaacatgaactcagtatggctttacaatcaccacttgtcacaagctgtcttgagtactgaaggggcgagattcccaggagtagtattttgttgccatttgataggtcaggtcagtgatggagagatgacagatgcttgtaagaacccgagttgcat

SEQ ID NO: 20296 - DNA, 1213 bp, Mus musculus
cagagaatggtgggaggtttcagttaatgaagagtatggatagctgggtaggagatgagaaatggtgtttgctgtttgagactggtctggcccgagtactcagtgttcctcagtcactgaggacactgatcagacactggttttaacagcagtattgatgatgagagctggctgttgagtggatagaaaatgaatacaaggttatagtgtgttgagccttaagtggaaagtataagagtagaaggaggagccggtgtggtggcgcacgcctttaatcccagcacttgggaggcaaaggcaggcggatttctgagttcgagccagcctggtctacagagtgagttccaggacaaccaaggctactcagagaaaccctgtctcttaaaaaaaaaaaaaaaagtagaaggaggaagtgactttgaaattcttcagaaaacatgtcttaaaggagtcatccaagtcataaggcctagattctgatttgagtgctaggttatttaacctaactatcaaaagaggaatatgagacgagacagaggatttaacatgtaagatagagcagcagttgacatttcattgtcagtaggtagaactcaacctcattttgaccttttccccttagtgggattaaagtgctgaattgtgtaatgacatgttaaggtgagatttgaggaatacttagctatgaaaagacttgggttttactaccttaagcaggcatgacatggagtttctaggattgtaattcgacctgcagatgatcgggtaggagccagttcagaattagtgaaaagtctagaagcctatccttgaatgggatatagacagacagacatttctgtaggaaagcacatctgccacacagcaaaatgcaggaccaatgtcacactggaactcgtctgggaggagggtctgggaagttctcagttagtttaaagaaatgatgtgtgtagtgcttgctacttacttagactacttagagtatgcatcttagtgtgctattttattatgtataaacttatgtactttattatattaatatgtgactttcatggctacttggaaattaaaactagataagtttgttgcgagagctagctgtaaataagagtgacttaatcatgatcacattaaataaagaattttcaattggttaaagattgatccctgtttaataggtgaaaatactaactttttaaatgccttttggctt

SEQ ID NO: 20297 - DNA, 1188 bp, Mus musculus
tacatataactgtctctgcctcccaagcgctgcgattagaggtgtgcattaggttttgatgtatagttggtgtacagtctttttttttgttttttgtttttgttttgttttgagacagggtttctctgtgtagccctggctgtcctggaactcactttgtagaccaggctggcctcaaactcagaaatccgcctgcctctgtcccccaagtgctgggattaaagacgtgcgccaccacggccggctggttgtacagtcttcgcatatgggagtgacagcataagggtggagatacaagtccttcctagctttcagctactgccacaggtcccccttgaacttaaagctggtattgatctttaaggtgaatcggaaactttaagaagcttgctgctgaacccacacctgaggcagttgatgattagcctcgatcagggtgacaacaaagcaaagctgatgcgagcctgtatgcaggagccccttttcgtggagtttgcagactgctgtttaggaatcgtggaaccatcccagaagagggattcctaagactggatgtgttctctgctcaagttacctgctgctgctccaagaggtggctgttttcaaggccaccatacgcagcatgcacacgtgggtcttcctctaccacatggctcgctgcagcaacttcatgaagaggaaacttgtagccctggagtgatggctcagcagttaggagcattgactgcttttccagaggaccccagttttcagcacctatttgactacttacaactgtaattggttgcagaggatctgacagtctttactgtatgcatgtgcatagccatatgtacagggaaaactcctacatacataaaatacttaaaacaaaaacaaaaggttggctatttatatttagatggttctaaattttatttcttgtacagttcagagttgcatcataaataccaagtatatccatttgaattaaaaacatagtgtaacaatttaaggtgtggttctcttgatgctgcattgttcattgttcttggtaacattaaataaatcagtttattaaatattattgttcccttagtaaactatatgcaagttctcccccagccaaaattctagaggcaattttagggtgacttggcccttttaaagtgcttgtggatggcccagtatccatcttgctgtagtgac

SEQ ID NO: 20298 - DNA, 1561 bp, Mus musculus
agcagcatggacgaagactttgagtctgactacaagaagtactgtgtgctacagtaaagctacacttgggctgctactgggctgctgggaagggaagtgactccttgtagctggcatttggcagaaccatccctgaaaagcaagctacatgtagttattttatcctgtgacctgaagcacaaaataaagtcctaattaaaatagcagtcaactttaagaatagtaataattttgttttgaagtctcttacaagctgtctggtagagaactttcaggcagatcccaccattagcctgtaaacaagagggtttggcaccaatcacctgggaccaattaagaatttaattgtgctttccaaataatgaacaaacttgtagtgagtatagagtttaccaataatcataataggatactaaggatttccttggaatcaaagttaaaaacaacaacaaaaaccgtaataccataatgttgtctggggacaacatgatatgctacctcctttttcctgaagtttcattccgttgtgttacaaatggagaaagcaaaaccatgcaggaatgcagatagttcttatggaatggacacaaagagttttcagttttttgaatcatttcccctatctctctgtgtctttcttgctttttgttcttgttggttttgtgtttgaaacagtgattggtggcagaggcatatgacggtcagtctgaaccgaagagtctctgaagactatgtgccttctacccacactcagttctgagaaccaggagaaaggaaaggcagccatggtgtccagctcagatggccctcctgtagaggcgcactgctgggtgtggcagctgccacagggtttgcaccataggtcccaagctgatgttgcacacagcttctaggaaggtaggcggctgcgaagccagactgtttcctgttagtggtgggattgttttcccctttgtttctcgttttgcactttaaaagagagaacacatgcaaacaactgtgcttgtactttaatggctctaagggctataaattaactccattagcgtgtaaaatttaaaaacaaaaatacatccaacattaatagtttctaagaattgtttaagaaactctgggtttagcaaactctagttgtttgcctgtctgttccttaccaacttttttttttgcactggtcatcagaagtttctttgctcacttttttttttctaactattcaaaactggaacaaaagtataaatgttatttatttctggcagcatttttccctgtgttgtgttttagtatatagttaaaagaaattttcacctatttttggtccattaaaaatattcatcaagaccctgggaattgattctggtttgttgtcagatcctcttaccccctcgtcatgggtagtaaataccaatgtagtcagtgttcgtgttgtgatagctgagatcagtaaccgcctagttctcggcacagttggagcagttgtcttaaacaactgcctaggttgacccccttcccagaagagtgagtatacttgcaaggaaggagtggcctaaaggagtgatgc

SEQ ID NO: 20299 - DNA, 1166 bp, Mus musculus
cctagcttgtgtctcactgtgtagaccagcctggccttgaactcaaagagattccccttctctgctggaattaaaggtgtgtgccatcacacccaggctgagttgactttaaaaaaaaaaaaaaaaaaaaaaaagtaaagagatctgccaggggccagggtttccagtttagatagttgagacaaaaggcaaaacttccaggcacccacagcatactgtggacagcgacaagtgttttctttgtaagttattgtatccaccattcaccttcagttagccaaagaagattgtttttactaacgtggagatttatacctttaatcccagcagaagtagaggtaggcagatctctgtgagctggagatgatcttgatctacaaagtgagttccagaactatataatgagaacttgtctttaaaaaaaatgctgtacatcacagagataatttttctatcttatctaaaaccttttctttcttatttgcttatttttgtttttttggttttgtttgtttgtttgtttgtttgtttttctttctttctttctgtagaacttccctcaggacaaccaaaaagttcgactctcagtgagtggatttttgtgtgcatttgaaattcctattcctgcatctccagtttcagcttgcagtccaattcaaacaggtaagatagaacttgagttccttcttatgagtgcagtgttgaacattgatctagggccagcaaaacggttcagctgataaagaaagaggtttgcagccaagtctaatgacctgagttcagcctcagcactcctaaaggagaaaactgagtcctgcaaattgttctctgacttccacatgcatactgtggtatgtgcttatattcacatatgtgcatatatacataaatatagtcaacattggtctaagagttaaaatcttttttatatatgttatgctcaaaagaatttttgagcccagaagaaacctttgactggagaattttctaagaactcttaataaccatttgactcatatctttcttttgattaatagaaaatctaaaattcagaaacagtaaacaaaccaagtaggtagctcttagctcatatatacaccattaacattcacatctaatagtaaaatggcacagatggtctgaaaggaacctactaccagaaaata

SEQ ID NO: 20300 - DNA, 1141 bp, Mus musculus
taacgcaggaggattccagcattaccctttgagggccagcttctgttattcagtaagtctgtcaaaaaaagaaaggaaaaccagaataactaaattaaatacaaataacgattccacagcatattactattgctagtcttttgtgttatttgttgcagttcccacagaaaagggcgccacaggtctgagtaacctgggaaacacatgcttcatgaactcaagcatccagtgtgtcagcaatacacaaccactgacacagtactttatctcagggaggcatctttatgaactcaacaggtaatctttggacccaccagcagttttccttctgtagctttgatctgaaatctagtactgcttaaatctccttttcctttaactttaaagacgaaacgttatgccattgccttgtcaaatatggaataagggcctatctcttgataggtagttttgtgcccacatgagtgtgaattatggagaaatctttggcgacaaatttttctctcaaacttctaggacaaatcccattggtatgaaaggccatatggctaaatgttatggcgatttggtgcaagaactttggagtggaactcagaagaatgttgcccccttaaagctccgggtaagcagactaaaatactacgaaatgtgtaattccttaatatttcttttactacttttattacattttctctatttaactttttcaataatttttttaaatctttcactaagtgtagcctaaatacccaatgtttgtatgtgttcaagtaaatgaaaaatactgttgtatatgtagataacaggaagaaaagactaaagaaatagtccttctttgagatattgttcattttacaaacttaacaactgcttttcttgtaagaagagtaaacccttttgatactctttgactactagcattgctaagttatttgtaaatcttgaacgttaaaaaatatgctcttaggcctctaacagtaaaaactaagataaaacaagacaagagtaggtaaatagaagaaaacatttatatagactaagacatctttccatgtgaggaattgccattttactatttatataaatacaaatttataaatataaattaaatatctgtgtgaatgaatagataatttgcttc

SEQ ID NO: 20301 - DNA, 1184 bp, Mus musculus
acagttttttcgggtccgggtctttttttttttttttccccagttttttcgagacagggtttctctgtatagccctggctgtcctggaactcactctgtagaccaggctgttctcgaactcagaaatctgcctgcctctgcctctcaagcgctgggattaaaggcgtgcgccacctcacccggcccaggctggtcttgaactcaagagatctaccactccctgccttcctgaatcctgtgattaaaggtgtacaaatctaggtttctttttttattcattattccaaactggttaaatatctgtatttatttgtttgctttgttgaaatggggtcttaactatgtagctcagagtaaccttgaactcataaaaatccacctgcttcccaagtactgggattaaaggcatatatcaacacacccagcaaaattcttttcattgaaatttaatgtctgtaaggaaattaaaacctcttttgttcacttgatgttaattattgcctttcaaaatttaaagctttgggtcaatgaagtgactcattgggtaagagagcttgccaccaagtcagacaacttgcattggatcagagggaacccccacattgtagagagagaggattgactcacacaggtgtcctcagactttcgtgtacactcaaatatacacactaagtaaatacatgtaattgaaaatagttttttaattttaaatcatctttggtgttttgtttttgctggtcaacaagaaattaataaaccagagtgatttatttagagttagttaattatatagtaattgtctctttccatataaagtttgtccataaactttactaaggaattgagattacacttgataaaaataatattatatgtaaattatattctttagacagataaaatagaagttgggagtcttattctcaatgcagatggaattttaagcataggagaaaaaagtcttcagtgatgagtcttgagtgagaaactaacttaaggggatacagctgactaagtgcaaagactaacttaagggagggcatgtagctgagagcaaaaaaaggcatgtgcatagcatgtccaaggcttaggtttaattcagcagcaccagggagaagagagaaattcaaagatgtgttttgcctcttgaaaatctgtaaggtaacgtttcttatagaatgact

SEQ ID NO: 20302 - DNA, 1155 bp, Mus musculus
ttggttcaaccagccggcgcgcaagatccacaggcgcaaggcccggtgcgcaagatccacaggcgcaaggcccggcagaggcgaaagcgcgtcgcatcgcccctcggcccgcgtccggtcccatcaggccgatcgtgaggtgccctacagtgagataccacaccaaggtccgggctggcaggggcttcagcctggaggagctcagggtggctggcatccacaagaaaatggctcgcactatcggcatctctgtggaccccaggaggcgaaacaagtccacggagtcactgcaggccaacgtgcagcgctgttgaggagtaccgctccaagctcatccggttccccaggaagccttctgctccgaagaagggagacagttctgctgaagaaattaagctggccacccagctgataggacccgtaatgcccatccggaatgtgtacaaaaaggaaaaggccagagttatcacagaagaagagaagaactttaaggcttttgccagtctcctaatggcccgttccaatgcccgactctttggcatccgagcaaaaagggcgaaggaagctgcagagcaagatgttgaaaagaaaaaataattccgtgttggagagttgcaataaattttccataaaacaaaaaaaaattattctagaaaaagaatgaaagcagtgtaatgagtgtaaaactgtctcctttttcatttattcttctttcatatttacatcccaaccagtttgccctccttcctctctcttccctgtcccttcccactaaaatttttcgataattctagaatctactgaaaactaaatcttattctaatgttctattaaaatgtttgatgtccatagataaacaaaatattccctaatggaaaagttgacattttgaaaaagaaagcctacagaggtaagcaatccactgcttcccattcttttcattttctgctaacagaagaaagaaaatttaatggggttcctgctcgagaacatgtttcaccaaaagaaaacaggatggaagaaatcaaggttaagaaatttaacgaagttttaaaagataaacaatgcacaaaagatatgaaggaagctggggtaagacaccagcaaacccagcactctggaagctaatgcaaagggttctgtgctataaagacc

SEQ ID NO: 20303 - DNA, 1205 bp, Mus musculus
gattcctgcaagccattctctgcattccacatgtacacgtggcacatacacaaataaaatgtgattttaaaattaaagggaatagcccaacaaacatgaaaaatacagtcaagaaagccaagactcttagtatacagccagagggacttagtgaaaggtaatcttgatgtaagtgaggtctgtggttagaagaaaaggaaggtgggaaagagtatgaaggtgacaagaggtagcaatgctgggacaaacaacattaaaggaactgtcaaaagtatttttgcaacactgaaattgaaaatgaaaccaccttagattgaaactagagagatggctcagagattaaaagtaccagttgctataccagaggacctggcttgattcctaacacccacaaccatctataactgcagttctatgatgtctgacaccctcttctgtcctccttaggcacacatgtgggtcacacacatgcaagtaaagcttccatacacataaaataaaaacaagtattaatcttttttttttttttgagacagggtttttctgtgtagccccagctatcttgcaactcactctgtagaccaggctggcctcgaactcagaaatccacctgcctctcccaagtgctgggattaaaggcatgagccaccaccgcccggcttataagtattaatcttaaaggctaatataaatatagaaaggtacatgaacacaaatgacactcaatatgtattatattattttagatttcaaaacaaacacaagccaggtatggtagcttacagtctcagtactggggaagactgatagagtattattctgtgctccaggccagcctggaaaatacagtcagttccaggaatgcctgggttacacaatgagaccttatcttaaaaaaaaaaaaaattaatttccctatacatttgtaacatttctaaccacttttaatgctttcaaaaataagacaacagtaacttttcccattaattataactctgaatagccttacactgtaaggttctttatacagtcccacactactatgcaaatcaattaacttcctacatataacataaattattttaatgattacattttatttgtttgtgtacatgtgtgccacagcacatgtgtggaaatcagaggacaatttcagagtcggttctctccttcctctgtgtgagtcccagagaacaaactcagga

SEQ ID NO: 20304 - DNA, 2358 bp, Mus musculus
tcagctggagccccacaagcctatatagttaatccctccaaagacagtttcaggagaggctttttgtatacttttattggatatttagcgtcctgtggtatgtttgtggtataggaatgtcatggtaaattgtttttcaataaatgttttaaaacttaagttttcacatggattatttgtatttaatcttcatttttggtggtgtgcacatacagtgttttgtatagtcagataacttccgggctcatcttccttagctcagttcaactgaactcgcactcagtgataaaggaacatggtcttagaagccttgactacagggtgataatgtcagttggcaaccagcccccaccgccagcagcagctctatcagctgctccatctgaccattccttaatattgttctctgtaagttactaaaggctactctaatgcctacactctagcactccatcttcttagtgatatgactttatatgttctgattctagtgaaaagaatgccctgatcgtttcaagggtgggattcatccctcagcaagggtgatgtagtgagaggaacgccaccgtaattttattttaaatattattaaagcagggtgtggcacatatctataatgtcagtattcaggagactgagtgaggtaagagactgagttccaggcagcctgggctacaaagggagattgtctccaaactctaaaaggaaaaactgaataaaatttacctcagaataatcagtggcttgcatgtaattttaaataagggcctctgctctcaccctcccctggattctcgtgttcctaaagtctggtgctattccatttgggggcatgaggagcctgtgcatgcatgtgacccagggagtcacttgttcggtgtaatagcgccaactgagtaaaagctcagtgcacaacatttatggtcctcaaactaggctttgccctgaggatttaaaccctttctttctccatccatgtacattcatttttataaacatctcaccagcaccctgcccgggtattgctgcctgtgagaatcaatgatttgaatggagccctttgtcctagaccatgggaatgtcttgtgagcattcagtacagggaactgcacgtgctggcacaagttcaatcccaactccatgggaggctgaaacaggagaatcacttgggatgccccaggatggcctagtgataagaccctgtctcaagaaatgcagtagtgcaccagctgccagcctggaagtctgagcagccattgaacttgattgtctttataggcaaaacgcgatgcaagcttttggccaaaattttgcaaattcaaagaatgttttgctaagttacagatgttgttaactgccatcttttttcttttttatatatatgttttcccctagggtgtttagccttgctgcttccaatcttctttttctggatggcaaagttactactggaaagaaattatttataattactgaattttaagagttttattttgttttaaaaattaacacttttcacctcttggctttagaggacttcagattagctggaattaaaaaaaaaaagatttaagtagaacatttggattagtgtacagatcttaacactagtatttcttttgtcccaaatctcaggaatgttttaggcagaaaactggcttttcccctgatggtgattgaaggagggtgctttaggattgattaaatagcactgttttaattgcagttctaggtatctatagcatgagtggccttaatgagtttgttgaagtgcacatgtttttcagaagtaaaatttaagattaaatatatatgctatatatagatatctagaaaacttggttgtggtgcacaaagtgttgaatcactgaatcgcaggtaccatttgtataacatcacttgtttctgtatattccttttatgggaaaatatgttgccatggtgactaaaaacttttcaatttagttttacttttatgtgaatgctacattttattaaatattaccaggtcagtactatttttataccttattaagtaacgggttttagtttaataggctcaaaataaaaagaaaaacccttaatggaataattacaaatgaatcactaacattctttacaggaaaatccccactactagtgccacagtaatttctatagtaatatctctggtcattaataaattctgaagacagctcattgagtcagaacggcctttcatatcattctcacttgtagtgcccaccgttatttgtaattattaaaccacactaagtatgtttgtaaccagcattgtgatatattctgtacttgtattgctaaatgaattattgacctaataaatagtgttcctgcatt

SEQ ID NO: 20305 - DNA, 1870 bp, Mus musculus
cgggtagtcctgtattgcagttcctgtagaataagcatatattgagttatatcagcatgtgccgcgtgtataagtagtcccacattctcaccccagtagaacaacaggaaaccgttttttttttctttttaaaaaataattcgtttttcagaaagtctgaaagaaaaaaaaaaaaagaacccctaaataaaactatttaagagtttaaaagagttgcattcttattatgtaaggatgatttcaaaaactttttaacatatagttaattcttccatgtggaggtattcaatactgtattgtaaggaaatcttatggaaaactctttatatgcagtatagaaaagtaacatagatactagtaagaggggaggggcaccctgacctagatttggccgtcttttccaaatcagggcattcagccattccagaactgtctcagtgacggactgtcaggttcgtctgactggaccaacgttgatctgtcggtccgtctcagaaccccacgtagaccagcagttgtaactctgtatttggtaccacggtgagatgctctaaagtgattgctgacaggaccagaaggactaaaaggaccaggcagccgtggacggtgtgacttggaccagcggctttcagttgtggctttagtgactgcagttgccttgccagtagaatgcagagtactaatgcaagagcttcatttacatcagagataccaaactgtgggatgtgggcaacgccagtggcaaatatttagtcctggtacatggatggcaatatcataagcacaccaatgtctaaccatctctgcagccactccctttaatctttgccctgaatctccatgtagttaaaaaacatactggctaagagtcatgaaatcagtcatgttcagatgagaattttaggtttactgtatggtgtgtggggattaaaaagatgaatgcacacaaaaagaaatcttagaaaatttgttattgttgaaaataattgtacaactaagtcattttaacggaaatctcggactccttcagttgcaatgtttcactgattggggctttgatttttctaagtttttcaagctagccagattactcaatgtggggctaatgctcagttcctaagttgtgacatgtaacaaaagaaaaagaccttctgttgttacctcaattcttagcacagtggcccctctggtctggcacctctgtggttaagaatctgggtttctcccctattttcaggggctctgacttggctgttagctacactgctcccggcagtgcttggaggtgtgagtgaatgggtatgtgtcagattctgttttgttagcatgtttgtatgtcggtgaggggaaaacaaagctatcatggagaatacagaaacattatttaagatttgcctgaactttttgttttaacttacccttttttgtgtttttttttgtttttttcgagacagggtttctctgtagccctggctgtcctggaactcactctgtagaccaggctggcctcgaactcagaaatccgcctgcctctgcctcccgcgtgctgggattaaaggcgtgcgccaccacgcccgactaacttcccaatgtttagcttggtttgaaactgctctttgtggacttagtggtaagccagtgtggtatggcctttagaagggactttcgtggagatgcaccccgcagatgaggcaggctctctgtcatcctgacacaaccactcaaacttattcctccaactgaatttcctttaaaattcttcaaagaactcaatttggcacacttgcagtttatgcagctggctctccccttcccccttaattactgttttgtgagagtcacctttatttccacatagtctgtgtgacca

SEQ ID NO: 20306 - DNA, 1160 bp, Mus musculus
gtaaggaaagaagctggggttggttggtttgtttgtttgtttgtttgtttgtttttggttatgtttggttagagattttgttttataaagactggttgcagaattgtaagaattactgaaagcactccttggcagttggatagctttaactttcatgtctcctatcattttactctttgtttcttgtttatgtatttggttggtttggttttttgagacaaggtctcatatagtctaggctgctcttgaatttgtcttgcatccaaggcttctagtcctgttgccttggcctcccagttgcttacataggcattcaccgccattcccaggtgaccattctcttttaaaagctaatttccatctataaaaggtagcaggttaatacagtagaggctgattctgcaagataatttaaggtacaccattttccccttaatttaaatgaatattttctatgaatagaacaactttcccaaaagtgtactgttgaagaagtcttggggtggaccacaactgcacacacatggaatcctagcactagttgaagcaggaggattgccatgaattcaaagccagcctgggctacaaatcaagagcccagttcaaaaacaaagaaaacaaaccctacaaatgtggaaagctttgaccttggccagttcttaactacagtcagttatgtcttcggtactcagtaaatactacattccttaattttcagttaagtgttgggccctgggacgtgggtttttggtctgttgatgtgtcactcgcctgctctctttgtgcagcacttattctagaggagattgcgattgactgtcacaacaaggagacggagcagcggctgcttcaggaggcacacgacttgcacttgtcttcgctgcagctggctaagaaagcatttggggaatttaatgtacagactgcaaagcactatgggaacctcggaaggctctatcagtcaatgagaaaatttaaggtaaaaaaggttttatattctacacttgatcttagccaaaaggctgagaagcgataaggttttatattctttgtctctgaataattagtaaatttaatgtgataaattttcagtaatcttaaataataccccaaaggagctgagagaaaactgagctagtgtaaaaaccctgtagtgaaat

SEQ ID NO: 20307 - DNA, 1187 bp, Mus musculus
tgtggtactcctggggtggttgaggaggtcctgtcttcctcccacatgatacccaagtgtccctgcagtgttcatgctgtcctcagtagctgactgaagtgtgtgttgcttccgcatttccgaccacatgtgctgtgtcatcctttaagcacttgttctcatgctgtgttctcttgtggtttttaattactatttaccggatgactgaagaaaacttgaatgcctttgcgtgctttttgtctgagttttctctttggttcaaggcctatttaggcctttcttttttccttcaggtggcctgtctgactgatttcagttgtggggacattttgtagactttgtatacgtcagtgaagtagtctgattctgctcctggtaacttactaagtaaacttgtgggtacacaaggaggccagaaggtgttgggttccttagggctggagttagaggtgtgggtgctgctgtgacctcatgattgagcagcaggggcttgtcactactgagcctcagtttaccacccattgcctaattaaggagaaccaatttattccctcttactagcttttcttgcttatcatttgactgccctctgcagttatcctagtataactgtttgctcaaacttacaggactccctcattttgctgtgacctttactgtgctatggggtgacttttatattttgtcctttcagtagagttccagtgggcagagtatgtaagtaagtgattcaatctgctatcatgaatttacagttggagtttagtattacagagttgttgtaatactaaattgttgttgtcactgaatttaactagacagtatatggtttggaattgatttgagagttctgttatttaatttttaagttatcttaagcaagcttcttaaccatgcaaagtatttatttcttcatttgtaagatgaaaataggaataatttgtttttctttttgtttttcaagacagggtttctctatatagttttggctgtctggaacttaactttgtagaccaggctggcctcaaactcagacatctacctgcctctgccttcttagtgctgagattaaaggtgcacaccaccactgcctggctagggaagaattttatgtcttattggcttactgtaaatattatttgaagtagtacgtgcaagcttctttgtataggactttggtgatgagt

SEQ ID NO: 20308 - DNA, 1150 bp, Mus musculus
tgtgttttgagacagagtttctgtgcagcccagaatgatcttgaacttgtttgctcctcgtgtctcctcgcttccagccctggttttatgtagcaccaggagtcaagcccagggcttcctggaagatagataagcacctactgagctacatctccagccctcctgagcgttgtaaatgggaatgtgctttttgtggagagatgagttcttttgtacactgatggttattgataccactctatccatgaatgcttatcctcctgattctagcagtcttacaagaattaactgcttctttgggtgtgaaagccaggtagctgactaaaaaagccatattcttgagaagtgtaggtgttgggtagagtttggttactctgtaagccttattgatgagaagagatggtaatggatggcttattatgatcagtgtatttaggcatctgtgattctgtggaggttaagaacttgcctttgatattattcctggacaggcattcttggagtaatgacattccacactgtgctggtcagcagcagggagggacagagagggatagaattagttgcgttggtgtcatcttttgctttgaacttctgtggttttagagttgtactgtattttaatgaaaacatttctgtttaatttgcaggcttacagtgggtctcccctaacagaagaaaaggagaagatagtctgggtcagatttgagaatgcagatctgaacggtatgactaacttttctgggatgtgtatattaaatgctcttttggggctgacctgattttagaaagggaaccccaagttcagtcaggctattttgcttatactaaataaattcatctttggctgggaatagtagcacatgcttatcatctcagggctcacaggcggaggtaggaggatccctagttggaggtgagtctggggcatagtaagacccgtctggaaaccagccgtgctgttgtgtataaccattgcagtcggtggtcatcagtcttagagcattttcatctggggaataaactagatttctttctctctctctctctctctttttttccgagacagtggaactcaatttgtagaccaggctggcctcgaactcagaaatccgcctgcctctgcctcccgagtgctgggattaaaggc

SEQ ID NO: 20309 - DNA, 1169 bp, Mus musculus
ttagtttcttttattgacattaatataaacatacaaagtaatgaatgtcatttctggcatctttagacttgtgtccttgctctcattccttccttcccctgtagtatgactcctaaggccgtcttttagacaagcccaagtgtgttctaatagcattatgcaaattttgctaatttgtaggctgattgttacttcataattgaagtttatcctaagttgggatctttcttaaatgagagccccccccctttttttttttgctttctaggaatatgtatgtatagttggtttttgtttgtttgtatgtggatgtgtggtgcatgttcttgaatgtgcatgagtgtgtgtttccattaggagaaaaaaggcatgggctctttttctcagttgtttctctgtcttaattgccctgagatggggtctctttttgaaccagaagctgtggtttcagctctactgtctggccagggaggtcttcacagctgcctgtttctgcctctcactgttgggcagaagtaaatacttcttgaaaaagtagactggaggagaaggacggagttgctgtatgtcccatgggtacatgtgactcctgtttaccaacagtctaaagcagagtgatgtggttggagtctctgaacctgagttcacatgttattgccacccacagtcagggttcatttcagtgctgtatgaggggctttgacagatgtgccatgacacgagtcactgagcattgttcactcatgtccccacaccttgaatagaggccatcatttttctcattacttgatattgtatttggcaaatgtcatttgccatacttggagtggccatttcagattggtttctgttatattgaatatgcatataagcgtcctcttgtttctttcatgaattgatagtttatagacgtcatataccattgtaaatatagtttataataccacaagctatataaagctcatgtttatagcttgactttttcctgtgtatgtgtgattgtgcatgtatgcacacagacaagtaagtggaacaaacacactggatggcatttaaggatccttttctttctcatgtagttccctcccccatgggtaaaacagtcattgtcctgaccacagattagcttggcagttttaaacaatttaaatttatgcactatggagtct

SEQ ID NO: 20310 - DNA, 1158 bp, Mus musculus
ttgagctggcatgcttggcccaggttcactgtctttctctgattcagagataggcaagacaaatgtccatttttgtttccccagtgccaattgcggcttacctctgtcttcctgggttactgaggctacacacctctcctggccatggggcaccatcatgtccatcttttagtcaaggcatcaagaactttgggaaggagctctgtgggtcaagtggctattgaaccgatggcagagaagatgatgtaggagcctggaccttgagatcacactctcctcttggagactttgatcctactcacttctgacctctttcaccttcacagttgcccatcccaaagtggaaccagcatgcccctgccctccttgggtcagctcttcagtcctggttagaactaagcaactccttaaatggctaacctcaaaacaaaacaaaaaccccatgtgtacttagcctctccctctggtaggtggtgatgttgcgctgagatagtgcctcaacgtctcagtagccttaatctcacccagagttccttatggaactatacattggtcttgctggacagcacaggaaagaactggaaggctggttggcggtcagtggtgagcctgtgggtggtgaagatttctgaaacaagcatttaaaccagttcagccttagtcagtggtgtgtagctgcttgatctgaacgacgggatcccaccctttacctacatgtgcctgtgtgtgtcccttatggaaacaccgcatattcagtgtgatccttagccttcatgaggtgaagacaactgtaatgaggtggtgctatccactccgtgggtggcaagtgaatcaaacttgtggataggttgagaactttggtcttagagccacagttccaagatgttgtggtggggtccagggagcatccacacacaacaggatataccttctttctataagcaaggttattcaacctcactctctggcatttctgtctgcccttccttcatgtctaccatgagtggatacttggtcacaggaaccaggtccatggcaacacattctgtttttaaattgaaatgattatagttttatgtgcacttgtacagaaaattagaaaattagaaaattccataaatcttttaatatgccctgataattttcacaacttcagag

SEQ ID NO: 20311 - DNA, 2192 bp, Mus musculus
tcaggctgcaggtgaccagggtcatcccagtaatagaccttattggtatggttcagtgggttttttggactctgcatttattttagcagacttctctgatagcattttgcagctttcagctatttgtgttggaaagacaaataataagtaaaccagtccagggctctgtttctttgtgcaactgactgtgtgtcctagtgccctgctggagggtgggggtggggggcgtgggagaagcagtgagggctcctgtgggatgccagaggagaggggggttttatgctcttaatgtgcctcccctttcttgttatttaggacatcaatagaaccaaggcgtgttagaattgttctttaacattgtgtagacaggagcctctccacagtgttgagcatctctcactgaacgtagtcacacccatcacactgttctgcttacaattgcttaagcaagtgtttcttgagtacctagaaacatggcagtacccaaaatagatttgtcacgctcagtgtttgcattgtgtgagtgaatgctgctgcacatatgggaatagtattcaataaaatcttcttctgcactaaagttactattattatacataagtccactgtagctgtcttcagacactcgagaagagggcatcagatctcattacagatggttgtgagccaccatgtggttgctgggatttgaactgaggatcttcggaagagcagtcagtgctcttacccactgagccatgtcgccagccccaacttctattttcttaacctttgagttatctcaaccctttaagtttgaagatataactacagattataacttcctaatgggcaactctcctgagtcctcaattaagattgttttgttccaaagtcctttggagagagagacttaaaaattagtgatactctatttatccaggttccaaataaaaagacagaaaaaataaaagttttaatcattgtgttcatattgtctggcaggtgatctagcaacaaatggtaactttgaaaaacatcaatattgatgaatttatagaacttaacacaaggcgataagggtaccatgaaatcatacacatggataatctgggacaccaggatgttgaagtgtagtctacatcactaaagatgtgttacatgatactcagtatgggttttgcattaaggatgtttcatcattttctagttcctgtgaattagtatccccatctaataggtaagatgtgccgttagaacgtttgctaggtccagtgtgatgatagactcttttgtttgttttgctttgctttttgtttttttgagacaggatttctccacgtaactaccctggctgtctgggaaattgctctgtagaccatctctgctctcaaattcacagaaatctacctgcctttgcctcccagtgctgggattaaaggtggcaatgggacactccttttaaccccagcgtttgtaagacaaaggagaacagcttggtctgcatggagtttcagaccctatcttaaaagacagacaaacagacccacggtgtgtgtgtgtgtgtgtgtgtgtgtgtgtgtgtgtgtgtgtgagagagagagagagagagagagagagagagagagagagagagtattagagttagaatagtttcatggaccattaagaggaagctgaacctaaagtccccacactgggtatttggatgaaaaagtcatagtccctagttggttctctatggctggtgtctgagctgagccgcctaaaaaaatgcatacagtaatggtttccccccttaaggtctcactcctctgtaagctggttcctacatttacctgagattttccaaattagtcctgttagaaacaagtgtgcttaagttagactcttctctcccagagaaaaggtaaagccttgggatcgaaagcaactagaagaactcacctaacaatccaagatcctctcctcaggatggcttagtccctgccaccactgagtatggccactcagaacacctgcatgattttaaactgaggtctaaaggtgttaactaactctagcccaggtacagagtgacaggctgctggaagtcccactgaggtttggtggactcctgcacgttatagcccttaggaggggtcctagcattgctcttttggtttcctgacgaagctgagtgataagtttccttcattatggctacttctgtc

SEQ ID NO: 20312 - DNA, 1165 bp, Mus musculus
tttaaaaaaaagaaaagaaaaaaattgttcgtgagcaaagtcatatgaaaaaactgggaaagaatgtaggcaagagcagactctaatgcatgttctagaacagtggttctcagcctgtgggtcaaaggactcttttggagggcttgtctaagactataagaattgacagatatttactttatgatgtataacagtagcaacataacagttgaagtagcaacagaaataattttatgttggggatcactacaacatgaggaagtgtatacgtgtcagggtataaagaaggttaagaatcagtgctccaagatgggcgtggtggcgcacgcctttaatcccaacacttgggaggcagaggcaggcggatttctgcgttcaaggccagcctggtctacagagtgagttctaggacagccagagctacacagagaaaccctgtctcgaaaaaccaaaaaaaaaaaaaaaaaaaaaaaaaaaaaaaaatccatctccagagagtcacagacaggaaggatcttatagccttcagctaagcactgatcgtggttcagcatgtgggaaactacctaaggcctaggagagaactattactgtagaatatcagaggagacattcagcattcactggctgtcagacaggactgtcagctttcttttttctttttggtttttttttggggttttttgtttttttttcgagacagggtttctctgtgtagccctggctgtcctggaactcactctgtggaccagggtggcctcaaactcagaaatccacctgcctctgcctcccaagtgctaggattaaagacatgtgccaccactgcccggctttcaggactgtcatttctgtcacaccatccagaatagaaaactttatggtttatagacaaacagagagaaggtttatgtcacaaaatgggctaaatttctttcagttttccctaacttagaaggaagacatcataattaaattgatctaaactaataatgaagtggaaatgtaagtatctcataaggtctgtattcccatacatcccacaaaagagttgataaattacacaagtgttctagaagtctaagaaagactatcagtgtgtagataaaggctcataagccaacttgtgttaaaggaaactccaaaacccttacacaaatgtacacgc

SEQ ID NO: 20313 - DNA, 1123 bp, Mus musculus
agaagcaggaaaaaaaaaatgtaacaacaacaaaaggccaccccgaaacaacaactagtgaagaaaaagaaaattccattctgataagcatgttttcctgccttgcttatgttgtgctgtggagtacagatggcccaagagtgacatcaattttaaaaggtttggaggcgaccttgtctccttactgtgtactgaaaaaccatgcgattgtctcagttacggtgattatttaatagaatgtaattatctgaataattcatttatttgactactcgtctgtgtcctccagtcacagaggccagaatgccaaagatcaagtagactgggaaaatgggaaaattctcattataaagacgaagggtggagggaaaggatggaatagttggaatttcaacgcagtggtttctatttatctgaaatgtcaagggcagtgtaaaatgtatttttaaaatgtgttgctgtatggtttgtgcccattcttggcgtggctatggctctacagaggccattgttccttgaggaatatgagggggtgtctttgtccaaagtgacaaagagagggctgagaagactgggcctcctttgttcctgtgcggtgctgtaaaagttggtttgaaattaggacctcagggaaggaccttcaatagagagctttcatttcctgccagcattttaatcactgtggggtttaaagtggatggccagccagcataatggccctatgtttaatagaacagcttgtattttgaaggccagtgaaggggtctgtcatccgcccaatattcatcttctgtttcctgtccatttacgaagaccgcccacccttttaggtggctcccttgcaccattttgtagtggaactactgcggttccttcttaaagaggctgagctggggtgaaagcaatgcagcctgcatttgaggcaggatgggtgctaatgagacccagggttggtagctgtccctgtcagtttcaagaagaaagagtcagattttgccaaaatatagaatagtagaaaggctaaactgtaaccctgtctcatcagaactatcagcacccattgattcagtaggtgtaaaatcattgctacgggggaaggaaatgtccaggaagaggaggggtc

SEQ ID NO: 20314 - DNA, 1126 bp, Mus musculus
atacttatttatctattgcatgaacctaggagatagggggtgctaaaaaaaaaaaaaaaaaaacaaacctgaagtctccttcaatacccacccgtattcagaacatcagacaatttatacccagacgattacaacaggtcagctgagtagagctcatgagcccaagctgtctgagtcacaaggacatgagtaccagctgctggaaactcagttttctccaagacacctgggaggagcacaagaacagttctgtcatttgaagaaactgaggtcacaagacttgtcttgttttcttgtagctttctcacaagcactaagaattgacttcccatgaatccatccttggatcccatcccaacacttactggccgtttttttcttttttaagctgggcttcactgtgtagtccaggctggcctagagctcaccgtccttccgcctcagccgtcagcctgtagaattacagagtccgacaagctgaatgtggtgccacacacctataagtgtgtaaatgtgttaagagcatgtcccaagcaagctaatgtccgcagcatctgcactctgaaacaccaaggctttgctgggcctccttcgttgtggctcctgcttgtcgccccttctgctgcacacacatccaagagccattgctcaggccagcgccattgcctctccggtttcctcttacgactctcaccttttcaggccctatactaaaggcaggctttgtgtgtgggtggggggagggcaaggtacatagtgagagtccttatttctttttgggctagaaactcaccgtgtagatcaggctcgcctcagaagacatctgcctaccactgcctccctactgctaggattaaaggcgtgtaccaccaagcctgccccaatttcattcttactgagaaattaatttataatctttatctttaaccgcaggttatttgttgcaggttctccctaaacttcacagtagacaagaaatgattttccatgaaactcctctaggggtagaaacccagacccaaattctgagtcctggattctgatgtctgttcagtttgtcacacagacttggacttctacagagttccatctcaagaaattgcagactctcgagatgcagctcagg

SEQ ID NO: 20315 - DNA, 1180 bp, Mus musculus
gttctcattggctacagattcagtgtcttcagttatatttactcttgagttctttctataactcaactccttccactcttggctgtcttgtattttgtcattcattcattcattcttcattctcttataagctgaagattctcttagcatgagacttgagtttagatccccagcatgcatataagaggaagctatgcatggcggtgcatactgtaaccccagtgctgacacacagtggcagcggaatcccaggagctcatttgctggccagtctggccaatcagtaagcctcagtgagagtcagtctctctctctctgtctttctctgtctctctctgtctctctctgtctctgtctgtctgtctctctctctctctctctctctctctctctctgaagataaggtggaaggtgacagaagacactcatcatattttctgcccataagaactcggtacctactactcagtacctaacccccattccttccccacccctcagtcccagcactcacagtctgctttatatttctatggatgtgactagatcccatatagaagtgaatgatagtgctggctctcttgtgactggcctacttcactttgtataacgtccatggggtttgttcattcgcactgtagtttagggcaggatttccctcttacggtgtaaaatatttcacttacacagtaggtggtttctttatcttggctacagtgagtaatgctgccctgtgcaagtatacagttatttctttgaaattcaattttagttctttcaactatttgcccagtaataggcttgcattggattacatgttctgtggtttttgatactgttttccacaggacctgtgctggaagtattttatattcttaacagtgcataagggtttcactttctctaatgtgcatgggtactttctgttcctgggttttgcttgtatatattttgatattggtgggaaatgatatatctttgtggttttaacttgtatttccctggtaattagtggtaagtgtctttttatattcccattgcctatttatttatattcttcgtgtaaatatcttttcgagtctttgcgccagaatctcatgtagcccaggctggcctcttacttgctgtgtagtggggttcctggccaggaggtctcctgcctccacccacgccaggccac

SEQ ID NO: 20316 - DNA, 1155 bp, Mus musculus
ttaaaggagttctcttcaaattggcttttaatttgctcgacataattacattcattcaagttggtcactatcctagagtatatttctaagatttttgccacacagcattttaaatggtttctggtgtttgcctcacatttgaaatggcattttccatttctctattgttgaaagattgctttcatgtgtgcctttccttccctcttcctttgtacatgaaccttgcacttgtagtagagagtcaaagactcgtttccaatttccattccaactcgggctaggaaaagacacgttaaatttgaattctgacgtcttcactgatgaacacacaaacacacacactctcacacacactcacacacacacataccatgctctgcctcttctatttctgtacatacttgtaagatctcaaaagttgtatatgagaaagtcctgttaacgtctaatgcataacttggaaccattttttagtgaacacattcacacatgatttttgttattttttgccataatcggtctcaggtttgaagtaaaatctgtctctagaaaagagcaaatctcacagattttgaatctcttctattgttttcataggactcccttatcaataagagggtttcctgagccctgggtgggagctgaaaaatgaggagcgaatgagcctgcagagactttccctgagagctgagcctcttcacagttggaggaagtcaggaaaagtaggcgggaaatttggaaactattcaggatcagagagcccagtttgtttgtattttgctgaaagagttcaaaggcagaatcttgggaagttggtcactctgagatgggacttcctgtgtcagcaagggaacattctacagcttgacctgtggggatttcaaagatcgcttgaacacccaagctaaactctgtgtttggattggcccttgtaagtaagtatcataaaggaaggatgggaggctgaggcagaaagatcacaagccaacctgagctgcgtagaaagacaaaaaacaaaataattaactagagaaggaggcagtcacaacacagtagatcatggaacaggcccttttacaagtctttcagctctcactttgggagtgtcattcagatcattgagttgttcaaattacattgaatcattatctaccc

SEQ ID NO: 20317 - DNA, 1294 bp, Mus musculus
agaacttcagcgagagggaagcatcgagactctgagtaacagctccggctccaccagcggcagcatcccaagaaacttcgatggctaccgatctccgctccctaccaacgagagccagccgctcagcctcttccccactggcttcccctaggcaccagccacctgcttctgactggctggcccgctcacccctagagggactgactgggaggggggagtacccccatctccctacaccaccaccaccacccctgtcccgcacgcctctgttcccacccttttcagtctcctcaaccccaccttccctaagcttagtggcaacagctgttcatcccaaactggacgagaagagaccttcagaacacctcggtacaccctgacctcccccactcctgtcagtgggggctgtggcccaaagagactgcagaaactcagtcccttctctctttgcacacaacgtcccgcactggatccgcttttgtattttctaactactcacaggggactggaacaggggccagatcttagggcctctggtaggggagagttgaaagatccagccaggcattttggtggacatcagccctagcccagttcaggctgggatgcacattgcccccaggtacccctgctcagttctaaaacaggagtgaactgagacctagagcgatagagaggaagaaggaaagaggcctccccttgcccttgcttccctgttggctcatggagagatttgtctgtcttatctttaagcccttgtcccctggtcctgtactgttccatgaagggaagtgcagttaccgaggccgtgtcaaaagtgcacgtcttgtccaataaatctcgctgcaattggtgttcattcctgagttgctggggtcagggtcctatccaaacacggagcaaagtcctgtaggtctgaccgtggcactggctcccaacacccacaccctcactatacacaagtgtccagggagcctgtcttgggaagaaaaggggaggaaaaccttcccactggaatttaggtgtggcctcactgaagtccagtctctaagattcttgcctgttaccagagcctctgacttctggaggagccaagcttggacctccttccaagtcctgcccctactatgtggtgggttgctcaaggaagagagcttgcccttgcctgtggccttgtcttagagcacttgagaacctctctctcactccgagaagatggagagcctgttgactaaagttgggtatcctctgaaagttggaacacctctgatagcaagttcttgggttttgttgt

SEQ ID NO: 20318 - DNA, 1111 bp, Mus musculus
tcaggccatcctggtctacatagtaagttctaagacagccaggactactcagagaaactctgtcttgagaaaccaaaaaaggaaaaggaacatttggtatgtacatttaaaaaataagtaaatgttgcatacacacacacatataaaacggaccctgaaataatggtccattaaaaaacaagaatctactgtgaattttgagtgcatgttttagagagtgaaacaatgtctgatcaaaaatgtttataaatgatggtcatctctgacattccaaaactacactgatttacccacccccaaagaatggacatttagactttttatatggtgatttgaattgagagtgtggtgtggtgtgtaaatgcaacttttattgttgtctcggaggcttacagcctttggctgctatcctaagcgtttagcttccgtacaatcttatctaggcctagaatgtcttcagcctctgagactcactgctgaataagctcaccccttccgagttctttctgacctctggctggctgagtcaactcagcttttctggctcaaactcctctccaagctgatttaatcaggcttctcactctgagtctctcctgaattgctctgtttgacctcatattaactttggcaatatgttctaaccttctggcccttcattttctagctcattctatctttacctgtgtctagcttgttctttcttcaacctgtttctgtaaaactttcctggtaaaaccgcctggctgcttcttcctcaccacactgttctggtaagtagtttccctttcttctctcatgagagttctgcatatcctattctatcaaatgtttctctgattcataactttgtctgccactcaattagacatcactttcaaacatgggtgcctccttctacaaactaactttcattatttatgactaaaggtgtatgctaaggccatgtctgtattccagccagaagaattaaaggtgtgtactaagggctgagccacaccagaactaaaaatagggctttttagtaaattacacaatctcagggttcaaatttggttaaatatcctacaacatgtgtgtatgtgtagctggagatcaagcccagggcttt

SEQ ID NO: 20319 - DNA, 1205 bp, Mus musculus
ttcacttcagggtagtatttgctcatattctttctccaagtgtactactgactgtatgagcattcatcaacatttaatcctgaaatgttgaagtaaaaaattctaagtcaaatgtaaccacatggggagatgcttacataaaaatgactggagcctttttatatttcacatttgaatactgaaaaattaaggctgtgctcattttatagtaactaattattttattaagaaacactactaatttttcatttttattagtatttaaaatactcttatttctaacctaccacccataggtatatatcaactaaaaaaaaagaaagtaaatatttctcatatattaatacctctcgaaatgagtgtcaaagaatcatcttctgattgaaaaatatgattacattttaccttcgaaacaaatgatatgaataggattatgtgaaatagtctatttaggcaggaccattaaatgcattagggcttgagtactggctattaaagtgaatccatggcaatacagggagagaaacacaggccaaaaagcatttccaaagagctgggactgtaacaataccagtaacgagggcaaagaggtcttaatgcaatttgcactttctaaagtttcaaaaagagactctgcgttagtgcgttattaatgtactgaacatctggtgctgcataaaagctatggacgttgaacaaatacaggattctaacttattgcctccctagtggcatactggtttttaagaagcttgaaaaagtgaaatgacaatgtccagataagacacaggcattccaaagtattcttttaatttgtgagatgtgacttttcaaaaacatgcctcgaatgctaatgaatccaagcaatgtgaacaccagttggtagattgtctctatcattgtgtcagctagtctctgtatgtgactagtatttactttttaatgatctataaaaataactcagaaataccttgtgggttttttttttttctcttgtgtggtaggcctgaaaaaccaagagacaggtctaagtagtttcctttaagctgtttgagagagtgaacaactgaattgtgtgtccagtcggcaagagggaatcacttgagccatgtacatgcgttctttgagtgtcacctgcagtgagaacagaaaagctgtagacctaaggatttgcttagtgaaaccgaaaatgaggaagagagaga

SEQ ID NO: 20320 - DNA, 1101 bp, Mus musculus
tggtactctgctgaagatctggcagttatttcaaagaatcccaacaagcactttgatcaggaaaaagaactctggaaatatgccatcaggaaaaaaagattctgccacaggaacaagcacggacaatgataagacaaatgcatcaatggacccacctgggaggtaagcaagctaactcaaactgccttaagatctacgtattatattccaggactgaaacacctggtagaaaaaatagttcacggttgtgtgccctgccaaaaggtaaatgcttgcagaagcaaagctgactccttcctgtaagagacctcggggaggtaagctgggagcctactgggaagtggacttcactgagataaaaccaggcaagtatggctacaaatatcttctagttttcatagacactttctcaggataaatagaagccttcccttccaaacaagagaccaccacagtggtggtaaagaagataatggaagagatttttccccgatttggagtatccaaggtaatcagatctgacaatggccctgccttgttgccaaggtaagccagcgagtggccaagtacctagaggtcaactggaaacttcactgtatttacagacctcaaagctaagggcaggtagagaggatgaacagaactctaaaagagaccttgacaaaattgaccatggagactggcgctgactgggtggtgctccttcccttggccctgtttagagtcaggaataccccctcccactttagtctgattccttatgaaatcttatatggaactcctgctcccctgactttcctgggggacatccttgggcccacttgtcatagtaacaatgatttgtatgccaggttaaaaggcctgcagctggtgcagagagaagtgtgatcacagctggcagctgcatatgagcctgatactcctaagacatcgcatcagttcgaggttggagattcattctacgtgaggcaacatcgtgcccagaggctcgagccccattggaaaggatcctatctagtactgctaactactccaacggctgtcaaagtggatggaattgctgcctggatacatgcctcacatgtgaagccagccccctta

SEQ ID NO: 20321 - DNA, 1225 bp, Mus musculus
cctgttcctccaacaagatctgtgtgcagccctaaaagaagaatgctgcttctacatagaccactctggagtggtaaaagattcgatggccaaagtgagaaaggggctggcgaaaagaaagagagaaagaaaacagaaccaggggtggtttaatcttggtttaactctttccccgtggcttcacgaccctgatttctatccttctgggaccattgctaatcctgatgttgcttttaacttttgttccctgcattttaaattgcttgctagcttttattagagaacacataagcacagttcagattataatgctgagacaacagtatcaagagttaagtcagggggctggtgagatggctcagcaggtaagagcacccgactgctcttccaaaggtcctgagttcaaatcccagcaaccacatggtggctcacaatcatccgtaatgagatctgactccctcttctggtgtgtctgaagacagctacagtgtacttacatataataaataaatgaagagttaagtcagaatgagctataatttcatgactgaaatacaagaaaaaggggggaatgtgaaagtttaagaagcacaaaatggctgctagaaggaggatcttgccagaaataagactttgggtacagaaggattatgactaattcctcttcccagaatgtcccagaaaaacaggaaggcctttactgcagagcagggtgggccaggtgcagataattcagttcccctttgaagataacaaagacctcaccccacttagaacaaccaatgctgagaaaggtcgatacagactactaataagctttaaccaactcatactgttgctgaagtctgcccccaagaactgtataaaagatgcttgaaatgttcagggtagcctctgccctaattgcaggatggccccaatgcgctggatcattaaacctcttgcttgttgcatcgatctccgtctctgtttctgtgagtgggcctccctggacgtaaggctctaagggtcttacagtaccccttttggaaatggatgatttaacctacacagctagtcccctaggactagaagactaatttgcaacgaaaaggaaacctttttcctgttgtctatcatgcaagtaacctccatggttacagtatgggaagaaagaggaatgcagactgcaccagaattgtcactacaatgctaaaattagtgagaaggtcctgtggtactttgt

SEQ ID NO: 20322 - DNA, 2732 bp, Mus musculus
tttgtgtaggatgcctgtgttgaatttatatttgcaactaaacaattgtgttgcttttcttcccaccagttctgacacaagctaagcggtactcgtttttcatgccaactcttccaagtttggtctccttttgtcgagcatttcctccactgtatgaggatattatgtctttgctaattcaaataggacaagtgtgtgcctctgatgttgccactcagacaagagacattgatccaatcattacacgtaagtgctacttcactttaatgtttcaaacaagactatattcatttcagaatatcttgccttaattattttctctccttactttgtaggtcttcaacaaataaaggagaaacctagtggatggtctcaaatttgtaaggatccatcttacaaaaatggatccagggacactggaagcatggatcctgatgtccagctctgtcattgtattgaaagcacaataattgaaataataaacatgagtgttagtggaatttaaaaaaagttttaagtgcagccacttgctatactgaatctggactttatgagaactctaaactgaatgagaatagtgagatcttggaattgctgaagtgactcaattcagcatgaggataatttagagctctctgagaattatacttgtttgattggcatatctttggatctgctctgatggtatgtttatattgtagcagctgaacttcttttccactggagacactttaagaaacttgtcactagaaaaggattggttcctgtacttagcatttgacgtgaagaaagattgccaggcctttaatttaattgcttaaaaaaatgagcctgtggatatccctcatatttgtgagctttcaacagttttcaacaaagagaggagaggaaggagaaagagggatgtagggcaggaaccatttagaaaaaattaccatttaagtacacagaaatcttacagacttgtaatgcaaataacagtattacaggttgaacttctaatttgttagagacagtagtaggatggctttaaaaaaaaaaaaaaaaaagcaggtaaggcaggtgtggtggagcatgccttaaatcccagcctagggagaaagggagaggcaggcagacctttgaccaggccagcctggttcacgtagtgagttccaggaaagtcagagctacataatggaccctgtccagactactaaatgactgccttggaattacagatgaagatacaaagatttcacaaatctgcttcaatttttcccaatatatgaagccatatgtttaaagagatacttgaattctttgaaattttaagatactgattgtagttacagtaacatctttgtgcaaagaagaacctgaaagtaaatttcatttattctttttaaaatttatttttgtaatactgtattatctagttctcagaggagcaaagatgtatcaaattaaatgaactttagagcaataaaccccaatagtgctcttggttcatcagcaggattataattcacattttactttgaggagatctttgagtaagaaaatacagtatttgaacctcaggaaaaattataatgtggaaaatgctgtgttgctgactttttcagccctctgttaggagcttcacgtttaaggagatgcattcagataaccataatcatttttgtaaaattaagtacctatatacaaggtacttctttgctctttgagaaatacctcaatcatatgtcaccctactcagagcggacctctggttaaagaaggtagtaagctaaaaggaaagttatccctccccccacaaaggaacttagcttcatcctttcctctcgtacatagtcacatctcatttttctttgtcactcctgaccctacctcatgaaggtgttctattaaaacaagtttatagctgtttccaatcatgaagtacatcgtatcatgcatggtggaatatatataactttttattagatgcttaatgttcaattaattaattttgatgtgaagagtaaaagaatatgctttaaagatataccacaagaattttcctatttttaaatgaggcagttctgaagtctcttaagattaaatacaactgctcccgttttgtttgtaaatgagacctttctggaagtttttctgtgaatagtagaatcctttaggaattctgaattatttgaagtatgttttgtaatgaaatacagtacacattttgtggatcaattttcaaagactagtcataacctactgtgttaaagtaataacatagcctgtttttcatccaatttgttgatgatgtaaataaaatatgtaaataatattagtaaatgttaatattcatatatcttaagttaaggttataagctttgtcacaatgtgattttttttattcaagtcaaaacagatgtgtgcaactattttggatattgatttataaacattcattctttaacaatgaactgtagcttttatgttttatttcacaactgttaatgtaaaattaccaggagggagttagaatctaggacaccctagttctggggctttaatatatccctttctttaaggtcacataaatgaaaggaaccctagaaattgtagttaccgatggttatgagtcccatatgggtgctaggaatgtaacctgggtcctgtacaagagaagcaagtgctcttaaccactggtccaccctcttcagatcctggagtctgcttttataaaacaaatttcacag

SEQ ID NO: 20323 - DNA, 4640 bp, Mus musculus
tacagtatgaaattcttagcaaagagggtttctgtggttgtggtattgatgtcatctcattgtttaggcagcaaagggtgtctctctctctctctctctctctctctctctctctctctctctctctctctttctctctctttctctctctctctctcacacacacacacacacacacacacacacctctttgagtcttgaaagtactatccaagtgtatattgaatgagatggattgacacagtttattcgctttcaggtttgttttggaacagtacaatgcactctcatggctaacctgtgaccctgcagtccaggacagacgctcatgtctcccagttcattttgtggtgctgaatcagttatataacttcatcatgaatatgctgtgatcctcgtttgatggaattacgcaaggaaagaacgggaagaaaggatattttgctgcaagattaagttacagttctcagtggaagtcatttgtgatggggtctaattcttattacttcaacaaatattgttttgacttggggggcggggctataaccctatttttcattgactttactgagctctttaggatgatgactgattattcaaaacgtattataacactttcgtagcaaaaattaaccttttttttccagtcacagtatttgtgaaaagtaatgagccatagtacccattaatgttaaagaatattaaagcatggagaggaacatgaggaacaatgaattccaacatatggctttagaacatcaggatgttcttgtattggatatagtatctagtattcaaaaatgcctgcatctcttatttattgtaagtttttaaatgtataaattgtcttatatttcttaacctcttttataaaaattttcctagaaggtttatactgccttcttgctttaaagcaattggtctaaaatatatgtaatcgtcttaattaaaacgttgcagtagggttgcttttagagtattatttttttgtaagggggtggggtggacagtaaatttgtattgtctcaatgtacagtttaacagggatagaggggaaataatgtccatgccattgtgtgtggaagatttacagctaagctgtagttgcagagtacatgtacagtaatgaagttcactgtgtttataaactgaaaaggtaccgggtcttacagcattttatatatcacacctttacagaataacatgatggcaatatacatacgtgatattgttaggtggaataacttagaataaaatgagaattcttgagttatattttgtactatggtttagggctatgactaatatttcaggccatttccagtgaaagaaacttagttttacaagaaaacatttgctactgaatgcttacactaatcttggtgtttaatgttacatgcttaaattcttttcagttttcacagtggcacatttaggcatggggatagtactaattatgaaatttcctgcaggatctgttctaaggttgaaatttagcccagctctaggcattttacaaattattttaagaacagtcactcttgattgttttactttttatttttaaattaaagattgggaatgcgtgtgagagtatgcataagcatggcaggaagagaggggggagagagaaagagagagagagtgagaaagaaagagagagtgagagtgtgtgtgtatatgtgtgtgtgtgtgcaatcaaactgtggtgtaaatagatcctcagtgaattctggtattcagactctgttccactagtgaatgaaccattttctaaacgtttccctttgacttttttatttattgaattttcttggtttggagatggcagtcccaaacaccagagtctgtacttttctatgacacagctcaaattaaagtagggcacatgccaaggaggttctcacctccctaaagaagggacttgaattttagggactttaattcaccctttccttcaatccagctttcccccttcttgtttgcacatgccaagataactgcttttatgcaggctttacccctgaaaaactcctttctacagtgctgctcacgagagcccagccagtctcatgcctgcattgctgacttgaactcacagtcgccaagtctacctatctttcttggaagcagtctttcaaaattcctacttgtatattcatccattgttgacaaggacaaaatcagttgtatttacaaaactcttaactcggtattttttttttaaactgaatcctgttttgtaaataatatacatttaatgttgcttagcataaaaaatactttcttacagtaatcttctttaaattgggtatatgaaaacattaccaactcttgtttttctataaagaaatacagttaataacaaggtttcaaattattcctttaacattaatagaacaatccaaatgttgagcatattttgatattaaactaaagatcacgtctctgtttttaaattatgctaacaccaccacagattatgttgacgtattttcttctgtattttcttggtgggacttgagatttgaggaaaaaagatgcttatttggaatttctattaagaactatccttgttattttcttagctcaataattactcaagaaaaataaaagattataatctcagtttaaaattactaatgtgtgacaaccatacctcagtttgaaatagatttaacaagattattccctgacattttcttccatgtagccataagcagggacccagcatacaattcttcttacctaggaatcaggaactagtcccaaatatacaggattgagtcatggtttgctttttttttttttcctttcctttttttctcccctttacacatcagattttgctcaaataggaggtaactaaatagccattagaagaagaagtgaagcctttcatgcaggatgatagatctaacttatcaatgtactgtcacagtacattaatcgttttatttgagtaggtaaacaaatttgcacacttttccccagtgaattcccaacaccttgacttcctcatttcagtgctaataacctgttttgtgtgcagttaatccattctgaagcaggtgaaaggtcagtattttagcattttaaaagatgagttatataatgtctgcttccagccagtctgcaacatctagccatacctttcttatgcaagccattcagttatcaggactgtgaattaacactgtatgaatacatttctgtacaccttattgtttggccagagggccaccaagtgtacttatatgtaatccttaaattttaaactagcttgtgatttttaaatatttctaaacttttcttaaaccactaaaattaagctcttactacttagtcaactatcctcagctgtattcgtcttcaattgtcagtatggcacagatcactgtattaaaatgctctttcgtcttcatatttaccttctgaggtcattttttaacttaatgtgttactacaaagatttgcagatctttaatcaagcactatgttaatactgtaatatcaaaatactatgtcgaattatttcagatgttcagattgaatagggtaaaagaaagtctttaaatgctatcgcatcctagaccctcttcccacctactatggcattgcatattagtctgttgagacattcattgttgcttgactgacattttggtctgggttttcttttaatattttattttaattaaaattaggaaaaaatgtgttcaacaattttttttttgtcccatcttctccaaatcagtgggaaaagcttaccttttggtatatcttagtgttttcatgggcccagaactgtggtttaaatttttatatgtattctcattctcatattcactcatactcactctttttctctctctccctctctctccctctctcccccccccttctcttttgtggagtataaattaaaaaaactggatttgggacctacaatactcctcaggttgagatattcttgaagttttaaaatagctttagtttttaaagtaaactggatttgtggaccttaaagttactgagtttaaactacaaattgtaacatcattactgaacatgtccgcatcaaccctctgagaataacttggtcactttatgaaggggcgtttttaagttgtttagcagtgacatttaatatggtccaattgcttttctttttaacatgacaaacaattttaaaagagactaaggaacaaacactattgcgccgaatgccataacactgagttgtacaaattgtgattgaggagatgaaaaagtttatactttttaaaaaaaaaaaaaacaaaaaacaaaacttcaaatggaataaattattcatgaagccttccttgtggtgtctcattctgtggaaagtacaagctccttacagcttccccatggttagcagcagggctctttctgtgtcatttgcttggggacggtggttttgaggcagggtcttgctatggagaccaggttggtcttgaactcagtgatttccttgcttgtgccttccaagttctgggattaaaggactgcatgcaccactaatctcagctctgaataatttttaaaagagaatgctggttctccacacccagtattggtgatgtgtgtgtgtttacacacccaagctccttttt

SEQ ID NO: 20324 - DNA, 1190 bp, Mus musculus
gattgttaagtgttcatccagaggcaattttgttaaatttccagctttgcaaaaataaataaataaataaaataaatgtgcaggattactcctttgacattttattttattttattcatttatttttatagcacttaggtcccaagtgtgactgtgtggtctcaattttgttcaacccagggacagggtacacttcaggcctatgggttcagtgtttccttaatcatttgctttatagacttgggcagattatatttagaagataattgtaaagcttgtttttaaggattgctatacgatttttaaaagtaaggctaaagtaaaaattgtagagagacacgatgtaagttttacaccttaaagtttccatcaaaaccatgaattttttatagttgctcccacagataacactgtcataagatcagtttcatcaggataatacattaggagaacacagtgaaatgaaatgttgctttccctctgtggctgactgcgtccctcccttcctttgtaggcctctttgcacctccacgtgccttcagtgcaatctgacgagctgcttcacagcaaacactcccacccactggactcaaatcagacttcagatgtcctcaggtatagctcccatgatgctaagggttctctgtttcaacttgggtaaaagagaatggttattatgagatatatttattcttttgggtaagagttcacagcgttttatttttgaatcattgggtgattccccaccccaccccccacccccgttcatgatatagacaaagcatagtgcctgtgctggcttggtaaattgctctacctctgagctaaactccatttaaaaccccatttagttattatttcttaaaaacaattttattctttttatgtccatatatatatgggtcttttgtctgcatacatgtccattgcaccatatatacatgcagtgccactggaagccagaaggcatcagataccctggaactggagttctaggctgttagcaggcatgtaggtactgggaattgaattctggatctctggaaaagtagtactttaagcatgagtcatctctccagccccaacctcgttaaattattgagaatgaatacctttctaaaatgaatacgtttttgagtttttttctccccacctcattcattcaaaaagcggtcttatgtatcttaggc

SEQ ID NO: 20325 - DNA, 1181 bp, Mus musculus
tgcctcacaactgtctataactcaaacttcaccggatttgatgccctcttctagcctctacaagccctgtacacgggtggtgtacaggtatacatgcaggcaaaatactcgtacatatgaaaataaggcttcaaatgctagaattgtcagtaaaagtttttgttttaaacaaggaaccatatatatatatatatatatatatatatatatatatatatatatatatataatacaacaggtataactagtatctattatgtattatacaagtatatgtaacaattttataaatatataatcatatataattatataatacattttatacatatacacagacatatacactgacttcattctgaaagtaagccatcaggcataagagttttaacttatttatgatgacctctatattagaagaaatacactaatttaaaagctgttatctatttctctttcatcgtcagtctcataacagagcagtaactttaagtactgtccttccctattgatatccacagattggagttgtttgctgagtcgtcgaaacttgcaatctctaagcaaaaggctcaaagacatgtgtaggatgtgtggcatatctgctgcagactctccaagtatccttagtgcttgtttggttgcaatggaaccccaaggttcttttgttatcatgccaggttagttatgttcagtgtatgtcagatttaattatcattgtacgcgtttaacttaactgttacataaaattctgcacttacaaaaaaggaaaatgcatttctctttagattctgtgtcaactggttctgtttttggaagaagtaccactctaaatatgcagacgcctcagctaaataccccacaagatacatcctgtactcatatacttgtgttccctacttctgcttctgtgcaagtagcttcagctacttacaccactgaaaatttggatttagctttcaatcccaacaatggtaagttaattgaaccttaaatttttaatctaatttgctttgaaatcatggtctttctatacagccctgtttggcctagtacttgcccaggtgtggtcttgagctatatccctagccattctttatatatctgtttgctataatacggctttatatcatctactagaatataaatgtaatttagtgaaccttttaggttgtgtttag

SEQ ID NO: 20326 - DNA, 1175 bp, Mus musculus
tggattatattcttgctacattttttgctagtctttgttaggtatatgttccatgggtcacagtggaaaatatagtattagagggatataccaagggcataaatgtgttccatttaaagtaacctttggtatgttgggtgtggtggtgcacacctgtaaatcatatgtatttgggtagctgaaacaggagactcgctagaactatgtcttggaaaaaatgtattaccaggggtggttgtatatgtttgtaatcccaacatttgagagggagaggcaggaggatcagaaattcatccttcagcaatataacaagtttgaggctggcttgggttacctgagaccctttgtccagaaaaagaaaaaagaaaaagaaaagcagctggaaatttctaaaggaaaataaccatgtcttcatagttacccatgctttcaactcagttgttagttataagtgagaaggtttgttttaaatgggtcaagttctgcttggattttataatctgtatccaaatagtatggtaaattcactgattctgccttttctatatatattttagtcctgtcgattaggccaacacagacctatttctcgattgttgacggatgggatcatgaaagtgggagctactgcatcaaagaaactttcagaaaagtttgtaacagaatggttttctcaggcagctgatggtaacaatgaagcattttccaaattgaagctgtatgcacaagtctgcagatatgatttaggtattaaatttgtattcatcctacaagagcaatgtgagcagtatgggttggttcaccatctaagtttgtaaataaaatctttgtgtcatgtggccatctccatgttttcaaacactgtctctgcctgcttttgtcctgcaaagtcagaactgaatagatgtggcaaagactgtggtttcagacttaagtatgcactgtctgactgtccatagaaagtctgctagctctgtatatgggaatgctatcaagtagtcattattggttccaaaatattctctgctgcttctgtggagtctgatgtttcctgccattgatcccagcattccggaggcagagtcaggatctctgtgagtttgaggccagtgtggcctcaagacaacagggctacacacatagtaagaccctgtctttaaaaacatttttttttg

SEQ ID NO: 20327 - DNA, 1195 bp, Mus musculus
aatgactaagcttgggcaagccattcttaatagttactaagtctgaaaaaccaggtatatttacaaatgaagaaatttcaaatttccttatactttttatcttaactagattcatcgagaagccaagatagtaagatgatgtaagttagctagctatttgatcccagagctattaagtgaatgtgagttgatttaaaattcttttagaagacaatatgtgcatgagtgttttgtctgcatatatgtatgtgtaccatatgtatgcctggtgcctgaagaggttagaagaaggttccttggaactgtagttaaatatggttgtgagttaccacatgagtgctgtgaattgaaccagagtcctttgcaagagccagtgctccttaaccatcacaccatctctcctgttctgcacatgggctttatgaattgttctgtacaagcgatttgtaaattcaaatcatcatatttttagagttgcatatgaaaaaccaatgaccttactgtctcaaaatcttactttatatattttgtctaatagttgtatattaacataaataacctaaattttttttttttaacttttcaggcataaaagtctcaagacaagaaatactgggcaacaaggacaggcaccatctttagggcagcaacagcaagtacttcctaagcacaagaccaatgagaagcaagacaagagtgagaagccacagaagcgccccttgactccctttcaccatcgtgtatcagttagtgatgagattggcatggacacagattcagccagccaaagacttgtgatctctgctgcagatagtcaagtgaggttttcaaacatccgaactaatgatgtagcaaagactcctcagatgcatggcactgaactggcaaattcacctcagcctcccccacttagtcctcatccttgtgatgtggttgatgaaggagtgactaaaacaccttcaactccgcagagtcaacatttttatcaaatgccaacaccggatcccttggttcctaccaaaccaatggaagataggatagacagtttgtcccagtctttcccacctccatttcaggaagctgtagaacctaccgtgtatgttggtacagcagtaagcttggaagaagatgaagctaatgtagcctggaagtattacaaagtcccaaagaaaaaagatgtagaatttttaccacc

SEQ ID NO: 20328 - DNA, 1205 bp, Mus musculus
gctttgtgtgtaagctgtgtttagcatagctacccaggggaacttttaatgtcatttatatcatgaattgttgacctcaagagaagttgttttataaggttgctgattgctttttaagtactggaagtatcttctttaattttaaatgtagtgtgtgttttaaaatttatgtggcagtacttcataaatatttagatttatttatctacattttcttcaagttgcttagagtcagaataaattgaataataggtaaatattcccagttcattttgaaatatgattatattttgattttgtggtaggcatattttaagcaattttcaaaatcttagcgttatattttatattaaaatgtataataaatttactttcttggagtgatgataatagatttccttttttattagtcttacatcattataacactgtttatgattttatttgctgtaaatctttacttactggatatctgctttggtttctagttatcttaagtccatttggactaaatggcactctcacgggacaggctttcaagatgtctgattcagctacgaaaaaattaattggtgaatggaaacagttctatcctatttcatgtggtttgaaggagatgtctgaggagaaacaggacgatatggattgggaagacgattctttggctgcggtggaagttcttgttggtatggattctgatactagtctgaagggggtcctgtgtgtttagattttactaaataacaaaccgctctcttggcattcagtaccaaacagttatttcttgcttatttcctctgcacatcacacaagggctacagcttggctgtgatgactgtctgcatgttcttcctgtacagtccaggttaagaagcacctagggtctgggacacagtgttcctaggaaaacaagggaatgacagggatcacgcctgatgatgaaagtgcattaaagtttctgctgagatgaaaatgagctaaaggaatggtacatttgctcccagtgaattagacaagactggttacctgtccaagccagagttactgggacagaggaacatgctttgttgtccacatgttatagaagggaacaagattaattgtgaaacagttattatttgggggctagaaaaattgacagcctgtattatgtatagtgcttgaatatttaataaaactttcagtaacagaaaatattcctaaat

SEQ ID NO: 20329 - DNA, 1152 bp, Mus musculus
ataaactgttcatagaattactgccagcaatagtggcaaatatcgcaacgtttttgtgtagaacgcattaattgtacaccttctgtcgacttccatctacacaaatatatagcttttctatcacaacattaagtgaaattgatgctgtggcaagtttattgagaaactttcataaatggatatccctactatgactgtgaaaacatgtcaggtgtcacatgagtgtcacagacagaaagcacatgcctatgcaatatggcctactctgtatttatttgtaaaaactgaagcataatttaaagtgtatatcaatactactctgagtttctaagagaggtgttcatgcttgtaccaggtaagtgaataaaaaaaaagattaagtgctttttctttcattacttgattattttctttaaaatcagctattacaggatatttttttattttctacattctgttttttaattaatatgtactcactgaactgaaatttactaaatttgttttataaggtttgtagtgttacagaataactaaactgggatttataaaccagctgtgattaacaatgtattaattatttgaacttgaaccagaccattaggaaaattatgttatttgttccccttgtatgctcttaacttaaagaattttcccacataccgtttttgagatagtttgagatttgaggataggatgcatgtgagagactccataaattcaacattctgtactatagctgacaactataaacaaaatgtatcttagcattaatatcttgagccttgaacatcatatttaatacaggaccattttagaaatattcagttagttgtatatttcctaggttacaagggctagatctaagattattctcatgagaaatgttgaatttatgagaaatggattttgaggctttgaaaatgaaaatggctagtatctcaaagatgtcagtatccatacatctatggtttcatcccaggagcagacattagctagctggacaaacagttgtgacaatatttgtcacataggggcctatggtttgttgctcaacaatatagtacttttctcatgtgactcaacactatagcacaagtattatttccctggattctctgaaggagcatctaaaagacgggtttctgacag

SEQ ID NO: 20330 - DNA, 1567 bp, Mus musculus
atgcaaaatcaaaaaggaaacaaatccgggaaggggatgtgtgagcatcctgcaatataaaaacaagaataaaatggcagtctcaaagagtcagtgtcattacctggaatgctttcgatggaggaaaaaataaacatggattttaaaaaatcaatcaaaaatggtgcaaaaaaaaaaataaacccacaaaaaactcaagcaaaatagtattgtggaatccacagacacatcagctgactggttcctatcctagcaacatctcggcgttcgcaagggttctcatgctgatggctgcaaactgacagtattaagggtaggatgttgcttcggaatcaccgttgaaatctgatgatgtcaaataagggttatcctaataggcaaagtttgagattgcctgtaatacttgcaactaaggacaaattagcatgcaagctttgtcaaactttttccagcaacacagaatcaaagacaaaagaaactttatcgattgatgttttacgtgcaaacaacctgaatcttttttttatataaatatatatttttcaaatagatttttgattcagctcattatgaaaaacatcccaaactttaaaatgcgaagttattggttggtgtgaagaaagccagcttctgtcttctcttgatgaaataaaatgcaaatgatcattgttaaccacagctgtggcttgtctgagggcctggggtggacctggggtgtttttttaatctttttgttttagtaacctagctgcaatacttgtctgtaatactaggggggaaaagtctgtttaatcatttttacttgcagtactgctgtgtgtttggcgtaactgcaagccttgggacaggcagaagttgtatgatctacattgcatccttgtcctgggcctgcactacactggaaacagtatcaccacctgttcttataccagtatttgagtcaagccttggtcgaggagggacagaagagaatcaggctaaagtgcataaagagggcagtaagcgggggagatagacctgcaggggagagggtgttgccacgggcgtctctctcgactctttacagcacattggtgtggttctaggtttactttgtactgttatgctgtttaccttccttaacaattttcttttttgagaatctaaaaaagaaaaaaatggtgtttttttcccctcctgcactggggctacatttttcacttataaaaatatttgatggccttttgatgaatgtcttccataacgaataagaaaacctagtggcttaatttaggaaacatgttaacaagacactgtttttgaaattgtaacaaagtcaacataagtgatttacaggtacaaagaataaaaataaaggtaactttacctttcttaaatacttcctgccttaaggagcatttccatgactagctggtgaaagggtttaatatctgcagagctttataaaatatactgcagtgcatactggtctaggtagatggtcacacagtgagtcctgtcacgccactctgttggtcttttttgtcttggtaatagttgcagcccttgggtttctttatgcagatgc

SEQ ID NO: 20331 - DNA, 1169 bp, Mus musculus
tgtcatattcagtaaaatttaggtgacttaattgtgtactaacttttttacatatgagaaaagtactagagaggctttaatcaagaccttttaaacttcaggcctaaaatctatatattttgaaatttgcagatataaaagttttaatttcaagccaattttagttctcaaacttagtgttttaatagaataacaatgccgctaaaaatagcttcctggagattttaaaaccccagtttttagcagctttttgtttttgtttttttaatttttaagaagtcagtcttacaaatagaagaaagcataaactcattagaagaggactggaagtaaagatatttattcctaatacatttcctttgtaggaggagaactatttatgcagttagaaagagagggaatattcatggaagacacagcgtggtaagtaaagtttttgtggttgtatggattcaggtcatgattcatgtaattaaaagcaaaaccaccttcccactgtgggcagccacatgattcagtaagttgatctggaggcagtcagtcactcagaacatcaagggggacctttgggactgggcagctattggagatcacgtgattcctttgcccccaggccttgggtggaccgctcttcactgcagaatttccttgaattggtaagctgcctgccttggttgtgggtgagtgtggttttccagtgaaattttgtatgtggagcaatggaaagtatcagaaatcatctcctcttttttttagactttccagttcccaaggtgcagtcttagggaggtgataaccctgaacatacatctgtggattgattttatagccaggatgggatctgccctcctattcgtaagatggcatctgcttcaaattaaaaatatacacatccttttgtgaagtgactgtattgggtaacaataaatcagtttgacctacacattaattgattagaaaacacttaaatgttttttctatcttaattaccaaactgcattccattgtttaatttcaggccttttctaacacagaagctgcatttaagagccttagggatgaagtgcccctttttggaggaggctctctgagccctgtggaggctgtggtcctgctagctgtgaaactgcctcagtcctctaggacacaccctccatcctggagtaatc

SEQ ID NO: 20332 - DNA, 1148 bp, Mus musculus
cgtattctttagggtggatgtgatgttctgctgcaaacttaacaaaaactggccttctgataccttcacagggccacacagaaccttctgaagtatgttaaatatgtcaggctttttaggcttgtcacaaatgattgtttttttctaagtcaccaaatgtatataagttatatatattggatagcaatcttgcatgtctatcatggaacaatttaatatgccttcctttcccaccctcaaaaaggccattttatgacgcattgcacaccctctggggaaattgatctttaaattttgaaacagtataaggaaaatctggttggtgtctcacaaatgagtacgccattttttattctgtatatttagaatgaagtcgtgaaaaactttataaagacatctttgatcattccgaaattgtgtccgttttctttagtgctatggttttttgtttctttttcacttctacaaagcgagtggcagccttgccaattagacttaaaccagaattgcccaggcttttatgtattgcctgagagagctacctccaaggtgttttgttgttgggctggagatctaagcgggactatgaggttcacctagagtgggaatctcttactttataaaaacaagaagtggtgatgtataaatcagaggacactagcaagaaaggctttttcatgttcatgttagttttagctgtttgtactccggctttaacaggtggaagcttacttctctgtgtgatttctgtgttttatttcaatgtgattttcctttgacatttttttgattgaccctgttcattttgttttgcctggtaggaaaataaacagctttctttcctagaattggcattaagccccagcaaaccagagatgtttgctttgctttaaaccctgcctgagcacctcgtgcttgccccctgtcgtggtcgtgacatcgcatggctgtaccaccttgtcggatagcttatcagactgatgttgactgttgaatctcatggcaacagcagtcgatgggctgtctgacattttggtatctttcatctgaccatccatatcaaatgttttcattcaaacattacccagcatcatggtttgcagtcaaaaattgtggtccttatgtcttgtgagacttggagcccttat

SEQ ID NO: 20333 - DNA, 1148 bp, Mus musculus; identical to SEQ ID NO: 20332

SEQ ID NO: 20334 - DNA, 1578 bp, Mus musculus
gtcttcagacactccagaagagggcgtcagatcttgttatagatggttgtgagccaccgtgtggttgctgggatttgaactctggaccttcggaagagcagtcgggtgctcttacacactgagccatctcaccagcccgaaatgaaatcttttttttttttaattaattaattaattaattaattaattaattacatgtaagtacactgtagctgtcttcagacactccagaagagggagtcagatctcattacggatggttgtgagccaccatgtggttgctgggatttgaactctggaccttcggaagagcagtccggtgctctaacccactgagccatctcaccagccccccgaaatgaaatctttaaacatgaaaataactctatctttcccaggcggctgccgaagatggagaaggggcaggttctggtattggatggccgaggccatcttcttggccgcctggcggccattgtggccaagcaggtacttctgggccgttaggtggtggtggtcgtacgctgtgaaggcatcaacatttctggaaacttctacagaaacaagttaaagtatctggcctttctccggaagcggatgaataccaaccctcccgaggcccctaccacttccgagcccccagccacattttctggcgcactgtgcgaggcatgctgccccacaagaccaagagaggccaggctaccctggagcgcctcaaggtgttggatgggatccctccaccctatgacaagaaaaagtggatggtggtccctgctgccctcaaggttgttcggctgaagcctaccagaaagtttgcttacctggggcgtctggctcatgaggtcgggtggaagtaccaggcagtgacagccactctggaggagaaacggaaggaaaaggccaagatgcactatcggaagaagaagcagatcttgaggttacagaaacaggcagaaaagaatgtggagaagaaaatctgcaagttcacagaggtcctcaagaccaacggactcctggtgtgaacccaataaagactgtttgcctcaaaaaaaaagaaaataactctatatatgatgggatgtaggttcctaacttctcttcataactagttatttttctgacactgcttacaaacaaatttcttttatttttctatggtactagggattaatgcaagcgtgcgcatgctgagtgagtcccctgtcattgagccctatcctcaaccttctgcttttattctgagatgatgtcacactaagttgccctggctggccttcagttcactgggcagtcctggcaggccttgagcttgccttcttcctgactctgcgtagctgggattataaccccgtaccaccagcctggcttccagggggtttaatcttgtctcacattgtggctaattagttactaatgacgtattcaagacatgctagcctgatatacctaccttcccgagtgccttctcggtggtgctttaaaagtgcttcagtaatcacagcagaatgacttcagtggcctagaatttgctcatatagatgaatgtaaaacttgtagtttgataggagctgcaaa

SEQ ID NO: 20335 - DNA, 2062 bp, Mus musculus
gtatggcctgataatgtcaaatgtgcatgtgttactgctttaaatataggatgttgtggccctcagccctgctccgttggcttttttaaggcaggaaccttctcagggtgagactgtattccaaattgggacagtcaaaagtgcccacacacaacttactcagtgaattgtgagtgtgctgcttgagtgggtaagagtgctgagcctggtgctaacagattctcctcctctttgtcatcttaggtcagccccagctgatgctaacagcaggacccagtgtggcagtccctccccaggcaccttttggttatggttatactgcaccaccgtatgggcagccacagcctggctttgggtacagcatgtgagatggaagctgatcctgtagtctcctattttcatactgaagcatcctctacccacttctcagtttataaacggggaaacaggcaacgtgttcttgtaacctttacttcatgaaggactacttttttgttctaactatagacttgggtcgcctatgttaaaactttattttcacattccgcatcattagaccttcttttcaaaggggaatagtattcatgtgggcttttttctccccctcattctttgaagaactgcttactattcaatctattgtgaagaacctgatttgcactctgtagtgtttaaagaaacaaagaaactctaatattgaatctcttaaatttagtgtatgtaaacagctttcactatgtattgtctaaatgcatttaaatctcttttattcaaagaaaagctaaggtgaaaatactggtatgtgaccatgcaagactgtcaatgccgacaaagacaacactaatcagcatatcctatattggatcacagtgctctccaaattatttgaaaaatgcatacagacaacttgcctgattgtttttttttttttttaatgagtataaaaggccctttcacctatgcaggtttccccattatgcatatagaaaatgctagtgtgtgttgctcacttcatgtgtaacaggtgtcctcatgttgtgctgtatcctgtgctttttctgtgggaccattccattcaggaacaagaagcaccatgattccacgcgtgtgtatttactaaccctcccttccctgaggtttgtgtatgttggatattgtggtgttttagatcactgagtgtacagaagagagaattcaaacaagatattgctgttcttcagttttgtttgtggaatttgaaattactccaatttaaaataaattactggactgtggaaataacatgtagaattgcagttttaattaaatacatctcaaaccagaatcatggttttcatagtttcatactggatactgctggagcattaccgggagccatagagggaaattatgaaaaagagatgcattatgtcaattacattcctgtagttatgaaagattatacagcagtcagtgaatagtggactccttctcacgtttccagcattttaatcaagtagcactccagggctttatgcatttcacgtaactaagaaaagtatgagtgttacactgacttgaaataaaggtatattttttaaaatatcatggtatttcttttcaacataaagggctccataatttaaatttttgccatggctgagaatattgaatttactttgttaacaacttaattatctatagttatagagcatattgcctagcttctattgctctacaactctcaggctaattaacatcagcttcacatacacacccttagcaaattagtattactgttaaagtcacttttcattcgtcttagtgaaaccgtgaactctcaggctagagctgcactgtgttcccagaactctacctactaccgtaaggaatcaagagatatatcagtcagttcattcttgacttttcctaaacttgtgaatgatgctcttttcccttaatagaaacaacttgaaatctcatttattttatgagtacgggtgttttgcctgtgtaaatgtgcatacaatgcccccagaatccagatgaggggctcagatcctctggggtggaagttaagtta

SEQ ID NO: 20336 - DNA, 1197 bp, Mus musculus
acagggtctcttgttggcaaaagtctcactaagtagtttaagctagctggccagcaagcacaagggactgatctaccactagtttggtgctgggattccaagcacatgcaacacctgaatttgtgggtcataggtattaattaactcacatcctattgtttgcaaggcaagcactttccaactgagttccacattttaacacatgaaagttcaatgattgagtaattttatcaccctggctgaatcaatattttagggctatgaaattaaactgttcttaggagatagagtgtgtgtatgttcattcattttatttgtaatttttgagatacaaaattcagtggcatgaagaatgggtatttgttactcctgcctcaacttctgggtgctgaattttacagcatattcaactaaacccatctgttcctttgtagtaagataagaatttggaaaagggattaggctgaaacctgtgttttactgatcatggattgcttttcctccttaggttggtgaccgttgttatgatgaaaaaatgtatgatgctgctaagttgttgtacaataatgtttctaactttggacgcttggcatctacccttgttcaccttggcgagtatcaggcagcagttgatggtgccagaaaagctaatagtactcgaacatggaaagaggtaatctaaacccaagtttgaatgatgaattaacattttgtttgatttttttttctcttgtaccgttgtactgttttttcttttctgttgagttgaaataattgcacatatttatacttgggttctcatagtggaaaatgtttattctaggtctgctttgcctgtgtagatgggaaagagttccgccttgctcagatgtgtggactccatattgtggtgcatgcagatgaattagaggagcttatcaactactatcaggtaacgacaccaggcctttatgtgaattgaaaccttcgtacacatattctctcctctaattgcattttttctttatgtaggatcgtggatattttgaagaactcatcaccatgttggaggcagccttgggactggagcgagctcacatgggaatgttcacagagctagctattttgtattctaaattcaagccacagaaaatgagagaacacctggagttgttctggtcgagagtgaatattcctaaggtaaccaaccagtcttca

SEQ ID NO: 20337 - DNA, 1207 bp, Mus musculus
ttttctctttttcaaacataggtaaatccaagtcgacttcctgtggttattggaggattgctggatgttgactgctctgaagatgtcattaaaaatttgattcttgttgtgagaggtcaattctctactgatgagcttgttgctgaagtcgagaaaagaaacaggtgtagcactgttttctctccttataacacacaagtttgtcactcctggtagtgtagaagagttgaaatacggctgactgacttgagtgtggcttctcagcacatggggtaaatcatggaggcagctgacagaagggtgacacacttgctcttagagttgaaaggtttttgtttctgtcattttctcctgaaatgtgattgtatttgtatagttaggagaagactgtgctgtttttaacacagtatgtctgggctctgttgttcttactagattgaagctgcttcttccttggcttgaggccagaattcatgagggctgtgaggagcctgctactcacaatgcacttgccaaaatatacattgacagtaacaacaacccagagagatttcttcgtgaaaacccttattatgacagtcgtgttgttgggaagtactgtgagaagagagacccccatctggcttgtgttgcttatgaacgtggccagtgtgacctggagctcatcaatgtgagtactgagtgtgctgagtgtgtgcagagatacctgtagttctctaactagttgtatttccagttagcaaattttgagattctatatgattttttttagttaatgtgcaacagttgtgggcagatgtgtgctttttaaaactttatttggaaatagtagtaaacctaagtctatatacactctctcctgaattgacatgtattagctttgcttgggttcttgtacacggcctgccacacaaagcattttaactaggttacatacctcatggatttgcatccattccggttctactttgtaagaatgaagaagtatctttatgtgggtactagcaacagtcagacattagcaagatactttaaaaagcttgttttcagttttgtcagggttttctgtagtttaggatcacaattgtgtccactctttagcctctttattctaaattagttcttagaaatttgtttttgtttgtttattttgtttttaaatgattgatacctttggtaaactaattttttatttgtattttgttag

SEQ ID NO: 20338 - DNA, 1176 bp, Mus musculus
ctcttttctcttttttcttttgttacagggtctcactctgtagccctggctgttctagaattcagtatatagaccaggctggagatctgcctgcccctgcctcttgagtgctgggattaaagatgtgtgtcactagggctggtttaagaaaaacacagtttaaagttgttcttgatgacattttagaatattcagctctttccccaggtggtgacacatacctgtaatgtgtacattattaatatgtacaacaggaagtagatggcctctagtccataaaaggctttgattcctttattttttttttaaggcacagttattgattttgtctttctactgccttgaaaatttttgtctggggagaacaatgtgcataagagctagctctctccttgtatcatggaaggcccaggggtcaaactcagatcttcacatttggcacaagtgcccttactctttgaatcatctttcctattttttttgagatagtctcactttgcagtgtctaggctggccttggtatgtggtaaaaccagcatcttccagaaggcatcattcttggcttaggtttcttatattttactcttcaattttttttaacatttatttatgttttcattttgtgttgatgtttgtgatgatgtttctgtgcccaggccattgcatggaggtcagaggtcaactcttgggagtcagttctatctttgcatcatgtagttactgcgtctagaactcagaatgttagtctccatataaacgtctttacctactgagccatcttccagcctctgccttagatgcttgtatttttcagtttatctttggcatcattttcaagatcctttattgtaggttaaggaaacatctagatttacttctagcatcacatctgtctgaatccagaaatgaagtgttaatgtataatttataaaccaagtgggatcaagataaattgactttgtgacacatgaattcagttggagagaataaaggctgcctctggctggagtgaagaataatgtcctaaagaatgctaagctagagaatagtaagggtttttaatttgtttaactttgcttgttaacattattctcataccagttattttatggggaaaagtaaaaatttgtagctatctatcaatgaaagatgagaaaaattcttaaactcagagag

SEQ ID NO: 20339 - DNA, 1213 bp, Mus musculus
tatatatgttcttccccagagtaaacatctttcatttaatcagtctttgaaaagtgatatgctatgaagaggcaattccgtctcttacctcagctccaggctcaggtactttgagtccctgtaatggaagactctgtcattgtaatgtttttgtcatactgaattacagttgcttgctgtctcagttttttgtcttctttgtttaattgtatttctagcaccatccaaaggtggttttgaaaagtaagaagctctcatctctctatttagttgtgtctctgatagaaaaaaggccaaggatgagtcagttagggatgatctgacagtcaggagttaaggagcctgcggggcttccttctctctgctactgtgctggtgttaaaggtgaagcttaacctggagctccttctatcactttaccatacactgtaaccatgcagcaaaccaagcaagcgtcagcataatcaattacctagtgactccgtctaaacagatctagcacagtacaactattctcttatgggtaacctgcaggtcctgtcagtttgtgtggaagaggagaacataattccttatatcaccaatgtcctacaaaatcctgacttggctctgagaatggctgtgcggaacaacttagctggtgctgaagaactctttgcccggaaatttaatgctctcttcgcccagggaaactactcagaggctgcaaaggtggctgctaatgctccaaaggtaactagttatgaagttaaggttggcatgcttgggctggtcttactgggctgtatttttgatactgctacaagaggaaccagctctgtaagattaactaactcctttccagttagatttttcttttaataaaatatgataactaattctcagtgtctctaggtttggtgtgtaaaactgcagaatcttagaaggatttatagacttatagacctatagttgatgtaggcagagttatgtccacttactaaaatacaatattatctgggctcataattgatggctttctattttaatttgagcagttagtattggttggtgttatagtgtgtagagttgtcagaaaatgagcagaatctattcccataggccttcacatcagtgttagttatggagtgtgtgcttactgaacttgacttaatggctagtggttactgttgcaggaatgggtttatctttttgtcacctttaaatttttttt

SEQ ID NO: 20340 - DNA, 1192 bp, Mus musculus
caaagcaagaacatctctgcttaaagtttttattgtgttacaggcagcagaaagaagtgactacatatgggcatttgtgggtattggagaggaaggtgtactgagaatagagctaagggaaggcgtggggaagagagggcagtgaggtgcctgccgcaggtgagattgggatcccaggctgagtagctgggaaagagcttcctgagatggtgacgtttgagcaaaagtttaaaagaggaatgatccaaataaattctgtcatgatactgaggaatcccagatgtccctcggttgtgctgctaacagcaggaactcaggacacttgcgtgctggagtgtttggggcacctgatggctgtccaggcgcctgtcgtcagccacatcgctgcttctgtgtctcagaagtcatctgtgcctttggtcactctgtgtcttttttttctcttcctctgttttataggaacatgcttttgaaagcagtcagaaatataaagaaggcaaatacatcattgaattagcacacatgatcaaggacaatggctgggactgacctgatagcatccatccggtccagcatccatgtgaatgccacccaactgaacattctacccaagcgtgagagagtgactgaacacactcggttccatcaacttaggggccttgccatcaggggtcatcctcccaccctgacaccatcatttttggtgactggcctctaaatcactgtctctctgtctctttgctttgtatctgtttgtgagttgatcttggcttctctgttctagtgttggctgaaaacagttacgagctggaacggacccttggctgcatggtggcagccctacttgagggggggtggccctgcccacatgagagctgcctgatggctgtcagaacatcggcatgtgagcatgagcaacagaacaggggaacctgggagtcctaggattggggaaggggcaagagggtgcaatataactgtactgttcttggagacctgctaacttaggcttgaaataattgactccttcaaaaggacaaagagaaaaaaaaatacctcgtggcttttgttctctctgatgatacactcctgccctagcatcagatgtgccaggacagcggattagcacaagaagcatccttgattctagctgacagggcaggaccctagcattctggacctggactggaga

SEQ ID NO: 20341 - DNA, 1124 bp, Mus musculus
agccaccatcacggatgccggtgggcaggtgatccactttgcatttcttctatttaataagaaaacctcgtatcacaggatgctgggaactcactatgtagcccaggctgtactccttcctcctgcctgtttcccagtgctgggattataggaatgccccttgataccggaggaaaactcaccctagtattcttactcttcttcatttctgccctaaacacaggcacaacaggtcttattctcaaattatagcacagacagacagacagacagacagacagagtgcacaggaaaatctgctgaatccatagctgctgaatccatagtaccgagtgtttgcacattctctggtctcctagctcccctcttcctcactttgtagattgattcttcactcaacaagacaacttaaagtctgaactcttgttctaaaacacaagaaatagaaagttctgaatagaggtggtagttcactagtaatgcccgctgagcagtggtagcacaggcctctaatcctagtacttgggaggcagaggtaggccgacctctgcattccaggaccaccagagacgcaagagtctctgtcttgaaaacaaacagaaaaaaaaaagctgtagtttgtatcattattattttggaacagtaggatttggtttcttactgatctcagaggctctgccagaagagccccttatctactgcttgtgcctctgtcattacccacgtgacttccgggagaggtgttctgggataatgtataaatgctcgtgtgcttcctcactctgcatgtgagatagtcctttgtcctatattgggaagaaaggccttctgtagggctcgctgagaggctccacgggggcgggatggtggtggaagcaacctgccagggaggtggagagggtggggtgggaggaggttctgcagctcgggggttcatgcagtgtctagtaccctggagcacagtagtgaaagaaaagcacttgattcacctgaggtggaaacagggagaacagaaagtaagacctgattggccttatagtctggaggtacttgctatcctacttatgtataacaggtgcagctttttgttgttgttgttgtttttgttgtttttccgagacagg

SEQ ID NO: 20342 - DNA, 1297 bp, Mus musculus
acacggggtggggagctaaggcaagaggatcagggggttgaggccagcttgggctacatagtgaaaaaccctgtccttaattttttttttataagaaagcagaaaattattgaaggccattacagccgttctgaattatctcgtatgtctaggtgcgtcttagtttaggggaaattgaggggaagaggaacccgaaggtgcagccaggcagtgtgtgctgttcacagggggcaaattcaagccagtaacagtttgttattactcagaaacccaatctgtgagctgagacagactcctgggttatggttgtcaatggagacattccgattagagtcttttttttttttttcaggtgtgtgacaatgctgtcatgcctaattttttcttatgtctttaaaaaaaaaatagacattataaaataagatccaattagtcatgtttttatgtttccttaaaaactactcgattcttacctttgggcttgactagactgatcctgggtctgagttgtcagtgatgtggcaaccctatagtgattggctggtgacaacactgttgcgggcgtgtttagcatgagccacatgctcctgatctctctcacttctctgaagcgcagacccagccagagttaacccagcattatacaccacttctctgccttccgatgtgactccatgcagacctgtccctggcctttgtgactaatttaatgatgtcagattgggagataaattcagtatagagtactagacgtcttttgcctaaattatgtctctgctgtggggcctgccacgcacagctatggagggcagcctcatgctcccttctgttgctttgtggtctaaattgtaataaagttttccaagaataaaacgaggtattgattttcttttatgcttgtgattccagtgtgtttcatgtaatttttttcagttaatgaggtaatttatcaataaatgagtcaacctgagctttctcactattgtgcataaagacaataaaggagaacaggattgcagtaaggaagtcgctttctggcatctggacagacagcttgtgcaagataatccactagggcagacactttattcttgtatattatacactgggtttctctgtgtagccctggctgtcctggaactcactctgtagaccaggctggcctcgaactcagagatctgcctgcctctgcctcccaagtgctgggattaaagacatgcactgccatcatccagctgtggtttattttgaaattttgcttcagaataggtcatattgtaaatgtgactagcacacg

SEQ ID NO: 20343 - DNA, 1162 bp, Mus musculus
ttctggacctaggcggtaccaagcgatgagacagcacagccgccaacagctctccttccacattgatagcagcacctcgagttcttcaggccagctagtggatttcactcttcgagaattcctgtggcagcacgtggagctggtcctaagcaaaaaaggttttgatgacagtgtgggcaggaacccacagccttcccattttgaactgcccacttaccagaagtggatctctgcagcagcaaagttgtatgaagtggctatcgatgggaaggaagaggacttgggctcccccactggggagctaacatctaagattttaagcagtattaaagtcttagaagggtttttggatatagacacaaaattctcggaaaaccggtgccaaaaagctttacccatggctcatagtgcctaccagtcaaacttgccgcataattacaccatgacagtccataagaatcagcttgctcaggctcttcgggtatacagtcagcatgctcgaggtccagcctttcacaaatatgccatgcaattacacgaagactgctacaaattttggagcaatggccatcagctgtgcgaagagaggagcttgactgaccaacactgtgtccacaaatttcattccttacctaaatcaggtagctacaaagttcccaacagtttgaactgaaaactggagctgtgcttttagtattagtgtgtgtttgtatggtgtggtgtgtgtgtctgagagagacctcgcacccttggaggtcagagggcaatgttgtgaggtcagtagtctccaaccttttcatgggtcccaagtatccagcccatggagttagccttgtgctgcaagcactgtgcctgctgtgtcatctcactggcacctgagctgggtgtgtattcatgtattaagatgatttatttggtacataattgggttgttttttaagagccctgcagaactttgatagtaaatacttttttttttctttctttgcttttatttgttttctgttgttgtttttgaaacaaggtctctatttaatcctggctggacctggaactcactatatagaccaagctgacctccaagtcacagaactcctcctcctgcctctgcttttgaagtccatgtgccactgtacccaattagtaaatactttctacttct

SEQ ID NO: 20344 - DNA, 1511 bp, Mus musculus
ggtctgtggcagttttatcaggaagcctggtccccgcttggctccttaccagcctgcgtattctggcagtgctgtagctcccactggacttcaggcttgctagtctaaggctgtcagacttagcaaatgacaggataaagtactccattaaatttgaatttcagataaatcacacacaaaaaagctttaagaataaatctgccctactaaacaacaaatatttgagtgttacatagaactcacggccaagaatgtgtttaactagtagaaatatctccttaatattgaatgaggtacacttacatttaaaaactacatttaattctttgcaggagttcagggatatagtgcttctctcgaatgttcacggccctaggttcaaaccccagtactaacacacaaacgtatgcatacacacactcattcatgtgatggttaatatcagttatatacgtcatgttatctataattacctggaagatggctttccatcttgattgggttaattgagatgggataacctaccctcagggatagactaccctgagctgtgcatgcagctcttgattccttcccttccacaacggagtgtgtggtagaactataagccaaaggaaccctcccttttctcagctatttcatcacagtgacgacaaaactaactggtcattcatcatatctgtgtatatatgtcttattctctgaaattcacacttaactgagaaccttatattttacctagctaccttgtttgtccattcttgaaaaattgcaatttatttctggaatcccatggtttactacatgtcttcatggcactgaacactatgtagcttcagccaggaagccatcacatatgttctaaggggagtagatggatcatttcgattaaagtgagtatcgctcaagatgcagaagtagctgtctttcttttccagtgcagaggagcctcggggctttgagcacgctgggcaagtgcttcttgcaagtgatctgagccatactcccagctccagcatcacctctgatgctgttattgcacaatggtaggaaagagacagagcatagaggtgtatttccagaaatcccattatttctattgaatgatagtgctttgagatgccaaatggtggtgttggaaagtcatcagactggaaagtggtcctggggacagtgtttagtacctaagaggcagtcagtttaaataaagtaagggcttttagtagaatgtcattttgtgggcagctataatgtttacaatggtaatgaaccactatatactgtacatttgatcattcttctggcataaaaggctcgtttaaaacaaaacaaaacaaacaaacaaactaggatgggcatggtggcttttgccagttgtcccagttacttggaaaactgaggtggagggaagcctgggcaacttggtaagaacctgcctcaaaaaaatagaaatcttacaggtaaaacagttatagggactggagagatagctcagcagttaagagcactga

SEQ ID NO: 20345 - DNA, 1501 bp, Mus musculus
gggattaaaggagtgtacaccattgcctggctttttttttttttttttaattttttttttttttgagatggggtcttcaaaattcagcacacagttatttctctgggtaaaattcctactgttttggtctaaatctcttttccaaatatggtattcaaacatacatttagttctgttaaatgatagtcctttgtttgatttcttgatcttgtttgtacagcctaattgcaagttctttgaaagcccaactacagtatataaatagccagatggctattgttttcccttgcctttcaaatttcaagactaaatatgtagtataagattatgaaaacgtttgtgcaatgaagcaaaatttaactcgtttaacaacctttgaaggttttgaaataaacattttgttatttgtttttctagctaactctactgactgaagaagagaaagctgcaacagagccattaaaatctcatatgccggactgataaaaaatgttaaagaggaaggctggtggaaagaagaccaactgcagagattgggcgagacgtctagaggcggggctgatgaggaagcctgacatttcccttgaccgagaggatcgtgatgcatttcagatgaggaaattgtaagaagcgtagatgtcctgtgactgaaaaccaaaaggatgggatggaaataaagcaatgtaaatactgatacccagcattcattttaggcaatgaaatcccttagtactacttttttttttattttctgttttctttttgtatagtgttggcataattttagatgttttgggattttgtaaaataatatttatgtacattttgttcagtatgtaaatgggcaaaatacttgtataaaaattcaggtgttgtttgctcttttgagacaaggtttcactatgtagctctggctggccctggagctcactatgtagaccagaccagctctgaatcctaaagatgcctgcctttgctatcacgctgggcattgtctgtctgtctgtctgtgacaaggtcttccatatcccaggctggcctcagatttggtgtcaatagggataatatttgacattggtacttcctgagtgctgggatacccagtgtgcagaagcacgtctggtttgtgtagtaccagctagcacggctcagctgagccacatcccaaccctgtatttttttttctttaatgtacattacagttaataacacacttacttgtatgtatatactgtccagttttcccaaaatctaacaaattaataggatgttttgtgagaacttttattttttttttcctttttcccattgcttgctagtaataaaacatcattagtttgttttcaaatgctgttttagactttctattggtgttacaataatatgttatctttcagtgtagttttgtatttgtttattctatatgaatgacagactaaaatcactgacacatctgctattatccagtgtgtgtgtgtgtgtgtaaatcagtttcactatt

SEQ ID NO: 20346 - DNA, 1099 bp, Mus musculus
tggtgctgtgaattgtacctgggtcttctggaagagcagcaggtgctgagccattttttcagccttctcttgttttttaagacaggatctcactctgtaggccatgttgggctggaactagagataatctcacttcagtgctgggattacagacataaattttcataccttcttttaaaatttgttataagcacagaactctgtctgcctctccctcctgagttctgggattgcatgctgtgcaaccaggctgagcctgatagattactgttctgagagcaggtcccagtatatggttcatgatggcctggaattcaacttgccttacgtacctgtgtgtgaggttacaatcacctccaaacccagcttaaggtatatactgagaggtgcacagaaaaccagtttagtaggctgagaggagtcaagaaggtactatactcaaaccggccatggagttccaggtgagtcgggccacacagcaagacttgctttcaaacaaaatccacacgtgtgaatgttttccccttccatttgttttccaggacttgagactctgtgaccctcccggcctggagatggctcagagtttaagagcactcactgttttttcagaggtcctgagttcaattcccagcaaccacatggctgctcacagccatctgtaatgggatcttgtgccttcttgttggcgtgtctggagacagctacagtgtactcataaataaaaattaattaaaatagactctgtgatcctcaaatattgccagtaaaattctctacctcaacatttaaattgaacatattcggattacttgttcattttgtagttttggcagtggcttttgttagctggaatggttacctttttaatgtatttgcatccacttacctataaaataaaacctaaaattggtcatagtatctagcctccatgttatattatcttcattcttattacttttatttaggattatttctcatctagatactattttctgttactatagtgtttctatataatactatttaagatatttaaaaacaagcataatgcatattatttagaagtagtcagccttcagtttctttattcatttct

SEQ ID NO: 20347 - DNA, 1153 bp, Mus musculus
gtttttgtgtgtttttttgtaaatgaggtagctgtatttggctagggattgtaactgattgttgttgttttggtggtctatggcttgaacctaggaattaattcatactgatggcatgtatatgcagcttctgaactgtgctccaagcccatggtatcattttgtacaggcaaatttaggcaaagaaattaaaaataaataacttgagttatcattgttgctacttagttggtacattttttttcatgtgtgtgatgtatgaatatgataaaaataaattccattgcctttttacttttttgacacagaaccttactgtgtagaccaggctagcctggaactcattatttcagcaaaactgtccttgaaagcttcagttctgtaaccttagtgataagattacagatatgttttttcatatctgcttttactgttttttataataatattgtgctctatttttaggaatacttagtctagagaaatcttggatgtctgagttagatatacacgtatggattgtttcttttcagtgctccactccagctacgggaactggtgaactgtcgttgggcggaagaagtgacacagcagcttgacactctccagctgtgtagtctcaccaaacatgaagaaaatgagaaagacaagtgcgtagttcttgggttttgtttactagttaatagaatataccatgtgctgttttaatgacactatctatacatatatttaaataattggtttgtatgtgtaattgctaaggtatatctatatatgtatggggtactgtggatttatcctggggccacatgcaaagtaaatgcccactgactttaactccaagacctagtgacacaacattgctttttttctttttcttttttttttttttttttctttcgagacagggtttctctgtgtagccctgggtgtcctggaactcactttgtagaccaggctggcctcgaactcagaaatccacctgcctctgcctcccaagtgctgggatcaaaggcgtgcgccaccactgcccgtcgatttgctatttctcttttatctgtaaatgagaaagttaatgttaatctttcatctgttccttaatatttaacttaatgttgtttaacttttcatgaccactcgtccacctcatcca

SEQ ID NO: 20348 - DNA, 1230 bp, Mus musculus
ctggctgtcctggaactcactctgtagaccaggctggcctcaaactcagaaatcctcctgcctctgcctccaaagtgctgggattgaaggcacgcgctttattgtaatgtatgtttttgcacatgtatgtgttcgagaacatgcatgtggagggccgaggacaacttgcaagagttggttctctcttactgtgtgggtctttgagcttgaacttgggtcatcatggtttgtggtagacaccttttcctacttatctatcttgctttggtagttagaggacaacttgaaggaactggttcttttctactacatatattccagggattggggtcaggttgtcaggctttttggcaaacatctttcaccttactgacccaaatttacagaatttttaaaaagcaatgttgcctacatagtacaattattaaaaatattggttatgaattttaaagaggcaattaactgaatttaagagtaatcacaatgattgcattatcatgttcttgcttctgttgtaaaggacttcagttacaatttgtccttcgtgtttatcttctaggaaagaaatgtagaagctgtaagaaatgcaaaggacgagcgtgttcgggaaattaggaatgcggtagagatgatgattgcacgactagatacacagctgaagaataagctcataactctcatgggtgagtgtgcttgcattctgttgccatggtatcgtgatcttgtttgtggtccagtctttaaggagtaaattaatgaattgatagtaggtaggaattttaagaactctatgttgtttaatctgaccacaagtctggcttctgttggaatataatcaaagagaaaactttttcacagccattgtatgaaaatcctaaatgatttgtgaaccttgttgttgatttttttttttttccttccacaactaagagaagatgccactactgatgcctttaattccagcactcaggaggcagaggcaggtggatttctgtgtttgaggccagcctaatctagagtgagttcctaaacgaccagggctacacaaaccaaatcaaaccaaccaaccaaagactcgagccgatcagccagtaaaggtatctgcccctgaggctgatgagctcgggtgggtttgcagggcgcacatgatggaagaagaggacttccacaactgcccttttactgccctgcacatgctatggcatgagtcccttctcccacaataaaaga

SEQ ID NO: 20349 - DNA, 1216 bp, Mus musculus
ctgctggagtgtgcatgctgaacttcagttcccttgtcatggggcagaagcatttggatttcaaagttaaaaatatttgtacacagtgctgtgtatgatggtgcacacctttaatacctgtactccaaggcagaaggagacaaatctctgagtttgatggtagcctggtctacagaactagtttcaggacagccggaactacacagagaaactctgtgttaaaaaaacaaagcaaaccaaaaaccacatagataataaataaaatatcttggttatataaggtccaatctaaatcaaaatatattttttgtttcatatatacattataacatataacctaaaggtaattccatatagtatcttcagtgactgctttgaccatactttgtggcatgaagttgggtatgtatcttctactctatggctgctttgttggattttaaaaatttcagatttagaacatttggatttcatatttttggattagtagtgttcaacttgtatggtcagggtgactttttttttttttccgagacagggtttctctgtatagccctgatgtcctagaactcactttgtagcccaggctagccttgaactcagaaatcctcctgcctctggctcccgagtgctgggattaaagtcacgcgtcaccacgcccagccaactatttctttattctgggaaaaggaaccttttgttttgtttttcaaattgggtttctctatatagccttaactgtcttggaactagttctctacaccaagctaccctttgtagaccaggctggcctcaagctcaaaagatccacctgcctctgccttctgagtgctgagactaaaggtgtgtgccactgttgcctagcataataaatatattttaaatttgtatgattttattttatcttcttttatgtgtatgggtgttttgcctacatgtttgtcaatactccatatatatacacaccatggcctggtgccaatggaggccagaagagatcttcagagtccctggaattagagctacaggtagtagtgagctgtagtgcagggaactgaacttgagttctctaacagaacagctactaattgctgagccatctcttcagtcccaaaggaaataattttaaaaagtgaggacacttggattttgtatcaaagaaattaaaattgtaaacttataattcaattatctctctatcctctatcatccatcc

SEQ ID NO: 20350 - DNA, 1154 bp, Mus musculus
catgatttcataaaaataccctttgggactgtggagacatctgggttaattaagtacttcctgagtttgcaccctagaacctttgtaagaaagctggacctgatggttacctgctcagaacctcagttctggagcagtagagataggaagatccctagggctccctggatagccaacttagcctaattttgttttaggaagagagaccttatctcaagtaagatagacagtacttcaggaaaacttcagcttgttctgttgcttccacatgcacacacaagataccattgtcttgtagcctctgacaactatcagcttgtattttgtttagaaggtataatttttaaagtgactttataggatagtatattttctttgacttacaaaactaaataaaaatataaactatgtttttattttttttaatttgtgtttgtttattcttaggttttttagtcttaatatttttattagtatatactacacatattagtaatatataatgattaaattgtggtttttatttctctcttttttgagacagggtcttgctcttggctggtctggagtttgttatgtaggccaggctgtgtgtgaactcctgagtgctggaattaagctgggctattttgtttgttttttgttgtgtttccttgtttctctatgtaacagacttggttgtcctggaactcactcactttgtctaccaggctggccttaaacttgcagagatctgcctgcctctgtcttcccagttctgggattaaggtgcatggaaccactgcctggcattttctttttaacttcatgtgtatgagtgttttacttgtttgtctgtgttccatatgcattcctggtgcctatagaggccagaggcaggcattgagtcccttgatactggagttacagatggttgtgagcttccatgtgggtgctaagaattgaacccacacctcctcgagaagaggaacaaatgcttttaacttccaaactgtttctccagggtctgactatagccctagctagccttgatcttggtctggccatgtgctcatagatggattcacatctgccgcccaaagtgctgggatttaaggtatgtggcaacatgtctgacttcattatagagttttcacgcgtgtgtgtatatacaa

SEQ ID NO: 20351 - DNA, 1243 bp, Mus musculus
gatgaacaacatcatagctttaagcctagcactcaagaggctgaagcaggaaactgaattcggagccagtctgtatttgtttcaaattcaacattgattatattttgatccactcaaacacaatttccagttgtttaaattagaacagctgttctcaacctctgggtatttacattacaatacataacagtagcaaaattacatatatgaagtcgtaataaaataacttcatggttgggggtcatgacaacataaggttgagaaccactggataggagggtttgtatttttgtttacacttcgtcttaattgatacaactttttaaagacaaggtcatagttaatcttattaagactctgtttcagaagcaacaaaacagaattatttttgtcgtagagtagtaaataagctgtcagggtcacagagtgccctgttgttttgaacattgtaggcagaaaaatatctgtatatggtaaagattagacctttctttcgctgtatagtgagttttgtgacatttaccatattcagaaatatgaatatatttttcctaaatatttttcagccacaaataagaagaattcccccaagtcagctcgggccatagcaggcagtctgtcactccgaagagctgtggactctggagaaaatagccgttcaaagggagactgtcaggttctggctgaaggtaaagctgacgaatttatagtctaattttattgggcccgtgcttgggaattgatgtgacattgctttaaccttgatgctgatttacggttggacttggggtgtgtgtggcctttattgtttactctttatgagtttgttcttttgtttgatttttgacttttaagaacagatttactttgattttttttttatcatatatttgtctgtatgtgagaaggttttactcttgatcctcctgtcttagcctcccgagttctggggtggctgacatgcacctcgggctctagtatctgatctcaaatcagagcagtattttcaactatgtattctggacttgttaatttttaagtagctagtcaaaaaggttggggtatatttttaattttgtttggagattttacttagttcaaaatgttcatatagtaggctggagaggtagctcctggcttagagcattgtttcagtcatgcagaggacctgggtttgattgccaactccccatggtgactcacaagcatccgtaactccacttttaggggatctgatgccttc

SEQ ID NO: 20352 - DNA, 1200 bp, Mus musculus
acacagagagatgctagcatatacttctggctgtcctggtcagtgtaatagtctgaccagggtaatagtccttgagacacacttgcatagtgggctacaggtactaactaataaaacaaactgtagattttttttttttttttttttggagatagggtttctctgtatagtactggctgtcctggaactcactctgtagtccaggctagcctcgaactcagaaatccacctgcctctgcctcccaagtgcatgcgccaccaccgccaggcaaactgtagcttttttaaggtatgctgtgtatgtgtggtaggaggggagaggtgggaagaaccacttaagaagtagagattagatattgaagacactggtaaatagcctttgataatattgtgtgataagtgttctgatagaggaactaaaagtatatcatcaaaaaagttgatatttagtaagttcttgctatgttattctcaaaattattctttatagtcattaacttcttttatttctgattttacaaacaagtgatttaagacttagaaatagaacacacatgatatgcactcactgataagtggatagtccagaagctcagaatacccaagatacaatttgcaaaacacatgaaactcaagaagaagggggaacaatacccaatggaaggagttaaagagacaaagtgtgaagcagagactgaaggaatgaccatccagagactgccccacctggggatccatcccataaacaaccaccaaacccagacactattgcggatgccaagaagagcttgctgacaggagcctgataaagctgtcttctgagaagctctgacagtacctgacaaatagagaagtggaggctcacagccatctattggacagagcacagggtccccagtgaaggagctagagaaaggacccaaggaactgaaggggcttgcagccccataggaacaacaatatgaactaaccagtacccccagagctccctgggactaaaccatctctcaaagaaaacacatggtgggagtcatggctctagttgcatatgtagcagaggatggcctagtcagttatcagtgggaggagaggcccttggtcctgtgaaggttctatgccccagtataggggaatgccaggaccaggaagtgggagtgggtgggttggtgagcagggggagggggcagaggggagtcggat

SEQ ID NO: 20353 - DNA, 1416 bp, Mus musculus
ttaatttagcaaattagtacattaacaaaggcagcttgtctactgtaacagaaagccagctaagtgccagaaagtacctggaggcattgcatgatctgatctggctcagcatcggtgcgcttctgtctttgactgacacatggtttagatggccatggttaggtttttcattaggctgtgatttcattaaggcttgtataatagtgaaaaggaagagtgcttataaacagactttgctcagtggacacttttcctgagtaactgcagcaatgttagacagactcttttctttgaaatatgacgatagaccaaattttatgtttttctcacttgttcaagtattggcataccgggtaatggcaccccttctctcagttatgtgacctttacaggtgtcgtttcaaatgagctcagtcattggggattggttctatgcatggtcatttggacgcatgtaagattacttaaagttgttcatcttttctgcttcctgaaacataactatagtgcaacaaatatttttgaacaatatatttccattggttggaccttgatctcagtgagtgcatctaaagatttatgcatatacatgaagctgtgttcaaggctttcttgcatattcccaattagtccaaaccccaaatgattgccaaattttgctactgtgctcctgtgtttgtgtttgagctgttgtatgtttgtaaatgtcacacttaaagctggccaagagactgttgaagaagcgtggatgtgcataggagagcaccccccccacctgcatgtacttagtgcctcctctgtgtcccatggtgatagcttgcttgctgaatgctgtgactcatagtttactgttctcttaacagcttgcacttttcgttaataaaattaacttgagaaaatgtgcctctgcagtttattcaaagtgggaccagaagcaccactccccctcttaaattttttgctgtggctgtttagcagtgtagacaaggacattttcttatggcattgggctaataatcattccttttaaaaccaaaagatttcttcataaataataaaatatatggaaagaataattcttactccaatccctagctatcttatattctaaaatgtccaacaagtaggtggcattttacttttggtattttgactcttctggggaagaggctcagagcccttgcatgctaggcaagcatgttactcctgagctaaagttgtccgggatacccagtgtttcgatgatggcaggagctgcactatggccaccttggctgtgcttgaaggcaggtggggagaagggcagaggcatgatggtagaatcccttgctgtgtctgcttgccctgggctcttacactgtgtatcagattctcccctaataatccatctttcctgcatcgctttatagaaacaaa

SEQ ID NO: 20354 - DNA, 1155 bp, Mus musculus
ttttattagtttttctgttgtactttattcagcataaggtgtgtttgttttgtgtgcatgtgtgtgcgcatgtgtttacgcatgtacacgatagaggtcagaggacaccttaggtgccattcctgggtagccatctactttcattttacttgaaaccttccttaaatacctagttatttatcttaggggtttttaaatttttatttatgtgtatgtgcatgggtgtctgaggccacagctgcacctgatgctcaggtgcagggaattccgctcacaaagcctctggaaagcttgagaacccagccaccacctctctaaccctggcttgccttctttttccttcccgttctttctttttgtggcagggtctcactatgtagccctggctggcctagaattctctttgtagacgaggctgcctctgccttttcatttcatgtgctggggttaaaggtgtgaatgtgagcatattgtttttgaacaattctgacaacttgattgtattcttcagtaatctttgagatggacaagttgtgtattgttcccacttggcaaatttggggagactgtgctgctctaaggttggacaccatgcttttttcagttcattatgcttaaccaaacaccaataaaaagctgaacaattgtcctgttttgttgttttattttgagataattttagatttctaagagttaggaaaattgtgagaattcccatgtagcactggcccagcttctccttttgtcagtgttctgtgtaaccatggcacagcaacagggatgtaatgaaccttgtttgcagtgcttttttcttttaagacagggtgtcatgtccaggtttgttgtagatgacatggataatcttgaatttctgacccttttgatcctccagccttcagctcaggagtgctgggagtataggcctgtgccaccatccttaacaagggctgggtttgaaccagggccttgtgcatactgccaactcagctaccctctcagcttcacattcgtcttacatccagggcctggaatttgctatgtagacctagttggccttgacctcacagagatccacccaattctgcctcccaagtactgagattaaaggtgtcacagtgctcagctaagctatgattcaactctctgaggaacttg

SEQ ID NO: 20355 - DNA, 1176 bp, Mus musculus
gcttctcctggcagctcccagtaactcttgtagcagcccctgggcttcccttccttccagtttctcaccttgcaccatttgagctcgtcacagcctctcgcatctgcggctcagctctctccatctctcaccttcccagttctccagctctgcaggccctcttcccagtggctccccagagctcctcggctgccttcgagctgttgctgctacagaaagctgagtacagccaaggagaagatttatattggcacttactgttgaacactggggatgatggacaggaactccaggcacttgaggagtctgggaacggagaggtggagccacacatgtggggacagtcaactatgagaggtggggccacacatatggagacagtcagccatgagatcccaagcagaaaagggtgatggtttcctgagcagttgcaagtgaggctgtctgtaggctatctagagttgtcactggcaaagtgactttgcagtatggcagggaaacacctgggatggcagtagagtcttctggagcaaagcccacagcccagctttggtgttcccattgctgacccagagttttctctgagcacccgtagttggcttagagctgcttccaattgtctgtagtcttggagaagttccctgagatgactatgaaatgtttaaggcagtccttgatggcagctcagaggacaggctgtctggcagctgccagctcctccttaaagcagcagccctcaaactggctgtgctgaaccttcaggggctgtgatgctgctcacagttgtccaggagacacacatctctcaggtcaaagggagtaagagacagtttgttcttgaccatggcccaggaggatggcttcagattgcctcaaataccacgtgcagagtttgacagtggttttattttttttgttgttgttgttggtttttcgagacagggtttctctgtatagccctggctgtcctggaactcactttgtagaccaggttggccttgaactcagaaatccgcccgcctctgcctccttagtgctgggattaaagacgtgcgccaccacactcggcattgacagtgttttgatagttgcagaacaaagtcataaatcaaggcccttttgtattcatttcatttttggcatgggggtgaaggttgcgacaaggactcactatgt

SEQ ID NO: 20356 - DNA, 1928 bp, Mus musculus
gaaagcatccttatgcagtgttatttttttttaatgtgtgtatagaagagcatatataaaatgctctaataaaactctgggttagaccacctgcaaagtttatcctctttattcaatgattaataaattctctcccaagaataacatagcttatttaaagactatttggaaaattaatctttttaaattgtcttttatgtgtgtgtgtatatatatattttatgtgtgtatttctctaccttgcagcctcagggatttagagacgctgttgtcactgctgcctcatcacagacagagagttctttgaatttccggaaacggtcacgagaaccagaggaagaatgctgaccaaatgctgatgccagtgtatccagttaactgatgatgtgctagtcagagtgtagtgtgtgtgtgtgtgtgtgtgcactgtgtgtgtgtgtgcactgtgtgtgtgtgtgtgcactgtgtgtgtgcgggtgcctacaaaagcaagcggagggtggtggatctcgtggaactggagttagaagtaactgaaccaccatgaaggtgctgagaaccagaacctagtcctgcaagaaccaaaaatgttcccaactgctgagccatccatctctccagctcctccaccctgtctctgaggcagggtcttctgttttgtctcttcattctccaggtctgcacactttaactacttctgttttggcctcctgtctcactaggaaccctgggatgcaggtgtgtagcacactgtgggctctgagaattgaactcaggtcgtcaggcttgcagagcaagggcttttacccactgaacatctttctaggccctccttaaattttaagaaaaaaatctctccctgaacgtggagctcactgcttcagggccacctatctaccccagcagcaccaagatgcacacatgtgctgcactgcaccagcttttattatatgccgtcctcatgcctgcatgtcaggcactttacccatggagctgtttccctagctcctgaaaagattttctgaagcactgttctataattatattttaatgtgtttttattttgagtaatgtggaaagctgaccttatgttacctatctggatttaccacccagagtggaaaatttctttgtcaattgcctaaaaaataatagaaataaaacactataatatgtttgaagtgtgtgtatatgtatctgtgtgtttgccaactgtgtggaggccttcaaagcatggaagagggcatcatgtcccctagaactggagttatatgtggttggctgccagatatgggatcttaagtaatttctgagtcatgtctctgtccctccatattcttaaatgtagctttgggggcctagagagaggacgcaggagttaagagcacttgttgctcttttagaagacctggatcagttatcagcaccaagtaactccagttccaggggatctgaccccccccctcctcagccctccacggacactaagcatgtatatagtatacatacatacttgtaggcagaacactcaaacaaatacgaaataaaattaaaaataaacaaatgtagctttgaaagcaattaacatatcactgtttagttagttgagttggtttggtttgctgactcctggtctgtgtgtcctccttgctgctgggttgcccagagcacctcctgcaagccattgttggaggcagcacacagtctgtaataggggttgaaggtctgtgcctcccctccaagtctttgtgcctggggacagctaagccctagagagaggcagagccaggtttggctccaagtcagggccaagagtatgtatgggagaggctggaagagaaggccttctctgagagatttaggtctgaagcccctccccaccctggaatccttgatgaagaaatagatggtcctttctttgatggtgg

SEQ ID NO: 20357 - DNA, 1211 bp, Mus musculus
aaattaacctttctataccggttttcacagtgcggctgtttttgttgttcctcttagtgttaattcacactaaagactgtgcatccgactcctacatttatgaaagtaaatgcctattgttagaacaaaaaaggctacagaacaaaaaacaaagcgaaataccatctgctttaggttcagtggtattttcccgctgacagggaggcgggtttttgggtacaggaaacgagtcactatggaggcggtactatgtagatgagaattcaggagcaaactgggaaaagcaactgcttccaaatatttgtgatttttacagtgtagttttggaaaaactcttagcctaccaattcttctaagtgttttaaaatgtgggagccagtacacatgaagttatagagtgttttaatgaggcttaaatatttaccgtaactatgaaatgctacgcatatcatgctgttcaggctccgtggccacgcaactcatacttacctggcaggggagataccatgatcacgaaggtggttttcccagggcgaggcttatccattgcactccggatgtgctgacccctgcgatttccccaaatgcgggaaactcgactgcataatttgtggtagtgggggactgcgttcgcgctctcccctggtttacttggttttaaaaatagcttgcactagcgataccgcgaatatggttattaggtttgttaggcacagtcgtgtcttactatagaaaaataacgtagtgttcattttgctgcctgtatgtgttaatttgtccttattgcgccattgttcttgttaagtcttctgtaaggagttgcgggtttcaaactgtcagtctgagagcataagctcacttttcagtcagttgaattgaatgttacattcgattggttctggatattgatattacccaaggcttgtcctgtttgtaagtcttttcctacacctgacaatatgattatgtttacaatgtccctagaactctgggtgtatcgttcccactgaataaaatttgatctctaagttgacctataaatttaagtaccaaaaaactggtttgtaagattttggaaggcagaggcagggaagagaccaacgtggtctacatataaagtaccaggtacatataaagtaccaggttttgtgttttgttgtgaagcataagcaaaatttgaaggaaaggatatgggttagtagtagaactgt

SEQ ID NO: 20358 - DNA, 1142 bp, Mus musculus
ggatacaatacaactgggtgctgagttgtaggtttccaacaggaaggtaaatgtcacttgttcccctctatgtaatattttgtttttcattttgtaaatttattttaagttatacgtgcacaacaggcagaggtgacagaccctcaggagttggaatttcaggtggttttgagccacctgtgtgggttctggtcttccaggaaaccatctctccaacctccaatattttgcttttctttagctttcttcagagtttctcttctttatttccccccagtggtttccctgtggtgtatctttcattcccccttctcctttcccatgtcttctctgtactgaccgagacctcgaaacattcaaggccttcagttttctttttcagattgtgtgaggagccatatttgtgcatagtgtgtgagggtgcacaggcagaggcggaggcggaggcggaggcggaggcggaggcgggtgttctctgcctgctttcctcctttgagacaggctctcttattgaagttggagcttgccttgcttttggctaccctgtctctccccatcctgctggggttacaggtgtttgtggagatagtgctcccttgtctctgatcattgtaacaataatacagagaaaaagaggttgtcatttacagaaggactcaggaacagtatggagggaaaagaaaccaaaacaaaaaccgtctagttgttggtgttctgggaaagagggatattgcaggatgacttgggccttgctgccagcagagggactagctctgacaaatgaacactggcagcttagcagaagcccttttctagtttcacaaaaggcaccttagcaagccaatccaaatcctaaaacctcttatctgatctagggatgtctgaaggaatcattacccaaggagttctcagcttgaggagacttcctggtttgcctggtatgtctctggactcaggcaaaggctctgagaagccttcggaacaacccataaaacctcagataacaatcactgactatttacaaaaggctacttcatagcctaggtgctatcgtttcagaattcatggcagattcaatagctctgctaacattctgctacatctggtcctcatgttcctacagcaagctatcctaaatgctg

SEQ ID NO: 20359 - DNA, 1289 bp, Mus musculus
cagtcatggaattgccattttccccacgtggtttttcgtttgttcctcaccggaggcctccggtttgagcccgaagtctaaaccggtgcgcgtctgcgagctcgcgtgcgcctccgcggccggagcacagtcgcgggcgggcatcagggcggtgcgtggccgtcagtgacgcatgacccttcgcaggcagaagtgggacgggtcaagagaggactgtgatccgattggctgttcggcgaccgtatgctaatcgcggtgacagtctgcgtggtgtagggacacggtagcgactcaaaatgccccgtggacggggtctggagaggtgtcggtctgtcagagaaggtgtccccgcgagggcagacgcggtgtgagatagaggcgcggacagggatgtcacgggtcgtctgtgcgtcagtcgccgtgactaagatgtgggggcggccggtgcagtgcggcgcggtgtggagcgtgaggttaagactatactttcagggatcatttctatagttcgttactagagaagtttctctgactgtgtagagcacccgaaaccacgaggacgagacgtagcgttccctcctgagcgtgaagccggctctaggtgctgcttgactgcagctgcctcctgccattgatgatcgttcttccctcctttgggagggtgagagggagggaacgcagtctgagtggactcggtttatcttaaagggttttaaatatagaaagcttccttagtcttatgggtgagagtgctgtttaagccttacctaggtatgtctttgaacatttattacagattgttatttgtgactatgaccactcaggtgttctgttcttgtgaatttagacacactcagaaaggctacacactcaaagaccacaccaaagtgaagtactatctgggccgtgaaactggtcacatatcagttattttgcagtaaaacaaggaagtcaatcatactgcttcagtgggtcagggagtcaagaatgcacagtacaagagctggtgagattcctcagcaggtaagagcactgaatgctcttccaaagattctgagttcaaatcccagcaaccacgtggtggatttgaacaaaggatgaaaacaaccatccataaccagatctgatgccctcttctggagtgtcaaaagacagctatggtgtacttacataaataaataagtaaaaacattaaataagtaatttaaataaataggtaaataaatatttttttattattttctttttatatacatttcaaatggtatcccgaaaattctctatactct

SEQ ID NO: 20360 - DNA, 1213 bp, Mus musculus
agcccgaggtctaaaccggcgcgcatctgcgaactcgcgtgcgcctaggcggccggagcacagtcgcgggcgggcatcagggcggtgcgtggccgtcagtgacgcatgacccttcgcaggcagaagtgggacgggtcaagagtggactgtgatccgattggctgttcggcgaccgtatgctaatcgcggtgacagtctgcgtggtgtagggacacggtagcgactcaaaatgccccgtggacggggtctggagaggtgtcggtctgtcagagaaggtgtccccgcgagggcagacgcggtgtgagatagaggcgcggacagggatgtcacgggtcgtctgtgcgtcagtcgccgtgactaagatgtgggggcggccggtgcagtgcggcgcggtgtggagcgtgaggttaagactatactttcagggatcatttctatagttcgttactagagaagtttctctgactgtgtagagcacccgaaaccacgaggacgagacgtagcgttccctcctgagcgtgaagccggctctaggtgctgcttgactgcagctgcctcctgccattgatgatcgttcttccctcctttgggagggtgagagggagggaacgcagtctgagtggactcaattttttattgttttttataaagttagagttttatttttcttcatttctcctttacacttttggttttcttcccatgctcatatactatgtgtgtcttttaaagtcctatttctacatctttaagtttatccttattagtgattctttttataaacattgttgttacagtgcgtttatggcacgtggtctgaaagggcgcttcaggcctcatatgcattgtactctctaaggtagccaagcctagccacgttttcatgtgctttggttactttttgaatgtgacacaggacttttagtacagggacctcaagtggtttagtggttaagaccactgacagttcttggggtcagaggaaggcagcccggggctgctccaaagtttgtcttgagaaaacaattaagcataaaatataatacaagtaggaataaatgatgtaaatttgctctcataatggatttagttggaagacaagaaggtgaagtctttgaacgtatccagtggctggaagagttgattcagtggttaagggtgcttgttcccaacacctgcctgaagcagtttactcttacttgtaactcctatg

SEQ ID NO: 20361 - DNA, 1111 bp, Mus musculus
tttctagaaagtgtgtgtgggattgctttggtgaagaattacttctggttggtggttttgttttccttatttaatagctggtaacccttcaacagtttttcagcctgaatttgtttttctgtgacttagagacatgtggtgacagtataatgtggggttgctgtaaggattgtgttagataagacactatagtagttcagtaatcctttccccattctgaaaagcttcctccctccagttataaatctgtctctcgtcctgtcttcaagcaagctctccaccactgagagatacatgtccccaatatgttacctttgaagtctctccttcaccctgcccccatcttaatgagtcataggaacttaccttctagaacagtcagagtttgtccatttctttagcagtgcctggtgcctctcagagatgccttgtgccagtctcagaactgctatctacagcttcccatctctcagtgacttcccttcacaaaatgtatttgtatggtggtacatgctaaagcaagaggactttttgtttgttttggttttttttgagacagggtttctctgtgtagccctggctgtcctggaactcactctgtagaccaggctggccttgaactcagacatctgcctgcctctgcctcccaagtgctgggactaaaggcgtgtgccaccactgcccgactaaggcaagaggatcttaagttcaaagctaactgtggctacaaaatgagctctgtagttaggctctgtatcaagcaaaggaattgggaagtgttggtacaggcctataatcccatttgtctggatgctaaggcagaaagagcacaggttcaaagcctgcctaggctacagaattacttcagtgctggtaagagcaattaaacaaatgtctcaacaaaacaaattgctacagaatgcttagtggtagaaactttgcctaaaaattctcagttctcagtagttctcagtactccctgggggtgagatagaaccacctgtggatccagtttagaaaacttgctctggaagtatttatttggttcctgctggcaccttccttctcaagtcttctccttctaaatttggatctctagatttcgactatc

SEQ ID NO: 20362 - DNA, 1980 bp, Mus musculus
ctctatgacccagttctcgtctgtaactcatgttatgaacacattcaagtatctcgtgccagggaactcatgagccaacatctgaagaaacccattgctacggcttccagttgaatgccagaggaaatgatctgtccatttttagcagatttgaagggaggatctgcttcaggtgtagtctggaaggttccttggtatggctcatgaacacagagctcaaagataccgtcttgagaaatcctccttggtaccatgtgaccggagcagaggaatttgaatttggcaggagctttttctactggagagaccctcactttggggtgatggtcctgacctagacccagagtctggaagcttcacactgagttggtgactccagcttctatctcctggaggtcccaagatgattcataaatactgcctggtgcacagtgcccaaacagcaatagaaaggcttacttataaccaaactccaagtgatagtgagacccatctctcctctaccttgaagagagcagatcatagtatatgagataggaattcccatcctatttgagttgaactctcttctgtacctctgtgctctgtgtctgtgcatgaaggctcagtctttagaggcactccctctagttgattagcactgtcttctgtggagtttggttcaaagactggtatggcagatagaggcttggatgcatttttcatcaggctcagtggctagcatcagtgaacattcagtttcagagggacagttttgaggattaagacacttggaaacagaagaactctggtaatgcttagtcttgtgagaaccagttattctgggctgtgaaggcagttgccactgttatgcagtggctgcttttgagggacgcactgtgaagaatgagaagggaaaagcaagattatccttgtgaaattctgctgattgtgccctaccctttgcacctgacttttcctagttgtcctggtgctaaaatggaagctacaccttgatctctcctggcatgaaaataaaggattttgttgttccactgcccacttcccccatgttgtctttcccttggccgctgcctcctctgggtcacactgcttcttatcctgaacacttgacaccttgagggtagaatatagcatttggtttttacctcctagcatatgctacttggtatgtgagggtttcagtacaaatgctgctgtctatttctgtgcacttaacaatggaacccaaacagaaggaagaaagccttgataccaaaattgggagtgaggatgtgtccatttggaccaaacactttgttttgttttatttagattttgtttttcatcttactatgtaccagtggcacttaaccaaaagatacagtaacatagccatgtactgtggttgggacagatacagtctccttggcttataggacttcctagctacactttccttagcgcattaatgtgatgctcactctgtgttaaaactgcagccgttgtctttctcaactgctactgtcacgttgctttcaagaaaacattttttttcattccagactaaccagaacctgcatttagaataggagtcctttctccgaccttttcttcagttccacagcgaagcctctgtgctccttttatacttgccatggatgtaacctaaaaagttttggcatatttaggtcagcctagcacatttttttttttttcattttaatggagctgaagaatggagattttttttttgtgtgtgtgtgtctgagaaattcctaagatcaatgaaagagtgataaactatttgtctctgatacataaaattattttaagcattttctcaatcattaaatgttactgccagtcataagtggctttttaattaccagttttcattgcacttcactctgttttcagggggattggggacattcggggagactgtatctgtctactttgtgtgactgttttgagggactgtcccatcagtgaacagat

SEQ ID NO: 20363 - DNA, 1223 bp, Mus musculus
gtgaggagtcctctagatgggctcttccagagggaactgagccccagagtaagtaatcaagcaccaagcactgtcagatcaggactggacccacgcctctggattcccagtctgttctcatctactcctgctttgctaccacgctctgtaggtcccttcttggccttccctgctccaaggataggccctgggtggagatagggaccactctaacgatggctctggctgtcctcccgatggatcgtttgcactggactgtcccctggggcgggggcagagccatgtacatactcagtgtatatatgtccatactcagtgcatatatgtacatactcagtgtatatatgtacatactcagtgcctcagtccaggtcctccctctgcttcaccgcacaggccaggggaggagaaaggccatgccaaagcgggcctgaccccgccccatagtgctccacccctccctgcccaggccacctggcctctgtgtgatcccatcctctcagacccaggggaccagggggcagaaagcaggagttgggtttgccttattttgctcattggattcaacttctctcttgcatcattttcttccagtccctgttgggtccaggggctgagggaaaggacggatttatgcagctattttcatacattccctgttcagagtgggtaggggtgtctcccctcactctaaccatcccatccttcaccccttgtctgggcgagtctctttgcatgttttcttcgctgtggtgggagatgtttgattgaaccctcgccccctaccctggtctccaggggtgtgggatagtgggggcatttgtttaaaaagacattttactataataaagtctattttcacaaaattgatgctgggctctgcctgggcaaaagactccttagagggatggatgggtcacgttgatggctttgaattcatggcttcagtacccagaagctcaccttgaagggcagctgagaccaaaactaatcagcactgagtgcctctcgaatcgttcccaagtccctgggctgtgaggcagggtaggatggtggcggagaagcaccctagaaggtgattacaggaaatagaagagacaaggtgtcatttcaagagagtgggttggccacacaggactctccctacccctcttaacaagtctatagaaataacagacctgaggaaaacataatctatgagtaggcacattaccgagtcctac

SEQ ID NO: 20364 - DNA, 1232 bp, Mus musculus
tgagagagagggcagcccaccaccatccaggaaatagagctgacgtgacagctgagtgttgattatgttctacgccagcccggttccaagcatctcacgaagctcttacaaccctgtgaggggaacactattaccactttataacaaggaccctaagttacagacccaagtaatcgagcttgggaacttgaaagccaggctcgttcccaggctggccaacttcagagcctctgtgtttcgctttagtttagtgatcttttagcaggtatatgtgttgaggctgtctcactctgtctagctcagactagccggggaccccctatatagcccaggctggccttgatttgacagcagttctcttgtcttagcaatcagtattggtacttcagttcttatgtctagctggtggcacagccctgtgccctgaaacaaaccaacatctttttaaaatgtcagtatctgattttctcccattcagaactaaaccctgggatgggttgagccgaattttgagaactggtttgctttgtttcctcagctttacggccggcacaaggagtacctcagcagcctcgtgggcacagactttgagatggtgggtagctcagctccccacagctctgtgagctgttggggagagtgtctgactatagagggactgtctccctctcttaaacgactccaagaccaactctgcagggtagaaaggaggtcaaagaagagtttcatgaccctgcattttgatgagggtccttgcacgcatagaccgggtctgaaagggcacacatgctatgttggcctctcttgggacaggctgggtgggtggtggtaattgggtattgggcagtgagaaaaatataccaggcattttgacttcttgttctctagggtttggtggtttggggaattttatcagtggtaatgcattcatgcgttaatttacaatttatttaaaaaacaatataatgataaaaagtgtcttccttattactcatgtggatattgttccagagcaccttagataggcaaagagctgtcattttttgctggtcagatgttttggatcttagaaaatgaaaccaaaacagtttaggtcagtcactctggggtcctgtctgtgttttccccaccaccagggattcaatttctagacctgcaaacaaggatagaactactcaccctcgcccccgtctctagaaaattaactcgtattgttttatgctacatgagca

SEQ ID NO: 20365 - DNA, 1810 bp, Mus musculus
tcttgccgtctgtcaggattttaagtaagggctgtgtctttgtgggtcatcttcccatattcttccagccagaagtcgtgttgggaggatgctgggagtagggttagcctgacttcccctttacattctgtctgctccctgcttagccctcgttttttctcattccttcgttctcttagagcagcccctattgttggctggcaagggaatttctggtgactgtagttccttagttaggtcttagcaatcaaaccaaatcaatgcccgtcagttcttctttgtgtacgtttgtgtttgtctgtgtgcgtgtgtgggggtgggtttggggtagaagggtgggaaggggcaggataagtggaatctctagggtgtatgggaagtagagggcagttagttctaagtgggcttttatgttccctgttgtgagggtgagaacaggttggtatcaaaccatccccctccccttagttcatcttgcttggacactgctttgccttgtggctgtctgttccctgggaaaggttttggaaggtcacccagaacaggatggccatactaacatctttcctggagttggatctgggaccaggtgactggtctctagtgggaagtgagaatggaagtgatggggtggagggctccttggaacaggtctgaagtatagcaatgacctctgggaggcaggaggtggagaatggaagtggggtggagggctcctggaacaggtctgaagtatagcaatgacctctgggaggcaggaggtggagaaggctgactgggaggagattccagagaagagtgcaagggaaaccttgtctgtcggtgacatgattggggtgggtgggggttgtcattgccaattgagctgctgattcttatgaatcacattcagaactcgcatagggttgacactgtaaggggtggggaaatctagctatttttttttccccagcccattcttgggggtcggggggaggcaggagaatgccccttcctcctaagcccttcctgtgtgttgagcttttgtttttcttcagtgctggcaggggagggtgggaactggtggggactgagttccctgttcaaaccgttattgggtacaggattgaatgtttgattttaggttttatttttcttatgaatgtccagatctgtgtttccctgccctcccagactctggccagttggaagtgtctcgtttttgttcatctctcatttctggtgcagtgactgagaccctgccacatctatgctctgcatccacgcctcttttggacattaaaggtcgattgatgcacttctgagctgttggggtttctttgggggcgatgggtgggtgggcctgatgctgttagtgccaccggtgggtgggctaggtctgtgtttcatagggtgaggtagagctgtgctttcaatgagtataggaggtaggtggggcttcaggtatgaaattgggtgggtgagtcttttggggaagactgtggaactgtgaggtaccaaaggattaattaagggactgcagagcctgccttgctgctgcctttgctggttagtgattgagagagctggagtcttgggtgtttcaggacaaaggctcagttcaagttttagcagaaatgagggggactgaaggaccaaagttagctatttctgctccatatgtctcctggaacaacacatttctgaacagtccagtctagtcttactctttaggacttcctggaggccaccttgtggagagccctggaagggaatgataaacagggtcataggactgtggaagaaagacgggaactgaaattctcgcaga

SEQ ID NO: 20366 - DNA, 3127 bp, Mus musculus
ccagaattggatacagttttcttaacagtggaatttgaaggtaaggatacaggcaagggtgttcacgtaaattaccagagccctgatctgtctttgtattcgttcagcttgtctgaagacaggtgaaagcttagatctttcaatggaaagttctgtctatccaatagggagaaactgcctacatccgggttaaagttgatgggcccagaagtccaagttatggaagatctcgatctcgaagccgtagtcgtagcagaagccgtagcagaagcaacagcaggagtcgcagttactccccaaggagaagcagaggatcaccacgctattctccccgtcatagcagatctcgctctcgtacataagatgattggtgacactttttgtagaacccatgttgtatacagttttcctttactcagtacaatcttttcatttttttaattcaagctgttttgttcagaatgggctaaagtgttgaattgcattcttgtgtaatatccccttgctcctaacatctacattcccctcatgtctttggtaacttgtattttaagtgatgtcatagacaggattgtttaaatttagttaatttccatgctcttcagactgtgatattatgtaaatgtctattctgctctggtttgtgtgaaatgggatgttgggggtgtttgtggttatcttacttgggggaagttcttatgtttatcttgcttttcatgtgtctttctgtagacatatctgaagagatggattaagaatgctttggattaaggattgtggagcacatttcaatcattttaggattgtcaaaaggaggattgaggaggatcagatcaataatggaggcaatggtatgactccaagtgctattgtcacagatgaaattggcagtattgaccttatactagaaggcgagggttaaaaatttatctaccttaaaagatttgcaaacacttaatgcagttatcttcagctacaattgctttgctttttaaaaccttggcaattgtggtagaattgcccattttgtaacaattatttgctcccttcccccctttttgttttaatagggactaatgtgggaagaatggctaatttgtcacagtgcttagttacaactgttaatgtgtggcctgctgttggtgtacatgtgggtacagggtgtcaatttccaaacagagtataatatcaatactgctaaatctgcatgtcctctgtgtgactgatagagcattgttatttcattttttaaagacaaaatgacagcaaaataatagaattccaacgtattagtgtagataatctagttgggagtactttaagtctcaccttcccttttaatattcataattgactcatgtttaaaacactttaatttacaagctaaattgcagatgggagcaatagtttaggtttaggtgggtagtaataccagtaaacttcaattatataactttgcaaccacaaaacctgtgatacctgtacagtaacaagtgttggcattatcagttgaactgtaaatataaagtgcttcttccagttagtctctatagttattaagtttctaaaatttatctgaacaccatacagaaacttgttttggggaatttgatagttattgatgtgcatctgtaaactgatgacagacataactcatcattccccagaaactttttttggttacagtgtctaacattttgcctcctcttttttggttttgctggttataaaggtttggattggagagggctcactggatcccaatccttggagctggatcattggattcaaatcataatgtggataggatagggaggatgaattaccaggattcatggagcgggatcagattaccaggaacataggagtggattccttcctgccccaaccaaaccgcattcgtgtggatttttttttcattcaacttaattggctattccaaagaatttttttcctatttttgacgattggagcccttaagatgcacgatggaattgtgttttgcattttttggtaaaaggagcaaagcgaggacctggagatatacgctggagcaatctccttggaaggattcagcacgagtagatggtaaacatttaaaggggaaaagggggggtttgtttaaaatagtaaatcagtaagtcacttctaaatttaaagaaaacaaaattggagttgaagaataagtaggtttccaattggctattgccgtttttctttgaaaaaaataaacattttttaaaaaacgatgcatggttgtcctttttcctcttgtaaaattttgattgggtaactagtgtatcagttatttaatttgataagattctgattctgtttatgtgttagtaaattaaagattctaataaatgatgactgtctctgttgtggaagtcttaagagcataataaactgagtgtaaggcagttacatacgtaacagttgtgtagagggtaatgatctggaaagtaatctttcatattttgctaaagaacttacagttgctgtttattttggtaatgctttagacaaaataggcttttgtacaaagtttgatagctaatcaattttagctttgagattctcagtggaactcaaattcagtattaacattaggagacaaaatagactacacagtttttttttttttaaattttggatagtgtgctgtcaaatgcttattgggttaataaatacattataaatcttttcagccatagagtgttctgtcgccaaactgttctgtattgagtcagcaattatatatatatcttagtctagtctactgttgtatctctactgataaccccttgaagcttaatcttcatcttaattggtttggagaatggaacttttatttaaaatcccaagcttgtgatttcctcctggctagaatgaatagaccactattcaccacagtagaaatagctagatctttaactttccttgagttgcaggctaaatatgatattgttcagatgtaatgtagaatataggggagaccagaaatttttgctagtgaaagaaacaggtttcaagaaatttgcatgagatctcagcctgctcattttaatgaccgcatacactgtcctgaaagagaaactaattcttttaagttcaaaactaggat

SEQ ID NO: 20367 - DNA, 1518 bp, Mus musculus
gactgggcccaaaactccaaagtaaatccagtctcccagattctgggattagccatgaagcaccatgcccagcttactaaagtagtattaaaaggttaaagccagctagataaatgcaaatgtgggtttactttgaatgctttggaaacgggaccaagaatggcctgtttatagtagttcagttgtagattgaaatgagcaaagtgttctttgcctcactgtaggcttatgtttgaacactagtgagcacagcgtaggttttaaagcttaggaaatagggctgtacccatactgacagttgataccactttggaactacaaatactttgatttctactccccgcccccctctgttcccttaggatattgtagggaaacctatgattagtttttctaaccacgaaagcacttaaatctctttaagcaagtactttcataacttctgattgaataacccaacttgctgttcagctcatcctactggagacaaaggtaagacacattttctgatacctagtttgggatctggattttaagaactaaagttgtgatgaataattgctcctgacttgcaatgttcctctcttcctcccagctttatatttttaatagttttgagtgtataaatctactcatctcaattctggagttgaatatgataaattccaagatctgtctatgagccatgcttttgtaggggtggtgctattttcagcattctgaggtcaaggtcaacttttggtgtttgcctttttgctttgtatatgaaatttgtagtgaaattacaaatgaaataaattatatgtatttaaatagtattaaaaggagagaaagtattagactgagttctgttataacaacaaccacttgtagcttatttccatcataatttgatgatagattgataacccacaatactggaataccacagattgtttttattgagcaaaatgaatgtaaaatctggccagagtagatgcctttattgtgtaatttgtgtaaaagtcacataggcattgttgaaggtgttttatatatatgaagtatatgtgataagatcttcatgtaaagtctgaacaaccatggatcccaaatatatatctagtttgggtgagcaaggagttgtagaattgtactagtactgcagaggattaatgttactatatgtaattttgggagtgaataaaaagctgttaatttggaacctttattgagatttaagttctccatccttttagactgaatcaggtacttaaaaggtgtcaaccacacaatatattccattactacatagtttaacactgtagcaagacttcatagaaggtaatacctacaatatacagtgtagtactcttgtagatgttttgatgtcaggtttttaagatttttctttcttcgagatggtgtctcttttaacagccctggctggcctccagaactgcctgcctctaccccctgagtgctaggattaaggcatgcaccgcacccagcttcttaaagactttagacttaatggtt

SEQ ID NO: 20368 - DNA, 2833 bp, Mus musculus
ataacagtgttcaccgtggctttccatctaagaagtcctaagcatgctgtgtgcatgaacaggcctccgctaggtacagtgtgccttctaagagatcactgcacagctctgatagacaggctctgtcccactggcctgctggtggtggactcttcccaggaaaggctctagaactcagaactgcatgaaggagtgaggacttttagccctacttaaaatctctgctctcagaatacctcgcagaagttaactgatcctctcagcatctctgtgaggtaggtaagtaaatctgaactgaagtcaagagttgagggctaaccaggttgctcaggtcttcccaggcaccagagaagagatccatgtcctgggcccgcccaggatgtgctcacgaggtcctcgcttcgtatttgatcacttggtagaaactggaatttgatttattaaatgttctttttacttaagagaaattagttcagaagctgaattttgcctatagttttgagagtctaaagtcccccttttgtcttctccttttagaagctgccaacctgtgccaaacctccacggctgctacgacaccagtgactctcactactccattcaatataacgtcctctgtgtcgtctgggactatgtcaaacccagtcacagtggcagctgcaatgagcatgagaagtccagtaaatgtctcaagtgcagttaatataaccagcccaatgaacatagggcatcccgtaaccataaccagccccttagccatgacctcacctttaacactcaccaccccagtcaacctccccacccctgtgaccgccccagtgaatatagcacaccctgtcaccatcacatctccaatgaacctgcccactcctatgacattagctgcccctctcaatatagcaatgaggcctgtagaaagtatgcctttcttgccccaagctttgcctacgtcaccgccttggtaaacagtattataaagtcaaaattgggttaaagtaaatatttaccagcaacttaaccttagttgattaaagcaaaaagcagactatgaaattgggaggttttattatgttagttaataagagtgtagtagctccaattttgctggggttgttcaaagtagggtatatgtgtaacttatcactggaccactttagtttactcagaaacccctttagctgacaccattgcttaaacaggatagtagctggcaagacgaaatgccagaattaaaaccaatcataaaacccatttcaaaataaaaaagcattatttgtttttattattatttttaatacaacagaatcattttattgtaaacactagcagagttcttccctctgtacaaggtggacggttttaacctggagctcaagcccacagactgagagctagtgtagcattgtctgtggttttgctcgtatgagtgaacagaggcattgtcataataaaatgcatttcagagaatatgcattttacctttgggaatatgttaatttcaggcagcattccctatgggaaaggtgataccagctctgatatgcaaagcatatgataatttatcattctaacttcaacatataatagggattgtgacctgatatttggagatgtaaatattgctcagcatattaatcctgatggaatatagcattgtagttgactttttaaaaaaaaaaaacaaaaacttaaaaaaaaacaacaacaataaattgtgttttgatgagaaaaggctgcagctgactgaggagaagtcaggtgtgcacgaagcaggctcctaacgggtcaggggatcctgttcaggaggagtgagaacttcggaagagtttaaatctattgctttaaattggaagacattggaggcactgggatgtgatatgcctctctctctcccaatcaacgtctgttgatgttacaacaggcacagatgtgttagatgctcactagagtttatgtcttatattaaattgtatacagtttttattctaaccactaactaggtagtatgccccttcagaacaagcagagtgtatcttttccccctccttctgtttaatcaagtattgtgcagatttgttcaactttgtaaatatggacatcacttttttttttcctttggaaaaaaaaaaacaacaacaagcccttgtatccgctttctggagtttccagggaggcagctgtctgcatgctccgtggaagccctgcagtgagtgtgcacgctgagactgtgctttttgtttcttagcgggaagctttatccctgtacatacagtagaaaccagaagctagggaaacagagactctatgccatcacgccacacttcatgttttcaaagcatcatgttagagaacagtttgttcaaaccaagaggttgtaattgttttttacattgcaatatgttttgggtctttttcatttttaatcatgcagttaagagatatgggaatgagttttagccctgcagaatgcatgcaggactgtcacagaagatgacttccgtttgtttataccccactgtgtcagtacaaacatcaaaataccatacgtctgaggcagacttcctacatcagggacaggtatctgtgtgtcattatacaaaacagttctagggggatgaactacatagtaaaaaaaaattaaaataaatagtacctagtgtaaaataattttataaatgatcttttgtactttaggacattaaattgtacaacttttgtatataaaaagcttaggaactttctgtttagcaggaaggcaacacattcctacacttttaatgtatatgtttgttataatgtccatgtaaacatgccctatgtttgtgccttttaa

SEQ ID NO: 20369 - DNA, 1197 bp, Mus musculus
gtatagactatagcagagcttagattgggagtgtgaacagagactctgtattcatccttggctcctggactctgaatcttgggtcagttcctgctatcaccccatatccatatttaaaagggatcagccgtgtgtttttcaggagcagaccctccgtcccacagctgagctgggaaggcaagaacagaagggtaaggtgcccccgctaatcccagctcagagaaagaaaatcccatagaactgattcctaagcaagcagccaggagcttaggcctcaccagatgttcagctgggagttttcttgtccttgattccaaattaacaagggacactggagctgctgaactggatcagagtgactgaaagggaagttagcagacaaggtgactcgggatgagccaagttacaggacggtgagctgcagcccaaggatcctgagagacccacgcaggtggctcactgcgttctgactcttggctgagccctgctcttgttcccgttcagcatctgggaggcgttcttggctctctgtcctttctgcttcaattcacgagagttaggatgcacagagggtcatgatgtgctggcaaatggttaaccttctgctctgggtgcaggagaaggctgatatgcaggctggggggatttccgagacatagatctccctaccagctcacttcaaaccaccatcatggctttgaggacatgggactgctagagaggctggaacccaaggccagccagtttcccatacgtgcagcagatcttaaggctgcccttgtttgctccgaagaggaaaatgtaccttgcaagaaagaagtactcttgcaacttgccttaaactcctatagcagggaagaagccgggacttgttctgtaataagagaacagacagaaacagggatggagggtatcctctgacctccttccctagagccttggccaggtgctcactctatctcttagtgggacctcggagacccaatgggcctggtccctcagcaggtgtctcctccttccaggaaccagtgaaaccaaccccactgtgtcagaagatgccttattcagggacaagttgaaacacatgggaaaatgtgagtcttgccccttttcccctccttgtcccagctctcttgaggcaggccctgtggcctcatgagagggagagagcccccccttcccccccccggaagattt

SEQ ID NO: 20370 - DNA, 1178 bp, Mus musculus
tcagattgtgctcgccaccccatttcggtggagaccttctacagtaaagaagctgaagggcctgactggacaggtcttgctttttcactatggaacggtgggtgggacccgtgcaagaagatggaagctgtgtgtcgtggctcgcgcgcgtagtctcggcacttaggaggcgaggcaggaggattgccacaagaccggggccaacctggcttcgtagcaaggctactggtggacttctgtcaaaacaaaaagcctgcgtggacacgctgtaatcctagctctagggaagtgcagggaggcactaaattcaaggtcatccttggccacactctttagtttaagtctagcctaggctacatgagagctaaccaactggacttaacactgtggccatgctaggttgctgtgtgtattggccgtgcctcctttaggcgggaggcccatttcagctcacccctaccaggctgctctttccttcgtttaagttgattcagagactttacaaccctgtggtaaccgactgaccttggttctgttccctttctaaggacgagggatctgatgcgggccggggtgttgaaagagaagccactgtggtatgacatatataaggcctttccacccctgagagagcctgtcttccgaaggccccgcttgcgatacggcaaagccaaagctgacatccaggacatcttttaccaggaggatcagattcgagcgtaagtgtctatcccctatagtgagcagggtgccgcagaccttcagagaggaaggctcatgtagaagtctgccaaccagaccaccagaagaggatatcagatcgcattacagatggttgtgagccaccatgtgattgctgggaattgaactcaggatctctggaagagcagtcagtgctcttaaccactgagccatctctccagcccagaaacagaagttctaagaagtggaatctggagactaaactgacaaagttgcagataaagtgtttgttaactggcctctgttctgtatgaggtacttgatcagcccttgacaaacatcagctcatagactttattactctaaccctgtccgcgaaggcaggtatcattgcctctgtgttattcaagagaactatcaggttcaaggaggttaaccaccatggccaccccagagggcggtggatctgagaatca

SEQ ID NO: 20371 - DNA, 1317 bp, Mus musculus
gaatatcctgggttctgcggccactgcttggaacaagtgagttgctgttaggctcctgaggatgtagttctatagatgtttgtgtgcctggtcactggtacactggcagcatctgagaggcatgcttgttcctggtcctgtaagcaagatgatggtagtcacattctctgcaaaccctcacaggtcagcgtgagactccaagcttcatcagaaggacatgagcctcaggaagacgatgacctggcgcagcgggggcaggtgaagcaggagccagaaacagccccgtcccctccctgaggcccttcagcgcatgagcacgcccatcaccgctggcccaagctgatggactctgatggcctccatctctcaggcacgtgtgccttctcttagtccctgttttcgggatgttatgaatctcagtactgtggtttgaaagcaccagctttgtgaacttttatttcaagacatggttaaataaagggttctccaatgcttacaaagtaaatttactttgaaactgtaaataacaccaggaagcctttaaaggtgccttgtgctggccttgggctgccggcatctgaactctttgggcttctcgtctggatccctcagaatcctacttggccacaaggtccggtccctcggccgtgtctgcgggtggtgtttgtactttttttctgtagagctgttgactgcatcctgacaggcacagcagaggcacagccaactcctgctgcagtaagaccgagtgcctgtttgatgtggacgaagatcacacccagtccttggatgtcacgggttgggttcattgctcttgagatgatcagcatgggcacacagctcataggctgcctagaaattgtttggtgactgaataaatgaccacacctagctaaagactgacgttttcctagtcactggatttccaagatggcaggggtaggggtctgattcaggtggtcttccccacaaacatcctgccgccctggtactgcttccttgtgttgtgttacaccaaataaatgcgatatcctgttgtgatttggctctctatttgtgggtagtttcatccagcagtcaaaagtcttaaagcctctggcttctcagtgcagttctgagtgcaggcctttctccatcctgcactgaaggacagtctatatcctgtccacctcttgcatgtgagtgtgggtgagtctaactgaagtgtttctctgctgagttacccactgcttccggcattgctgctggtttatggttcctcacactgggggtgcgggtgggggaatctcactttgtgatggagaagcaaatctccat

SEQ ID NO: 20372 - DNA, 1178 bp, Mus musculus
tattatattgcatatgaaattgtttacaaaagaaacactaactcatccttctctttatcagttgaaagtgacacacgggacagagggaaattggagggcaggtgagggaggggagagggtttttttgtattttggtttgtttggttttggtttcttttcttgaatgtgctttagtagccagatcctccaaggaaggcaaaagccagccagccagagagagagtagcgaagcgggcaggctgcaggtaagcacactgaacaagagacacactggcaagctcccccacctcagcgagagcagaaagcgaacagctcagcccagtcctgggcacagacactacacaaggcaatgctggaattgaaacaatactttaataccgtttaagtttgtttcctttttttttttcctcttttttttttctttcaccaagaaaagaaaaaagtaaactaaaatacaaaatacaaaaacaaacaaacaaacaacaacccatataaataaaacccacccctctctgggaaacaaccataattcaaacatggctatttagtaatcagaaggtattgtctcagacaggatttcatttccgggaggcagggcgtgaggggggaggggagtgggactgagagacagttccagagcctccagggaaggcttctactgctaactgctgtattctgtatatactgtgccaccctgtgtggagtctgtgagtgtgctcttgagtagcgtgggctagccaatctgccattcatggtgttataaactcggaattccatatgtaataggatgcaagtctaagcgtttcatgtggacataaatgtatctaaataaaacttcccctagcactgtggctgacctcacccttacttttatactttagtatgaaactgatgagaactttggtagtgagtattttttttatatatatacatatatatgtatctatatatatatatatatctcaagcatctttcaggtctttgtgtgtggctttcttaaagccctgttgtaaaaaaaaaaaaaattactaagtggatggcagtctctcacatcacagatgtggaaagtataattttatatttgtattttcaaataaataagtttgtgaaaggtttccatcctctactgtggtccagaaatcaatgtgtttgtctgacaaaaaaaataataaaataaac

SEQ ID NO: 20373 - DNA, 3881 bp, Mus musculus
acgcgcctgacctccctacactacagagcatacctggatgtccaggcaagactgggcgaagtttctgagtggccctttgtttaggtgacgtcctcagacctggacccccaccagcctcactcctcatcccaaccagaggtggcacacttggattgagggttgacacatctcatctcacccatcggctacctgctgtaatataagacaacagcttttaaacgtgtatataatccatgattttggtttggttctgtttgttttccttggtggtccccctctccctcttcccttctccttttaaatctccctcaatcacatttggtagtgatttttgacttagtctggtagtcacccagcttaatatctagttaaagctaaccatagtatacttgttatatattaaggagttttttttctttttttttgttttcttttttcctttaaagagaatttttgttttgttttgattctgttctcgcttttaaaggatgctgagatggtgatgttactctccatttttggtaccagttctgagactgtaagacttttcatctgggactttagcacacactgaatcgaagttgtgatacgcggagcgggaggtgggcatagactctattttgtgttgtagaagtgacatacagttggctgcttaacagactctctagccgttcatttttgtgacgtctctttgttaacctaagtatatctattttcggcaataaggtaaggacggccgtgttttgagggtcttcctttcctatgagtgctttttcttttcttctgttcaaagaggtcatattacaaggttttttgaaattgtgaattctaaaaaacaaaaaacaaacaaaaaaatgttgtaaatataattccattaactacatagaaactattaaggaagagagaatcaaaaaatatttttgtgagggagttgatcctgggcagttaggtaccctggaaggaggggagggaacctcgatgaagccagtacaacaacagaagagcccccccagctgccagggcaccccagacccccactcttcactgttggtgtgatagacctaagaaccacattagcaccctgccagcctaccagcctctctgtgcacagcttctaatgttatgatctagctagatttttatttaaaatatgaaaaactgcttttcccaagacgttttttaaaaggaaaaaaagctacaattttaatatttgacatatttaaagtttcaaagcacacttgttttggcttaggggaggggcagggtggggtcattctttttcagtcttaatttttaaatatctgatcattttatattgtccgatcatttcagcacctccaaagggtcctaggatattctgcctctctcttcaccctgtccccagacgggggaacccgtgggtcaggcgtggataagcctgcgagaatacaccctttctccattcactttctatttacaaattaggaaagcaacctttcagtttatatatatattttttttcctttttgatacctcagtgctgcaagtatcatcagagaggctatggaagagttttgtgttttgttttttgttttgtttttttttttaatttattgtagatgtaaacagaattttaaaaataaaatataaacatcactgcactgtgactggtggggaaaactgacagcttcctgtttgtacacatttgacattggctgttataatatatggtcctcagttggggaagacacttagaatgaaggatgttttttaatttaacttttttttttttttaaagaaaaatatcagtaataggtcggcaacagcagccgtaggaagtacaacttagggtagcattaaagcatactgtagtgtggatatattttttttcttttttaaaatgtgatattgacattttattaatattttttaaattgttacgtttataaatttggtacttaaggcacagccagtgtgaggcactgaacgcgacatttattacaatgagctgctgcactcctacttttataaattttactaacaagtagactaatgtagacattcacagacgggatagcgcagaagcatcttcacacgacaagtctccaaaaaaaaaaagctaattcagagagggcgggaggaagcctgttcccgttctaattaagtgcaaccttgttttatcttattgttttattttttaagaaaggaaatcatgttctttttttatatctctatatataagatacagagttgtttggtaaggtttggggtgttttttgttttgttttgttttaagtttccaaacaaccaaactaagaaaaatgctggatgcttttagaatacaaaacttactcaagtcataaaataacaaaatagaacttttactttaagaaacaacaacaaagagagagagagactcgattcccagcaagtcagtgtctcacaagggcactggctaattactcttctgtccgcgttgctgatgtcctgtccccagcccctgtccatctcccccacactcccatcacctcatagaacgctctttgttgatcattgtctgttaataatgtataaaatggctatcttgtaagtgtgctgtcttggtactagtgtagtgactttttttctcctcttctagtacatattgataggtataatgtaattaaggttttaaaaaaaatagacatagttattcagattaggaccagtaaggatagaactttctcttatttatgaaaagaaaaaaaatgctaataatttgggggcagttttttcctttttttttttttccaagttcaaatttacttttatttttgctgatttgatgtggtttcaactaacccaaggtctcacaatgttcaaatggcggctgactctacagcattctgtaggtccctgcccccctagctgaaggggtgtgccatactaccttaaatgcaaacactagatatgcaaaactggatttttttaatttattttttaaaagagggaggtgtggtatattaaaatgattttactaagagaaaaaaaatatttttttaaggatgctcagaagaaattgataatctgtgtgaatatgttttagatgtttatatacattttgaagagacccagtagcccatagcacaaatcttgtgaacatctgatatgttttcaagtggctacctaggataaggttcatcattagtacccccacccccaccccaccgccatctagaagtccatcttaaacaattttttgtaaattctttcagcactggtgtccatctttgtctttgtttcagttaagctcaatagcgaatgtgggaccccctcctctgaccttccctgggggagaaaccctcttggctaatggctcttccctggcattatcaataaccacccggggactctctggctttcagatccatctgcctgagaccccaaggtcctctcctccctagaggggaggtggagcagcagttgactcctggttccctccctatttcagcctggatgtggggctggtggagatgcctccaccccaggagcctctgcatatgtggttcgtggccttcttctcacccattgggaaaaccaaacagcctcacactctgtccccatcgctcattggcttaactcaagtgagaccccaactgggcctttgcgttttgtttttgtttttttttaaatccttcatgaccattctcttaatttgaactcgtagcttgggctttaaggtagcatggctcgattgctgtcgacttaatgttccactgcacagcaattcacggccagtgaatgttacacacatcttgctagactagtataaaaatcattgggtaattgttggttctaatgacctgaaaggtgttcagtttgtgggttttttttggggggggctgcttggggggttgtttttc

SEQ ID NO: 20374 - DNA, 1099 bp, Mus musculus
tattagtgcttacatcaaaaatggattaaactcctgcgtctttacaatcattaaagacggactactcaagtggaaagccttctgtacagatccttgagggactatgccctcaacaccctcctcacccaccagccaccagccacacccagatgctgggtccccgggtgccaagatgctgttagaagtgattgggcagcaagtgccaatcggccatgaggtgtcccagctccccacaggacccagcagagtgagatggactttgagggctgggttagttctctggggccccccactgtgtctgggccttgatagaagtgacagtctcagtaagggcttggccagtggcccacccacttactgactcccaacactgactacatttctgttctttgccacaaagttctttgttttatgccacagtggaaggttaccccagtcatcagcagagatgaagtcccctatgtcttcataggcaccacccaaccccaaggagatccctggctagtaacagaggtgtctgcaacatcaaactgtgattcaaggagggacaactgagtcgtgtcacgactgatgtcacattgtactttcaagttagaactggagacagtcctaagaccctgagtttgcttatctattacacagcgtaatgaaacccatcttaaaagctgttgagtgagtggccctcctagcctggccctctcttatcccgttagctctcacctatcttggcccagccatgtgtgatagtagtacatctcctccctagccattcctaccagggatgtgctgaccactgactcttaggtagctttcgtcactgctgctggaatacagtgctagaccatcttcgtcactgctgctggaatacagtgctagaccatcttctaagtctatatagtcctagccttggatttcatagtactgtagcatgtgtgtagtacagagaaatatgcattggtcatataagaagtaacgtatgagacacaagggatctatggctgggacaggcaggggtgagaccttcacgatgagcagcatagcaataagtggagatgactggagacacacgggaaaaccatactgcttgcttccctagtaa

SEQ ID NO: 20375 - DNA, 1225 bp, Mus musculus
gctgaaaagactagtgtagagagagcccctggtacccagccatgaagcctggattcacctggcaacaagtagggaaaccccaaagcaggaagagaaaccagaggtgcgtgattgacataccttggcagcattattcagggtagcatgaaggagctggtaattcttagacattgtggcctctgagtgcacatcagtaaatacctacataagaggtctcatactctcctcaaccatggcgacggaggctgggctagggtacggaaggattctgtggagactcagtcacacagtcaagtttccgatcaggctgtaggtgacggagagctcggcagccaagctcagtacgtgaggagagacctgcccctgccttcagagattgggaacagaagactggctactagggagtgcaatatagacttaaagagactgggctacctagaagccagccagggtcactatgtatattgtggggctggggactggttcaaattcttcatagcagtaaactgagaaagacagagccacctaagagagatgacctgggcagggccccagagcagacacaagtctccattttaccttcagtgataagttatcatccactcccaccctcaggatgtcagttctcactccgttgccctcacggcagcctctgccctcgtcctttctgctggtccatctctcattgcccttgtctggctcggactagtagaaagacagccacacctagtgaccggaacgtctcaaaatatacatctgctggaagtttccttaaagagtaacaggagagtattagaaacattcccctactttattaatacaataataacaattcatcagtagttgctcacattatgtgagtcaagtgctgtgtgcgccaagcccacacgccatacccctacttaattcggaagccataaatgggtgccatcagtccccttcccattttagagattacaaactgtggctcggggaagagatagtagcttatctgaggtggcagtgacaggatttgagcctgtcccatcagcctgtgttctgagccactatccacacatgctctgttgtgccagtctctctcccgcggtggttgagccagactgcaacttttaaacactcgacagaaaggtgcagctgttcccactcaattcttcctatccttaggggaggcgataacccaaaatcatttacaagtggtctcgagaggcacgctgtgcatttttgc

SEQ ID NO: 20376 - DNA, 1174 bp, Mus musculus
gaattaggctctaaagagagtggggcagggtggggtgctggtggaagataccaggaaacggattgttaaaggcccagagggcaaatgccaaaaacccaaactggtacggtgaggctcgtttgaaaatgtcagagaaaatccgttccatgcaaactggcactgcctccaagctacaaaggatcccctcccccaaggtacccactggagttttgggggtggcccaggtagggcattaattgaggtgggggctgctaaggggccgtttgccagagcttgtgattggcaggcaggctgggaagcccagatagctgggccctctcaacttctacccattctagtctgtgacggtcccaccttgccctctggccagtgtcccttggtgatcctcactcccaggccctaagacaggtgcacagttttgggggttttattatgaatgctttgggagaatgaagagaaaaaaaaaaaaagcaaaaagactcattcctacctgtgcctgggaggggagaaagatcaaaagaacagccttgaaatttgtgagtgttgtttgttttctccgatcagtttctttcttttgataacttggattattgaaactaaactttaacccaaaattaaccctgcctctctccccaccccaccccctccccccctcccccgacttcatggcaagtttaaagggcagtatgggattctttgcgagtctgagagccgcctccccgggctatgcccccttctgccactctgcccatacacagacccctcctcccccctccctatccaggcgggagccccactcacccatccctctaactcctaaccctcaaggtcatctccaaccacacattttgtttctcggatcagtggtgttttatttgtagccatttccatcgggagccaaatctcccacaggccatcaaggtcagccatattcatcgctgcactgttagtgaattgtattcaggaggacgctccccaaacccctgcccaccccagcctgggttgttagtacaaggagtaaatcctcagcttgaggtacccacccacgggggagcccccagcactgcctagtggctgtaggcttgggctgtacccaccatagagagaagcccagcccagagccccatctttagacttggaccaaagctgtcaagttggggaagggaactctgcc

SEQ ID NO: 20377 - DNA, 1206 bp, Mus musculus
agcatagtgggagccattgatggtacttggagagctgttgtgaagggcagtccttgcctattcctgctacagtgacaacaccataacctggggctaactattccctaaggagtaggtgctggcaagtccaaggtcaagttacctgtagattcactgtgatggtgaggactacttcctggtccacagatgcctgttttcttgttgtatcttccctttgtgagggtggggcatgggactatcgaactctttggattctgtcttgttttcttaaggtgagtatttattatgtatgtgtatgtctgtacatgatgtggtggagcatgcctgccacagagtgtgtagaggtcagcgaacagctttatgttgtaggtaattctcctcccaccatagatgaacattaggggttaaactcagatttctaggccagctcagcaagtgccgtgtcctgcagagctggcttgctggccctggattctcttttattttttattttatttttaatatttatttatcggtatataggtacactatagccgaacagatggttgagagccttcatgtggttgttgggaattgaagttttaggacatctaattgctccggttggccccactcactcagttgctgcttgcccaaagattgatttgttattatacataagcacactgtaactgtcttcagacacaccagaagagggcgtcagatctcattacaggtggttgtgagccaccatgtggttgctggggtttgaactcgggaccttcggaagagcagtcagtgctcttaccagctgagccatctctccagccctggattctcctttataaaggcactaatctcactaagggggctccatcctcatgcctactcacttcccaagggccccaccccctaatacctagcagatgagaatttcagaccgtagcatgtaataaccaaacgaagccttgaaacacaaaaagaagttcaccaggtaggggctggaaagatagctcagcagttaagaacactggctgctcttgcaaaggacctgagttctgttcccagcacccacatggtgcctcacagctgcctgtaactccagcaccatggtatgtgatgccttcttgtggccttcacagatacctggcacttgggtggcatgcacacacatacacataaataaaaagtaaaagaaggcaagtttcctcagttgatattaaaaag

SEQ ID NO: 20378 - DNA, 1154 bp, Mus musculus
gtggactgtggtatgatacttctgagcctctgatgttcagtgtttatctgggagatggagccaggactgagtaccctccctgtatcataagagagggtctctgatggtctgatgagaggagtccctggcaggcaggaccatcaaggaatctgtctaaaaggccaaacaaccatgaaagatgattataattgctgctgctgctgctgctgaggctggtatctgcaggcccgtccatcagctgtccccgcctccttagccctcaggccttctgcagccactgggttgcagccctgcgtgtagcgtgtcgtcctcactgcccttccagaacctaatttcatccttgtaggtttttccaaagcagaatttgcacaagtggtgtggtttcttaaatatttattttgcaggccatttactcagcacagctatttttacagtgagtaaggagcaaggctaaaaataacagctcgtaacccgatcgtttctgcatctgacatttacgtggaattcatttgcatctcatttgttctccttttctgtctaacaggtagaatgtaagaaagctcagccgaaagaagtcatgttcccacctgggacaagaggccgggcccgggggctgccatacaccatggatgcgttcatgcttggcatggggatgctgggtgagtctgtataggtgcggggctgggggtgtgcagtgggcggggctagcggagcgcagtgggcggggctggggaaatgcaacaggctggggatgagggctgtggcagcctgtacctgtgacccacccacctgagtcacctggcagttgggcaaactgaatccatctgaacttcagtttatctgagctgctgttccctcatcttctaggtcgataggtttgcctttgaggtggtcttggcaatctgttgagcgtatagcattatcacgcctcgagcctagcttgtgatatgcttgaaattctctggccatcctcttccttaaactcgacacaggacagcacacccatctctgtctcagccttcttggcccagtgagagctcctctgaccaaaggattctttgctacctgaacttgtgtggactcgggttactttttttctaaaacttaggagaggaactgaagggtggcaagggtgggcactaatcctgtctatt

SEQ ID NO: 20379 - DNA, 1159 bp, Mus musculus
caggggcctggagagatggctcagcggataagagcaccctctgctcttccagaggtcctgagttcaattcccagcaaccacatggtggctcatggccatccataatggaataccctcttctggtgtgtctgaagacagctacagtggactcatataaataaaataaatcttagcttttaaaaagaatgagttctaggacatcaagggctacacagaaaaatcctgtcttgaacacacatatgcatgcatgcatgtatacatacatacatacatactacatggataaataactcttcagcatcttagagctaggacaggctaggaagcccaagaaagaccatcatgcaacagttttccagtatatccatttcttgaaaacttgaagaaattttcccctagggtaaggtgaggtagaagtctgggcaggaagtctctacatggcactttctgctataggttgcagcagctaacattttagaatgtagacattttgattgctggacacttgcttggtacatcttacctgatttgattgtcacacgccttctagtattaaaaaagatatcggggctggagaagtggctcagcgggtaagagcactgactgctcttccgaaggtcctgagttcaattcccagcaaccacatggtggctcacaaccacccatggtaagatctgacgccctcttctggtgcatctgaagacagctatggtatacttacatataataataaataaataaatcttaaaaaaaaaagatatcaaaccattttccccattttaaagacaggcaaggcagagatgaagcaacttgcccaagaccacacagtcagcaagtggcagtcccagaattcaggaccagaaagctacactcttgagctcatggttgaaccacgaggctggcctttctctgtagaccaagaaggaccatgatgagccaggcaccagcactcgggaggcagaggcaggcagatttctatgagttcgaggccagcctggtctacagagtgagttccaggacaaccagggctatacagagaaccccatctcagaaaacaaaaaacaaaacaaaaaaggactgtgatgatgggattgctggcgtataaggctacccatggccacagagcatcttttccccctcagcccatgtagtttcttga

SEQ ID NO: 20380 - DNA, 1178 bp, Mus musculus
gaaaccctctgggaatggtgggtgggtatggctgcctctttcccttccctcccttttctctctccccctcctcccataagcccgcctcttcagctcaggtatatcatcattccctttgtaagtagagaatggcaggggaggggccggtgtctgggaaccgcgcatgttgttaatctgttattaggcataagtcttaccaccaggctgggtactcagatgcctcattgtgtgctcgggatggaattatgcatcatgaataaaaactgctgtcaacatgcattggtttgaaaacattagaccatatggtatgtgattatctgtattgtcaagtgcaataaagtgaatttggatataataaagaatgtaatattttagaaatttggtaataaactaagggaaggatgacagctgaggttccttaaggccccagacacaaataaattgaagttactggcctctaaggccaggcaggccgaatggccacaccgtggcttagctgcatgctgtgatttttcaagtcagggaaagctctgttgtcccctgactgacagctctcaggactgtggaaccgaccgattcctgtggaagatgggaggtggtggtggctcctggtagaaggtcaggccttgctgtcacacctggcccttaggtataccctgcagcctgctggtggcgttggcagcttctccctactagtcaagggcagtgccatgccagccatcaagacatcctgagacccatctccccctctctaatcttctcagtttggttggagaggaaggtgtctcaatcttgagaactataagtcactccctggggaaggtagccattttctggaactcttctcccactgggccaaatgatgaaataatttctttaaggcagcgagtgtgtcagggcaacagatctccagcgagggatgaaaggggcaggggcagcggaggaagagggctgggaactgagtcaagcccgagtgtgccagcacatgtaacccttctgtaactgtacgggcgctcagaggaaccttccacctgtggacaagaaaacagaggttgctggtctgtgagtctgagatctttaacgctcctatagcagcttctcccctcacggtaaccaaacacatgaaggaaatgatgtaagcgaaaatgatgtaagctgggcaaggttgttttgactca

SEQ ID NO: 20381 - DNA, 1155 bp, Mus musculus
ggtgaaccagcaggacaccagccgtccttaatcccaagtgtctgcaccaagtgagcccatggatggccgacctctgggggaggcgggaaaggctagggaagcagacctgtttggatagataaagaccttgagtctgcagaggcgcggagccctgtgagagcgagcacgctcaggagaacacttacaaaagcaaactgaaaggaaattacagggcgttcacatacatgatggattattacacatccattaaaatgatgtttacagagagtttttaaatgacatgtgaaatggcgatgacataatattgcatgaagaaagctataaaatttatacacactgtgaatcacattagaatgagcatcacctgggactcttaaagaatatcaattcccgggcccagcttacatatcaaggccgtctccgagggggtcccgggggtccttgcagtctttcctcccctgaagtctttgatacatcaggatgtatctgagagtaactacctcgagcagcagggtttttagtttgtttgtttgttttttgtttttgtttttaagcagaaaaattctccaagctgtgacaagaggcttctctggtggaggagttatggtggactcaaatctgcaccgtaatcatttgagtcttccaaagctttgccggggagctggttctagagacccagccatgcctctgccctgccctcccctccccgactctccccgttcttttggccctcaatctcagatttctactagcctgggaatgtatcacggctcactccatgagctgtgcctatttaaactatttctccagacagcaagctacttgttacaaagcgggaggattcagaatgcccatacttcattgggtgcagtctgagttctgcagtaagcagagggatgtgtgctgttgtatgtcatgtctctaagctgtacctgatagatagatagatggtcgctaaggggagggcgtcctcatgaactgatcttggagtctagtgtctgagagttggtgggggtcagcttctccccaggactttgctgagcaataagttgggcaccaggttgctttaccatgtgcagatctgggcaaagcccgagctttaaggtgtcttgctgtgtcacagtgaagcctggggcagagcttcaactgtattct

SEQ ID NO: 20382 - DNA, 1216 bp, Mus musculus
cagacagtgaaaaccatcttggctagcgagtcctggctgaaattgagcggccacaccctgcacactggttcaacttacctttctcgccctggctctcttagcccctagccaacctcagcactcagtgatcccagtggaaattattcatggtgattactcaatctgactctcaatttgcatcaagagggctcagagagcagcctgtcagcctaagacttgagtgagaggaggtggaaaaaaccctgcttgaatctgttagcagattaccacacttgcagatctggacggtcctgtggagcttcgaagtgcttggggggcagctgtacctgtctgttcccctgaccaatccatgttatagaaaaccatatatatatatgtgtgtgtgtatacacacatatatatatatatgggtctcactcaacctggggtccacaaacctttgaaatgatttgcccgatgtctgagttttgcttgggagtggatccctagtgttgaacagatttgtcaaagagaactctcagtggcccctgccagcaggaacatgttcaaatcattgctttgaatgggaaaaggggaggaatctagaccatcctccttgagacggaagtctgaggaggttatgactcggtgcagtattttgctgtgctctggaagtgccctgttcctggggtcctcattaatggggtgctaatgagcagtgattttgaagtggggtgtgaggaaaggctctggagtgtgctccagggaaggagtcctgggtgaacttaaagacctgtttcctttgccacatctattgttgcttccactccccgatatcctctgtgatcagagcggtgactgtgctggttgcgcctctttcctgtctgaggaagcagcgagtgaaaggcaggaagggatgaagggggccagggagagatctgcatatcctgtcttcatatgcccaactttcccctcgatggagaggtcaaccctggatggaccagggcagggtagaggatgaggagagaaggcaaggaaggaaaaaaaaccatgtaaatgctctctctccccttccccattaccctggagctggagctggaggagagctaccaagaggaaggtgatgttcagtttgtgattattttctgtcatcatcaacattgtcttggtgatgttatcgatgcctaagtaccacgctgggagggacagcccaggctctgtagtctgtttcagatga

SEQ ID NO: 20383 - DNA, 1205 bp, Mus musculus
gtttggtctaacctgcgctaggccagtcatgtgaacttggacagggccctgtggccagtagaatcctgaaaagtttgcagtgacccgtgaggaaaagtaggcagttacaccctgacagaatcagtagcagccagagaagtgcagagcaagtgagggacatgtcaggagggaggcctgtcaaaggaaggaatacacaggtcttccctaatacttgaggaatatatgccaagactcccagtacaaaaccgaacctggggaactgggaggagtggagggaggggaaactggttgggatgcaatgtctgagagaagaattaggaaaaaaaaaaaaaaaaccaaaaatgggaactgaagatggatccatatcccgtatgctctctctctctctttctctcttcattgccttttccaatcctgatgagtgcgtatcaggctatcaggccctgtggtctaaactcttgcagtttaagatacaactgcagggctggtgagatggctcagtgggtaagagcacccgactgctcttccgaaggtccgaagttcaaatcccagcaaccacatggtggctcacaaccatctgtaacgagatctgacgccctcttctggagggtctgaagacagctacagtgtacattacatgtaataaataaataaatcttaaaaaaaatacaactgcagaagtagagtgaatccttctctgcttcacaattttcaacaagtggaccctcatgacagcactcaactaccttttgttcattattaaatcaagaactttcaccttttcacttaaaagtggtgctgtatagtttctttttggtgtatttaagtgtcagtctccctgcccttgtgcttcgagactgccaggaggccataagggatctttgagcataagcactataaaaccacgcaggtgaaatgataaccaagatgtctaccaggcttgagcaggtggcctcagccatctgtatacagtaagcaaagaggaaactcacatcccagacaggacaggacaaagatctagtgagttgtttatttttggaatttcctattcagtgaacacatggagagtaaaactgcagagaagaggaatataccaggaagtcaagctctgagcctgggggaaagggagtgggttggcatggggtgcagcttgatattaagacacttgagaatttgaggtcccagaatattgatgtgataggcaa

SEQ ID NO: 20384 - DNA, 1194 bp, Mus musculus
acttcaggcatcaacctctaggaagaactgtgaaatgtgagtgcatttctgcattccccagaagtcctggaggcaggatatggctggccaagggaaaggtgattgtggctggttgatagagcctgcacaagtattgggtgagtgaaagagagaagtgtattgatgtaagagtagaaggaagggcagggggctggtgagatggctcaacaggtaagagcacccgactgctcttctgaaggtcctgagttcaaatccctgcaaccacatggtggctcacaaccatccgtaacgagatctgactccctcttctggtgtgtctgaagatagctacagtgtacttacatataataaaaaataaattaatctttaaaaaaaaaaaaagaaggaaggacagatgtctagatagaagggtggatgaaggcattttgggtggtggccctagtcaataaaggtcacctcccttctgccctggtctcctagcttagcaactgctccatactgagaggatgggaaggggactatgggttgacaccagaggccttgtgtgatttcaggtgagttgagagggtgtgtgcttgaggatgctgtgagttcaatacatgatgttccttagaaacgcatcccccatctctgcagctggggaccatttatcattagcacaggtgggagagggaaggctcctagggaaagggtgaggactctcaggctcctaagatgacgcttgtttggtgacaaatgaggtggcctgacaaaggtctcaaagcctggtctgagcactttgcacgcctccatgctggttctgggtagcacagctgaggttggcacggtctgcccagaccgtagatggtgacctgagaggagtccatagctcaccatgtctcctagagacaccagaccacttcgtgttttgtttctgtaaatgaccttctggtgatttcttcatccttgaaaactggctttccgtgacccttcaacatggctgcccaggactagctctccctttgtttctgtcttggaggcggaaatagaccttatatagtacacattgtataatgtacaaagttggtcgctgtctaaggagaacttggtgggtgtcaagaaccctctttatgctctgaaatccagaacagctctggccttgtctccttcgaggagtctgccagaaagacagacgtttaggtccctgccttggct

SEQ ID NO: 20385 - DNA, 1209 bp, Mus musculus
ccagaggccagctatgctattcaggctgtgtgtctgtgtgtgtgtgtgtgtgtgtgtgtgtgtgtgtgtgtgtgtgtgtgtgtgtgtgtgtgtgtgtgcttcttcctgtttaatgagtaggaagaaaacttctgagtagagcttgagtttgaggtggatctttggtacagaagttaaactggcatgtttggggactttctcacaaatgtccttgtgacatttaacaaatgacctttgtgctaaaattgaggccctgtcagggtgctcactgcagtgatttttgagaagggaccagaaggagtgaggtataagaaggtgaaggacacaatgcatgactgttgaccaaggtcagagcattttagcaaaagggcatggagcggcctggagacaggatgagacgtgagtgagttgtctggggcttttgagtccttgttgtcacaataatttagtgtcctcaggccctgactcctgtcttcagattccttgaagctaacctaagcaacctcggggcttagagtggagccctcacacttgattagacagtctttaaagtaactgcaatcatatgttgatttatgcacctgtagctcaacaccataggacacagagagtcatgaagaaccaggattggaggtaacccaaggtgggcgagagaaaatatgcagacagtggggcatcatgccaagtacaaggggccaaaggggctttgagacctgagcaggagctggagggacaagtcagagtctgtggcaggatagcgagctgaaggttcccacggtgaggaacagcactggctgacttaagggcaactcagaggatggattcggagaactgcagaatacggtacccagagctgaagcgaggcttagggctgggggtgagggggccagtagatggaaaccatgtctcagtggtccggtggagtgtggctaccataggctctctaagtagcatgtaaactctgttgccaaaagttaagattggccgagaaagtagcatgctctcaggcggatgatacagccaggctgtgtcaggaatgtgcttgggtgacagccgatggggtaaggcggcatgctgtctcaacactgagatcctcgcttcttctggcatgctctctgggaaagcaggttggattgtcctgcggaccgaagcaaaggctgagttatcccctcccctcagtgttccattcctctgaaatgggattggtga

SEQ ID NO: 20386 - DNA, 1188 bp, Mus musculus
gtaattctcctgcctcagccaccatgctggccactgtgaatatattagagatgcttttatgtatgtgtgtacatgcagtatgagtgggtaatagaattatatgaccactaatatgtgatattttaaaaatctaaacatcctgccgggcattggtggcgcacacctttaatcccagcacttggggaggcagaggcaggagaatttctgtgttcaaggccagcctggtctacagagtgagttccaggacagccagggctatacagagaaactctgtctcgaccccccccccaaaaaaaaccctaaatatccataatatgtgtgtttatattatatataatataatatatatttaaatataaatatatatttaaatatatattttcagatcatattcttcccctagggaaaaaggagctattttatactctcaacataaatctgggatattagctttgcttgattagcgtttctattgctgtgataaaacactatggcagaaaacagtttgggaggaaagggtctatttcagctcatacttcatcaggtcacagtccatcactgagagaagtcaggacagggactcagacagggcaggaacctggaggcaggagccgacgctgaggccatgaatggtgggatgctgcctcctggcttgctctccatggcttgctcagcctgcttccttagagacccaggaccaccaccagcccagtgaccttagaaaatgtcctacagacctgcgcacaggccagtcctatggaagcattttcttaatttaatagtcttccctcccagatgatcctagcatgtgtcaagtttacaaaaccaaaaaaccaaacagactaacaacaaactagccagcatagaacttagctttttaaaaatatcaacgagtatttctaaaaataaaagggttaatggtagaacatttgcctgacatgcattataggctataggtttgattcctagcactgggggaaaacaaaaatcagaaaaagacccagagctacttgattaggcaaggctgagttttcagccttgagtttcttggtccacttggccctgactttccacattttgttcttcagtgtgtttggtagcctctctctggggcttgttgacctacctaacttctgaacactaacctacttacttgcctaagcagcttacatggttaacatttaccca

SEQ ID NO: 20387 - DNA, 1202 bp, Mus musculus
attatcttcgctctaaggtgggtcaaggtctcccttcccagaggcgcttgcttctttttacgttttcactggatgtcgcccttcctcctccggccggcagtgaagctcggctgcacactgcatccgatctatccatctgacagttaccttggtctctcctgttctagcatagcacgtgtccacacatgtgaaggtccacacccaagtaggagaagcagcagtccaaatcagtgtcacgctctgcccagcatttagttaccaggtgccttttgacaaaagaatcgtgccctctttctggtttcgaatggaagaccttttgtgtatttactgcaaatatgataaatgctagtctgaggggagaccagctgtccccatggtaagggacagtgtgtttaacacctggcagtttgcatttcaatgtggcagattaaaacacacatacatgccgggcagtggtggcgcacacctttaatcccagcacttgggaggcagaggcaggcggatttctgagttccaggccagcctggtctacagagtgagttccaggacagccagggctacacagaaaaaccctgtctcaaaaaaaccaaaacacacatgcgcgcatgcgcgcgtgtgcacacacatacacacacacacacacacacacacacacacacactcactctctctctctttctctctctctctctctctctcacttacactcacacacaccaaagcccaacttaaagcagtgatctttctagtagcctggagggaaacaagaacaggctgtggcagacacaggcatcagcagatgtagagacctctctgagaagttcctgatggcaggagaagtcaaattacttctacttcctgtctccagggcagcttgaagcataccttctgtatctcagacgttgtggttggtaggatattataaatggcagaaggtcagataatgtgggcagtccaacgaatgaccagagggactggcttgtgtgggcaggtcaggacatcctcccaggcaggagactagattagagtctgaaatgtagggtgttgccctcttaggatcaaagtaatatggtaccacaggctgggtgacttcagcatcagaaatatcttgtctgtatagttggggagctgggaaagtccaaggttaaggtttcgggatgttggttcttcaaaaaccagggagaaaagttcggttctgggcc

SEQ ID NO: 20388 - DNA, 1461 bp, Mus musculus
tgtttcgtttaaactgtgtgtatattataaacagttgtaaactgccttatgtgtgctaggaaccaaacccaggcgcctctataagagcagcatttgcctttatggagcagtacttgctctcctctctccagcccctgtctgggattttaaaacctgcgtttacattctgtgtgtgttttcaaaaaatcgtgttttgagttttggtttgatttttgtaacacttttttttctttttcttttttattctgtttgttcctatttatcttattttcttactacttaagaattagaatattatgtttttaagtgtctcactatgttggcctcccagatgctaagattatatgtataattcctgaacattattgcattcttttatttctccaatgtatcctgttactttccccccccctttctccccgccccccaggattgaacacaaagcctcatgcatacttggcaaattctataccactgtgctacattcccagccgctggtggctctttcttagtttcttgatgggtttttccatcttattttgatttggtttagatagatttggtttttctgatacgaggactcttggaaggagcccgtgttggccttgaactgcctctgcctcttaaatactagaattataggtatatgctaccatgtacaacctagctaattcattttagacttttgttttctgatttataagattacagacttctttctaggtaccactcaaactgtattccccaagatatataggtttttagttgtttttttttcaagacaggttttctctgtgtttttttctctgtatagtcctggatgtcctggaacttgctctgtggatgaggctgtccacaaactcacagaaatccacctgcctctctgcctccggagtgctaggagtaaaggtgtgtaccaccactgtccagtgatgtataggcttttaaatgattatctggttaataaaaaatcaaaatttctccaggacagccaaggctacacaaagaaaccctgtctcgaaaaaaaaaaaaaattagaatttctacgaatgaaaagtatttgaaagctgttattaatgtttaaccagactgaattagaatttttcctttttttttttttttttttttttttgagacaggatttctctgtgtagccctggctgtcctggaactcactctgtagaccaggctggcctcgaactcagaaatctgcctgcctctgcctcccaagtactgggattaaagacgtgagccaccacgtccggcagaattagaattttttaaaagggtagtttctacatgcatcagagactttgtgacttactgtagcttgctttggcacatgatcagtattttataaatattttgtacattttttggaaagaatgtatatcacttattgataagtaattttctagatgattcccatcagatcaaacttgctgtttgcattaagatttg

SEQ ID NO: 20389 - DNA, 1638 bp, Mus musculus
gtcatgtaatgggtggtgccatgtagtgtcatgaagctagatgtgctattgaacatgtaacttctgggacggtctctcccaacacaaagtacccttagttccaagcgggggagaccccactctagaccttccaggacctctgtccattgttcctatccttaccatcaagactcggtttcttcaggatgttagaagcctgtgccagagggcacaacatttgagtaagaaccctgttgtggttttatgcgccaggtctgcacccattccctggctgatgcctggagacttgggttgaaggacccacgctgacttgagacctagccccttgggtgccatgcagagttctcaggaattctctcttttttttccaggtggtgttgataaaccggtcgctggtggagcgaggccttgcacagtgggtagacagctactatgccagcctctgaccttggctcctgagttgcttcggtcttctttgcactgttgagagtgggtttggcacccaggacagagttttaagagcagagtaacaaacactgttctcactgagtcttctttccccattctgtagtcctgtggaggaggagggtcctcccaggaggacctgtgtgttctttcaaagccttagagtggcgctacaccggccagctggcttagctgcaggaaggcctcttagccaggctattcccattccatccgctcccttctccccacccaaaccccacactgcagcaggcaggccagggcgggtgtggggctggctgagaggatcaattttagagtctttattcagggagtgagacatggactaattggtatcgattccctggatagctcgcttggatgaattgatggtgtttagcagtttttatatacttcctccgggtctctaggaactcagacttttttaaacatagatgtaaataaggaacagtttgtcacacctgaccccagtgagtggggggaagggcagctgttatcttgccaagcctggttgtaatttgtaaccattttctatttgttcgaactctgtaaataatatgtttaaagatgtaatattttgtacaagacacactggagaacaaagggaactcaaaactcttccacattcttcccgaggaaatcgacgacgtccatccgtcccacagagtgggaccgaccgcccctgctgctccagccagggcccctgcgcttcctgtgcagacaggaagctgtgtgggagactgtcatttgggaatttgatttttttttttctgtacgaatttaaaaaaaaaagaaaaaaaagaaacttcattgaattaccttgcagtggtgttgactcttttatagactgtctttagcattgtgcaatttaagaataacttaaggatcttggactttacataaatcttgaattgtataaactctaaccttgagtccattttttcttcagtggagtggtgacaaagatttggggctgggactaagggtggttgagagtggtgtggccagctgtgactctccaagggccatcataaaagaaagagaagacccaaaatcttggaagacattttggcctgctcttccccctgcccccaccaggtggcaacccagcttactctggctcctgcattcagagaacactgggtgtggtgtagg

SEQ ID NO: 20390 - DNA, 1165 bp, Mus musculus
agcccaccagtgttcttaggcatgttgttctgagcaaactgctcactcccatacttgctttccttgacttcagactcatgttcagcagttaggagcactgcttgctcttctagttcaaatcccagtgtccacactgcagctcacaattgtctgtagctatgcgcgcgtgtgcgcgcaaaatatccatactggagtgattgcatgctccaggagatggacccttgtcacagagtcagtcagcactgcatatacagttggcctctggctgcctattttgggctaggggtctcccctatcttatctgaaggtgagatcgactctaaaggcaggtctgggtattacagtacaacagcctacagacctctgctatctgggtgccatgttcctgatggctatgccagttcatgggcttgccctggggccttgtgacataaacacgagaataacagtgttggctgcctcttcctgtcccctagctcatgctgcctgatggtatcactgtggaagtcatcgtggtcaaccaggtcaatgctgggcacctatttgtccagcagcacacacaccccaccttccatgcactgcgcagtctggaccagcagatgtacctctgttactctcagcctggaatccccaccttgcccaccccagtggaaagtaagtgctacctagagagtcagggggagtcctggtgcctggttaggactctccaagacatgtaggcaaggagggttgcccacattacccttggtctggaccaggaaaagacttgttcaggactcccttgtgtgccagcgtccataagttcttgcgctgttatggggttatactggtttgagttttctggctagccagtgttagcttgactggccaaagcagtacagattggagtgatgtcttgacgggcggactcttcttttaaacatttttttaaagattacatttattcattttgtgtgacgtgtatttttgcctgtgtgtatgtatgtgtaccacctgtgtgcttggtgcccatggaagtcagaaagggcttcaggtcccctggaactgaagttgtggatggttgtgaaccactgtgttggtactaggaatcaagcccaggtctttctcaagaacaatatgtcctcctaaccccagagccacctctccagactgggctttgtgtctt

SEQ ID NO: 20391 - DNA, 2678 bp, Mus musculus
ttccctcacttccctgctttctgggtcctccaggctgctctgtgtgggttggggctcggtcttccctgaatgctagaaaacatcagttggaggagtgagcgccagagcctccctgctcctcactgtaaaggtgtctagatgacttagctgagctcagctgctgtaaaatccagagagcctggggcagaagcgcaggcaggcaggcaggcaggcagcccgccctgagcggctgtgtgtgagcatgctcattcccctcacctcacaccctgtgattactaaacaagccaagattgtggtgtcttaattaatacttctaaatatttaacaatttaattttcccgtgctggtttttaaaaacattgttttaactgcattgtgcattgtatgaatggctggtgcttcaccagcccccagcgcctgagtagttttctagccccttgctgttagaacttaacaacttattagtgtttatcgccggggttcagaagtaattggcagactaccgaatcccagggcgcttggctccatgctgagctggggagactcagtctgaactttgggtcaagactcctctgctgaccccgggctgctggctcccatggtagtttccttccctcgtgaccttgttatcagtcctgccctcagtggtcacagagggcatagtgaggcaggccctgggtgagtagggaccgtgtcccttgccaccctccagggctggggtcattaagaattgttgaggagcttgtcttacattatgcttacggctggcgtcttctgtttgccgtgaactctggtgcactgggcacttgtatatgctgttagtggtagggtgggagtgttgcatgttctcgggctttcactgtccaaccaagttcctctgtctgtggccctgagtgaggggcaaggatggatgttcagaatttgagtcaactcttatagcagtggatcattcagcgtgtgtgtgcccgcgcgcgtaggaggggtgctgtgatattctgggtctgggccatatggttgggatgagatgctgagtcccaggccaggctgtccctttcagctgctgagcagctgtgtggtcttgggtgggttccggagcatgtctcagcctgtttctcttcatgtgtaagacgataaagttgtctgaccataggtcctataagtgaatgtaagtgcttagaacagttctgaaaactacatgctgacagtaacagtgtgggcttgactgagcctgggtcctcgggcctcgaggagctgggttcctgtcaccctcatctctctctttccctggaagcacttagttggtcgactgattggcaagcagggacggtacgtgagttttctgaagcagacatctggtgccaagatctacatctccaccctgccttacacacagaacatccagatctgccacatagaaggttagtggcatcgtggccctttgctcagccccccctccctgaaatgcaaggcagcagcaccctggttgcagctgtccatttggaagtttagcctctaaatagaaactgtgggtttctagttagttggagggcatgctgggtgtcttcccgtcagacctgtccagtttcaggtgcttgtgggagactctatccctctgcaccgtgtctctgtctggccaggataaggatgggtgctcagtgacaggcccagggcctgtcatccacatttccctcacagtgcataggccccttctggctgagtccacttgtgcctttcccatctgccagcttctttatgtgttcaaagcatgggtcagcatggcaaaggtaccagaggggagtggacttacgtgacttcgttcctaaagcaaagccacacgtttggcatcttagagacccttgcacgggaggattccgaggaggccctgggggggggggtgttgggtgtttgctgtcacttttcttctacccacagaggccgtgtgttctgtccttacccgtaggctgtgtgtctgtccttacccgtaggctctcagcaccatgtagacaaagctctgaacttgattgggaagaagtttaaggaactgaacctcaccaatatctatgcgccaccactgccttcgctggcactgccttccttgccgatgacgtcttgggtgagcatgttctactggatctcaattcttgaccctttccctaaacgtatcccagttgagagactcctggcatccgggccaagcgggccgaggggtgtgtgcgctccccgctctggcctccacgcagttctgctggcgtgttccctgaaggcaggatagagtgctggcaagaagccggggcctcttgaccccactgggagggtcatgctttcctgccccccaggcatgctttcttttttctaggtttttgactatagaggactgagctaggtgactgggtgtgggccttctgaaatgctggggctgtacctagagccactcactccccagcgccagagtcctgggtagggtttgccagtaaggatttgtgtgcgacttagatgcacattcttctagtcagctgggctggatagtggccctggcaaaggaccctttcctcgggaactgcctggattttagttggtaaaggcagagtccctagcctggaagcccaggaggttagcagaagagaaggtactgtctgcagcagccatgcctctggtgctccttgggcctcctgttgctg

SEQ ID NO: 20392 - DNA, 1099 bp, Mus musculus
ggccaccacagtgggcaagactgtggcacaagtgcacccaacctcggccactcagcctaaggggaaggaggagagctgtgttccagccagccaggaaactagcttgggacaagacacctcagatcctgcttccaccagaacaggtgccactgccagcccttcagcagaagctctgccaccaaagacctatgtaagctgtctcagcagccctctgtcaggccccaccaaggaccagaagccaaagaactctgcacatcacatctccctggctccctgcccaccgccagtcaccccccagaggcagtctctggagggggcaagtaacccgagaggtgatgacaactttgtcgcctgtatggccaacaacagccagagtgtcctttcagttagctccttggggcagtgctcagatcctgtcagtacttcggggcttgaagactcttgcacagagaccatctcaagctccggagacaaagctatgaccccaccactgccagtcagtactcagcccttcagcaacggggtgctgaaggaggagctgtcagacttagggaccgaggatggatggaccatggatacagaagcagatcactcaggaggtaggaaggtcttggggtgctttcttgatgaatctgggaggggtcccattatttgctagaaggcaacaagctactggccacccttaccttctgccacttgtgcaacaaaacaatgctgcccatccctgtgttatccagccacctgtacagatggatacccgagaagtcaggtgatcacatgagaccctaatggctatgagagttgtccgtgggttcactagccagggaacctccccagacctttagaagggaccacgtctgttgggtccaccagtcagccttagtgcctcttctcctttggacacatgcccttggaggggcctttggggcctccttagtggtccctcccaagtgccaggaatgggtgagcatctcttaatggccgacttcctttacttatgtgcttgttccgtgtctccacctgctctcctcagaagccctcgaagggtaagttcacccaggacagccgcagcttcgagcgctggtgggaggctcgagct

SEQ ID NO: 20393 - DNA, 1097 bp, Mus musculus
gatccacccaccgctgcttcccacgtgctgggactaaaggggaccatcaccatgcccagcgtactacactcttcattggcttctgtaatacctccttttctctccctactttcctaggtgtagctacttcacatcgactgactccaagatggcaatccagttgcgttcgctcttccccttggcgttgcccggaatgctggccctccttggctggtggtggtttttctctcgtaaaaaagatcggctcagcagcagtgataagcaggtggagacactgaaggttggccctgccatcaaggaccgacggctcagtgaagaggcctgtcctggagtcctgtctgtggcccccactgtcacacagcctcctggaagggaagagcagcgctgtgtggacaagccttctacagagcccctggccttgccgaggactcgccaggttcgacgaagatcagagtcctcaggcaacctccccagcgttgcagacacgaggtcgcagccaggaccgtgcagagatgagatcgccaaagtggaactctccctgatgggggacaaagccaaatctattcctcttggatgtccgcttctcccaaaggatgcgtccttcccctatgaagcagtggaaaggtgtaagcaggagtccgcactgggcaagactcctggaagaggctggccaagcccgtatgcggcctctggagagaaagcgagagagacaggtgggacagaggggactggagatgctgtgttgggggaaaatgtatctgaggaaggcctattgtcccaggagtgtgtctcagaagtggagaagagtgagtttccaatcctggcccccgggggaggtgagggagaagaggtgagccatggccccccacaggtagctgaacttttaaagaaggaagaatatattgttgggaagttgccgagtagctttgtggagccagttcactcagagccggttaaggacgaggatgcgttggaaccccaggtcaaaggtagcagcaatacttcggatagagacctggctggagagctggacaaagacgagaccgtgcctgaaaatgaccagattaagcaggctgccttccagctcatctcccagg

SEQ ID NO: 20394 - DNA, 1154 bp, Mus musculus
gcaactagctagctttgccggggagcaaaggtagtgggaagcccttgtgaggatgaagggtgtgtgtatgtatgtatgtgtgtgtgtgtgtgcaggttcggacacagcaggttggtgcatcatttcccacctctactgacctgtcagaccatttaagtctggggtggggttgctgacatgagactgcctggggtgaggaagaagtgggctatttgtttcctggatggtaggaagtagagtggggtggagaggcatcaggtgcctcggagagcccccgtgggtgccccttggcaccggatcccttaagatgatgacactcctaggcctggtgcattgcattcaaatcctttgtgttccctgtagctgctggtccggggctgccctctggggagagaatagctgctgcctctaatctcacccattgtcttggaagcaggggacaaacaaatcctgccctctacagggctgttggggaactccctcactcagaccttggctttgtctggaaacagtcctggaaagaggggctttgtcctgagccgcctcagtagtgggtctttagacccagctcagattgggctgtggagcagtgggcactgagtctcttctaggttccttgtgttggctggtcccaggttagcagtgttcatcaccccctaggaggctgattggcacaagacaggaagtctgtctgggaaatgtcactaccactgtttccttcttcaactgacgaagcctctacaacagactgatttgcactgagtaggggtgagacttggagtcccagtctctggggaacaaattaacagggaggcttaggtagacagtggtggtgataagccgggatatatgctcagagtggcaggactgctggttcttctcagggttgtgtctgagctttgggtgggacagctggtgaagtggtgggaggaggccattggcttggtgggcctgggcctcgggacattgcggattggccaggtactggactaaagcagactagagagcatgctgttgggatgcttcaggggtttggggagatagagtggggtgatctgtaactgaggtagagggtgggactgtgggcgttggtttagtttcaaagggcagaattgctcacagctgaactggaagccatttttgttttaggtacc

SEQ ID NO: 20395 - DNA, 1579 bp, Mus musculus
gaacgcaggacttacgtatgccaggcagtggctttaccagcctgagctacgtcctcagctcttctttctgcaccgtcgtctttcttaaataggctgggtcccaatacctgggctctgcgcagagaaatcaacagattatccccaagtagaatagaagacttctctaagtgccaacttcttcaggccccaacacactggggacccagaactttggtccagtgtggaggaggtcttttctttacagtgagctgtcgccagtctttctagatctcgccctggaaggatcgtatcagtcacccttgaccttgacccagtccttacatcaggaacactaattcaatgcttcttgcttccaggttccttctgaccaaggggagatggccctgaagatgatgaagctggtgaccaagcaggagtagctgagctggctggccctggaggcgctaagagcagagcccaggatgcaggtgctaatgtctatccctggtgctcttctcccctgctctgccatgggatatgactctgggagcacctgctctctcccgtaccgaaagactgtggccttctgtgtctacttagaaatcagttctgcttcccaaagagtatttaaaaccagactcatttaatcaaagtgaagggttgcaatcgattggtctcttactacaaaagcagttgatagcacatgtaaatccaagcacttgagaggtagaagaagcaagaggatggatgagaggttcaaacgcatccgcagctacatcgaaagttcaaaagcagcctatgccaaacagggagagtccctgtcccccacccccacccccaaaaaagagcaaaagcaaaccacatgatttatagacaaaagcagtgggagagacaaagaaaatacttaaacacccactgagctgccaactaggtgtctctgactacgggtcttttatttgctacatatatatttttacaaaaatgaaatccatattgtacgctattttgctgtctgcttcgttcccatgtcgacatgacccgcacttcttttcccatcaataaatgtgttgtgatatttttaatgacggctgaaaattctgttctgtgatcgccccaatgtttagttaccgaattcccaattggtcctgaatgtttccagttcttcctgtcgaagacagccctctgatgagccattcaactagttaatagtttatgcacactccgtttccttcaggtaaactcgtggaaggatggctgtttagtcaaaagatttccacatttccttataattaagatcataagctcctccgggcttaatgttcaaaccacagcttgaggtgtgaataggtgatccggtagcttccggtacaccctcagagagcaaaccccagctctgcatgcagaaggggaaggtttcctcacagattacagcagcattatctaagctcactggataagactcatctcccctggggtcactcttctgtctcttgtgcccctttgttcattagaagcctgtgctatgtttgcgatgcatttgttgttaaggaaagaggcagctcctgagaatcccacacttagttaggcctttgctgtgtct

SEQ ID NO: 20396 - DNA, 1207 bp, Mus musculus
aaggagaagcagcacggggctaaaaggtagctcaggccacctgtcagagtctgagtcctgcccagagtcagtcagcgatggccactgcagtgtcatgatgcaggaggtcaccttttcagagaaactgtcagctgagctgttgaaagatgcacctgctaccaagactgcagctgccaacaggcaggcctcaaagcctggctttaccttcagctccggcaagggcaaggcctccagaacctcgtcatccagttcagactccagttcagagtcggaagaccagttcctggtgtccaagaacatgctcgagggcgcatctgctggcttcttaaagccaactggcctctttgcagggcaagggggttctggtccagggctgtcattggagactccgggtattatgggatggaagtcttctgactcaaaccggggcagacaagctcctggtcctcccagtacgcctgtccccaccagtttgggaagaggatgggggcgaggagaggacttgttgtttgggaagggactgaggggccggggtgtccggggccgagggcgagggcgcgggcaagcggtctcctgtgtctttaatagaagctctgagagtcagaagcagagacagttaaatgatattctaacaaactcatctgtggtgatccaggtaagcgtgtgatgtttgtgagctgccctcctcccttccccatgcagcttttctcaaccttgtggcatggcgtgggctctcattccctcgccagtaatgaaggcacatgtctgttttccagaatccagtagagccccccaagaaggactatagtctattaccactgttggcagctgcccctcaagttggagaaaagattgcatttaaggtatattttaaaacagcactgaccataacaaaaacaaggttaccccccctcccccagcttccttagtgaatctcattaagtaatgttgacaaagacaactgtctgcaattgtcaggagtcatggtggggcctcggatgggtgggagtggccacctctgcaccgcccaagttcttggggtaggaaggaggagtcctaagagactgaagggttttttcttctgttttagcttttggaactcacatccgactactctcctgatgtctctgactacaaggtaagcctgtttctatgaaaataatgaagttagttggtggtggggtgcacctgctgtcccaagcaccca

SEQ ID NO: 20397 - DNA, 1902 bp, Mus musculus
ggttaagagcactgactgctcttctgaaggtcctgagttcaaatcccagcaaccacatggtggctcacaaccatccgtaatgagatctggtgccctcctctggtgtctgaagacagctacagtgtacttacatgtaataaataaataaatttttttaaaaaaagaaaagaaatatgtttaacataaaagttgatgcatttcaagtgattaaactcaaccgggcagtggtggcgcacgcctttattcccagcactcaggaggcagaggcaggcggatttctgagttcgaggccagcctggtctacaaagtgagtcccaggacagccagggctacacagagaaaccctgtatccaaaaacaaaacaaaacaaaacaaaacaaaagtgattaaactcagttttattagctttgaaagtattttcattatctaaccattcttcacagaaacttgcttaactaatctatagattttagcttacgtggagtcaagaatgaattaagtgtggtgttttgtctttttcccttagatcaccgtgctctggagagagttgatcgatccgaggctgatcattgactcttcaggtagcatctcgagtacataaggtgtctggatctgacctctggcctcgccaccccgcgctccgtaaccgcattgtttgggaccatgggtatagcctgaagattttaaaaagaagactaaatgttgtgtagactttctgtttctcttcactttaccatattaggaaaaaaagatctacctcatcatttagagtaacaaagttgttagtttatagatccttatttccttctggctaaattcagtaacccacttgaaaacctgggtgctgaccaaaatggcggtgtgctaggctccttcacacctgtttggctaccagtagcaatcgtccgtaggagtttacagtaccacacacaagaatgtgctgtgcatcttgctttgtttcttttaagtcacattgtaaagtactaaggcatgtttcttgacttaatttttgacatgtgagctgttctgtgaagcatagagcatctcgcccattccacagtttctccctgctctcctcaggagttagtggggttggatttgtcagaggtgatgagttaaagagtcctttcacactttccagatgtgaaacacaggactcctaggagcccgcgcagcccgcagtggggaggcatccttgttgtattgtgtggaggagcgctggcctcccactgccagaaggctgggcgtgagcctcagaccaggctggggcaaggggccttgctgcacaatgcaaggaacttgggctcctcataactgaagagaggatcttaaacagaaatttccttttctgttgttttcttcagcatgaagctaaaggctgaatataaactgcaaaattgctttctttgaacgaaaaatcagattcctccttcaaccttgcaaatttttaaataaaatcatatcaaactcaatgtccactctgagttatgttttcgttctgccaatagttaacttggttcataatcatgttcataacaaggaggcttgctttgcacctgggaggctaacacaggaggtttacgagttcagggacagcctgggctacatcgtgaaacagtatctcaaaaaaaaaaaaaaagatatatatatatatatatatatatatgtgtgtgtgtgtgtgtgtgtgtgtgtgtgtatgggggggtagagagatatggctcagtggttaaaagcactgactactcttccagaggtcctgagttcaaatcccagcaaccacatggtggcttataaccatccgtaatgatatctgatgccctcttctggtgtgtctgtctgaagacagctacagtctacttacatataataataaataatctttagcctggcgtggtggcgcac

SEQ ID NO: 20398 - DNA, 4206 bp, Mus musculus
cacctgatgtacaagttcaaggtggacttcaccgaagctctgtacccagccttctgggtgttctcggccggtaccaccctctctatctgctccaaatagccaggtccctaggctagccacagacacttgggcttgctggggaacatccaagactggagggaactctgaacttgtgagtccctatcagataagaaattgggaggggagctggggaaggggtgggaagaatcaaaggggaggtttaggctcagaaaggggtggggtgattgtcttgtggatggagaagcatatctacctcctcatgcccccgagggcagggtgacctcctgccagtgttctgggaaatctctccaggctgctagttacttgggcagagcctcagagagtaaaattattagtgttcctgttgtcttacagaaaaatctatagctgttagtcatgttctttctcaggtgacagatgtccaccctattctactctctggggtagccttcagatctttgtgttttgattatggcctagatttttgtttgttttaaagccagctgtagtggtgcgtgcacttaatccgagcctttgggaaatagaagcagacgcagcttgatgagttcgaggacagcctgatgtatatagtgggttttaggacagcttgtctctgaaaaacaaaaatccagttcttgagttctgtatgtgtatgtgtgtgtatatatatatatatatattatcatctctttggtgctggggtctgaatctatggcctttacccctgagctacatccctactctgaatttccatataacccttcccccacaaggaaccttttgtagataaggctgcagcctgtgttgatttgtgtcaaggtaacccagacctggttgagacggaagtctctccctcttcaaggggcagttctctggggacatgttgacggtggccatggagttagaggcctttcgtcccatagcctaggccaggggtggaggttgaggaacagaaccctggctggattgtgggagccctgatggctttgctcttactgttatcttgccttgacagctgttcccaacagtaatgtccccatcctctggattgtagatactgggctgatggctataaatgccgccatttgccttttgtggcttctgtcacagttaagtggacagccacaccacattcccaaagcctaccatcatggagactggctgtgtgtggttgcttcaggaaccttgctagatcacctattggtggacagcctgtggcctgaagcgagagacgagcgggagatagctggaatcctgtttatctctagccacagattacaggcccagtgatgagtcagacccgtcacctgcccgaccctttctgctctcttcctcatttttgagccaattccagatgttcatgtagaccaaactacaggttaggaagactttgaaggatgaggaaacagtaaataaataacaaggagagtccaggcagtggctgttttctctgctgtctttcacacagtgaaaatggcccgggccataaagggcaaggatggatggctgactgggatctccccacctcctgtcgtgatgccaaatccagaagatgtgaggatttgacctcttgtgacaggagtccagctctctctttcctaagcggggagctcctgcttgcaagcattcttatgaagagaggtcaccatagggaaggtaggccctagaccttttcatttgatggatatttgagaacacatctcaggtctttatggaattccaggctcttagtattggcattcccgacagacgtgtgatctgtgtcttctcccagaggaatattctattccctttaagcatctttacagggaacatgtccctgtagatggtatgtgggctttgaaagatttcttcctttgccacacaaattcttggcgatacttctccaactttgaaggtgcccaaaaagcttctttgctggtcttgttttgagccttgtttgaggccagatcagacttgggaaacaactaggttcagagaagtggaacaccaaggattaactcaggagtcctgcatgggctcttctgcagaaaaggagccggacagtcaggactctttccccaggcagtgtgcagctcaggctaggaaggcatgcgtccctctgtttatgagagacccaagcaggcaaccaaagcccagagctgtgcaagatgctttggagttgtgagtggaggggtgtacccttgctgtctggtacttttctgtttgcagtgataagaccttaccttaaccataagcatttctgggtagatggactaagagttcatcagagtgcacatctcacttggctctttgcagagtcaggcaggtgggaaggtgggggatggctctgctcaagtcctcttgtcattccaacatggaagagactcctaacgtgggtgaccaagaaaaccccagggccctgtagacatacagaaatttccagaaatgttgatgtaaaatcctgtcgttgatcaagatactggggactgtctcagtcactgtggtgtgataaactaaaggtggaatctttgtatttttctgatcactcagaaattgattttttttacctattactaatagcgatattttatattttctactattgattattaattaattactaatgttttcactatgacttcttgaacctagtgtttttagaggtaattcattaagataatcaatcattcattgtacagggcaaggctggctgctgtaccttactttgtatgcaaacagcatccagcatcctctctggattgaggtgtgggtgaaagatgtcactcaagctgaaatccactgtcgaggtacccaccccctaagagctactgcccagggccactgggtgctcaggccctgctccggaagcctgctatagcgtagctcagatcacatgaaactggataaagaacactcaagagagagaacttagcttcaagacagtgccagggtgggacactgatgagggataagcctgcttgagtaaccggcaagctgcagtgggaacccagagcttgcttgaatatttttcttgcggttgcatagacttgaccatttctatcgtaagttaaatggtgaaatggaaaagtcttgaccagagataaaccctattcatgatcttctctacataggactctttggctgttaaagaattacgcttgcctttgtcgctggtgtgggtgtgtgtgtgtgtgtgtgtgtgtgtgtgtgtgtgtgtgtgtgtgtgtgtgcgcacgcgcttgtgcttgcatgagtgcgtgtttaagttctcggaatttcctgagaggatggagtgccattgttatttgtctgccttgtgcctgacacagcggaatttatgtcaagagatgacccagcatggtagctagccactaccagcttggtgattgattacagggttgaggtcagcccaagacttctgtgaatcctgtctacagatgatggttcaattccagctccagttgagacctagtgcaatttccctgcagatgaacacatagctgtgctttaggctgatgcacccgtgtcctgtgacggcaggacagggaggctgtgtgctcgagacccatctagaccttgccctgtttgtgtctttatttgactgcttctgattctttttcttttgaataaagttcaaatcataagtgcgacattgtcctgccttttgcaaaacgaccaaaatgggagggaggcaggtcacagtctctaccaggatttgcaggtattcggcagtgtgtggagcctgaggccaggcaaagcatggggaaggggggcggcgggggtggaggtactatgtcccttaacatggggcaccacacttaactctaaaatggctggcgtattctccctgtgcagtacagcggtgctgctgggacagagggacctgcaaggatgagcagccgcagccggtggctcgcatcagttcttttaacaaaccattccttagatttgcttcttcacttagcctgggaagacccgcaatgtcagagactctttagagatgccatttcatctgtcccggaacactgtcattcagataagactcaagagtggtaactcagtcaaggcaagccatgtgtgtgaatgtggaaatgtgtccatgtgagtgtaggtgcaccctgaagtctggaagagagctggggtcctctggagctctgggtgctgatgagccccactacacaa

SEQ ID NO: 20399 - DNA, 1143 bp, Mus musculus
tagtacttcttccagcatgtcagaaagtaacttttatctgtaacataaagtaaaatatttctactgtacactgtgggatttttatttgcactagctagaaaacttgaaaggttatgttaatttgcacattaatgtggacctgaatacataatctgaccagaaaggtcagtagaataggtgataatgtcaaaataaagatattaaagcaaaaagccagcactttatattcagaaatgaggtgggagtgttaatttggtttctgtgactttttttttaaacttctgatggtttaggacaggatattaagtagattattttttaagatttatttatttgccgggcatggtggcgcaagcctttaatcccagcacttgggaggcagaggcaggcggatttctgagttcgaggtcaccctggtctacagagtgagttccaggacagccagggctacacagagaaaccctgtctcgaagaaaaaaaaaaaaagatatatttattttatgtgtatgagtgctctatggacacctgtaggacagaagaaggtattggatcccattacagatggttgtaagccaccatggggttgctgggaattgaactcaggacctctagaagaacagtcagtgcttttttttttttttttaaagatttatttattttatgtatatgagtacactgtagttgtcttcagacacaccagacaagagcgtcagatcccgttgcggatggctgtgagccaccatgtggttgctgggttttgaactcaggaccttcggaagagcagtcagtgctcttaaccactgagcaatctcttcagccccctaagtatattttatttataattatttttttaagtctagaaattttagaggagaaatagttctgttacttcatgccagtcctcatgaagtcacacgctcagcgtctgcacggacacctgctttggctcacctctacaaagcatgtcctgggtttcagaccatccctgcagctcaggtattctctgagagccaggagggccacgagtgtggttgaggggtgaattcctactcaattttggatcaagttggctgtgtgtgctattataatccccacacctagaggctgagctcaagggcagcctggctatatatgaggacctta

SEQ ID NO: 20400 - DNA, 1110 bp, Mus musculus
aagggagggcacatgatgaagaacttggggtggcaaggtgtccctccacctgtccgttactacttattgaaggcaggtccatggctgcccattagagggcgctcttctgctgtctgtggcctgcctctgcagttagccgcaccagtgggcatctaacttggtgtgtttctgacaatgacatgtttccactttgtggtcttgtgtgaattagtttctgaaagactagactctattcccaaaaccaccatttatctcccttttaatagtttattatgaatctacagtcagtgaattgccataaacttcaattttagtcacctcaggcctagaccatgtttttgaaaggacaacttagtaaataaaatattagcgagtacattatctaaagtaattttactctgcttcattaacctcttccaccggttcctgggtgatgccagattctaccactgaaaggtgaaggcgttccaccggtttgtaactgccttcacactgggtagctgcagctgaggtttgcgatagctgggaaggtttgcagctttttccttgtgggtgatcctatttggagtgtagtgaaattcatccttagattcatggtctgaggcatactgttagatttactgtagatgcagtttatgtacctgtaattcataatgctctatttgtggtaaaacaactgattagttctgggctatcagtcaaaatagagtagccactgaggtattccaggtagagcggacttggtgtcccctcaccatgacacgccatggtctctctgatgccttactcacattccattatgtaacttctcacactctgagtcactagttacccggcattccagataaatgaataggcacgtgccttgtttgaatacaatttgtagtgcttggtgtttgcaagttatatattagatggtgaacttattaccaggcctctatacttcacaaaatgattcactatgagatccctccgttccatttaaagttgtctccatagcaacaccacttacacattctcaggaaaaactatgagccatctctttatctgtttccacatcgctcatattttctgctctaatacattcctcatgaacttactggcataaac

SEQ ID NO: 20401 - DNA, 1218 bp, Mus musculus
ggattactataaactataccacagaagccacctatacagaagccattagtctctaagtattttccgtgtcagtaaatatttatagataatcagagtccttacatattaggtcattgtgtatttgtcagaatgattttttagaaatttgcactagtgtgttgttttgcttttaaggcataaagaatggaacactagctaaaggtgagcttagccctctatagtgtggtgtgaatggaaaggagtcagacagtgtcatagacttggtttgaattgtagctcagcatctgcagattcaccagcaactgactaaacctcttgggcctcagtgtcctagtcactggaatgaggctggttcctcctttgtaggtcagtggacagggtgagccgcagtgaacaggaggtgtggccctgtctctgagaactgcaaaagggaaataggtaacagcctgtaaggtgaaagacgatattgggtaaaactaatttttttcttgtcctctggtttttaggtgtttgatgtaactaaaactcccccgatcaaagctctgcagctgtgcactcttcttccttattactcagttcgagtccttgtttgtggaggggacgggactgtgggctgggtcctcgatgccattgatgaaatgaagattaaggtatcagtctttgagaactactgtcagggtggctgatgacgcggctcgggtagggtgctgacgctgattaagtagttagcacacttacagttgtatttgtgtctttgttacattagtccttacatcttacagttactattatatactagtaatctaaagagcaaagtctgcagcgtgtcttttatattctagggacaagaaaaatacattccagaggttgcggtcttacctctgggaacaggtaatgatctgtccaataccctgggttggggtacaggctatgctggagaaattccggttgcacaggtcttaagaaatgtaatggaagcagatggaatcaaactagacaggtaagctacattgtgctagcaagtctgttatttgagcttggggttattatttttataaatgaagatttgtatagctataaaatgtaatgaagttggccagctgtggtgacttgcacttgtaatcccagcacttgggacattgagacaggagagaattgccatgaacctgaggccaacctaggccatagcattaagacactgtctcaaaaaccaaaaac

SEQ ID NO: 20402 - DNA, 1376 bp, Mus musculus
gaatgggtgaaaggaggaaggacgacaagctatagaagcagcccttcttggaaagcaggctcacttcaggactctctcttgcacccagaagtggtctttagcccacagttgaccttccatgttcgaatactggagatagagtgatgtctgttctcttgatgcctcgctgattcggataggctggggtttggggtgacaagcaagtggggctgtgtttcccccttgggcggcattagtagctactatgatatcagactcctctgaggggtgtcccagcactaacggagcatatgttgagatgaccaaggcttcctaattgcccacatctggatttttcctttcccatccactgagaaatagctgcctctacctctcgagctgtgcatttgactgcaagcctcaggcttcaaagatggcttgcgcatagcccaatgatagtgtcttcctatgtactaaggtgactttccattctagactgtttggagatgttgaagggacagtaatggtttacaatggagtgaaatggaagtagtgatttgatgtgctctttgcccccccccacccccacaaggtttctctgtgtagccctggctgtcctggaactcattctatagaccaggttagcctcgaactcagaaatccacctgcctctgcctctcgagtgctgggattaaaggcgtgtaccaccactgcccggcacttcgcctttttcttaggaattctacctcttcaaaacaggaactcagaaccctgcgtttgatcctcgatgttagtaggaaaatacattctgtagccaagacacagccttaatgatctcaggggaaaattgtaaccactgtgtgcaaaccttgattaacgaacatggacactcaggatgcaaaggcagaagaaagggattgtttaagtgggattccttaaagtgtacgttcttttctgggaagaaagttgtgttctgtgaataaacgcagtgacttaggcttctctgtgtgctgtctccctcttacctttctttgtggaagaaggaattagttatgttgcctcttctgtttgcagggacacctggcccagctcaagactagaaagaagggaagaaagaaaggaagagggggaaggaggaagggagggacagacagacagacagacaaacagaaaatttgtggctggagagatggctcagctgtttataacactgagtgttctttcaggggacactggttcacgtttagattgccaacacacaagtggcaactcatctccttctatgtaatttcagtttcagggcatgtgacaccctcttctggcttccacagataactgcatgcaaatcatgcccttatggacatgcaggcaaaacacccattaaatttaaatgcatc

SEQ ID NO: 20403 - DNA, 1558 bp, Mus musculus
agtgagcaaacttgcactgacttcgttttaatttttttttaatataattactgtgaaagtataaaagctgtgtctcggagttttcctcttcacaggcaacagatgaggtagtgaatcaattcttcattccattccactatcatgaaggactcgggagagacttggccaactgatgtttacaaaccagaaatttttgtatttttcttttacagattttaactacgatgatttttttctaaattaagtaggtcaggttgtcaaagtcagtgcaatagtaatacaacttcctttttaagaaaacccaaagttgtttctatcacgtttcccgttcactgtgtaaaagaatcatggaaactgaacactactttttaccatgtttcatcttgacataacatggttattttttaaaaaggaggctttagttcttttgtaaatttttaaagaaacgattccattgacgcacacccccactggctcctcatccatgcgaggtttttgcagcaaacggtcaacattccacgaacaaacattatacctcttctggcagttttattaagtgtggagaacttgccaattttttagaaacactgcagttttttccaaccttttctgccaatctctaaccctgaactcagtgctgctttgggctgacatccatgactggtgtgggccaccaggagtaagacagtagtgttttgataccatccactttttcagaagacataacttcgctacatgcctttgccccagtttttctccagggtctctctccacagtcggggaggatcctgtccggattatgatagtattattgggttgcccatctgccatgagctttctgaatcatggcgaattgtatttgccactttggtgcccaacggttcaagtcattgtggttaagccacttaactttattgtatgagtttgatattcattttaattgtgggactagacacataaactcacatttctgccttttcctctgcatttctcaatatattatgtttttctcacgccataaataaaacattgattggcaggttgaagcttgtgtcagttgttgatgggttttatgctgactctgtggagtgatatttatatattatttttagtttcctctcaatgtcttatattaagattgatgtattagttgctttgttggttaatctttcttggtgtttaagagaaatgaagtcaccttgcctttagatcagatgctattataacctgtctgtctaggaacaagctgtcagactaaagatatggtttattcattgaaattctggacagctgtacgtttaaaagaaagtttattttgtatgtgtgtctaggctctgatttttggtaaattgtaaaggaacaactgaagaactggttgctggggatgtcttcagtagtcaggagtacccaaggataacaccagccacaccgctgtatatgcatgattctgaacagttagccgcctgttattttactgtgtatatttgactttaaatatattaactttttgtggattcatttaaagtctgctcatatgcagcactgtcaaaaccactaa

SEQ ID NO: 20404 - DNA, 1135 bp, Mus musculus
caagtcttagaccccagggcttccttaaaccagggtgtagagcctcctggatttagtcagccctgcaggactccagctttcagtcacgaagaacttcccgatttgtaagaaaggaattctccaggagaaaatagcattccatcaggttcctgtgtaactgagcatctcatgtgaatgcagctaaggaggttgagcctctgaattagctgaatcaggcgaacactcattgagaactattctttagtccctatgtcctcacccatgtgttcccttgggatgctcagtagctaccagcggtgtgaccagcactctggtcaccagggcaaagcagagctacagctaaccatttcaaaataaaaatgatcttgaaagtcagaatttgttaacttctaaattttaaaaatagtttcttttcctttcaaaaacgagatcaaagttctgtagaaataagtcgagttagataaatagcccgtctaactttctggaagctgccgtcaccaatatttcagtaactatttcccctcgagggtaagcctgccacccttaaacagctcccccttgaattggtatgttgtggtcatcttttcatggtgatatacgcattctgttgcattttaagtgtctgcttaagctatcacttcccagaatacccttcaccagttgttcagcaactcattaaagaaatcttaggctactgtaaggtctttcccgtaacagtgtcatggcgagcatttgtgtatttattaaaaccttttcttcaagtacccccgcactcaaacatgagcgtctgtagactgaatacttttgaaagccactgtgtcagagtacaaagttttgtcactgaacaaagagcttctccatccctgcctaaaaaacctggatttttgttttaaattggatattttctttatttacatttcaaatgtaaacctggatgttttaatcattgggttttatcatctctttagcatcggagactggcttgctgtgtggggcagagtctggcagtgactaattcagtgttccacacatggcattcctctcagtgtgttctactttacatgtaatgatgataaggacttgcttctaaattagcagagagagcaaaggcatgcatacagcatgcgcaccattt

SEQ ID NO: 20405 - DNA, 1248 bp, Mus musculus
acagcagtccagaggacacctcagagtcatgacccactctcttccttctgcggccccaaccccaccaccaccaccaccaccaccacccttagataccaagcaggacactgctctgtgacttttcagtgggctttgtattttctagactagagacactggctcatggccatgcttaggtgccatgagccagtaggagcatctaaagagagctgacaggagaaaggtatttgtttaaacactgctggagcgcttgtaaaaggatggaggccaggagccaagcaaagcagcgcagcatcacttaggcaagcatagagctcccaagaacacggtgcaagaaccttcactcagggccactttataagtaagtcacggagttcctgcagtggagcagcacctgtgtcagcatcagaccctagctccttacattctctgctgagttttacctggtatagggaatgcatatggaaaatacacatgggcatcgtgctcacccatacctctctgaatacatttaagatgtagggtttaagctgaatgcacttaggattcatgttttccttcatgaggaagaacataaagtcaaatacagactgacaaggagactcgaaccctaacaacgacagaatggctggagcaaacgtatgcctctcctcacagctgtctggatcttaggatgcttcgagaagcggggtaggggtaggtggctttgagagcagctgcagaaggacctgtttcaagtcccaaagaggtgtgaacaggcactcacacgcttttataagaccgtctctgctgtgacaccagcacactcctgttaggagatcattctcctgcctcgcattggagagtgtcctcaattgtttgtaagggaagctgagatgggctcctgaagcatgcagtctttaatctgtatgtgtgcatgtgtgtgtggcactcacaacctctctgctgctagtatcaagtccctccctatttctaccaaatacataatcaaaaagatctataaaaacacatagctctatgtactgagcactctataccatacatttcggtatacaatgaacatcttttgggaggtctttttgggatagccactctctgtgtataccaccctggccttgagttcacaatccccctgcctcaacctcccaagtactggtatttcagcaacaagtaccttcttgaaggtacccaaagtgattccaattttatgaaaaagctgaggtttagaaagaagtggtcccaaggatc

SEQ ID NO: 20406 - DNA, 1181 bp, Mus musculus
taaaaatactaacatgaggattctggaaaagaatatttgctttatttaaaagtgctcaagatctcaagatgacagcaaactgaggacagctatttaatgcatgccattacttctgttttattccaaagtatctttgacattggaaaataaatagcaaaaagataaaaaataaatataagcaatcgcagtagaagtatgaaggtaaagtggtgctgaagaagggttgtaaaccatgccacaggtgccgtaacatcaaacgaggttggatggggcctggggcacagggctctaagcccagcacctgaaatactgaggcagaccagtgcagaccaacttcaaaagatgcccaaacaacagtgccgtagaaagcactgacgagacacagccagccatggtgtcttatatctaaaggctcttgcaagcctgaggcaagaggagttctgggcttttgaggctaggctaggctacataacaattgctagcacagactaggataagtatggaagacaaacagaacaaactattgaaatagttaagtaaaaccatgaggggaggggaaaaaaagattatcaacaggaacaaccaagcccagactctgtggcggtgagccgggtagttcctgaaagggctgtggaaagccaaacaagttctctgctcttcagagctgccaactcgggctgagacaacagcactgtgtgcgacctgtatgatcagaactagggacctttccaacacaggaggagcagaccagtttctgagtaagtcccagcaccagcccagaaccctcagagatcaccctagtgactgggcgtgtctacacttcccccattcggttcccaggcacttgtgcctcatcgtgagaatttcaacttttaataactgttttcagcacgtcatttgttcccctgcagtgaaaatttatacatgactttcctaactcctacattatttataaaagtcaataataacatatccaaagtgaaatagagaagaaataagatgatcaataggtaaaatctttagcccaagagcactaggcattgttacctacacatagcatccctataaaagtgagagccatgcatatagattcctgtgcacaagttcatgggcatctataacatgactgacttgttgagcagttcctacaaagctcgagacacaggaaaatgcagtctttt

SEQ ID NO: 20407 - DNA, 1193 bp, Mus musculus
agtaagtgtagccctaaaccagccaaaattaagaatattttccatttaacctaattctgtcaacttcatttatactctcaagatagcaaccaagtatttttcacgtttcttttttttttcctcatgttatctataaatttgaattcagtaaatttttttgttatttttcttttgaaaaatcacataggctaaaaataattttatatctggttctacagccatgtttgtaaacctggcattagctaaggtgtttgccatggcaggggtgagggttgcaggcaagtagaagactcaagaaggtaatcttttataggtagttaacctacaaacagtcaagagactttgcacggattctaattctggtcacggttccccatgttgattttgttttctactgcactgtaaaacatagttgtagtgaaaagttttaccccagaggtatcaaagctgcctcacatacgtccacttcctcccaggctctcaattacctcggtatacagccaacaaaggaacaacgtgaagccctgagagagcaagtccaggccgactcaaaggggactgtgtcttttggaggtaatgtctgaagtgcatcatgttgcattaccacagacagttgggggatgctgttgtgacctacttttattgagaagattgttctgtaagagggaaatgaaaacttataccatagtccttaattggtactttaaaaatggccattgtcagtcactaccctggctgggtcagcagaagggagacctatatcagaacccatcagctccaaatatcattagtcgatcccactctttttgcatctctttgcatgttttattttttattatataaacattgctttaataattacaaaagatagtacgaaatgtagaaattttaattcactactatggagattacatctactttttttttttttttttagctagtgaaacaggaagtttttgtcatactgcataattatttattcttagagacggcataatacaccagggtttctactcttggcatattaatggtttctcagtagctgttattacaaatctatatttattacagcttttataaatgtgcatttatcctttgaaatgtagcagtttcttgtcttttaataggataagtcccaccccacccccgacacacacggtttggaacttccatgtttgtcactacgttatatt

SEQ ID NO: 20408 - DNA, 1172 bp, Mus musculus
tgagtcaccatgtggttgctgggacttgaactcaggacctctggaagagcaatcagtgctcttaaccgctgagccatctctccagtcctccttaacacattcttagttgcttctgtgttcctgtcaatacagacccattaattccttttctgatgaaggggagaattttccttttccatgatccccttgcattttccctgacctatcctcagcatcagccattactgcgggagtttggcctcctttagtggaggttcatatttagaaataaagtctgggaaacagaagtagtcgttacttctagaccttctcaacacagaactggatgacttgtatatatactgttatggttatgtatatgtgcccaacaagaaaaataagctgctattttgtttaaatatatattcttaactgtttgttcccttcaacacaaagcaaatctccatagctgagaacctggccccaaacattttgagctcacttttgcctggtatgtcaactcaaagagtatgctacattttgagcaacatctaaaagcacagtaggacaaaatcaaagagggcagagtcaaaagaaaagtgaccattcagcttctggcagttctgaagacctggagggaggaagaaaagccatgtaggaagagttcagttctggaaacatagtcctttttcctatctctcccaagttcagcccttactgaggccagtctttccactctgtaaataaaaaacaataaacaaaacaaaaagacagactcagagcaccgaagtaatctacaaacttgcataagcttattcagctgggtagtatcagacttagagcttaagcttaaaatgctcgtgactctgtgcctctcagtattttctgcaccctgtgtagaaaacagctttgcagtgaacagtggcagcaacgaaacacaacgatttccttttcaatgtcagagaaaggttcttctgcgttgattaaaatcattactgtgagaaggtttctctatataaggtagcacatgttaagatgatttctgagcaagaacaaactaaagctaaatatagattgaagtcagaaaatggtatggagacatgaggttatggaccttatattataatacaagattgacatgtacagctataagaatgatacagtattaggaaatgctgaaatttatttatttt

SEQ ID NO: 20409 - DNA, 1151 bp, Mus musculus
aggaaatgaatattgctttaagtaatacagttggcctgctattattcaccaagtatctttctataatttatagtgcttctgttttgaagaacaaaggcttaatccacaagaagaagtagatatgccagtgtttttctacattgatcctgaatttgcagaagatccaagaatggtgaatgtcgacctcatcactctttcttacactttttttgaagcaaaggaagggcacaagttgccagttccaggctataattgaagcagctcccaaggcctgcttcagatttgtgatttttggaaaatcatgtattgctttctcagaagagaaatattctatagtaatgtattttaaagccttgtattttaaatggttttacctttctttctttctttgcaccttcatttatcccacttaagactgaaagaacaagttcaaaactcagtctgtggtgaaaagatgctgctatcctgtgatggtgcttaagggtaggaaacaaacacagctctgttttaagtaatagaatatgaatattgttcatattccaagcctgaagaatatatgactgcccaagtgtgactattaaaaactgcatcatgggccagggatatgaatcagtgggttaaataaagtgtttgccacataggcctgacaacttgatttctattcccggaaccagccttaaaagagtgactacagtagctcctacctgtaatcccagagttcttacagtgagctgggaggtggagccaggagaatcatcttgcctgtatatgcatgctctggctgcccacacacagatataaactgctttaacagttcagtttaagtcctcctgaagtattagcccttcacatctataataatgtatctgaaaacttcgaaacagaatcgacatgcaactgtttagttcataggcatgctggttgctgttttccttcagtataaactgacaccatttaaaaattttaaaatttatcttcttaatatgtggggaggatgaatgctacccatgctgcagcagacaatgggcaagctgtgggagacagctttctctcactgtgagggtctcaggaatcaggggagcacgtgccttcaccggcagagctttctctggctgacccaacagtgtggaggaggagacacttgctccaag

SEQ ID NO: 20410 - DNA, 1147 bp, Mus musculus
cagctgttttgacttgctaattcattacttctcagctttttatctttacaactttttacatgtctgtctaggccaaacatcgtggtgcatgcctttaagcccaccacccaagcgtccgaagatacagctttgcttggactatgtagtaaagatacagctttgcttggactatatagtaaagcccccatttcacagaagcaacaggagatttaaccttccacataaacttcaaagacaagttgtctttggtctttgggtttcaaatacatgaccaataaatgggtaaagccaaaagattttaagtagttccacgcttagatttatattctaataggtcctaatctttaaaggttccaattaacttttatcttaaaaatgcatgttttactgtcctgtacctcattgtggttcataggcatgtaccaccatattcaatttatacagtgatggggattaagtctggggcttgtgggtgctaggtattcttattaactgacactgcatccccagacaagagtttactgcttctttttgtttgtttgtttgtttgtctctctccccctcccgcccgtctgaggcacagtttctctgtatagccctggctgtcctggaactcaatttgtagaccaggctggcctcgaactcagaaatcctctggcctcccgagttctctgcaccaccacgccctgccccggagggttcttaaaaagtaaacagtaaactaaccagggcgtggttgtacgcgcctttaatcccagaagtcgggaggcagaggcctgcctggtctacaaagtgagttccaggacagccagggctaaacagagaaaccctgtctcgaagaaagaaagaaagaaagaaagaaagaaagaaaggaaggaaggaaggaaggaaggaaggaaaagaaagaaagaaaagaaagagaaaggaaggaaggaaggaaaagaaagaaagaaaccaaaaacctccttccctctgcaagaatatactttctcttctgtctttgctagaaagcgtaatgaagggtgaaaaggctataaatccacttgaatagtctctgaatggaagaaagggctgtaatgatagttggggacactgtcagaagaggcttgagctgcacttctgccgttgtcgagccccatggccttgt

SEQ ID NO: 20411 - DNA, 1348 bp, Mus musculus
ggacacatctatgtattctcagtcactcagctctcagaaggcttaaggccagcgttaggcaaacctgcctcaaaataagaaagagtgctgggaagattgctccgtggttgatgttcttccaggggacacaggttcagtatccatcacccacgtggcagttcacaactgtctataactccagttccagaggatccagtggcctcttctgacctttatgaataccaggcacacattcatgcaggcaaaacacccatacacttttttttttttttaagaaatttggaatatttgaaaaggatacagatgttgtctgctaagcctgcagcctattatcgcagcagtttgggaggctgagtgggaggatcacctgagtttgaggccagcccaagcagaaacagaccctttcccaataaacaacaacacaagtatcagtgctcagtactaggttttcacttgtcaaatctgacttagctgaatttgtgttaagggcttgtaaaggggatgtgtatgtgcattgtgtcatgtcactggtttcttctacgaagacagaacattcttcacaatccaaaagaaaaagcagactggttcgggatgtttgacggctatgatagctgcagtgaggacacaagtagcagctccagctctgaggagagtgaagaagaagttgctcctttaccttccaatctcccaatcatcaagaataatggacaagtctacacatacccagatggtaaatctggcatgggtgagtgtctgcactttgacctgttgtgtgactttacctttgagcttgtgttttcattggaccttttgctaagttctgtttcattttattttattttgagatagtgtgttgctatagctcagacttgtctagaacttagaatcgtcctgtctttgtctccgaagtgctgagattataaacaatggcaccatgcttgctctggcccataggtttgtttgtttctcaatatgaatggttgtgagccaccatgtgattgctgggatttgaactcacgacctccagaagagcagtcattgctcttaaccgctgagccatctcagcagtcctcccttagaattcttaaaggactgttttaagagactgagcctcaaagtcaggagtttcaggtgacgtcagagagtttgtgtttcatttctttgtcgttgccatcctatcttccagtggggaacaagtagaacaaaatcataaacaacatattagtacacaataaattcagttaatgactatctctaaagagctgaatgaaagtgggagtgctcatacagtttttaaaaacaatcagtgcttactctgtgataatttattctaatatttgagacagag

SEQ ID NO: 20412 - DNA, 1190 bp, Mus musculus
tgtttgggaaatgttaatcatactgatcatcccagcacttggaaggtggaggaagagtctttagccctgcaatcagtttgatgccagcttcgtctacaagagaccctacctcaaaagaaaactacccattctcaggaaactgtactcccacaccacatgttcccactgtggtgtttgccatcttaagcatgtgagaaatttaggtaaaatagaaatacagaggaaaaagctatgctctgaagcgttgtctttgtattaacaggggattctcaaagttgaacagtagtccaacagatcagtattggccagggacttacagattttccacaccatcccattccctagcatgggactggagtccttggaaggggcacctctgttaataaacagcaggtggttctgttacaaggggacagcaaagcttgacagccattaccttaaaagctgtatcattttaattttgtttcttactatgtaatgattgatttgttgactttaggttataatgcccttttgagatatgaaggatttgaaaatgattcttctctggacttctggtgcaatatatgtgggtctgatattcatccagttggttggtgtgcagctagtggaaaacctctcgttcctcctagaagtgagtggcctcatggtcatttaattctgttttaaacttcagattcatttgtcttataggtatgaatattttgcctgtatgtatcaatgtatacatgaataagtgcatgcctgacctcacagagggcattggagtccctcaaagcttcaattctaaccaattgtgagccgccagttggcactgggaatcaaaccctagtcctacaggagcagcacaagtgctctaaaccactgagccaactccccagcccacggtcatttaaaatgtagatctaagtggtggtttatgcataatattctaaagtaagacagaaattcaagtggatgtttttacgtcgattaattcttatgctagcaagatgtatactttctccatgcttgctacccttaagcaccttaatactcataacttgttgttaaccttgtttctctgtttttgggggggttttattattaatttgtgaaacagttctgtctgctaaaggataactagttatttcttttattttagctgttcaacataaatatacaaactggaaagcttttctagtaaaaag

SEQ ID NO: 20413 - DNA, 1289 bp, Mus musculus
aggtaaaaataggatccttaaagaattaaagagctcttttaaaagaatgatttagaaggacttttacagaattgtaatttctgaactgttaaataccaagtacattttcatacccataatctcagtactgaggagactgaggcagaaggatggctagaagtttaaagttaacctgtaggctaaagagtgaagccctgtcccccaaaacaagagccaggcctggtgatgcgtacatttaatctctgcacttgggaagcagaggctggtggagatctgtaaattcaatgctggccttatctatgtagcaggttccaaaacagccagggctaccttgtctctcattcattcatagatagataggtagatagggttccagtacttgaaaggttgagaaccactgttctaagggaacaaaatttacagaataaacccataaatataggtacgtagatagacagacaggcaagaagggagggcaatattaaagctgcatatagacctttgtcataagtctccaacaagattttttttctgcttttgtttgaaggtttctgagagtatgcaatatcctttcaaaccttgcatgagagtagaagtagttgacaagaggcatttatgtcgaacaagagtagcagtggtggaaagtgtaattggaggacgactacggctggtgtatgaagagagtgaagatagaacagacgacttctggtgccacatgcacagccccttaatccaccatattggatggtcaagaagcataggccatcgattcaagagatcaggtaagcaactgtcaaaaaactttcagtaatattagttaggttgcataactacttggttgtttctcctacaaagtaaagatccaaaatagcattctcatctgattattctacaatagagtactaattccttatgttccttccacttcctctccatttaaaataatgaacattcatgcatgagaccatgagttttatttctagcacaaaaagacaattttaatccctttctctcacaactacaattgtattcctactcattttttttttttatccagaccatttgaaagctataaggagattcctttccacataattttaatctaaatagcaagattgaacttaactaactagacatggtatgaaacacacgaaacattgttctagagaggcctagtggtgtaggcctgtagtcccagctgtgcaggagggtcaggcatgatcattcattataagttcaagaatagcctcagtatcgtagtgagcccctccctcaaaacaaaaagtgaa

SEQ ID NO: 20414 - DNA, 3187 bp, Mus musculus
tataacttttttggtaagataaaagtttaggtagcaggattgaaggaaatgattaagaaggatatagttgtaaatgcaaatgaactgtcattacaaatgaaccttcttggtacctgttgggagattttttggattttagagttaggccagtcacatctccagcttcctttgctgcgaaaatatgcaactgaacccctcacagagggctcatcaccatgtagatcacggaaggggtcattaattgtgctcgctgacgttttattgcagcccatttaactgtttgtacagaaactttttcattctgctaaaatttatttggagttgtatatgaaactaggagaactctggatacttttatatgctctccttcacgtaaagatgattaaaattgtctaacactaaagtgttaaactggaatggttgacaaagtacacaagatctcagtctacataaagggttgggggaaattagtattttcctaagtttattctgttttccttgctagaaaaatcccataaaagggatattcttgtcagacctctgccatttcttccatctgtgagagagcaacgtgatgtaaccacacctgagagcaggtactgtcctgtgttacaaaagaatcacatggaaaattgttaaccaaaataagtgtagatttcagaatcattccagctctactcttaactgtcctgaatttgttagaaactgatttgaaagaaatgtttcttaaaattccatacacacacacacacatattatgaattgtctttaattgtagtcagaatttattataacaatatttgatttggaccattttaaacattccctattttaaaattcatacggcttccttaagaagtagaatgaaagggtaaattggtgacatgtttgctctctgcattttctaaccttctaccgaattgtgactgactcagagagctctagcatttaccagtgaggttcagaaactaaactctcaggaattcattgcatctgttgtagaagtgcttctgggtctgagcctggcctcctcagagtggtaatactgcccacttcctctggaaaataggcagggctaatgagaaactaatcaaatgattaacctctgcggcccttcagcctttggaatgctttaaaaaaaaaaaaaaaaaaaagaaagtaaaaagaatgctaatggaaaaccccaggagacattttaggtaagattttttgtttgacttttaaatgcatagaacattaaaaaccagcaatttattttctaaaatattgctctacttttgggaataatagcattggtaatatgcacaggtttacctcattctatgcaagaggggttaataacataaggttttgtagtagctactggaagtaaaatgtgttactttttagtgtaaaaatgtatggaatcgcatgtcaccatttttttaatactgactctgggggctaaatgcagatcacatcaatgcaagttgattcttgtgtcaaatatatgtgaattcagctgtaaaattactggatatttatcttaacagtgctgagagggacctactgtaaatgtgacatcctcacacttcccaaatctttgacttggaaggatcttcccagaagcttaaagcctagaagaggtccaaagcaaaggtcatagcagtctttattctcaggctcagcatgaaacccagaactgtgcttccatggtaccagggcaagaagcctgttggatggggtgctctcctgccttgggtggaggagctctccagggaactaactttaagccaggaaggatgtgatttcaaggcagccagtcctggtaatcagttctgtgaaataatcatttgtagccaggttttacaagcttccaattctacaccaaaaccaggcttggcgttagaattccccgcctacattcacaaagtgtttatgttctctaatagtgaagggttggtaaggacttgctagagtccaaacagaacccgaagccctcttctttgttaagaccctcgctcctgctgctaacacagaccgttaaccagaggaggcttccatcgtagccataatgcctgtcgtcgtacagctcagtagcccgttctctttcacagttcaacgtgtactgccgaccttggacttgtttgtgttttcctgttagaagcctgggaacttttagtagtttaatctttttaaccattttccttgcagtgtatgaggaaagctaaagctgttatcaacttcttattctgcggatactaacacgggttttcagtgtttgtttgtttttattattaattaattttgtgtgatgtgaataccctcgcccatcaatatttgtattatggtgctatatatttggtaatgatcctttaatattggggagggattttaaaaatactgtgattaaactgggtatcttcctttgattttcatattttaaataaagccacagtcatttatacaaaaaaaaaaaaaaaaaaagcatctgtccctgggcaaacctttcaaggacagaggccaaagtaaagtacgtaaggtttttacattgtttctgtgtgcgtttgatatataaacaatatctggacaaatttaatcttttattttctggtaacttgtgattattgaggaagtgtttgaagctttctcatggaatgtatataatggcgtgaaaaattccttcagagaaatttatgttcctttcatttttaccaaaatgcaaattttcagcatggatgtgaaaagcattaaaattataactttgtgtacaagatgaaaataattcactaaatttgccctttttttacacaaaataaaatgttaaagttaagctttattttatcaatttttcaacattgattttgtttactaggtaatgtgggtagataagccatggcacacatggagggtaacgggcaggcaacagttttctttttccagttccatgaggggtcctggagtagatagaactcgggttgtcattgtatgaatgtgtgtgtctctgtataattcaaagtacaactttctttcactgtggaatcaggattgaactagtcaagctaaccctatgcactctaacctctcccacatgcaattaagacaggtggtagaaagcggctgggtactcaggggacccttctcaccccttcagggtgggctgtaaataatcagcactaggtatggagtaattcttttgcaagggagc

SEQ ID NO: 20415 - DNA, 1294 bp, Mus musculus
cagggctacagagaaaccctgtctcgaaaaaaaaaccaaaaaaatccaaaactcaaaaaaactgagccatctcttctgctgctagtttagttgtttcttgagacaatgtctaaagtaggctagctggcctcaaaattgctatgtagctgaggctatccttgaatttctgatgccccaaacccttacccctctctcaaaggcactggccactccaccaggtttcaggtcactttaaaatattaattttgtcttcctgcctctgaaggcggaagctgatttgcttgcttggtcccattggctgtgcctttcttggacagagagtctgaccagcatcttccctgaaggctcgggctgctcacaggaagtccttctttcatgtcattctgaagtacttgggactctggcttttctgatgccatggccttccgctatccatagtcgagcgcaaggggctatgggcaggcttatctctcccatttgtaatgatgtcacctctctccccacccaggaacatcattcatggcagcgattctgtaaagagcgcagagaaggagatcagcttgtggtttcagcctgaggagctggtggagtacaagagctgtgcgcagaactggatctatgagtgacaggacggtgctggttttctacctgcttactcttgttctcacaggcaggggaccagcaaccctagatatttctggaacttctttgacctggaaggaacctttgggagctgtgactccctgtgcagtgttacgtgccactgttagattaaagtgtttaatctgtactttgtattgctgtacagctctgcattccttacctccttcaggcttctggataatctgagtggacagaatgtaaatgttttacaaattacttatattggcctcatgtgcacacagagattcttttcatttgtggtttgagccaccaccctgagacacaagggcatttctttgtctatctcccttcctatcacctgtgttctgttctctcctggcacagtcagacaacaatttgtgtggaggatgtgtgaggttgtgaaaactgttctgggaacagagaattcattagaaataaagatgccaagccaagcctgttggcccaggcctgtaattctaacactcaggagacagaggcagggggatgaattccaggccagcctagactacatagtgaaaccttgtcaaaacaaaacaaatcaaacagctgggtgtagtggagcatgctttttaatcccagcactggggaggcagaggcactctctcaaaaaaccaaaaccggaaaacaa

SEQ ID NO: 20416 - DNA, 2625 bp, Mus musculus
gcaatgaatgagtctgtgagagacagacgaggatgaggaagttgcctcttctgcatggtttattttccctttttcctttatttaatgctctttttgtgaaagacatttcaccacataataatgtgagcattttcccctgttacctttatattacacaatctgttctatggtaacaatacagaggagcgagctagtttactgcaccagtgttaataggaaatttcagtatatcatgaacaaatcgaagaaggtttactttctgtaaactgataaattacagaaagcaatccagatgtggtttgctctgccacagtctaatgtcactcacttaattgatgaggccatgttttacctgtcactaataatggaactaatggaaaagacttaataaatgaaattgtaccatgaagtacaatagagttttccccagtgtattatagaattgacgcactaataacagacggattatcacgatttgtctgaatgtcccaagagcgctaagagctaactgtaaagtactttaactttcactttcaattctgacaaatcttgtttatatggtatataaaactttgttttcatcagactcggggggttttatattaaagaaattaaggctacactatttaaataaaatttcttgttcctgtctcattagaactctaaagtttacgaagcctgcttctctgaatattctcatattttagatgaatttcacccattttcatactgacatttaagaagtgtattatctgacgtttaggaaataacctgggaagtgtggaggacacttcaatactggaaggatggtctaaaaggaaattatgttttgaattccttgtcctagagaatggtggtagtggattcagttttttccatagaaaaaaatgtacccattagccacatgtccctaggctgctcttaacctatcacggaggggacactgtggtggccgtggattctgcctcgtttgctgagtgcttaatgagtaggaaaggtgatttgttttattctgtataaaactaccaaacacctagtgcttgcttggtataactactcttcagcatttgttccctgataaaatgccatcttcaaggaagtgcggtgggaaagcaggcagagtctgcacctgtctccattcgtggcatccatctgagaaagtggggtcacatctagctttaactggtaaccttaggaggtttcaaaaaccatgagctacaggcttgctttcctctctcaagcttcctgaaagtaaatgatttaccatttcttacccactgctgcaagcaaagttgaacttaattttatgtgatctcttaaaaacatacaggaaacaggtcttcgggtcattggaaggaccacctcatagaaaagaaatcaaatacagatctctaattgtccaagtacgggggatttcccccggactgtcatacaaaaatatgtgtaaaaaatataccagggatttttttcacatgtatatgattaggctagatcctaaaatacataggacctagtgagcatgggaggcttttgtatcattaagcacattgggcacactctaaaattgtggccctgtatgttttaaaagaaaaacacctgttttgataaagctgtataaaggataatcaatattttgtttgatctacttattcattttttttggtgcagaccacttctttagcttgtctgctatgtctttattttaaatctgaatcatttgtggcaaatacttttaaaaagcattattaacatttattggaaatgttgtataaattcataaggaaacacaaaagttttggagagttttaatcccaagaagtgtccctgtcattgttcagaagtgcttttcatgtttgtgtggtccagagtaactcagggaatcagatgctaaagaagaaatattcaaatgtgttaccctggttataattgtttctttgaaatgtaacaatgttgacttcacttgcagactgtaggtgcatggtgattttagctaaagatctcacattactgtggccctgtgaactagctcaaggacgagagaacgcagaggcacccgtgcggcttgttttaagggctgtgcttatatttgtaattctgcttctcttcctcttcccccataacacaaatattcttgtgatgtttattttggtcaagggggtgatctttggaagaaataccaggataagctgattgcagacagtgacagggtctaaaatgccattgtcaccacagggccaagaaggcttacgtgcctctaggcagcctcccatgcaaaaactgacttttaaaggaagaaggcagggcactgagagttctcgttttgttacatccgggttatatgggttatatatgaggctaaaccgtatgaattgccagtggacagccattactggtctatagaaatagcagtgctgtatgtttcaacctaacacgcgataggaagtgcaggttaaatctctgtgaggcaaaaggaaggagactgctttctacaactcaggtttgagaataacttctctaactcatgtagatccaaatttgtctttcttacaagttgcagcttgcagggagtttaaaacatttcaacatagagcgatgcggcccatcactattgaggtggaatgtggt

SEQ ID NO: 20417 - DNA, 1178 bp, Mus musculus
tcacctggagtaggttgtggtaacttaactcttgtctgggcagctcaatttcaatgaagtcattttctctggaatcctgaattctcactttaagcaccagctctggtcacccataaattcaacatagtttttttaagagataaaatacccattttaaagattgttaacatcagttattagagcaaagatgatgctaagaattgaaccataagtagacttgaagtttttgcagatatgctgcgctgaccgtagtttgtgcccacctggccaactactaatagatttgattgcagtttgatgccagccagtctttccaaggtgtgtttttgtttagttatttggaaaagacatatgtctttgaatgccatgtgtgtgtgtgcaggtacctgtggccaaaaagtgttcgatcttctggactggagttagagtcagttgtgacctgccagatgagaaccaaactggactcctggaagagctgtaagcacccagctttctgagccatctctccagcccccatttgtctttaaaagcaggtctcactatacagcccaaatagaccttgaactctggactctcctacctcagccttggaatgacaggcatgcatgccacacctggcatcttcctgtgtctggactggggactaaatacatgtacagcaagtatactctgagtgatatttttagctcttagagatttaaaatacataatggaggattggagagatagatgcctcagtggttaagagcactagctgctcctccagagaacctgggttccattcccagcacccacatgatagctaataactatctgtaactccagttacagggatccactggcctctgagggtaccagccacacatggtgcacatacgtacatgcagaaaatcacccatacatatgaaaggaaagcacacagtggatattttaagacagtgtagcagttgggatatttggccgttggaaagttactatgaaatatttattgggccaggtgccaatcacttagtgtgattcttgcagcatcccttgagagctagtgatttgtgcaactatggcactgaatgtgagtcttgacagtttactctctcaaggactgtatggactagagagatgcggagccatgtggtgagcagtttgacaacatggtccaagagcctaggccttacctagac

SEQ ID NO: 20418 - DNA, 1901 bp, Mus musculus
ggtgttgtgagcggcccatgaaaagccaaattagaaatcaaggattcagtcaaactaagcaggtattcatgccaggtactcctttctctacccacatccgtgtttgaatgctattgcctgtgacctttacgcttaactgttgtgtatcctttttgttctttacaagaagcacagaggggttttttgtgtattgcgtgaaatcttacaaagcctatgttaacagaatggaattttttttcaactgtgtgtagggatgcagtggtgcccagaattagatatctttaaagaattttaaatacaataaacacttcatattacccgccttgttacattcagtgcaattctcaagtctttaagaggtatgtgtttaatgtttcctactgtgtaggagaatttgcagtcagccatagtatagaggaataatcactggctgagacatcgaaagcaacagcatctagccaggacagacacttggatcagtgacacaaagaactgattgactatcagatgaggttgggttcttaaagaactgtttcaagctaggttttatagatattcttaaaacctctaactgttcaatcttcgggctagtggtgtgggatgaaatattcctaatgaaaggaagtaccaattagttgatttattggtggcattcctgttttagaaaagcagtgtagttctgtctgtgtgaaccattcactcataggcagcacacacaggcacatggctctaagcaccacactgattgattgatgccttgatgtaaaaacagtacattttatatacacgtgtcatggttagcagttagcgactgggccaacacttagtcataaaagtttaccttttatatgctgtctaattatcaattttccccaaattttgcattgtaggactactgttgaagagtttttgaagaatactgaaaacggaataaagtgaagatcaacattaaaatgaggtgaaagaaagctatagtggcatagaaaaagtataaagctcagttagttatttggtttttttattattattattaaaaattaattcaggactgttgtgacctaccagatttcagaacatgtgttaatagcacatatgccactttgaaaacttaggtcctgtatcatattttttctttaagactttttaagaaatattacctaaacatgtggcttgctcagtgtttacttgcaagttttcagtcttggactttgaagccaggattccacgttagtgctcatgtggagcagactggggctccgttttacacttgtgctctccttagcctttggatttagaagtgaaaataaagtatctctgacttcctgttgcagagttgattgtctgtgtcattgaaaggctcagtgctgctctcttccaataaagtgacgactccaactactctcttgttttaaatatgaggcatactagtaatgcaggcgcagtgaacttttcctaacctgtcctgttgaaggttaatttttttatacaatttcctgtttgatgttttaatggtgcttcaatcttggctggttatgaataaatttggatttgctttcaatagcaaaggtgcatagtgaactgcaatatatttttacacccatgaggtttctttagtagtaaaaggttctaaataacctcacagtgtcttcctctggtaacctatgaaaaggatttaggcagacattcagaaacttccagctgttcctttcctttaaatcctatactagtaatttcttttaacccagtcttgtttggttataaatgtatatattgctgtgtatgtagtgtgtagtacatataacaaagatatttgagaagtaataaggcaggtatttcaactggaagtagcagcatgtttgtatctagccccatcgactgtataaagtaccaccccaaccaca

SEQ ID NO: 20419 - DNA, 1110 bp, Mus musculus
gtgctaggtagatgtataaggattgaaaggtgagcttcaatcttaagggaagcccccttctgttttggctctctgtatctgtaactggcctagagcttgctgtatagatcaggctggactcaaactcactgagatctgcctgcctttgctttcagattgctgggattaacagcaagattttcaataattttcatcctctaaaaagtgctttgctggtttttcttttttaaaatttttccagacagggtttctctgtgtatccctggatgtccttggaactcactctgtagaccaggctgcctgtttgtttcttaagggaaacttttacttaaatcttttgaattattattgaatagtaataatatatgtgattctctgagcccttttagtaataccagctgaaattgtttcctttttcttaaattattaagaagtagagatcgacgaagaagcagaagccatgacagatcagaaagaaaacatagatctcgcagtcgggatcgaagacggtcaaaaagccgagatcgaaagtcatataagcacaggagcaaaagtcgggacagagaacaagatagaaagtccaaggagaaaggttggtttactatgagaggtgctggcagcaacccgtacccctacttgctgtgctccaggacagccatctcaatttcaagctcgctctctctctcttcttgctctgatgtgaaggtggaagttggtctcattactcagttgccagcctgaccgtcttaaagactttctgagcttgagctgccttgaggatgattagctggtagaattgtttaacttttgtttatttggctacatttattttaagctgcaatagtccattgtgtctcccaaagtgtatgtacatctttcattgtttctactgtatagcagtcattaactcagcggttagcttccgtgtgctcagaaggtggacacctcacttgtcttagcagcctttgtattgtatctgcatgctgttcccgtctgctctcttctggggtctgtagctctcagtagctgctgcgttactgttagtggttaatggactgtaaaattggcccttggcctattttcattaaaaaattctcttttagcctttat

SEQ ID NO: 20420 - DNA, 1195 bp, Mus musculus
actttcaactctgattcatgaatagtaaatctgctcccaagcaagagctcctcccttattaaggtgcagtatttcaagtcaggcttagatgcagctgtttgttgttattccttggctgttctgttttgatttagtggttggttttactgttgttgttgtttacttgttttgtttttgttgattgggtatgtatcctaatctggcctagaactcactatgtagaccaagctggcctggacctcacagagatctgcctgtttctgcatcctgacttgctaggatgaattaattgttttggtgtttgagacagtgtctcactatgtagtccaggctatcctgaaacctctggtctttctctccgcctcccgtgctgggattgtaagtgtgagccacaatccatgcctgcctcctttactgtctgtatttcagtcctgactggactcagtgaatgctgcaggccttaaattacatgctctgtgctacactaccatttctctctctctcttttctagagctggtactcaaagtgaggattcagaatccatctcttcgtgaaaatgacttcattgaaattgaactggatcgacaggaactcacctaccaagaactgctgagagtgagctgctgtgagctgggtgttaatccagaccaagtggaaaagataagaaagttacccaacactctgttaagaaaggtaaggaaagtctgctcagtgtgagtggttgctgttttcatttcaagcacacttaacttctcccttggttattgagccatagcttaagtggaagccaataaaaaggacaaaggagagccaaggccaaggccaggttaaagcttgtgcttgctatgtgcaaggctctgagctccagctccagccttactgtaatcactccataagctttcttccccttcctctgagtccacagagaagcccccaccttactcatgtatttctttccaggcagggtcttgatgtgtagccctagcttgcttggtatttgttgtgtgtctcaggccagccttggatttatggcagtcctcctgcctctgcttcttgcctgctaggattaaatgtgtgaacgatcatactctaatacactggcacttttgaaggttggaagatagcaggatgttacatgggcctgtttcagttgttcccatagtaacctgtagccttatgccatatgatatgcgg

SEQ ID NO: 20421 - DNA, 2084 bp, Mus musculus
gtgcaggatctagagagttgtcaaagcagaagctgagagcgcagacctatttctagccactcctgttgacagtgcgcctgaagggccgggcgtgcctctcttggtgttgcatgctcgtgacactcaagaaattttgaactgatgagggaggaagactggggaaagaaagaaagcacacacaggtactggacagagggattctggtatgacctgtggctgtgaggtctcatatagcatatttataaatgttactcaggtttaaagtatttaaaatatagttacctaattgtaaataggctgttaaccaaaagagcttcccctcccccagttttcttttatgaccactgatgactgcggctgtctcgacagtcatcttcacatctgctcccctccacagtcactagagggctctctaatgctttctaaaggagccaccacctgctccgtggccactcctgtcaccctgtctaattgcaccattcaagaagagcacaggcgctgttggacaaggcgcccaccactctcactccctccaggaacaaagagcagcttttgagcccggacttgttgctggtttaaaggttattgtgggaaactgaactaaaggagttagcatctttatttttgtatcaaagataaaggttattttgaaaattattagggtttttacataactctggaatctgttgcttttataaacaaattgttcaattttaggaattccccgttacctccacagtcagttgtgagggcctgattagactctggagcatggtgtacgactcttctccaagagcgcatgcaagagtctccccccctcagcctcattaaagacgaaaagccacctcggtttgcttaactttagatagataggacctggcgcacacaagagcaggagaacagggctggagcagctgttgacgggacccctgctgtcttaagcttttccccatagtgcctatagtttccaaagaaacttaacttcctgggtattaacttaattttattagaacactgcagttgactgaaaacatgcagatgcactggaagagaaccttgtgctgaggtaatggcctcccactgccgcctgagtgctgaaatgagcttgaggtgttcttcaaagccagtgtcactgtgtgggtcactgtgaggtgactgcatggtgcctggccctggcacagctggtgacttcccttgtagagtgtttgcgtagtggagtggctgtggctcaccaccccctttcccaagtgctttaatgaagacacctcccttgtgtttcaaccaatcagaaactactttaactaaatgtactaacctttttccctcctaatttgctttgaaaaagtttagtaattcaattaagcgtgattctatcttagaagaaataaactcagtattaattcatgtctaaatcactggggttgagactccttcagcctccctggttgattagagattctgagaagcagtagagctggctgggaggtgggctacagaggagcaagcaagcacttcagactgaccaaaggttgtggtggcccacatggctctgcccagtgtcctgtgctttgccacagtcctctggggtcagtgtctcgggcagtgggatggaactgtgtgattgctcttaggtgagttccgagtcttaatctatgcattcagagaaatatttttatatgcgttgtgtaatttataacaaggggttttcttttaggctttgttaactgaatgctcctctcctcctccactgcatagttaaagcatgtgttcacactgtgtaaacattcacagaagacttttcctcgtgtgttgttgactctttaaacataacaggtattattaaaattaactgttaactgacccagcccattctctctcgttttgccctcgttttgccactgtattctaatcatagagggttcaaattgctgtgaagtcccatggggctggcgctgtggaggaaaaagaggaccagatccccagccgagtgtctgccaccccactgttgcctgcctctgccctgtcacgagtgtcactgtctcaccccgtgggtcgtgtctggagatggattctgtgtgatgtct

SEQ ID NO: 20422 - DNA, 1027 bp, Mus musculus
ttggctgtcctggaactcactttgtagaccaggctggcctcgaactcagaaatccatctgcctctgcctctgctgggattaaaggcgagcaccaccatgcccggctgagaagcattgtttttaagggaaacttatttggcctaagctggccaaatactgtgtagctgagggtggcctctgcctcagcttcctgagtgctgggagtatatttttcatacagatattccttatatagcccaaagtagcctaaaactcataattctacacacacgatcagcaactcttccatcctaagtgctaggattatagaccttgctgcagtacctaaatcctaccgtttctatgtgatccgtggtgtaaagaaggcggatgaacccatcccttaaccactcaggcagtcagtctgctggggtgtgtgtgagaggagtcaaattgtgcatattatgttgtagaggcagagaagaagcgtgaggccaagcagcaagctaaggaagcgaaggagcgcgagctgcggaagcgggagaaggcggaggagaaggagcgccggcggaaggagtatgacgctcagaaggcgtccaagcgggagcaagagaagaagcctaagaaagaggcaaaccaggccccgagtaagtctgctttccattttcagggtgcagcgggggtgtgcctattcgtccttgccctgagtgagtgactagtgtcactgctgcttgtttgttgagggtgggagttagatctgtttggcagcagtgaagaataaataagaaaactctcatagctcttgcctaaagtgggcatggtagtactgtgaggtggaggcaggaagaccactgcattcaaggccagcttgctctacatgtcagattgcaggacagctggagagacatagtaacaccctgtttctaaaacaaacaaaacccaattctctttgcctttttcaacctaaaaatgtcaagctttttttttcattataaatgtaatgtgggaagctgggcatgttgacatatctgtaaccttgaagtagagg

SEQ ID NO: 20423 - DNA, 2411 bp, Mus musculus
aactttgtctctgtaactccttagaatgccatttttaaatgtagtccttagagaccatggggaagactgtttctacctgagtgggaggggatctagctctcatttcgatgatcctaaactgtctgctcagggcttgagaaggaagtggctctgcgtggactgactgtagagctgctctccacaaattcacgtattctgtccctccagaatcgaagtctggctctcgtcctcgcaagccaccaccccgaaaacacactcgctcctgggctgtgctgaaggtgttgctgttgctcctgctgctgtgtgtagcaggagggctggttgtatgccgggtgacagggctgcaccagcagcccctctgcaccagcgtgaacaccatctacgacaatgcggtccagggcctgcgtcatcatgagatcctccagtgggtcctgcaaaccgactcccagcagtgagctcaccctcagcacccgctgcctcccagccttggagcttggattcctatggaattgggttctgctggacacaacctctttttagcgtcagacctacctgccatcatcacatggctgctggtggtacttgagatctcccctttgtaggacttctgttccatagtcagggttccctggtggaatgaggagaaatggagaggggggaggaagagttacctgcatgcctaaaggagtaggcttaggggtggggagagagaaggcataggcttttctagttatacaaagctgtgtaaggcaaggttcctttctactaaatggtcagctgtcactacatttatacttttgtatgtcataaaccctttctttcattcctccctgggtaaccaggacaatcggagggcagtgtgttactgggattagaggactagcaatactgggtaacccagcctaagctgggaaggtgacgtaatacgtttctttaaagattcagtcagtcaagcagtttagcaatatccaaaatgtctggctgtttggtccagtgtcacatgttgaggcaggaggtgccgtctcatccatgacttgccagcagtgttcaggctagtctgaggcacaaccaggctctcattccagttttcctccttccctttatgtcattcgacctcctatataatacccaagaggatgaactcacaccagagttgtctcagctaaagcgaatctttcataacagtcttaccacccacaaatagatctcatatcatcagggtcctgggaaacttaactcctgtggaattttgcctcaacttttaaatggcttccacaaaatggcagcaggccgggttccttgcctcagttttagagcattaactcccgaatggcctggaagcagagggaactctgcaaagccgtactgtggctgctccactagcactcggtgtgatgaaatacctcaaaggcaacctagaaacttgacttcatggaagcaggtttagagttgattctggacctgtaacagaagggaaggaaggaagagaacagtgggagtcaaagggaaacaaagtcacatggtggcgctgcagagtgatacataactaaacattagcacaaccagggcagagccgcccacctccctgctgctacaagaaagcattctcccctttcccagtctcttcacaacagctgcatgaagggatcagaaacaactgtgtctcggtgcttacttgctaaaaactcccatttgcaagctccctagaggagcaaggacctgtcatagttcagcagtgtagccctagtggcccatctggataggtctgccattcaaaactgtcctgacactggaagaaaggccttggatttttcctccccagacagttctgccatgtaggcccacacctcctcagcatcacctcctcagcatcactacacgctcctttagtcttcctccaagctccacagccattggtacaaaggctttattgagacaaaatacatactacatacatatggtgacatcatgaaaacaggagtcagcctcatcatagctccctagctggttgaggcagctcagtggctgggcgtagtcaagccaacccgcaggcaagagttcactctgacttcgagatttgatgcttatttcttggatttctacaattattaaatccatgtctgagtggtctgcctttctcctttgtgctgtgagggtcaactgggatggggtgggatggctgtccatggcatctcgcttgccgggagaggaacatgagtgctatggtggaggtagattcaagtgactcagccttctctgttcccagagatgagagacttgctccctaactgtaccaaggaggtacttctggcctgtctactgtcaatagccaaggtgggatatcagtcaacactgtctaagatgagatctggttgcgctgtggtcatttgaaggtagatccgcctggataa

SEQ ID NO: 20424 - DNA, 1244 bp, Mus musculus
ctgaccgtccaaaggccatcagagctgtggggagcagatggagccaatggccagaaaggaacacactctcttcctcacctaagtgcttcccagacatgctgagggctgttagaagaaacaggagtgagcagatgggtactggggtgaagtgataggactctgctcccctagaggctaagcctgtatcccaggcttgcattggatcctaagactgagctcctccctatctcgaccaatgggccacctacacaggttcatccagggaaatgagcagacatgtaaatgaggatccttgcactgctgtctctaagtgggggatgaagtatgtgttagcatcctgcagccaggcaaggggtctgatgtggctagaaggcagtggagggagagatgtcagaagcttgtagaagcaggagcaaggtaggttgggccacagacccatcagtaggagcaaaggaagctgggtagcagtggtgcaagacttccttgctctgcttttcttggtcataacggtgtccccagagaggtagcctgtatgaggctgcccaggacccaccagtaaaccctgtggcagtaggcttgtgtgcccaactgttggacaaaaccactggggcagatttccccagctgactgtgtagtgctgtgtagagtgtggggccctctaagccttgggtgccctgcagaactcagcttttcccatataactttttttgtttttgttttgttttttttcgagacagggtttctctgtgtagccctggctgtcctggaactcactttgtagaccaggctggcctcgaactcagaaatccgcctgcctctgcctcccgagtgctgggattaaaagcgtgcgccaccacgcctggcaaccccatataactcttatatggtgtctgttagtgcccttgggcaggacaaggaaaaggctacaaagcccttaggtacttttgcctctgtggatagaccccagaccaggaaagccttcgagggaccggcaatgggtgaccctgaagagcagtgtgaagggtatgtgtacatggggatggggagagggctaaaacctttgccttctaattccttcaactgccaccaagctatgagccctcaaggacactgctgcacttctatccaacggttgcttgcctacccctcaggaagcagccacctgtcctgtccctttccatctctcttttttaaaatatttatttattttgtttatacgcatacattgttgctgtcttcagaca

SEQ ID NO: 20425 - DNA, 1184 bp, Mus musculus
cactgggccagactgcagtaaatgatagcttaggggccttcggcatcaccgaggcccctccccaaggctacatacatctttctcgctacctaagtcttgcctttgtagcctgctcaggagaggctcttgtggttatggcctactggttagttctgtaggcttccctttatggccctaggacctgagtgaatggtgcctaagttcctgctgccttcccatctgattctcttcttgttgtaaggaagggctcagcattagttcttcatgcctcacataatgtgggagtagggatggaggtttctggacctctaagatcatgtcatcagctgccacactgggcaaggctcagtttagctcagggagtacagtacgttagctgatggctgcgcgaggtgtagcgatctcccagttgccaggagggcgctcctgaccaccaacaaacagcactagggtgggtggttttgcaggttgggactgccagtcttcaggtagcaagtcccgactgagagctggaaaatgagccctagggtcagagcccctgatgctcttcggaaggggtggaggcctccagggccattctgtagctgcactctgcagttctcacagggtgtggctggccagtcaggaagtgctaagggaaggagcacacaaggtgttttgtccagagaagatgcttgctttctgtcacccactttaatgaacatttgatgctagctctccaggtggttagggtgggtggctcctcccccccaacccccttcttatttatttgttctggtaggttttttggtggtggtggtggtggtggtgggttttttgtttttgttgttttgtttgagacacggtttctctgtgtagccctggctgtcctggaactcgctctgtagaccaggttgacctcgaacttagagctctatctgcctctgcccccccccaagtgctgggattaaaggcgtgtgccaccactggcgctttgttttaatttaccaatatcaactcttatgtcaggtacagaaacttaccagctggattcagcagatgagctacaggcggtaaaccatgatagactgcatcggagactgcattgtagcggccacacccgggcccacttaagcagcccacagcacagtagttctgagtactgggttttgttttttttttttttgttttttttaaacaaacag

SEQ ID NO: 20426 - DNA, 1225 bp, Mus musculus
ccatgtatctgaagtctggaggggcacgtgaggtgccatggggtgagatggataagtgtaggagctggcatgtcactgtgcagttacggagtgagccggacgttgttaggtaaaagtagagaggagcttcgagagttcaaggcaacctcagccaagatggaacttgagggagcgaaagaggtaagtgactaaccctgatctgcttgtcttttacagaaagggaggcagaggaagccacggccactagaccctggggagggctctaaggacacagacagctctgcggggcgtaggggcagcgctgggagaaggcacggacgctggcggggccgcgctgagagcccaggtgtgcccgtggccaaggtggtgcgggcagtaaccagtcggcagagggccagccgacgggtgcccccggccccacctccggaggcaccaggccgccagaacctgagcggagcggcggccggggaagcactgataggggccccaggcttcccacagcatggagacacagggagtgtggagggtgccccccagcccacggacaacaccttcactccgaagtgtgagattgtgggcaaggacgcactgtcagcactggcccgggccagcaccaagcagtgtcaacaggagatcgctaatgtagtgtgcctgcaccaagctgggaacctaatgcccaagtctgtgccccggcactgccagctggctggtaagggactagggtaccctggccctttccagaaatggacgggaggtgatgtggcccagatcttcatgcttctttcccagaaggccctccttgtccgcagtcgtgctatatgtaccgattggcagagggggagctgggactagggctctgagtctaggcttctgttaggaggcaagcaggcagccttttcttcatctcactaatgtccctgtcctttccacgcaggcaagatgagccctggcgtccaatgggaagagatccgggcccagcagcctgttggtggccctccagtacgcatcgcctacatgctggtggttcacggccgtgctatccgccagctgaagcgtcttctgaaggccgtctaccatgagcaacacttcttttatatacatgtggacaaggtactgtgaactgggaagacccagaggctctggctgaacagagcagagactctaaaggttgtagacaggtagcctagattgttgttggctagataccaagagcaaggcaggttga

SEQ ID NO: 20427 - DNA, 1107 bp, Mus musculus
caaccctttgagcttccttacacacatctcttggatcaagcccaggaccctggaatgactgcctatcccatcatctctcttgtccttttatttaattttttgtttttattcagataagacccctccccttttgtcctgagagctaagctggattcatgatctccatcccacacttaagactgttgacttttttaagaactggggttggctgtcgtggatgtagagacatcattgctagtgggctgccaatcttgtctggacagcttgctctgccatcctacagcagcacttctgtgcctggaagagtttgaagactgaactgcacagactctgagccatcttccaaccatgcatgggcagagaggacctcactgtccctctgtagcaatgcagaaaacacagggactacgtttccatagctggctgctaagtggggatgagacaaggtcagaggctgaggaaacccttccatcttcttccagtggtgactgactgcactgagcacctgctgggaggatggagcagccaagatgtgagtgaatgcatagaccttcaccttcctgggtcctcgggggcactgaataaagaaactggaaagttctcaggatcctgttctagtcctgggacctgctttcctgggcgaccagacagaacttgattaagcatgggacacttagggagatacaaaccagaaaaccgccttctaggagaagattgggtggagagaaagcctggagaagcaggtgtggtttgagttgtgtggagtgaggccaaggaatacttcctctacattcctccgctggattcccctggaaggagaggggaggtctaccccaccttcctcttccttctggtgagcctgtgttccacactctacagctcaaccctgcccaaagttaactcctaaagggaagaaggttttgtcctgtggctgaggggctgaggacagcttggagcttggactgtccagagtgggtggggagagtgaagacagttcctggtgcccatgccttggcaccttgcccctctgtttactgtgtgtgctgcagagggatgaaggccaatgtttcccctcagacagacaaaactaccaaaatcactgcttag

SEQ ID NO: 20428 - DNA, 1155 bp, Mus musculus
gtgagacgtggaaacccgaggtatgcttgatctgtatctgccacaatggcacggctgtgtgcgatgacgtgcaatgcaatgaagaactggactgtcccaacccccaaagacgggagggcgagtgctgtgctttctgcccggaagaatacggtacggttctggtcctagggttaagggaggttggagtccctccctcgcctatgtcttgaaagcctataacacccccaggtaccttagtaaatttacttctaactgaacgtttttctccccagtatcaccaaactcagaagatgtaggagtcgaggtaataatctgctccctactttcctcccacccgtccacgacccccactgtcctccaataaactgcagttttctttgcttctcttaacggccttttgtttcttcatcctcaaccccacagggacccaagggagaccctggcccccaaggcccaagggtaagcatcgtattctaaatgagctgggaaactggagggggcgtggctctgatttgtgctcatagcagccccctccgtctcttggtgcagggacccgttggcccccctggacgagatggcatccctggacagcctggacttcctggtcctcctggtccccctgggccccccggaccccctggccttggaggagtaagtagatcttggagaccccagaggggtgtgacttcccgttttgtttgtttgtttgtctgtctgtttgtttgtttttctttgctttggttttgtcagacatagttttctattttaaaataattataaacttacagaaaatagaatagaatagaacttctatacactcttcaacacaaccgctttgccactttctgggcacccagttctctatgtcgctgtatgtcctggaccatttgagacataagttgccaagaacgtgcccgtgacttacgatcttaagtgcatttcctaagagcaagggcattctatggaaccatagcaccaaatttaatgttgatctagcctgattaatattgcctgatatgcaatctcatttgcagatttcaccaatgcctcccaaaatgttctttatagcatttctcccgcccccttcctgtctaagaccgccaattgcattccattgtctcattcctttggttcccacaaatgtagactgtttct

SEQ ID NO: 20429 - DNA, 1193 bp, Mus musculus
tttactctatccgttcctctccttccctaatgttgagacatctctccaaagtcgtctccttcttcttctagggagaccgtggtgaggctggtccccctggtcctgctggctttgccggcccccctgtgagtatcaagaccctcctcattttctgtccctagctgagacacgaggcatgggaccttggggtggctgaatgaggacagaagtgttaccctgagtcagaggagaagggtggggaggtactggtgtctccaagtgtctctgcatctccaagtccctatctgtggcccttcctctagcccagaggccctctgctctcaggctgcctcctccactcctccactctccattctccctcctgcctagggtgctgatggccaacctggtgcgaaaggtgaacctggtgatactggtgttaaaggtgatgctggtcctcctggccctgctggtcctgctggaccccccggccccattgtaagtatcttgtcttctgcaccataagctttggatagccttggacttggggctagcctggatctcataccttgacactgtcttacagggtaacgttggtgctcctggacccaaaggtcctcgtggtgctgctggtccccctgtgagtatcatatgcatctctgtcgcgactccccaaaggcagagactggagatgaggccaggtgacaggtgactgttcacttctgaccacccaatgttctctcctaccagggtgctactggcttccctggtgctgctggccgtgtcggtccccctggtccctctgtgagtatctgtggttctggaatgaggatggggtgagacatgtattgtcaggacagcaggcctggctggggcttgccactatgatgctttggaagcctggactctgacagtccttcttgtgcccatctagggaaatgctggaccccctggccctcccggtcccgttggcaaagaagggggcaaaggtccccgtggtgagactggccctgctggacgtcctggtgaagttggtcccccaggtccccccggtcctgctggtgagaaaggatctcctggtgctgatggacctgctgtaagtgctaactcacatctctgtgattgtggagagttccagagttgtgtatgtgtttcctgtgctactgtgagcccttctcacccctgtctgcctcccacagggctctcctggtacc

SEQ ID NO: 20430 - DNA, 1189 bp, Mus musculus
attggccctgcctgcttcgtgtaaactccctccaccccaatctggttccctcccacccagcccacttttccccaaccctggaaacagacgaacaacccaaactcaatttcccccaaaagccaaaaatatgggagataatttcacatggactttggaaaacattttttttcctttgcattcacctttcaaacttagtttttacctttgaccaactgaacgtgaccaaaaaccaaaagtgcattcaaccttaccaaaaaagaaaaaaaaaaaaagaataaataaataactttttaaaaaaggaagcttggtcctcttgcttgaagacctatgtgggtataagtcccttcctgcccacttggcttatgataccctaatgctgccttttctgctcctttctccaccccctcttggggcctctcctccattgctccccaaatttaagtctcccccaagacacaggaaataatgcattgtctgcccagcaaacaaaggcaatgctgaaatgtcccaccagcccctcaaccccgtctacttccctacccagcaccctcaaatcctgctgggacatggggttcttggactgttgaaggaacctaaccatctggcatctccatggcctctgcaacaaaccccccacttttttctctccccccccccccagggagggcctgtgctttgggcagccacctgcccctctcaggggtttggagccaggcagggtcacagcagactggaaacatcggacatgcatgtgcaggctgggtgggagagaccgttctattcctcagtgcaattgtgttgctgaaagactacctcgttcttgtctttgtgtgtcaccggggcaactgtgtgggggcggggatgggggcagggtggcagcacgcccagtttggtatcaaaggtgctacatctctgtgaaggggtggggtgggaaggaatttctggtgctatagaagctgagatgctccctagaccagcaaatgtttcttttgttcaaagtattttttattctttttttttttttttttaatggatagggacttgtgtgaattgttggggttttttttttttttttttttggttttgtttttttttgttttgttttgttttttttcctgaaggtgctatttaacaagggagaagagagtgcggggacttcaccctgcccactctctactctctctccact

SEQ ID NO: 20431 - DNA, 2232 bp, Mus musculus
tttgggaaggattgtggtgctggctgggagctcagggtcgtagcttagggtgggggtaaagttacagggcccgtgctgagtggccaggcctgatgcctcctctctttgttctctagatctcagaactggaaggaaacctgcagacactgaggaactccaattctacttaacaggaataactccttggccggacaataataatcccctcccattatcctcaccccctgtcctcaatccccaccccacccctaccagcctggggacaggtgccccgacttcccctactcctccaccccacctcccccagcttcagggaccagagggcccatattacaggcccctttagggtggccagggcagacaatgctggctggaagagtggtctccttgccctgtggggctgaggcgcagaggccgagagaagctaagagctggcctgggtggtggatggacacgaggacctgcagaccaaactgccagactttataacctccagcctgtgtctctggaccggagtggagctggggctctcccagcatctcaccacttggaggctgctccctgcccacagggtccgtatggcccctgggcctcttgacttgagattctccgttcttggccctttcctcttcccccatcattgtgctgtctgttgcattctggcctcctgcttggaggggttgcctcaacatctcccacccctgctccccatcccaggagggatagagcccacccttgagccagaggctgggcctgggcctgcactgatttgtatccttcagggggaggtgattgggcgtcgggggaagggtcagtccagcacacctggggtccagcacccctttcctaggaagggcaacagccctcaacttctccttgtgcctcccctctcccaggtgccaaacagccataggcgtcctcctggaactgccctgaggccactctgggcttctggtttccttggtctagcccaggaatgccaggagggagggaggtcagcttagatggtgtgcctgcagagctctccctggggagctaggccctgcctagggccacacctggaggccttgtattaccatcgaggagactctgcctcccctcttcccctcccccgctgttttccaacgttttcactggagggcaaaattttactaatctttttggagaccagggctgcttgctgtcagcctgctttctaagtgaaattgactcagtttccccactttaaccccaaattggggcttggaccaagggaggtgagaccccctcaggtaccctcccctttcagaatccatctcttgccacttccacattaccacccttgccctaagcctaaatttctgttcctttttttcttcttttgaaaacgacccagttctatccttttcggtttctccgagtcccctgtaaatagaccatgccatcaatcagtatttcttgcccgtctcttccgtccctagacgtgcccccgactccccggaaagagctggctgtcactgtgcccggcccctgcacttcacccaggcagatggagggggtggagccgggtgggcgggtcctcgatgtacttccggttttgaccggcagcgctcctgccccgcccttggaggaccccgtctctgtatataatatatatatgtatgtattgttcctggttttgtacggaccatgccctctgtcaggtcgtccccataaaagcagcccccagagcctcgtcgcctggtttcttgatgcgctggagtggggaggggaagagatgctagaaagtcctctccttttactaattttgcacatgatctagagaggatcttaatgctggttcggttctccgaccccagcaaactcacttgccaccactccctagttttcttgagctctctagacgatgtctttaggtctgtttttcacgaggtctttagagtagccagggatgggctgcacacagggaaagcaactccccttccctgaaaaccgagcaatctgcaagaccccagaggtctcaaagtaccaggaggaccaaagattccctaggagataagttgtcagagcattgtcctcacggtcaaagagaatgttctttggccctcctgagctggcttgagaggcctcatatagtcctagctgcccccttagctagctctcagttccaggaatcagttttggtgagtcgcagaagtgaattgtaatgagacttctgcagtacacaacacagccatttcttgtacagatcct

SEQ ID NO: 20432 - DNA, 1680 bp, Mus musculus
cctgcttgaattctggatactgacacaatttctcttctgcctaaaccccagtgtgacttctttaagccgacccgctactaccggattatgcccaagtaccatgcagtgcgtatccgggaggaggaccgctacccacctccagggagcacgctacccaccaagaagcactgggtcaccagctggcagattcgggaccgatactactgatgccctccccgacaaaccttccggcgctcccttccttcctatttatcataaattatgactccgacagtccaaagggggccacgcccttggctggcaccagcaggctcaggcatctatccctcttcagtgcaggcatgttttctggggccctggaatctccttcaagaccttgcaatgctgagcccagcacagcccttgcacagtggacacacacacagggcctactgctaatggcctgctctgatatatcatggagggtgccgtatccaagtctctgtctgtgccaaaaccaagccaaagcgcctctactgggagacaggaggaaaaggtccctgatgtggggacacggctcctccacactgaatcccccttgagccattgtcaatggatggagtttactgtccagaataaaactactgatgcggaggagacagtcaggctcagctgcaattcctgccaggcactggagcgcagggctacactaaaggctacccaggggatgttcttacgacctgcgtgctcagacgcaagagcaatgaactagaaagcaggtcgccggaatgggctttatgggtgcatctctaaaatcgtggctacagagagagctggcaagaaacgcagcccgaaggaacaaagagagaccgtgggcagcctggacgcacacactgtgctgggactgacctggagcatggcggcatccttcagagagcagggtcctggcgcagcagacattggtaggatgaagaggagagacttctgatccatcctgaccacctcagcctgggcaaggcctggagatccccacgagaccacgtggggtgtgatacttgaatgtagcatggcaggggagggcccagcccctgccccagttggccagacttaactctgctcccttgaccacagagatgagattctgagctgcctgtggctttcttcccctcccccaggggctgcatccccattctagcagtggaggctgatttcccaggtcctctccccatcccggtccacaggcaggcccactccccagctctgtcccctccaccccacggtactataacaacttccccgatcctgtgccttctttgtatatgggcttctcactaaaataaataaactgttcccagtttgtactgctgtgtctgctcctacctgcccccgccccaacgcccctcgtcctgaccaatctccgttcagtctggaggggtaatacccttccctagctggtcccttggcgatggacctagcaccccacagcaagccacacatgagagattttgattcaagcacagagttcacggaaatccagttttagggagagcgccatacatgggggagtgctttctttacctgtcagagttgtggcctgttcctgctgggttcattctaacatcaaacgctcctggcctggatttggggagggagggagggagggagggagggacggagggagggagggagggaaggagggag

SEQ ID NO: 20433 - DNA, 1169 bp, Mus musculus
tgtaacaggtgccactcggagcagtccccccatgctaaccaccatttaatcctgtccaattgcccttgaggtaggaaattagcattcccagattacagacaataacagagaggttgagtaactcgttcaaggccactcagccagtgtgaatagcaacgctgggcatgagctcaagtagcccaacttcccaacgcatgcttttggccatggctatactgtaaaataactgcaaatagtctctacagagcacatgaaagaactagagagagatgaaattactatactagcccacagtcacacaacttatcaggaacagagttggcacgcaagtctaaatgtgtgtgtgtgtcacaaactcagacatcaggctgcctaccagatctaaacctgcccctgtggccaaatctttgtctaagacctgctggtgtccatgagtactgcgggggctttttaactctttgactgccccctagtggctgtaggtcaaatgacaggaacatgggctgggcagagactgagaaaatggccaaatgtggggtctcagcaggctaacccagcacttgtctctcctctgcagttctctgtggacattgactcagagctggtggaggagctgccggctgagattgagctgtggttggtgcttgtggccgtgggtgctgggttgctgctgctggggctcatcatcctcctcttgtggaaggtagaacctcccagcctactggggcttcccacttcagacccgccagtgccagcactgctcacccaacctccctccatcccgtggctctgcatcccattcctcatctccatcccagatactccctgcccctccccatagcttccagtcccacccatgccccagggagctgcaggctgcaaaggggaataggggctctggtatctggctatccaggaagctgggctcaggacttagctttccaggttcctcagttctaagccccagctccccaagtgctgatggccaggtctaccagcaaccctgatggccacccccacctcctccctccagtgcggcttcttcaagcgagcccgcactcgtgccctgtatgaagctaagaggcagaaggctgagatgaagagccagccgtcagagacagaaaggctgaccgacgactactgaggggtcagcccccctgccccggccc

SEQ ID NO: 20434 - DNA, 2154 bp, Mus musculus
gttttgtgaaatggcacctcagcttaggtccattttgaattttttttttagttacctacacatcataagcataaatgaataatgatttcagttctcattgaagacagaataggaatataaagaggaaactttgcaaatctaaaaataataacatcttgtactttaagtatgttattaggacttaggtgaatctgttgctagtcattttggaatcttttttaaagcgtattggttgcatgtgtataatggttgcttccttattcttcacaggacctgatagatgagtggatagccaaagaggccaaaaggtccaactccaacaaaaccatggatccaagctgcttaaaatggacccctcccaagggcacttaaagtgacctatcattccgagccagcgagccccagcagtaggaatccgtaccctagggatctgtctgtcatttctgttgctcttgtgattggcaagtacagtatcctttgggaaggccaccccctcagcactgttctggctccagccttcgtgtacactgcagacactagttctgaggaactgttgtttcggcctcagtgaggttgcctggacggatctgtatgaggctcgagtacagatccctcatagcactgacccaaggagttgtgttatggtactgtacctgtccagtcactggttcccacctcatgctttttaactccgaggtttgttgtgtcctgacctttgtgctagtgctttttcctgcctggatagcagacctccaaacatggttgccaccaaagggccctttccagttacttctaacacattcttcatgaaggggtgggcaagaggcagcgcctgtgcgtgtctgctgggagggtccgctcaccatgggtttcatctcgcagtcactcatttttctccctttttgtcaaaagacttactacctttgatcaggatcaggctgcccagagctaggaacgcctggcatttcccaggggttcacaggcctggtccatctgcgtgagatggtgaagcctaagaggtggtcccatgctttcctttgtatttacttgtggacactggggcagcattgtgtagaaggaaatgaggaattctttgccacagcagaaaatgcccccacttttttttctgcccccttttatgttggtagttgccaaaatattttaacagtcttttttcatacattaaatgaccaccctgtggatctttccacacctgcctctgccagtctggtgtagggcagctctactttccacacaagttgcactgatcttgtccagagcttcctgggagaagtggaaactggttgaaatgcttgtgtttctcagcccatgactcagcaagacagggtggccactctgctacggtttgcttcgctctcaacagtgcctccctcccccagcagactgaagtgcttctgtctaagaactaagtccattccctttcgggacttgccaccatcatcctgttctctgggttcctatttttggtggtgttaagtgaaggaagaagtgttccctctaatttctccctgtcccagtatataacctgctatcttggggcagcttttgatgtctgacatgtcacccttcccaagttggtctcttccaacactgctgtcttcacgtggcaccctcttaccacaaccctaactctggtcatttgtgcctttctcttgtcatctctgtacactactaatattcactgtgggttggggagctgattttaagcatgttcagtggctcccctccagtttcagtgtaactgttaaaatgtatccaaaagccacttcactgggggttttcttaaggggtaaaggccttttacagatgctgagccctccccacatgtggcagaatgtgctcttctgtatctactcaataaagcatgttctctgctcatgtctgactgctctgaagcttgtttatatgggaatggtgtgattggctcagcacagtgttagccctggggtttggagctatggattgttttcccctgtgaagcaggttgttgacagagtgagtgttttctctgaactcacaagcggtaaaacaaattgagtctgcctccctttggctccaggaagtcgctgtgcgcaacagcagctagctagtgtaatttcattcatctgcctctggtttggggccttgtcaagg

SEQ ID NO: 20435 - DNA, 1194 bp, Mus musculus
aaacatataaaatgaatagataaatctttaaaagatacctgggcagtacagctggcaaattttctgtgaacctgcctgattttccatgctcaagtaataccttagtagccatgtatggatagaggccaaatctagctaagtatttttatagcttagttgctggcctcatagtttttaagaataaaggtaataagggctgaagatagctcagcagttaaaagcatttgctgtttttgcaaagaaactacattcagttcccagaacccatgtggtacctataacttcagttttgggacatctgatgtcctcttctgacctctgcaggcactaggcatgcatgtgagctatagacacatgcatgcttgcacccatgcttatacacaaacaaaacatccatgtatatcatatagataaaaatctaattataaaaccaaagataaagtcttctaatccttatttgttttggtttctttttgccaacaggagaagttaaggcttcaaggccaaatcacagagggaagcaacatgattaaaacaattgcttttggccgctatgaactggacacttggtaccactctccctatcctgaggaatatgcgaggctgggacgtctctacatgtgtgaattctgcttaaagtacatgaagagccagacaatcctccgccgacacatggtatgtctgcttgagttcagctcaccagggtgatgttacacagtttcccagttatgttctagaggcaatgtaaacgtccaaaagatctcccaagtgtccacagcagtcgggtggagacttaaggaactgaaagtcacatttctgggttaaccctctgccagagtcagggctccatagcatcctaactatatcctgtccgagaacgtcttttttttttcttcttcttcttcttcttcttcttgtttttttgtcttctgtttcttcttcaacatatgaattacctctccctaaagtttgtgtttgtaccaaactcaatgagaagacattttattacataggtcagggagtggcttatatataagatggtgggtgtctgtcttgaatgaatgcatgttgtataggatatccacctttaatggatgatgaagataacagtttgcccctttttaacatcctgtatattaaaataggaaaagatgtgcatacccgagtctggtgacttctatgagtatagaattc

SEQ ID NO: 20436 - DNA, 1161 bp, Mus musculus
aggacacgctttttgaattgattctttccttcaccttttatgtgggttgtagggatcaagctcatgttgccagacttgaggtccaggacagccagtgctacatacatagtaagaccagggcgatcattcgattggtagatagatatagatagatagatcgatcaatagataaatagatagattggatgaatggatagatagataggtggatactgcttaaggggctaagaagccagctctgtgggtaaaagtgctagccttacaagcaagcctgataatggaacccttataagtgtatctgtaaagttcccactaccctgaaataggcagagatagacttattgttggaagccagcagagccaggagcactgctacacagcacccgaaacgagagagatcctgtctcagcaaggtgggaggcaaaagaaaaacagaacagaacatgttccctccatctgcagatcttatacacacactgcacatgtagtcagatgtacatatgggcacaaaatgacgtgtagaaaggagagcaagaaagggtaaatactatgtgaagaacggaatgcaagtaatggacacttaagccatgaaagaagtacaaagctaattttccagttttaagtgtggggttttttgtttgtttgtctgaagatttgtgtatatatctgatagtgaaagtgtaaaactcattgtgaagtcccacagcttcaggttggttagttattctaactgttcagaaattcatttgacatgtctggttagtcctggtatgggttttgttttgttttgcgtgcagattctttataataaattttaataaattgcaaacaaacaaaaaggtagaaggcaagaatcaatttccaaatgtcctctttagcatacacatattagtaatgacaataaaaacaacagtaatactcagaaataatgacaatgatgataggacctgtagccgggcggtggtagaacatgcctttaattgcagcacttgggaggcagaggcagacagctgccagcatggtctacagagtgagttccaggacagccaagtctgtgtagtgaaaccctgtctcaggagggaagggagggagggagggagggagggagggagggagggagggagggaaaaacttaaaatggacagagatgtagctctgtgg

SEQ ID NO: 20437 - DNA, 1177 bp, Mus musculus
tggcgaatgctctcccttctctttattggcccagctttgcagtctgttcttgtggcgggtgcggcttagcaaggcctggattggggcgaccaacgccccgcccttccggatagagatggcgataggtgttgtaaaggcgagttgggaagaccactttcctttcctggtggggggattacaacaaagccgaggatgggtggttagaaagccagcgcccacccccaagggatagctcgcaggcctgttgcgtctcagtcaccgtcttccacctatttgttcagtttgacatttcctggtcagtaaatgtttgttgaactgtatgacatttgccccatatgttcagtcgtaaaatgcaaagagcagtgttacgtgctagttgctaggaattcgaaaagtatgcgtgatcactggcttaaagggttatcgctgttgagagaagaacacaaagaaccatagttcatacagtctctgcttgaaattgtatacactgtaagaaagccgttaacgtgggaaataagtaaagagctgattttcagggttaagccaggcagaattgataggtcatggacgggtgtcagggtctttggctgagatgaccctaaagtttgccttttagtgacattctgtgcctctatttacttgtggtcagatttttgaatgaaatatttggatggatagacggttggtattcatatttctgcagagatcactcttcatggaagctttccaagttaaatatttacattaatgtctcttgcaatgaccagagttgacaggtagtatttttttaaaagattaatttatgtattttatgtatgtgagtacactgtagctgtacagatggttgtgagccttcatgtggttgttgggaattgaatttttaggacctctgctcactcaggcccaaagatttatttattattatacatgagtacattgtagctgagtttagacgcaccagaagagggcacaggtgtttgtgagccaccatgtggttgctgggatttgaactcagaaccctcggtagagcagtcagtgctcttaacctgctgagccatctcatcagctcgacaggtagtatttatatccaggcataccaaatacaagagacagacctactggtttgttggaatgatctagtctccttttagcagtttccaaatgtaaaagtggagaa

SEQ ID NO: 20438 - DNA, 1169 bp, Mus musculus
atctttgagaaatgccttactataggaactatacttcatctgtgtttcctgacctgactaaagtcagtgagatgcttttgaacttaagttactaggtttctttagggagttttatataatgacttctatagcatctcttatgtgtaagatttcttttaaggtgggataaggggaatatttgacatttagcatttgttcttgtcagtttctccttgggggctatgcttggctttgcaagggtataggacttataagaaactgtaggagaacttattctgtgaggctgtcactggcctaaggtgtggtaggaaagagatgtgtttgtaataaatggggaaacaattgagccaaaggagaaagtcttgatttgtggagataaatcaagaaaatgaggtatctgactgtctgtagcactaaggtagaagtcctctctccacctgctggtaacaaaagctttgtttctgtctctttatatttcacaggtgagtgtagtacaagactctgtcaatatttctgggcagaatactatgaacatggtaaaggttcctgaatgccggttggcagatgagttaggagggctgtgggagaactctcgattcaccgactgctgcttgtgtgtggctggtcaagaattccaggctcacaaggctatcttagcaggttggtatttattcatgattcactttataattttgattcaataagaagaatagtggctacccaattgcctttagggaacaacttcagcttatgaactctgtacctaaatacgtttttaaaatttactttcattttggtgttttgagatagggtctcactttatagcttaagcagacctagaacttattgttagcctagactatcctcaaacttcaatcctcagccccatcccacttcctgcccctactgctgaagtagtaggtatatgccactgtacctgaactgtattttatattctaacgacagttctcataaccaaaagtgctactcttcataaaaatggcatttctggtttgtcttaggtggacttgggtactattttaagagtataaatggtggtcatacaaaggaactacctatgtttgcactgggcaagtagctcttggagtacctaagagcaagtggtagctcctagctggactttggatgccatcgagaggattctgttc

SEQ ID NO: 20439 - DNA, 1205 bp, Mus musculus
aggcaggcggatctctgttcgagtccagcctggtctacagagtgagttccaggacagccagggctacacagagaaaccctgtctccaaaacaaaacaaaaccaaaaaaaaaaaaaagaattaagtaagtaaatagatgtgattttttttttattttattttttctgttttttttttttttttgaagactgggtttctctgtggaaccctcatttcctagaactttaactacagaccaggctagccttgaattcagaggtctgcctgcctctgctcctaagggtgagcaccatcaaacctggcatttgagttgttatgtgggtacctggaattgagtctgagtcttttggaagagcagccaatgtttttaatcattaagccatcttctcagccccaaataaatgtagttttgagagagaaaatagcctagaggtagtggcacatactttaatctcagaactcaggaggcagaggcaggtggctctctgtgccttggaggacgggctggtgtatagagctggttccaagacagtgaaggctacagagacacactcgtgagttcacacacacacacacttcctcacacacactcacactcacaggggctggggagagggaggagagacctttatctgcatcttggctcccattttactgtagaattcctcagacgctaatgtgtattggaagttttgttttcttctttcttccctcctccttgagacagagtctctctatgtagctctggctggcctagaattcattctgtagaccaggctgtcctctaactcacagagatccttctgcctctgcctcccaagtgctggctgggattaaaagtgagagccaccacactgggtttacagagattttctgggaagcaagtattgaaagttgcatgtctccaactcagttaaccctggaggcattttctcaagaatcacatcagattagaggacctgaggacacaatgggaactggcttgcattgtaaagccacatcagctagagctgggaggctagctgcctgtgacctggagcccatgcagtacctgtgataagatggacagtgtgattgacagttgccctgtatactaggcaggggcagttgatgtaaactgttaaaagggcttccttactactagctggagacctcaggagaaagcagatgctatgctgggagttccgcctctttctgttgtgtcct

SEQ ID NO: 20440 - DNA, 1936 bp, Mus musculus
tgtctagatagctgtttggaccatgtgcacactccctgtactaacctctctctccacatttctcctagtcatgcttcggatgtcttggagacctctgggtggaagtcaatggtggtgtcacatccccacttagtggcagaagcataccgttctctggcttcagcacagtgccctttcctggggcccccacgcaaacgcctgaagcaatcctaagatgctgccagttgggagactccatttattttccagaagcagcagccaccgttgctgccactgactaccaggtagacagcgcaatctgtggagcttttactctgtgtcagggaaaagactgcacgatgacccagactttaaaacagcactaaataacttagggggactgggggagggaagggcccaggactcgggccactcaacctgatgaaaccctgttgctctgtcaccgtgtgccctttggcctgaccaagtttgacactgggattcagtttaggcactggccccaagcacatcccagcagtggtacttcggagaaatgggtgtctgactgagcagaacaaatcgtcagtgcctggagcaaaacggaaaaaaagcagaaacaagcggacatttagtcttcagaggtggaaaaggaaagaagaaagattttttttttccaaaaatcagtttgtggattccagtagtatttatgttgaaagaagcaaattttagtccttccaactgtggatatttgtgaaaactcctcactaccatccaagtatcagaagagctctctcgttagcacttactgtttgcaagaacaagcccatccttttatcctcttatgacaagtgatgcgtgatggcgggggaagtcatctgatctggaaaatgagtgtttggcggtagtggcttctgcaaaaattcttattggtgttaaaaactggaaaaaaataattcatccagaattcatactgtcttgataaaaactatggttctgttttttagatattgtggaaaatggatttttgggggggcatttttctctgattttattttttcttcccttccccttccctttttctaagagagagagaaagagggggagggagagggagaggggagagagaaagagagagaaagaaagagagagagaaagagagagagagagaaaagaggagaggagaaacaaatccagaaaatacataaaacaaaaggaagagtaaaggagattttattattattgctatgtgaaaaaaaatcccagcccagatggcctggctgtttgcacctgactagttgcctgcataggagccggtcctgtcccttctgattagcccctcttccaaaggggagacttccaaatgttaacttttttctttttgaaaatataaataattactattttgtactgtgtggtatctctggtcttttgtttcattcacttggcttgtctcttgggtctgagatgcttgcctgtgagatcttgaagccctggtttgatctccatcgtgcagggattatgttcagaatgtctaagaagcggtaggatttatttactctccatagtctcacgcagctgccagcctgttgtcctccttgaggagctgccagccatgtcctggcgagtatctgggaccaggtcctactttgccaaggcaagcaattgtagtgggcttcttctgcaccctgtgtgtgttaatacccaatcccaaatctcctttctcctaacaaaatcaaaatatatatatatttaggggacatgaatatggagattaaataaagggaaattgttgtgtcttctgggtcctgtcattgatgtatttctggaaaagctgaggtcttaacttccagtgagctcaagagtgctgtggggttccaagcttcacagcactggccagacagtggaacacactaaaagcatacattgtttggccaaggttgcattatttaaccttaga

SEQ ID NO: 20441 - DNA, 2484 bp, Mus musculus
aggaaccagggctcagggttagagaacacggaagtgagggctcagggttagggaacatggaaggagagagggctcaggttaggaactgacaccccttgttctctgcagccctcaagggtgatggcaacctctacagtagcctgcccctgaccaagcgtgaggaggtcgagaagctgctcaatggtgacacctggcgacatctggcaggcgagctgggctaccagccggagcatatagactcctttacccacgaggcctgcccagtccgagccctgctggccagctggggtgcccaggacagcgcgacgctcgatgcccttttagccgccctgcgacgcatccagagagctgacattgtggagagcctgtgcagcgagtccactgccacgtcccctgtgtgagctcaccgactgggagcccctgtcctgtcccacattccgaccgctgatgttctagcccccacagagccgcccccctctcccttggggtggcccaacagtcagaaccgagcatctctgtgtagggcctctgtgtcccgctccccaaaccacagccctgttgctgctcctgaggggacctttgcttctgaccacactctctctccggcgagagataggaccaccccaagcctgtcttgccccgtgaccatctcaggcctttcctttctttctacacattaactgtgtcagatctaggggtctgacactagagaaggtaacaggggcacccctaagactcagggggtactaatgaaccagagccatggactccacactgtgaactggagaacagggggggcattgtggtaggccagaccttcctcaacccctcccttctcccatctggccaaagatgaagaggattacaggcctatctgagctgaaagcaggtttggagcccagtccacactccttctcttacacataggatggtaaagcccagagaggcagggactaacctaggccacccaacaacagggagatcaattgtaggctgacacactcctttctgaatgagggcgtcaagtgcttgttggcagggatggagtgactttcagggaaacatctggaaacgacgtctgccccgccctcaaccacttccaggcccctacccaacccttgtgcagatgaactgtctgttcaaaacctggtccattggcctgttctgatggagtcgggctaatgtcctggggagtggggtgctgccttcctctgtctgtcaggcttagccacagggcatttgtggagggatgaatctgttagcaccctcattcgtgtcataagcctgaagccaacagtggcccttggagtcaaccctaggggtcagggaccaaggacccaccccataatccaacaccacacacacacacacacacacacacacacacagagagagagagagagagagagagagagagagagagagagagagatcatgcttttccccccatggctctttttgggctgagaccagatcctgctggaagtcgctggctgccagagaaagatggaaggggaccgagatgagcttcgtggggctgtcttcctcacctcccggctctggcaggccaagaactgctgcatctgagctggcgtgcgtgcgtccgtccctgtccgtcggtctccaatggcctgtgtgtggaggaatgctcacaccgctccctctcctccccttcttgaagcccaactttggctgcacccagaaaacagtgaagaaaagcaggctgctgtgagaacacaagaaaatgcagatgctggcccgcagtctgaggcaactttctcctcagtttcatggcccctgcaaaggaccaatttcctgggcatggccaggaagggacccgagtgctcattggccggcgctttcacctggctccttggcctgttctgttttgcttgctgttggaatgagtgggctccccctctatttagcatgaaggagccccaggcagggtatgcacagactgactgccatccctccccacccagggtccacccagccctgtaaggagacaaggagccttgtgctcggtggtatttttatggacctcgatctgcaattagtagaaggaccccaccggctggccctccccggacacctgggaagtgggacattctttgtgtatttattttcctcccccagaagctgggggtgggtgggtgggggaggagctgcaggaccagtttagcatgtgtttggttctgggggtctctccagccttattttgggtcaagatggaacctctggccctccagctggcgactatgagatccagacctcttcatgttccctgacacttcccctttgcatcctgtgtaatcatttcttgggccctcccaaaacctacacataaaacatacgtgatgaccattaaatagcaaaaaaaaaagaaaacgatgccaagagaattttttttctggaaataaccacgttttgttagttgggattaaatgcagaaatcatcgacccttccccccgaaaccctta

SEQ ID NO: 20442 - DNA, 1909 bp, Mus musculus
agtcggtggtggtgagtgaacagggtgccacctacaggtggctgggtggccaggagagcatgggagtagtggtgggtaggtagctgggtggctgggagagcgtgggggtggtgggtaggaggctgggtgggcaggagagcatgggggtggtggagagcgtgggggtggtgggtaggaggctgggtgggcaggagagtgtgggggtagtgggtaggagggttatagccatgagtgtgccgcttgtttctccttcctcagtaacctgaccagatttctgtccatccctctgtggccaggctcgattcgatgctggagaattgattacccagcgagagctggtctccaggcaggtgagcgatgacctcacagagcgagcggcaacatttgggcttatcctggatgacgtgtccctggtaaggttcacgggggcactgggggaagggctgcttctcttgcttcagagactggcttagtttctgggcacacagggttaggtcccatgtccacttaactgggtgtagggcttgaaaatctgaaaacgtctcagcgtctgaagccaccgtctcaggtctcttttgttgagcattctttaggtttcgtctgccgcacacattgtcctcttaactctgattgcccccatgctccctaaccactgaactgtctcccacgctccctagaaagtgattcctataggctttgttgggcacagggaatggctgactggtcagcctgggagcgactggcagttttcctgtctagagtaggactggctcagggattcctcagcaagggagtcctgggagcctctggtgaaaggcaatagaaggccagtgagtgactgttcctgcgcctggagcagaggagagggcgggagacacctccgaggcgtaagcaacagtcacctcccgagactatactctctgtattaatgtgaagctgggtgtcataacttcaacggaaggcaatataggaagtatagtgtttcagaccaaggtgaggggaaggggtcgtgtttctagagtctctgggaaaagtcttggagtgatttgtcaggtaacgaggcagagtgcttcctgttctccctgtggccagcctgggaaagaaaggccaggcttcccctcgcatccgtgcagctgttcaaacagccattctctgaatgagcatccccctccaggcacggcctccttcctctgtctctcctaggggaagggcatgtggctccctcttctggcagcatgccaggttgcagcccccgactgcagcaagccttgctccaggctctcccagttaacacaagcaccttggcagtgagaacacactagtaaaaacctaagagaaacttggcatctttctagactctgaccacagactccgtcctggggaaatgtgggctgaccacaagaaaccatagctaagaggtgtgagaagaaaattagatttcctggggaatttgctgccctcagctggccctttcagaaagacattttattctttaattacacatttagcttttcaattcttaggattgtatttccgaatccaagcttcagatgagagtccaggagtggatcagggagagttgggcagctgcagggtaagatttagctggcgtattggcccatgcctgtaactgccgtgcgttccagcctacctgggctacagggtaagactgtctcacaaaaagaacagaaacaaccccaaagacgtgtagtgtgagaaagatgtggggccaagatttttgcttgtattgtacaaggcagagattgggggggaggggtgaagcaaatcgcacttgaacctaaagtaattagcaccgtgtgaacttttttcctagacttactttttttagctcacatttatgttttatctgtgtatgtaagtgtgccacatgcatgcaccagataccctg

SEQ ID NO: 20443 - DNA, 1984 bp, Mus musculus
gtgtaagccaggcttgcttcaggctttcagtgagccgcccatctgccatcgccacgttagtgctaacatagttgttagccaccacaccgggatgtcctggctttgatggaagtcattttgacgtggcactggaaggaaagacggacctaaagattgatttgattcctgctttccctttctgtttccgtggctttggatcagcatataagtgaccatgtccatatagccaagagaagcatgtcctatagtgacacgtggacatgaagggaacgaaggagactgggaggacagttttgaccccattgtaagggaagaacgctcccaggggacctagtaggtcccctctgaaggggcctggctttgtcctggttaggccatggcttgatatgaacgctatggagtaatctcagtctcccctcctcttctgtaggctgagcagcagaagaaggcagccatcatctctgctgagggtgactccaaggccgctgagctgatcgccaactcgctggccacggcaggcgacggcctgatcgagctgcggaagctggaggccgccgaggacattgcgtaccagctctcccgctctcggaacatcacctacctgccagcgggccagtccgtgcttctccagcttccccagtgaggccagccgggccacggcctccatcatgctgaatgacgccttccttctgccccaccccagaaaatcactgtgaaatttcatgattggcttaaagtgaaggaaataaaggtaaaatcacttcagatctctaattatcaagcgaagcttttattgttacacttcttaccctctttcatatccaaaattgccaagtgcctctgcagactggccttccaccctaggcgcgggcagttggcagaagaaaggcagggcagtgtgtagtggatgggcagcctgctggcagcctgcataggcctagggcctccattctgccgtatattgaagatttaaagacagtggcacacacacttgaacaaaagcaagccctcagtgtttccagccatttgaacctggacagatgcagctggggagggccagaggaagtggtctatctcaactgtaaggcccatcccctcttaaccatgaccagcggaagcaggtgtgtgtgaccagggcacggggtgaagaatctgcccatcaaggtgggtgggcctcatgtcgctgcccccaccagagtcctaaaacctggatggacttggacgggacaagaggcctggactgagatgtgagtcccatggaagacttcctctccaccccccacatcggtcctctcaaatacccaatgggattccagcttgaaggattgcatcctgcagggaatgagcacacctgccaaggacacgtgcgcctgccttcccgctccctctctctcagagattgccctttcttcccgagggctgtgggccagcgctccgaaggaagcaatcaaggggagaaaacacagtgtaagccgctgtcaataaatgacacccagaccttccagctgcactcggggtgtgttttcaatttgtgggagcgagaggatcagaacagagtgtcccagcagtcatgcgtgcgtgcgtgtgtgtgtgtttgtgtcaccagatggggagggatgtccagcaaggctagaaatgctttggttttaggaaatgcctagctgtgtgaggtgggtcctaccccatcctgaagtgaaccctggtaccaaactctgggtaagtttttcatgaaatgagttcataggaagtgtgtgtgggggggggggttaattttcttctgtggttttttttgtttgttggttggtttttgttttttatttatatgagtacactgtagctgtcttcagacacaccagaagagggcatcagatcccattacagatggttgtgagccgccatgtggttgctgggaattgaactcgggacctctggaagcagagcagtcagtgctcttaacctctgagccatctctccagccctcttc

SEQ ID NO: 20444 - DNA, 1548 bp, Mus musculus
catgcagaaggaatggcccaggaagagagccatcgaagtcaggcgccacccaccttctaccatggtgccagccaggagctcgacctgtccaccaaagtgtataaaagggagtctggaagcccttactctgtgctagcagacaccaagatgagcaaaccacatctccacgagacggaggagcagccatatttcagggagccaagggcagtgtctgatgtgcatactgtcaaggaagaccgggagaattctgatgacacggaagaggaggaggaagtctcttacaaaagggagcagatcatagtggaggtaaaccttaataaccaaacattaaatgtctctaaaggggaaaagggtgtctcttcccagtccaaagagacgcctgtccttaagacaagcagtgaggaagacgaggaagagactgaggaggaggccacagataacagcagtgactacggagagaacggacggcagaagaaaaaggagaagcaagtggagagagtcagggttacacagaggcgaacccggagagcggcctctgctgccgcagctaccacttcccctgcaccccgcacaactcgaggccgtaggaaaagtgcagagctacccaagaggaagaagcgggccaccaaggaggctaaagcgccagttcagaaagctaagtgtgaagagaaagagactctgacctgtgagaagtgccccagggtgtttaatactcgctggtacctggagaagcacatgaacgttactcacaggcgcatgcagatctgtgataaatgtggcaagaagtttgtcctggaaagtgagctgtcccttcaccagcaaacagactgtgaaaaaaacattcaggtaggtctcaccagcggagggcaaagtttccaggctaggacctggctgttcagagtcatctggtgtctgcccaagaggatagaggctgaagggacagatttcaccaattatcactttagactctgctgcttgggtcttttcaaaaccaaggcttaatcctgtctttcaaaagcattacacttaactgacgatggattagtgagaaccaggtgcactggaagggggattggttatagatgactgactgggatgtaaagtcagcgccgactttgcactgagagtctctgttgtgggacctgtgagataattcattctggcatcttctgtcacggtgggaggtttgccgagtgagggccaggagtagagaaaggtcctttccaattagaaggatgtcagagtctagtgcagctgatggggacagagaccatgactcagacctgtggaaatggaagatctccttacacccgtggagagatggcaacactaaatgtgtcaagaggcaagcccgtgggaatatgcaaaccttaaacagaggctgagctgtttgaaaatgttgcttacctggcagtagggttacataataatgttgctgtacagtgctgctgatgtaacaaagcgtgctattcaaaccactctggtgtcttggaaagattgtactgtgacaggttaagaggtgttgaatttattgcagctatattggtg

SEQ ID NO: 20445 - DNA, 8238 bp, Mus musculus
tttattttactacagaaattattttagagtttttgtatagactttagtagtctgtttctaaaatgagatgtatttcaataagctgtgtaattttttcagtgtagctaaacccatgttgtaaaatagataaatttttataatcatcaaaatgtgattctcaaagatgcatataataacttctatctcaactattcttacatccatacaactcaaaggtgcttctgtgactggatgtatctgagcgggtcaccagaccaggtacaaaagcaaggttcagtacaaagttagtcaatgaattggatgtctctgctgggcattcagtccattgggctcactgacacagccagtgttggtgtccctttgagtactctatggattcagtggggtggtgtgagggaatggggtcactcagagttagcggggcttgcaaatgtgaatgacatttgtgaatgccctcgggagaaagtgacggaggtcgtttccttggatcacgtctgtttctcactttcttagaaactgtgttgtgcgcagctgttaggggaagatggattggaatctcttactttgaggctcctgtgttttccaagagtgttagaagaagctaatagggtgaactgaaatcacaaacgtaattgctggtagtgaccaagaaatgtggatgggaaggcaagttgacttttaagttttaagatgcctgcagtctctaaaacgtggatgtccacactgactggtatctgccattaaaaatgtagtgagaggaaacccccaatactgttgcctgccctctccagaggagggagaccgcagcatcttaggtgaggaaggaacagtgcccttgtctctcgagcggcagcttactcggtcaacatttggggaacttaaacagagcgtggtcaccctggagtggatatacggaaggccagagagaagggctaacatggtggtttcagtcagctgacaggtgtgcacggcacagctcctacgcattctgtgctgctcttctcagaggctgagttccaagaatggcctctgcctcccacctctctcctcctcgtctctctatcctcaggctcttaaatcagacccttagctgttatttatttatctttgatattaaatgtgcagttatgcgttgtgcactttttcctggctacttaactctgcagtggggacacacggactctggactgaggttaggttcctgcttttaaagtatcatactctaaattagtttttttggtttactatttctagatttttctccagttttgcccttgtcttctgtaaacataggaaacattgtgtgtggagtcaggaaagtctctcaggacacactttccctccagcttctagctatgaattttaatgaatggtatttgtaatatttgcatgcattcttgcagccctcacaaacccgaggcaaacaaggaagcaggttccttttctgaatgtcgtgacttagaagtcacccctaccccatttacctccacagtctcctctgcagcttatgggaagtctgcaaatccaccttccatgtagacagatccatatctcacggctaaacctataatattcaagtatttttatcaaaaaaggtataatttgtagctaagttaataattggttataccttattttatactaaatgcttttacaatatgaggcagacattctgaattctagtcttgaggctgttgaattacaaccatttgatggttatactatgaatattcattgaaaaattcaggttgtcagttctgactttattcaaatgactatagccataagaaactgtcctctacataggaaacccaatagcgagtcagtaagcatcactatccttaacagaagcagaaaaaagaatttaaaatagtgacttaggcctaccacactctgtcattcttactcaaatgtgaaacagtgtagaaatggcaatatattttttttttctagagaagtttatcttccctgacttgagaagcctgctctaaaaaatggctctcaaaagtgtacgactaatgggcatatgtataatgagatctatacagaaatgcttcggagtcagaaaccacagggtcacgccttaaacatgcaggtacctcagctgtcacgtgctgaagactcagactcagggttgacagtgtacttggggaagagctgcagtgtgtgctgtgctggcccacatgtgctgcagcgccccaggagttctacagtacctgttacattcttgttacctgtccatggaaaaagacccgtggaagagttggagttctaggcttgtatctttactgttgtctcgtaacacgttacatttcagaataacagattttaagtcaaggctttctctttacaccattctatcttcaaaggctttgttgtggcaaggattacttagttacaagtagaccaggctagccttgaattcacagcctgagtgctgggtctacaggagggaaccacaaccggcccctcccccaagagttttgttgttgttggggttcttgttttgctttttttgagaaagggtctctcactaaatacctacgctaagctgaactccccagtggatacggtcatggttacctcaaacccatgactccctcacctcagcttcccaaatgctgggctcgttgtacctgctccccccgcctggcttccacagcgatgtttctgtgttggtattacgttgttttgggttgagtcatgcatcacttgctttcttctcatggatttatcatttggatacaaacttttttagcctaattcattaggctaattcattaggctgctgctctcaaactgagtcaggctcagactgggttaggttttaaaactgaaggaaaagaagatttaaaggcacgtggcttcattttattttatttgtatattattttgacttgattcttatttttagcaaatggagaagtctccacataaaactttaataaagtttaaagaaacctttgtaaatcattgccaggtactgtcttagtaaccctcagccttaggcctcaccacgggcctttccagagttgtccagtctgagaacctcatctgttgacagtatccttctgagctagcccccaccccatacagcccaccccacaacctcaccccgtctaaccagaggcaaaaatctttgaagtttggaatttttaacttcttgaaaatctttttcagttttatgattgttgagtggatgtggatgtgtgtttagtttcatttttatttccctagaagatttaaattttgagactatgaagcagagaaagaactccactgcggaggcgtgtgtgtgtgtgtgtgtgtgtgtgtgtgtacacatgtgcacatactcatgaatgcacacatctatatggatctagtccctcttggaggtttggttaggaaaacacactagagtaggtgagctttttgtatttaaagagagaaaaactaaaacttccattaaaagaacccctctgtttaagtcaaaggcgccccctttgtttaagctactgtatgaaaaataccacttttgttactttgatggtccacatgctagagattttgatgctgttccgcatgtgtagcatgccatgagaagagagagtatgttagagctaaccattttatcaactaaaaaaaaatcagctgggattcttaaacttctaaccctgagcaaagagtcaccaggtttaaggtttttctctacttaaaaccaaggtagaaaattcccaggagttctcgctctctccattttttttttttctttttcaggaataaagggtcataagccattagaaacagtggcattgttatgcaataacagctcactagctaacctacagtcttgggaagcaatgctgaccttccaacccggaactacctcgctaaagcagcccagaggtccccactgcactctctgtggaagccataaaagtcgccagtgtgtccgttcaccttcacagctgaatacttttgtacccgctaggcctgtttatagacttataatcagacctttccctcttaggggacagcttttccaagactccaaggaaagtcagattcctctgagaattttcctcaagttgcttcaaagagcaactttgtagctctccagcttcagtaaatttgtttaaagaaccagatgccatatcattcaaaaacattacgtttaattcaaaactactgtgcagacctacatattctgaaaacaaactcttcctttttgttcccttagtagaggctgtgttgttataaagtgggtctctctccaccctgttaactcagggcttctggttgatgtgtcgggacagcgtccctggagttgtttctgttactgtagcacagagacctgagtacctggccgtctgatctcctactgtctacgcagctttactctcatcactctgctctcgagtgccttcaaaaaagcccatgtcctggagcctctgtcccggtctgaatcctacctctgattgagtcgttctcctgagcatcggaattcaccctcttcccaagggcttaactacaaactctaacacctggctaggaattgtgaacacagttgtgtattgttgccctgtcattcacggcagggtcacctttgtagcttctttgtatcttattcccccacccacaccacttctggactagagccatttgtccttcaccttctagtctttcaccacagaccgacggttcccttaaaaatcaaaggtcacccagtgcatctctgggtcatctttttctcatctgatgaagtcttcctgagtacctacccttcaaactaaaggagcgcgagctgccgctggggcgcacatagcatcgcgtaacacttggttcttccagtggctagcctagtcataggaggagaaaagtgctctctggggttaacaaattcctttcttgatttttgatcagcccctctctctcatcagccacctgtcccccttgtaagccccattacgtcatttacaaagtgtgattgatgtctaatgtatgaaagacggaggaaaaaggaagctgatgtgtgctctgtgtgtagtatgtgcacttcactgtaaagattactttagcaactggctggtctctcgtgtcccaaattaaagtttgtgctgtgtaatgggttgatagttccctcctaaagcaaaaacagatgagctctttcggtgaggaaacaggatttttttttttttttttttttaggcaaatgaacactaattagagtatcctgacctgagtcaaaagctttgctttctgacttacagtctcttgcatctttccttccagttattagtacccaggcacccaagactgattgatggtcgcacaccgtgggagacttgaaaggcggctgttgataaatttttcatccttttttttgtctgtgaacagacaggatgccagtgggtgggacaataccaaattgtgagaattgggttgaaaatacagaagtcaagacattggaatgccccactggctgtttggattgagagcggcatgcacactggaagaggtagagtctgtggtgcagaaatcattcccaagtgtctaaaggaccctccatgtttgccgctgcggtcagtcttgggaactgggtgctttgaatcggttcctttttctccagtgtcccgggcgtttggatagcgaagagccatagtcacctgtcactgggaagacccatacccttcgagaaggatggctgcgttattgtgtctggattaggatacttttggtcaagtatcaaagagagttgttgcccctcagaggtttccccatcactaaccccagcttaccttcatcctatttgagcttctctggtgagattggggatatggcagattactcgaaaatgattttataggtgatggagatgctcaaaaagggagggaagctggggctttgtttaatgtcaaaaggaaatcggatggtttcagtcgagtcaagagcctgcctgtatgggtctgaaaagagagcagtggcttgtttctgtgtctctggctcccgtgaacgagcacagcctctccatctgccttaccatgtagggagccagggagccagaaacagggtctccatcacaccccgagtaggctctgtgactctggctgcattggaaaatacacatgatcactcacttgagttaagttggaaagaaataaatggtgtagtgtaatgtctgtgtttacttctcaaattgtattgctagatatgtggcctcaaaaaaccaggtgaattatcttccagaatatgaggggttgggagtaggggtgagggttgttttgggtttttgtttcctctgcagtacttgttttggccatacggggcgataaagtactttcttcttagcttttaagtctcttctgggctacctcttggctcactgattggatttgactaaaacattttcacgatcactaagttgagcagttactcaggcctggtgatgtgagcagagatggggtcctgtgtctgaggtccatgtggctcgtcaggcatcataaccagcaagcctttgttaatattggttccatgaaaccgaaagctagcccttatcataaaggctccattgtttactaaacgcagaactaaaggtgaccctcctccctgtttccaccctcccattgcagcccagtctgccctatcacatctgtgacagcagtggggacctctcatgtgtaagcacacgctctctcactttttctgctccaggtgggtaggaaggtctcccagagcaggcctggccctctctctgcacaggttccttgtctttgggctcctggccctcttcagctctcggggaatattgaatgcgtcctttgcagtgtctccagaggaacagttggctatccactcaggaaagcacaggcctgaggctgtttaccttgcagggtcaggaagcattttcctgtggaagggcctcctgctgattttctcctggtcctttcccccagcaagagtctgtgcagtgccagtcggggggtccttgtaattccagcccaggcagaagtggaagggaagcagtgaccagggtagatagcaggtgtccgggtgtccccacagtcctgaggtcacttgcactttctcatttcttaaaggaagtccagtgttcttgccaggaatccttagccttaggtttacaaagcttgctgttgaatgttcgtccggaggagtgtaagaaggcaggaactgcttggttccagtcctgcctgcaaggtcaagaaggtttaagactacgtctaatctggaatccttacctctgtagagggcgttgaaggtcaagctgggacggtgaggggtgctgtaaagaaggtcattgggccttcagttgtgggtgggggtgagtggtgggcaggacagagtcttactaggatgggaaggagggagaggagggcttggcccagggagctggccgcatggtgggtggagccaggtgggctctgaactggtccagatgcctggcttcccttagccatcttttccctagcatcctgtcagacccccggcgtgatgatatgcttccctgtgttaactctaccaatattatttttttagcaatggaaatgcacttttttttaatttcaactcaatcatgattttaagtataaaaatttatagattgttaaaactacttttttgtgtatttttaaccactcaatgtagcattgtatattttattcttattgagactctggtacaaggtgtgccatttaatgattttttccccccaacatgctgggcctttggatgtgtacggtaaccaacttcatgctaatgttcaaagtaaaaaaagaaaagtagccatattcccacgtgtcttctcttcatttcttctccaagctcagatgacattttgagggccccttggtcaatgattgttcattttatgtaatcatgtgacccacgtctgtattattggttcgtatctccaatgctgttggtagtgtgcctaccctaagccccaaatccagcctggtcccttaagaataacattcttcctgtcccccacctgcctgtccagttagttatagtgactgagtctcaagcttgtacacagtaggtaaactgtaccactgagctacatcctgtgtcctcctcttaatttgtgttttgagataggcccttactgagtcgcccgggctagtcctaaactcactcaggaactcagggaggcctttaacatgctgtcctcctgtctcaagcttcctgacaagcctgggtcacaggctgcaccaccaggtccgtgtgagcctgtac

SEQ ID NO: 20446 - DNA, 1203 bp, Mus musculus
ggggttcgttgtgtttctgttttttgttttttaacctgccctctcactccacttgatgtggctggcagtctcaagagtgggccctgggccttcatagtctttaaatgtggctaatgttttaacagacttggtcactgagccacttgctttgggacacgggaagacccaaaggaagaaatgttccagttttgtgctcagagactcttaatatcaccctgccatgtgacactaaccttgggaagatggggacaaacatgtactcactccaatcaggaaccaatgacggatcaaaataagcacaccacccgagtccagtatagcagactgatgagttttattggggttacagacagaagtatgggtgaggggttaccgcaggatcacaaatgactcgaaagacagcggcaccatgaaagctcaccatgtcacaaaagctgtaaacttgaagccctctgtacaacttgcagacagctcaacaggttagagaatgtctgtttcaggcagctcaacttgtctgagagtgcctctcagcagtcttcacagctaatatacttggaaaagagggggcctagtctgtctggtgggtttcagggagtccctgaaccctttgagttgaatggatgtccttttagaacatcctgtgttcctggggaagaggtgttactggatcataggaaactaactcactctctgtctctctctctctcttctggagagatggttctagatcttgaagtagagaaaagactgtgtttgagcatgctaacgacaacccagtcaaaatggaggatgttaacatttgctgtgagaatgcccagggttacagactggcagctatgccttacttctgggaatctgaactcaagtcctcatgcttgggtaacaaacacttcaccttttgagccatttcctcagcccctgattttggttttgttctgaaaacagaacaaaacaaaacaaaacagagctcactgcctagccctggctagaggatctctgaattcaaggctgggattaaaggcccacaccacaactagctggcatgtcattcctcgcctccttacccactggtgtttggctttctatggtctagctcagagcaatatttacctcaggaagtaaaaaataaagtgtaagtatgttcagagtgttgaaatgggctggcgagatggctcagagggtaagaggatggactgctcttcc

SEQ ID NO: 20447 - DNA, 6669 bp, Mus musculus
gtttgcacactgtcttgagaacaatgttccagtgaggaatcctgatctctcgcccccaattgagccagctggccacagcccaccccttggaatatcaccattgcaatcatagcttgggttgcttttaaacgtggattgtcttgaagttctccagcctccatggaaggatgggtcagatcccagtggggaagagaaataaaatttccttcaggttttataaaacctcaaaggatggtttgtttcttaacccctccaaatctttctaaccttcttggttaattcacgaaaattcctcccgttcttaatgtcctgaccagtaacttacctcttcctggatccattcacactgtttcagccttgttgtgctggggtgggggaggggcgggaggagggctagaacacagctttgtttacaatattaactctggagagccctatcctggatagtctaattctgatttttccttaaccaaccattaggaacagcaagatataaaggagagagttaataattacagtatgtaccgatccacgtttaaaaggagtccttgggctaaggatagagctcgccgggcacagtgcttgcccggcacggacgaggccctggcttctatccttggcatcacaaaaagaaaaagaaaaaaaaaagcatgccttatggctgagctcttgcagatcttgaaaaattggcacagcagaaattcctcctggccggccagctggggcttccccacctcacttatgcccctgtaaccctgggagtcctgcacggtgccctggtacaggggagtggtgctgcgtgcttcagggtagggctgaccacggtccctgattcccaccattctctctcaggcggattttatatattttttaaagtctattttaatgatgggatatatgagctctgggaagggggtgtgagctccctttggtaaagtctcggttctgtggaggagttgagtggcccaaaggtgctctcgctccacccgcgtgctttgacaagggctgaggcagctgttgcggtgtgtgtgtccccaccacggcactgttcccttgtggtggtcggactacaacccaaccctgagctcctgataaagcttaaaatttagtccatcatctggcaaacttagtaaattggagaatgtcgcttctgtttttatctagaggagtatttaactgactgcttatgcctccgtgaatgtcattgttattatgaaaggtgtgcctgaaaacaaaccagagtaccagccgcattatgcacagaggggtgagcacacttaatttattaatttaccaggctcactgagatcctgttggaagttaacccttgtggagggcagcggccatcagttaagtgaggctcagcctccctcccgatcctgtactgactgtaatgcatattagccaggtgatgcactttagctaccctggacaatgctgtcaagtgtgctgggaagaaaggaaggcctctctgcctgtgctcggggtccccgcttcctgatattgcaaggacaacagtgacaaagctaccgtgacgtgtgggcggagtcaggcagtgctgtgcgaagtaaactacctcaaggtgtgaagttacctcagcaatggttttccttttgttccctaaatcctggtttttaattttctttcttttttttaatttttttttttttttttttgcggcttgctgatattttatataaaaaaaaagaaaagcgaagcaaaagagaagctgatagtcttgaatattttatttttttaatgaaaagaaaaaatgagaaagttatgtttcataatttcttaaaacatgagccagtaactcttttggggctctgtggagaaaaggccctgtgggggaaaggtgggggttggggcctggatccaggggaggaggccatggtgaagtggaaaactccaaggagcccaggtcctccctgggttctagactctgaccttgaagtaggatttaagatctagcagagctttagcccttgggggtcaaactgtgggcacccctcctcccctctggtgagacagtaccttagccggctcttcccaccagcggtgctgttattttatgatattgcctccgttttatcgaggaaagaaataataactaaaaaataatactgttttaaaagaaacctgtatttctttaaaaatatgggagccaagactccgtttatgggaaagacaaggccactctgttcccatcgggccacctggtttgtcattacagtgcttttcctgatgattttttggttattgtttcattcccaccccaccttgttcttgtctgtgtcattctgcatagaccacaaggccagcggaccctccataactgccctccccgtctccctgcctccttaggttgatctgcttcattctaaaagtggacctgttagggcattcttggttttagagtggtgggtagccaagaggaggaagaggaaatgctgagtgtggttgggacagggtcttaccacttggtccccatcacagccacggtctctcataggctccagaccatttagtccaaagagagaaacagtctttaggatgtaacaggccagtagaattaagcttcccacctggctctatgtgctttgttcccattcaaagcagacaatgttcagacatcggccatttagtgatttcaagtggatttcttgcagcaagcatgctttgatacctggttcaagtgaccatggggggatcccatagtacctggaatgagattgctggagcgtctgttccttggggacctgcccccttcacaccttaagtccaagtccttccctttagctgattgagctcccagaagagatcagaacatgtgtgacaagggacctgaaaacttacatggactaggcaaggttccactcatggctggatttgcccagcagcaagattgtgaaagttggcttcctaatgaaagtaagaatatggactaggggcagaggtcagcaggaagggagagcctggcttatttgggttgtctggtgactcaaaggccagatcttagggcagctccttaccctgcttgtcacctctttttttttttttttccaaaccctgtcctaggtaagatggcaaattattacaaaaagcacttgggatatttggacagttgagaaaagcaacctttagaagaaactgcttctgtgctcagaggtctatgtatagaggtgtgtgtgtgtgcactacacacgtagttttatgaatgaaaggatcatctcttgggtctattttttaaattcttggaaacacataaaaagccaaatggtttgactcactgactgactttgaagctgcatctgccgcttacaccgcagtggctttaaccccctctggggtctggttgccttttgcagtttgtggacttagttgctggaaggaggtctaggtacgagggaagtcgtgtggcctttgactctttccggtcctttctgtctttcatttccctaaactctccgcttttggggaaaactcctgcctcgctattggctggagacaccatgtcaaaaccccgaggatgctgggacaggatgttccagttggttctgtatgtccgttttcctttgtgccaaagacagacagacagacagaggctgagaggctgtttctaagacaaagcagtggccggccatctttctacatctcctaggcctgtctgtgagggggagggtcctggagactacactaaagacaagcaccactcttgttaagttcctgggggattggggtgtggtgcttgcccagggctagggagcagggaaaagggggtcctgttgcactttggggaaggagggactcttgggctccctgtgggactgctctcctcccctgtccccactgcagagatggcaccgtggagttcccttcaggcctggcagactggcagtgaggaggggcctcagttagctctcaagggtgccttcccctcctcccttcccagacaccctctgccaaactgggaaccagcagtgctattaactacctcagccccagagggcgccaagcctaactgagccccaggaggagctgtcgatttaggcaactcttctccccctctctcgggacgaggtcgcctttccttgtcctaagtgctcctgggggagatcctagtggctttgccattcagaccacacaactgtttttgcctgtttgttgaaaaccaatagaaggagaccagcttggcaggacattgcaggaagagaccccctcatcaatgccaggggatgtaaaagccattttccttccagatactcaatggtttaggtgcagaatgttgttcttgtattcagacatacatagagtaataccagctgaaacatggtgtttctttcctttggatacatctcagtgagggttcaagatccgggacaggccacatgcttcatggtctagaggctaggccaaagcctcaaccctgcacggcctgatgtggtatcattacggatgccctcaaatgggtgactatggactgacaaaagaagagaatttgtttttcttaaatagcaggatgctcctggagcgtgtgtttttcataatcacagatgatgaatactacgagtataaatggatgaactacctcagtcctcacagtaagattggagatgagggcagggactcatgcctcggggatgaatcccagccaggagagagttttggcttatgccacactaggtttgtcatggggatcgggcaggcttgcccgggtccccactcacattggtcgggttggcagggttccgtcatctcgtgtcccctcccccccaccccatccccttttctgctctcctcccccactctctcatcccttcactccagctcctccccctctctctcagagcttaagcttaagcttgatgtgaggaaaggaatgggctccttccctagagagctggatggagggtggttctgggtccggcctggaatcccctagtcagctcctaacttgggaaccggggcctcttcaacagggtttcttcaagatcctctgcctccactgagtcccctcgggaggtgtgtgtgtgtatggggggagggggcgcgctctgagatagagcaggatccttctgccctggggcctggtccagtctaccaggctcgctcaggccacctttgtagttgaccaccgccaggtgccctagccctccccacccctaaatgacctccttatagaagcctgtttcacttttggttttaatctacctcttagcaaaacaatatagagaaatttaggtagtggcaactccacttgcttaggttaggcgggggaaagatttctttttccaaaggaaaaactattaccttaaaaatactttccaaaaaatcttaaaaaaaaaaaaaataaaaaccaaaaaaaatttttttttcttttaagggagggagacaatttccagtaaccatgggattaatttcctacactcttttcccccatacatatggtttcctctttggcagttgtcacatgtcacgtaatgatacggctttcccagtgatctccttgtctggtcacatccccaccccaaggagtgccagtgagactcacctgtgcttcctgtcacagctctggccaggtgacctggacatctcaaacaggagcactgggcaggggtgcttctggactcgttagggaacctcatgtgaccacagttttatgtgaaccactgcttataagctcattggaaatgaatttaagcagattataaatttgcatgatgaataaataccttttaccaccatttggagtctcccttctcttcagaaatcgtgattctgttctccgaaaccagagttgaatgagaagagcccactctggcagaatgggttgataggcagtccgaggacacggcttccggggagggctttatttttctgagtggatgtctgggaggcattggggggctgctgcttgtgactgttagactctgtaattgcgataactttgggattgtattttaccagaactctgccggccatcctgaccctgaatttgattgtgccttcctccctcccttctctgttcttgaagctgggggaggggcagcgggctcggacttggctagtttgtttattgaatggatgaacgaacactcccgggggtcccttccgggggaaagctgtttcagccacaaagcaatctcattccactgttttcagcctcaaaataaaaggaaacttatattgaaagctgagtgtgtctgtgcttctgggagttggggagcttgggtgctcgggatgaggggagggctttgctaggaaaagagtcccagagagttgccagggagagcagggagattggcctgaccccctctaggctgggctgggataggatgctcagagccaggttgcctctgctctccctgtcatgaggtgcagctctgctctgccaggcctttgcattgatagacctagaacactgggttacaatactaagttgttttgtcatctattacaggaataaaagtagctaatatagtaagaggtaactttcaaactcagcttttttcccatttggtttttgatgtacattctcactgtgtagcccagcctggccagtcggagcaaacccacccggcagccatttcccttgtgtttcaaacctggtctgcaatgttgtgcctttgaagggtttcccctgctctcctgtcttagtggctcctc

SEQ ID NO: 20448 - DNA, 6669 bp, Mus musculus; identical to SEQ ID NO: 20447

SEQ ID NO: 20449 - DNA, 1220 bp, Mus musculus
gaaggtctggcctttaggtgtgtctgccattgtacaaggtgtacaaaccttggttcttttcagctgtggcacacagggctgcctctgaagagcagtgacaggagtgggttagctgcctgtaagcagcctgcctctccattccttagagctgttgcagagtaactattgcacagtagcacatcaagttctgcctgcagcctctgtgtgtctgctgaccacagcctttcatgatagcctgtgttcccacagacggagttgttgtgagtatgcttagtttccttgccctggttacctgaagcctggagatagggcttccctgccggaagttagacgtcctttagaactgctggaccagtaactcagttgtctccggctctgcccctagctggggtctggctcccgccctgtgctgcccactgcttgacgttgtcttgctctcttgccaggctccaggacctcacgctctataaccctgagaggaccatcactgtgaagggcgccattgagaactgttgcagggccgagcaggagatcatgaagaaagttcgagaggcttacgagaacgacgtggccgccatgagcgtgagtgcgaggcggcaccgtctgcgtgtgttgttgggagttgagtctaggccttggagacaggcgaaagtgatacctctggaggagctatatcccaagctcctcttgcagccttctctgaacttagcaagggttttgctcgcatctatctcaggacactgtgtgcgtcccaggttcccagaggctggaagagggcattggattctccaaaactaaaattacagatggttgtggcccaccatgtgaagtccttgaagaatagcagtgcccttgatcagtgggctacctttccagccccttagtttgtgcttttggacttaactcatctaagtttgtttctgtggaggtggtggtgctggggatgaagtctagcgtcttgtacattgtaggtaaacagtctgttgttggcgtgggtagctgtatttactcacaagggctcgttacatggctgctgggttgggattgggggcaaagtcttgggtttcatggattctgtactttaaccactctgtgatctgtgtgatttgatctagttaagcttgtatactgtaggagatgaaggatcccaacttcagcttttttctgagacagtcctgcgctctgctctgtaggctagaactgaattcactcctgcctta

SEQ ID NO: 20450 - DNA, 1239 bp, Mus musculus
ctactcccgttgtagtacagccacctggtttcctgttgttacagataaacggcggttatggggaagaacagctcagctcgtctacccttaacatacagagtaaatcactgtcatttacttgtagttgggagtgtgtctctgaaaaaggacactagaaggaaaaaaaataacttcacagccacaaacagcttggagtccccatctagtggctgtgaggtgtcctgcattgtcctctcagaggtgggcagagtgacacctggccgtggttctcaggccccttcttgactttccaggcctagtccaaggagggtggattctaggcttttaattgatacgaggtggaggaattcccatgttgttggagacaactaaccagctttctcctggtggtccacagaatagacgtgcataggaaggagaatgcgggcgctgcggagaaggccatcagcgtgcattcaacccctgaaggctgctcctccgcgtgcaagatgatcttggagattatgcacaaggaggcaaaggacaccaaaacgtaagatctggctgtacttggcgcgcgcgcgcacacacacacacacacacacacacacacactttttcatcagggctgaggcccaagcagactccttgctgctgaaccataccccacccagcctctactcattcatgggagcggaactgagattaggagagagagtcacaaactgcacacaaacaaacataggagctggcagatgagatcattcccttgtacaattgtatagaaattttatatagtcacaatgtttatatttctctctctgtgtgtgtgtgtgtgtatggatgtgtatacattagcattgtcataaatggggtatgcaggtaaacttgtgttagcacaaaggtcaggctgaaatccctctctgtgccttttataatttttttgtcaacatatctgtcaatataaagctacagagagagaagcgacagagggcttaaaaattgcacagtagcctgcgggagctgtgcgcgtgtgaggacctgagtgtgggccccacaggagcctgcgggagctgtgcgcgtgtgaggacctgagtgtgggccccacaggagcctgcgggagctatgcgcgtgtgaggacctgagtgtgggccccacaggagcctgcgggagctgtgtgcgtgtgaggacctgagtgtgggccccacaggagcctgcgggagctatgcgcgtgtgaggacctgagtgtgggccccacag

SEQ ID NO: 20451 - DNA, 1184 bp, Mus musculus
aaggagccgcgccgcgtcgtcgtcagcctcccctgcactcggcgggcacttctcccgggctcacccaaactctcccgtgacccccgcgtgccctcaggccgcccacccgcccggagctccggacaacttcaggggtggggtgcgtagaaagtttgcggctcccgccgcccgtctccacgcctctcggcctaggaggctctccgcccgcgcccgcccggctcggccttgcctggaaccgtgtccttgccccgccaccgccaccatgaacaagctttacatcggcaacctcaacgagagtgtgacccccgcagacttggagaaagtattcgcggagcacaagatctcctacagcggccagttcttggtcaaatccggctacgccttcgtggattgccccgacgagcactgggcgatgaaggccatcgaaactttctcgggtaagagcgcggccacctccccggaaaacacacacacacacacacacacacacacacacacgaaatcccggaacaacggggacctgcagctcctcttttccttgccggccaactcttcccgggtccgggagggctcggcctccgtcttcggtccccagcctcgcccggcctccctcgacgccttctcccggcgcggagatattcgggatttcctcaccccttcccccagcccgaggcgctcgtggcggctccctacacccctccccaccgacggggcgggagccccggttggcaactggtgggggtgggggtgggggtgtctcacgaacactggggttcgggtataggcgtggtttccccgattcccccccgcccctagtcagccccccatgcgctagagcacccccaaagcccctgccctccgtcccgggcctttccaggatgggggttcgcgcacctcagctcttcccgctttaactagggactaagccctgaggcaggacgtgggaggaaggggctcccgcctcccgcccaaggcctggggcttgagccattttgatttgaaagtggggcgtgagccgggtggcgcggcggcggtggcggtggcggcggcgggtcgccatgctgcttcccgagacgccgaggctgggccgagaggcgcgcggctaccgcgagggaccctccgccccgggccgcgccgccccgggggccctccgctagccctgtggccccgacccggcctggtcg

SEQ ID NO: 20452 - DNA, 1195 bp, Mus musculus
ataaaataaaataaagatgaagggcatggcagcccacatctttaatcccagcactctggagccagaggcaggtggatgtctttgagtctgaaagccagcctgattcatgatagtgagttcaaggcaagcaagggctacacagttagactttgtctaaaaagaaaggaaggaagaaaggaaggaagaaacctggagtgatgcatggcttttctttttatttatttaaattaattaattaattaattttttgaggcagggttttgtgtgtgtgtgtatccctggctgtccaggacttgctttgtagaccaggctggccttgaaccatagagatttgccacctgcctgtctctgcctcccaagagctgggagtaaaggcatgggtcactactgcctggcatggtgcatgactttaaacccagcaccagaggcaagtggatctctgagttcaaagccagcctagtttataaactgtgttccaggactatagagaaactctgtctttaaaaaacaacaaaaggaagactatactttcagggatcatttctatagttcgttactagagaagtttctctgactgtgtagagcacctgaaaccacgaggacgagacgtagcatcccctactgagcgtgaagccggctctaggtgctgcttgattgcagctgcctcttgccattgatgatcattcttctctccttcgggagggtgagagggagggaacgcagtctgagtggatttggtttattaaaaaaaaagaaaagaaagaaaaagaaaaaagaaaacaaaaaaccaaaagggctagagagacagctcagcagttaacagcactggctgttcttctgaaggtcatgagttcaagtcctagtagccacatggtggttcacacccatctgtaattggacctaaggccctcttctagtgtgtctgaagacagtgatggtgacagtatactcacatatacataaaataaataaatcttttttaaaaaatcctcccagtagaactgctggatcacatggcaaatatagttaaacaacaacaacaaaaggaaatttgaaataaaatttatatcatatatcttatattatatatcatatgtatatttatggggtggggtggctggagggatggcttagtggtaaagagcactgactgtttttgcaaaggatctggggttcaattcccagcatggacaag

SEQ ID NO: 20453 - DNA, 1147 bp, Mus musculus
cacctgcctctgccttagcagtattgagattaaaggtgtgtgccaccacatctggtgtatgttaatttttttttaatgtgctgagattatttatttgttgtcaaggatgctagagcaggcacctaaaggttggggaccaaggtgagggtcaggtgacagggcataagttgacctagttgacaaaatccaagttgagaaaaaataagtaagtgttcccagagaccagacacaattgatgtactgagaccaggaatattaaaaagaaagcaaagtggtggtaggtggtggccagccttgctctttgcacaccaggttttcagaagagtggagctagtgtattcaaacagacttgagtcagctcctgtagggtaccggaagagcattcacaggtgtcctttccctggcaagggctgtgaacctcaagtgtgctggctgtgtgtgagctctacatgtttgtgggttttttttttttttctctaaatgagttgccaactacaatcagaaaatggcagtaatcagctgctgctcctataaaaatgaacaagcactctctagtttgctgtaatccatactacagcctgttgacttctcggtttctgttctgcttactgtatctgagagtcaggcctgacttgccaagggtctttaagctgctcttactcacttcagagacgacctgatcagggccatcaagaagctgaaagccctgggcactggattcggcatcatccctgtgggaggcacttacctcatccagtctgttcccgctgagctcaatatggatcacactgttgtgctgcagctggccgaggtacggggtgtttttgagagtgctgaggggcagcccgggccacagtccagtcaggagcggtttccacctgtccattgcctgagccttgtgcaaagactgtcttagggatgaactactctggcctgtgctcattcagcacatgtattgagcaattgcaatgcaaaatacctgtctaggctgtgggacagaggctaatacaggccctgcctttggggtgcttaccgtataggcaggtagacagacacgcagacaactacttttcttggggcagactgcccttttgatgtcttaaactacttcatccccctgcctcagtttctcagcatgcctgaaaca

SEQ ID NO: 20454 - DNA, 1114 bp, Mus musculus
ttggtgggtaccactggtccctcagtagcaagtgtgcattatcaaggaagaggccagctttagggaagttctgccttctcagtgttactgacagatgctgggcttcttgatacaaagttaagagggaataaagtaagtctgtctctaaaccccaggaccatctgtcacataccagcacttgccgtgctcgctccgtctcccatttaagactggttttgatttcactgacagtcacatacccgtttttctggaggaaggaataaagaggaactaaatcagttaagagtgctgcctggagcccagcacatgcctagaagtaggacatatatctggacaggctgcccttaaacaagcctgagcatgcaggaaaagaatgtgaaagttcctaacaggtgactttcagaatggagagactgtcgagttcatcctcaaaaactgggtccaggggcttggggagatggctcagtggttaagagcgccgactgctcttccgaaggtcccaagttcaaatcccagcaaccacatggtggctcacaaccatctgtaacgaaatctgatgccctcttctggtgtgtctgaagacagctagactgtacttacatataataaataaatctttaaaaaaaaaaaaaactgggtccaaagcactaagataccaaataacacctccatagagaactccagagcacaccaagagactcagaatgatgagccaggaaggaatggggataatcataaatttcatctaaatatttaaatacgaagctgctgtaccacctcaccctacccatcttccagcacagaaagccccttgcttatctaattttgatccatattacagaattaagaaaaatgaacacgtctctgtcatgtttatggggatgtttatgtttcaggcatgctgagaaactgaggcagggggatgaagtagtttaagacatcaaaagggcagtctgccccaagaaaagtagttgtctgcgtgtctgtctacctgcctatacggtaagcaccccaaaggcagggcctgtattagcctctgtcccacagcctagacaggtattttgcattgcaattgctcaatacatgtgctgaatgagcacaggccagagtagtt

SEQ ID NO: 20455 - DNA, 2505 bp, Mus musculus
agagacttaaatcttacatccccttgtggattttttatttgtttcttccacaggacccttttggagagaagcggggccactttgactaccagtccctcttgatgcgcctcggactgattcgacagaaagtgctggaaaggctccataatgaaaatgctgaaatggactctgatagcagctcctctgggacagagacagaccttcatgggagcctgagggtctagaccctgctcccctgcccctcccccaactcgagagtcccagcagagcccctcccctcgccccagggacggagaggcactgtgcatctcccttcaaaggtgtccgcaaggtggcaagaagcaagcaagctcaaccccagggggtgggggtggggctggtcccagtctgacctctttggtgctggagcacctagggcaacagtcaatcctggatcagggccagggtacttttgtgaaagtacctggagtgatggcctctggcaaagctaaacaaccaacacacctctctgcagggccagctaattagggataggagaagacagaaaatgagaacccaagagggagcatgcccaagtggtttatagggatatctgggagtttgggtgggggtgctgtccatgacacttaagcagtctggttggttatctgtttgtcttcagtcttgaagcagggcttcccaacacccttttcttcccctcccctatttcccatgggccagcataactttgtttttcctaatttatatagtcactgttctagacagaccaaagacaaggaacagtggtggagtctgggctgctgatcagtaagctttacctagcacctgagcaccttctccctcacaccatttcctccgaattttaggttacaggtagaaggtaagccagctggaactgagcccaggtctctgtgaagtctgcatgggcgtcaggaagctgctcactgtgtccccacaatcactgatttgaaaggttcccagcacaggcagctgcagcctgtgtgggatttgagccactacataaaatagtctcttacagattgtcctgaatagtagtcaatgagggtggttttcttggggtggagcacggtaagactaatgctagtccctattttgtttagctgttacgtctgtagtccctgtcctcccttctgtcctacccccatccctggggatttgtgagcatggacagccaatggctcgagggattgtggctgggactctggagacttctccctttatctttccctctttgtcactggagctgttcctttctttgaatttagctacagtgacccttcagctggttgagtaaggatatgtgttttcagtggctctgggttagaagaacctatccttcccaggttgatacagttcacacttttcagggttgctgttctggcttccagtggatggttagtgatccacatgatacaggccttctggtcagtgtccagccctgagaaatggagagagccacctgccctgcccgctgctataaaggtctctgacttgtggatcatgggactcccttgcagagatagggagaagatagggcacaaagagggacctcttgggagggcagaaagcagagaactggacagggacaggtcacttggggagcagttttgttttggctacatggtggctgggtcatgtggaggtttgaaaggggactctgcttccaatttccctcttccattcccagagctagtccagggctgaggatgcctttggtctgtgggtccagtgttgtctgtcatccattaagtgttcccactttcaagtgacaatcttctccttggccctgccatggggcagagcatgtccggcatagcagcctgacttttatgccctggttttaagttgaggaaatatatgcacaggagtcaaagagatgtctttatatctgactgtacataaatgaagttttctttttttcctttttggtgcaataaagtttgttttggcagaaggaggaagcgcctgtgggtgtgggagggtttgtgtaaagaaacggagtcacctgggccaacctgtcaggaaggagttttttggcagctgagtagatgcatctgtggaaagaactacttgtggtgggttccctatcatttggaagtgcagggctatactctcagcagtcaatgacagaacaactaaccctgagtggataccaaaagtagctttcaagattgggcgtgagcatgtcctgtgagggcagatgggagtcaagatgggcccaggctacaggatgtcagtgtggaaaagccactgtatttgtgtccagatattgacccagcacagatctgacaagcttgtaagactgggttataaactctaaaaagccttgtttccattaccatctcattcaaatgctgtgagagaattttgctttctaacagaaggtgtttcctcttgattgatcatgagtgcagaaagaaataaccagtgcatgttctgtcctgccagcctgtactgtgagtgcaatgatagggtaacgtgggc

SEQ ID NO: 20456 - DNA, 1235 bp, Mus musculus
ctcttgaggatatgcctccatgagatccagctgcaaggcattttctcagttagtgatcaagggtgggagggcccattgtgggtggtgccatctctgaactggtagtcttgggttctgtaagaaagcaagctgagcaagccaggggagcaagctagtaaggaacatccctccatggcctctgcatcagctcctgcttcctgacctgcttgagttccagtcctgactacctctggtgataaacagcaatgtggaagtgtaagctgaaaaaccctctcctcctcaacttgcttcttggtctagatggtttgtgcaggaacacaaaccctgactaggacagtcttgcagaggaactgggtttgattcctagctcccacatggtaactcacaactatctttaacttcagtttcagggaaccaaggcccttttctaaccttgcagccaccagctacatgcacatggtgcacagaagtacacacaggcaaaacgctcatacatatatagtaatacaataaacacacctttaatcgattttcagccttttggctaatatcaagtgtactatttgttcttatccgttcaatatctgatacgtcctctatccaaggacaatatattaaatggatttttggaagttggaataggagttttctccatccatccatgcattgatctggtattgcagtacctctgggaacggtgcaccctccccccttcagggacttacaaaataaaaaataaaaaaataaacacatctttaaaaaataaatttaagaaattaattaactattaggaatttgggctgttcacaaccacctgtaattccaactctaagggattccacaccctctctggtggcttccgtgggtacccgcacacatgtggtattcatttaaacacacacacacacatacacacacaaatgtgcatgtgcgagtgcacataaaaaattttaaaagggccgggcgtggtgatacctttaatcccagcacttgggaggcaaaggcaggcaaatttctgagttcaaggccagcctggtcttcagagtgagttccaggacagccaggctacacagagaaaccctgtctcaaaaaaataaaaataaaaaaattaaaagaattctttttgaggtgaggtatggtggtgcctttaatcccagcattgaggaagcagagggagaggcaggcagatccctgtgagttcaagaccagccagagctggctcaaaaacaaaccaa

SEQ ID NO: 20457 - DNA, 1435 bp, Mus musculus
tggtggggtgacctgcaccctggggaaatttctcctcacagaagaagttgctataccagtttgatcagtgcaaacagcagatacatttcgctgggtcggtattttgcatccggcctcagggtctcatggtgtgcgtctgttccctggaatatcctgtggttctaaactactacatgcaagttcccagggcttctagctgacaaaattgcttcctagccttcttacactctccagcttctgcccgtgccaactctttctctaaaattacaactgtctgcaccctccatttagacattccttctaaggctccggagcagggagggacctggtgagtatgttggcttctgctcaattgagtgaccacgtagtcttcaaccctagtctcttgtcctccctatctgtgcccacatagctcaggatggtcttgaactcactaggtagccaaaggtggcctcctgcttctccctccccaaaaagaggcattcaggctcataccgccaggcttggcttgtgccttctaattcctcatcgctggtcacttaaatgcgctgcatgttgaacattaatcataatcgagttctataaatgaggaggccgaggcttagggagaggccgggctgtgaggggcgggggcttcagcaccatctagggaaagggtggacccagttgtggaagaatgggagaagtgaatgtggagcctaaggataacttccttccactcaaccagtaaagttcctagtccaggaaattccctgcaagtggcagctgctcttccctgttcctgaagataaagaacaacttcaccagaatctctcgcatctcacaccaagccctaaactcatgctcaaactcaactctttctttgcctgtggtctgacctttccagcttacttaaaacagtttactttagggctggaaatataccccagctgctagagactataacttacctccaaacatcaagattttcttttctttttatttatgtgtatgtgtgtcaggggtgcatatacaaatgcaagcacacttggaagccagcatctggagttacaggcagtgtgagccacctatcatagatgctgagaaccaagccaagcccatctggaaaacaagtattcaaacctctgagctggatctgtctctccagccctgtccagcgcgcctttggacgagggtgtagcttcataaagagatcctggaaaggtcagagctcagctccttcgcaatacctgggaggcctcactgcatctcatgcagaactgcagcgctcccccgacccccattctgtcctgggtggttttatagttctttctgctcccctttaaccaaaaagttaagtagcgtggagacagggattggctagtgttaggtctgaaggcacctttaaaatagaaattcactagtctatgagtataagaataagtagaagacagct

SEQ ID NO: 20458 - DNA, 1393 bp, Mus musculus
ggcctcctgggaggaagagaaggcctcctgggagaaagagaaggcctcctgggaggaagagaaggcctcctgggagaaagagaaggccccctgggaggtagagaaggccccctggaaggaagtgaaggcctattggtggaatgatctgcaccggtgagtgggggaagggccactcactgttagcactgcctgttctggtttggtatgattgcacatcccagactgaggaccagaagtttaaggccatccttagctacacagtgaatctgaggccagcgtaggctacatgatggcctgtcccaaaacaaaacaaagaaacccctgtctcaaaaggactcagccaagtggtcgtgcacacctttaatctcagcactagggaagctgggacagaaggattgccccagttcgggataaatagtagctggccagacagctatatagcaagaccctatttcagaaaccaaagaaaggagaaaaaattgattgttaaatgtggttgtatgattttaaacccactagaagatgtactttgatatgtgtgtgtatcctgggtaccctctgagctcagagagggtatcaggtctctgaaactggagttacagagttatgagctaggtaccaaacctgagtcctgtgcaagagcatcaagtgctcttcacttttgagccatccctccaaccataaattaactttacattcatacattttgtgctgtgttgattttataaagtcatatttgtattttatgtatgtgagtacactatcactgttgctgtccaaacacaccagaagaggacatccggatccctttagatggttgtgagccaccatgtggctgctgggaattgaactcaggacctctggaagagcagccagtgctcttaaccactgagccatctctccagtccaaagtcatatttttaaaaaaggggcggggggtcggggggaggctcacagtgggagcttcacctgcagaggaagttcatctcaggaacttggataaatgttacttctcccagtactgagttgaggtgtccgtgtatcttggactggtgacagcaacaaccaccatttggccaggagcatgagtggtctctgttggggaatttctattctgtggagatggatgtagccaataaaaaggagttacaacccacaagtcctagtgaatcacagtaagagatccagtccactatgtctaatgttaacaacactccaggggactaagtgtgttgttgtttacccagtcagtcaaaacagggactaatcacccacagtgtgcacgtctatcaggccaggatttagagagataaagagtccttgcccttagaaatccacaaaactaatggagacattcacactgccaacagagcaactcagatttttggtctcc

SEQ ID NO: 20459 - DNA, 1162 bp, Mus musculus
ggaaaggtatattcggtttacagagccagctcacagccatcattgaggggagccaaggcaggaactcaagcagggcaggagccatgaagtcagcttgctctcttatacaaggatcttataatacaaggaccacctgtccaggaagggcatggcccacagaaagccgggcctttccacatcaatcattaatcaagaaaatgtcccacaaaggtgaccacgggccaatctgaaggaggaggcattttctcggtccaagctccctcttccctggtgaccccagcatgtgtcaagttgacataaacaaacaaataaacaaacaaacaaaccagcacaacctggcttgtagataaaagatgagctgagaagtctcctatgctggtgtacaacatgggagagtgacaggccagaaagttagcagttccccaggctgatcatcagcctccaaaagcctggagccttgtgctgaggtaggaaacctgacaagcctgcctctcaccctagctcagagaaaagatgcaggggacagtgtttgcttggtgctgtgagcttaattgtagccctcagaagtatcccgagaagccacatcaccagtgggatgggttgtagacgtgggaagaactatttgaggaagaaaagaaaaagacagattgggtgacagagtaaccagagtattgttactgtgtattttagtatcatttgctgctctgacgtgtatcaacttttgtttttgtttttttgagacagtgtttttctgtgtagccagccctggctgtcctggaactcactctgtaaaccaggctggcctcaaactcagattcacttgcctcgctcttccaaaggattaaaggtgtgtgccaccaccacctggctgggtctcaatatttttttttaagatttatttataattacatataagtacactgtagctgacttcagacacaccagaagagggtgtcaggtctcattacaggtagctgtgagcccaccatattgttgctggcacttgaactcaggacctttggaagagcagtcagtgctcttacctgctgagccatcttgccagcccctgggtctcaattttttaaagttattttttattttagagttacgagtataaatgacagcgagctcatatgagtgcaggggcctgcagagttcagaa

SEQ ID NO: 20460 - DNA, 1188 bp, Mus musculus
gtgaaatccggagaggtggggtggttccttgtaaccctggctgctggagtctgaaactcaggctaaatacagataagttggagccagataagtttgggcttcaaagagaaaaatttaaaaggttcagaattccagggctaaaactcaaagaagtctttggagcccaggctctctctgtgaccttggtcaaggtcgtttcctccggatctacttaagctgtttattcagtaggaaaaaagaaaaagaaaagtgacttaggaccctggaagaaagtaattttcataagtaggcaggtggccggcaacctccagcctggtgctgctgtgtctgcgtggagcgcgggaaattgagagggttggaggtgggctgcaacaggccggagggggaggggtggaggagggctctgctcgcccagtctgtcctaaaggggaatcggtagcctcccgcccaaggtctgcaggctttcttccgttcttgggctctttgggcctcgcccctccctctcacattcccaactcccaaggacaacttgtcgctggcttcagacgcccgccctgcctgaggtttccttgtgtcccggactctgctgtttttcttttgtctaatttgtccatttctgcacttggcaatttcttgggaactaacttgaatctacttctcccttgtctgtaatagtctcttctctctctctctctctctctctctctctctctctctctcacacacacacacacacacacacacacacacacacacacacacacacacacacactgtcttcttttcttcctcttagccatctctgggtcttccagctggctctggcctgtccctggcacctcccagctacctactgatccgacggcgcccaagccggtataggctggtaagactgctcccgggaaggaggctccgggatgatccacgcggccgcgccccgcacccaccggcggcgccacggagacgcagagttctccagatcctccaagcgccgtcggcgccaccactccagacactgttcacgaggcctcaaagcgtggaggcggtggcccggggccgactctcgggtgaccgccaatttggtcccaagacacttcaggatctcgcaacggatggaggacagcgcggttccaagaggtaggtgatacggtcccccgcccttgagctcatcttgggtaggattgcgcc

SEQ ID NO: 20461 - DNA, 1152 bp, Mus musculus
aaaggaaggaagcaagaaaaggaggaagaaaggaaaagacagaagagaaatggaggagtctgctgcgcctggttttcagctttggtgaagatggatccaggcttcatctttaatcacgccaggcccgggcccatctgtcttgtttactctgccgaggagaagacgggcgagcgagcttcggtggcgaccattacctcgacacttggctaacaaatgaggccaggctcggccgctgccgccgcctctgctgctgtcgctgctggatcacagcctggatttttctttctttgtcccctactcctgacacccagcgaatgcaccctcagactgccagatagcacagtgttttggccacggtaacaaacacacacacatataactttcctccctgtctgtacccactttggggtgggggtgggtgggaagactgctcactcccttccaccatagacttagaagggggaacagaagggaattgaagggcagtctgcacaacgtgggttcccaaatccgagcccaagaaataaatgaaaatgaaaaaagaaaggtagcaattgggacacccaagaaggccttctgctagaaggtccagctaggcctggcagggtgaggggcagttgagttctgggagctgggaatgtcttctgggcagttcacagtagtagagtcaaggccttctcttaggttacaaatgaatgtgaaattaggaaataaaatactgtggccctcctactctggaaggacaatgttgcagaaccctctcccgttgttatcattgttgcatcgtttattattattattattattattattattattattattattattattattattttatgtcatgtgtgtcctctctcctgttctctttctgacattccaaaaccaggccccttcctacctctggggctgcctgagcctagaaccttttgttggtgtgaaaatttgtgtcctgtacagagtgacaacagaaataaatgtttggtttcttgtgaccatcacatcgtggttttgttggaatgttgaagttaagggtgtgagcaagtgcgcccccccccagtgtgtatgccaagcatcctagagggtatggcctcacaattaagttctctctctctctctctctctctctctctctctctctctctctct

SEQ ID NO: 20462 - DNA, 2285 bp, Mus musculus
gtttctctgtataactctggctgttctggaattcactttgtagaccagctggccttgaactcacagagacctgcccttagaggggatttttaacagaggaatatctttgaggggatcgtgtgacaacacttgcccagtaaatgcttgcatcctctttcctagtttgtttctggaatttagactttaaaagccccattccctgggtggtccaaaacgggaccacaacggctgatctcaaagtctctttgtgctttgttctacaggaaaaactctgatgaggctgacctggtccctgccaaggaagccaatgtcaagtgcccacaggttgtcatatccttctatgaggaaaggctaacgtggcattcctacccctcagaggatgatgacaaaaaagacgacaagaattagccctgttgagtaccagcccctgtcacctctgactgtgggtttcaagggggagggaaggagttatacttgtcttgacaccatagaggtggcttgagaagatgtcctttgaagagccagcatagtttgtgtgtcctgcagctgcccaagtgctttaaattgttcaagctgtgtagtttgcacacccatcccagtggaggggaaagggtaagtgtttcaaggcaacctgttctgcgctttgctaaggaagcagttggccttccatgaaggacaaaacctgcagaactggggtgtgggaaagcaaagatactgtcgatcttcaaagagcatctccacaacccacagccttcttcccgatagtgttaactgcatttttacagcctagcatgtgtgtagtttttggctattactggtatattaattgggggtgggagggttggggcagggaggaagggagatgggtagaatcattttggttaaaatttggggcctgattggggaaatgatgaaatagtagaacagctaactaataaattggttctgtgtccagaatattttgccttttcaaaaaaaatgtcattggcaccataagtaaggactatgagagactgttaaaaaaaaaaaaaaaaaaaaaaaaaagtctgttaatcctaaaacctacagccaaggtgctcccagcctgagctcaaagtggcccacaaaggacaaagccagttctgagttaccaaagctgccatttgatgatggaaactgactggagagggaaaggttacaggagagtatatagaggcagactactctgccatagaggtgctaattcttgaaattggagaaaaaaaaaactttttccaattacaaagttatatcagtttgtccatctaagccattggctcaagtattgcaggatggcctatgggagatggaagagaagggcctttgctcttagggtagaaactcttagagcccctctctctctttcttttttttttttctttctttcttttctatttttgttttttttttaattttttttttttattttcagctttgaaccctgaaactgcttgtggcaggttcagttactgacagcacaaattccattgagtcaattcaaggattgaatgacttcacaagccctggtctcaggagattaactttcatattggggtagtggttcacttgagaatacaaaatcttcagattaactgatgtccaaaatactgtcttgaatcatgagatccatcaatttttagtattgtctagacctacaaatagaactacattgtaaaatctttttcagcatgtgttaagatgtatgtgaaaatttctgtttaagtttaaagttcataccatactgtcagtttttgtcttaataaaattatagatttctaattcttgatttctgtctttttttttccccaaccaggtcttcttcccgtgttgcccagtctggcctagaactttgaatcctatgcctccactgttcagtgctggaattgcatggtgtgtgtaccactgcagcaggcatcttcatcttatcagcagccctcttgcctcagctcagcttctcaaaagtgcctgccacagcttcatgactatagatggacactgtaggctcaatcttgtgccctagtcttttaaatggcctcagtttattaatatagtaatatttgagcatttataattgctgaacatatagttaggaactggcacatcattctatatttcgtattgctgggaaattatttactgataacacttccaaatatagttatttgaaaacatgttttatgaagtagcttagtcagttggatggcatcagcatatgttgtcaccaaaaagtttgaggaattggcattatgtattaaacactcagttgg

SEQ ID NO: 20463 - DNA, 2550 bp, Mus musculus
aggacttgcagcgagataaggcccgattgcttcgagaaaaggtagagttccttcggtctctgcgacagatgaagcagaaggtccaaagcttataccaggaggtgtttgggcggctgcgggatgagcatgggaggccctactcacccagtcagtatgcccttcagtatgctggggatggcagtgtcctcctcattcctcgcacgatggctgaccagcaggctcggcgacaggagagaaagccaaaggaccggaggaagtgagcctggggaggcagggggtggacgctcactaagaccgaaactggagaagggctgggcctggacctaacattggggacttaaatgccttcttatccaatatatcttctcagatgggatgactgcgggtcagtgcaccgaagaggcgggcgcaggcgctgtctggctcagctgcccccttggggtgggcagggaggaccagactgcttgggtgattggggtccccagcctattccctttctcttgaggggagggtagtgtcggcatgctggaagtagaggagctgtgtggagtgaaggagagaaagtgtgggagatctcattgctggaaggagaaaaggaaggaatcccccgaaaatcaaagcagtcagaaaaaccagagcgactgttaagggctttggccagctttctaggcagcgagtgcaggtgacaacggtggtctagggagagttactggtatggaacacagacatggcggggccccagaaggcctttgtaactgtttcttcaactcttgcatccctgaagggaagatgctcttggatgcacctgtaatatcttagttactgaatgggaagctgtaggggccgaggagggcagagggtataggaagtgagaacgaggcctgtgtcgcagcagcccagcatcaagcatgtcacacactgccctgccacagccacctccctccctggccatcccagagccgaggctcccactgtcctcagagagcctgcatggaaatgctgtcctcttccactctcctcctctttttgatacccaccctcactagctgcctccagctctggagtggggtgctattctggcagtatctggaacttggcctacagcttcctctgcagggtctaaacagggaaggcacgtgtggaggagtggtcccagtgacatccaggcaccattcagcacaacactgggaagtgattcttccctcaggcccctctgcctaccaacacctgggctcctcactgggggaaacaaaagcctataaaccccagcaacaaaacctagtcctcttagacgttcttgcgctttgatttttttagggcgtgtgccctgttacacttatagggcctaggatgcttgtgttgagtaaaaaggagatgccccaatattcaaagctgctaaatgttctctttgccataaagactccgtgttaactgtgtaaacacttgggatttttctcctatgtcccgaggtctggtcttgatttcttttttgggtttctttctaggaaaatgagaagtgcatgcaaggggcaggagatgaccctcccctaggctttcagcttcaggcagcttcttcacagcctgttcagcctgggctcctggaggacagccctgggggaggcagtgaggggcagcgccaagatagccaggtggttggttccaggaccacagtgtcttttttttgttgttggttttttgttgttgttgtttgtttgtttgttttttaactgccactgccgccccctgacccccaatcttggtcagctctggagtactgcctgccccagacgagcaggggttgggggggagcactgatcctcctccctgggcagggcagagggctttcctaaccgagcagtagggatagaaagcgtgagcctgggagtgctttttataaattattttccttgtagattttatttttaatttatctctgtgacctgccagggagaggagagaaagaaatgctgtgagcacatgacaaaataaaatcaaataaaatggatgattcagcttaagtgcactttctcccccctctcccttctgaattcagatgagagtcacggaagctgggagactggccattgtgtgcttaggtgggaaggcggggagcactgacaaaagaactctgcagtgaagcccatgccatctcttcctgctggatcaggggagccttctcagaggcttgactgtcggtgctgtgctggagaggcacagagcactgctggactgcagtcatggcctggaaatgggacctgttagccgtgaagtgcgccatgctacagatgtcctgtgtgttgagaactcacactgcctgcttcaacttaacatcctcaatttctaggtaggaagggctggcctttgcctctgggctgctgcttgcagaaattaggcctttaagagggctggtgccatttacccactcacctaagacagtagggagaggtggtagcaccttccgaataatcaggccttagttttgacctacacacctctgcagcaggaccttgggtctgacatggggggaagcgccctttgtcttggttcatc

SEQ ID NO: 20464 - DNA, 1184 bp, Mus musculus
ccacccctttatgcaaatgcagtggcaccacaggctgatgcaagtctggtcactgctaagcaattccacagggcagtttgcccttgcttgccatggtcagacagtctgtgttttcagagtctccaaatcttaaaaggagaggggtctcttgcttcctcctctgtctttttagaggtgatacagccctgacctttagcttgggtgtgactctggcccacagtctaaacctgaaagcctgtgtgatgctagacacattagtagtttttagcaatgcctcttattttggtggaaggttgcctgggaatgaatgatgccttgctggtgcagagggagcaggaaaggagggctaaaaggcacaggcctgagtatgaccccacccaggactcattggagcgtcagtaggtgggacctgtgaaggggtaggaccgggagctttctccctgggatgggggactacttgaaagctaaagtcatcttggtctgtctttcaggatatagatctgattgacatcctttggcgacaggatattgatctgggggctgggcgtgaggtttttgactacagtcatcgccagaaggagcaggatgtggataaggaactgcaagatggacgagaacgagaggacacctggtcaggcgagggtgcggaagctctggcccgagacctgctagtagatggagagactggggagagcttccctgcacaggtactgccccttactgtctccgacactggtcgctgctctccctgctccccagactcaccatgctggaacacttccagaacacttgctctggatcagagttgtgtctttgcagtggacctgattgtgttttggcttagggtctataaaggcacagtggacaatggactcagaagcactaggtcttgacagtagatactgcagacaggcaaagtgtctagcatcttagaatacttctccatccctttgattgtcctgggaatagggtactcgggtctgacattcagaatggctgggacactgcaaacctgttctggaaaaggggtgtttgttatagatagctaaggcccaggccagtcaacagtagttatagatagccagggcctaggccagtcagatttacagttgctattgccacagatgcctggtgacagtttccaatgacagccttgtcattggaaaagtgtcttaggctgctgg

SEQ ID NO: 20465 - DNA, 1205 bp, Mus musculus
ttcatttattttatttatatgagtacactgaagctgtcttcagacacaccagaagcatcagatcctattacagatggttgtgagccgccatgtggttgctgggaattgaactcaggacctctggaagagcagccagtgctcttaaccactgagccacctctccagccccatattaaacattctataaggggagtgttgatgagcagagaagagaagaacagctggggagggctaactgcatggctcagtggttacgagcactcactgctcttgcagaggacccgggttcaattccaagcatacacatggtggctcacaaccatttgtaacactagttctagggaatactggtgtcttctgcaggcaccaggcacacatgtggtaagcagacatacagacagacaaaacacctatgcacatacaaagttaaaagagaagaatacaagccgggcggggtggcgcacgcctttaatcccagcactcgggaggcagaggcaggcggatttctgagttctaggccagcctggtctacagagtgagttccaggacagccagggctacacagaaaccctgtctcgggaaaaagagagagagagagagagagagagagagagagagagagagagagagagagagagagagaacacagctggaatgggaggcgaagccctgggtgtggctccaggcacttcaccgcatggtggggcagtgcatgctcctgatgcagcgcttccagtttggaggctggggcatcaaagaacgagactgtttcaaaaccaaacacaagccagacagtggtagaacactttaattccagcactcgagaggcagaggcaggtgaatttctaagttcgaggccagcctgggctacagagcgagttccaggacagccaaggctacacagagaaaccctgtctcgaaaaaccaaaaccaaaaccaaaacaaaaccaaaccactactgctactcccaccccctagtattcatttgagtcatcctaagcttttactttgccaacaaaaactgaatggcaagttactcagcacctctagggctctagaatagaatttacctggtagagttatattaattacatgattggccatgctgccaaacctggaaaattaagttgtacatcctcaggaaacaattcctctctttctaaatgagcaagcaacaaataaagactggtagggccttgttatgt

SEQ ID NO: 20466 - DNA, 1278 bp, Mus musculus
gtacccccaagtgatggagttttggcaaggccaaaccaaccgcctccatgaccgtattgtcttccgccgaggcctggcaacaggagactcccctttgggacccatgacccaccacggggaggaagactgggtgtatgagagacttgcaccttaacactggacccaagaatgttggggaatcaccagggggcagagagtggggaaaagcagttatgggaataagggaatggaagcccggtctaccttctctgtgtgtggcgctgggtttaaaccttgctcaggctcggcaactctgtaccactgagtgagagtcccagcatttctctctctttaccttttattttaagactaagttgctggcccctgagctgtttggagaagtgcctgattggctccaggagctgccgtggggggccctgtctctgcttcccctaggttagccctgaactcactgtgtttatatcccaggcaagcgttggccttgagttcctcttgcctcagtccctggagtagttgattcttggcttgtgccaccaggcccagctccagttcttgtttttaagctaagccatttcctttcttagcccttctacctacgtctctccgggactcaccctccaagttctctgaactccgaatcagttagtggctggaacaaagtgccgtagggttgtagagaatcacaaatagcaaaggatctcctaagtgttcccttgactttgctcctgggtttgggggaagcctggcttgggagctgtttccagtaataaattaatcaggctgcagatagacaaaaggcttcccagccatggaaaggagccagcccaggccatgtttgctgtgactcagacaaatcattatatgttctggttggccttgaacttatcaccctggacacacttgccttgttttgactttgtggctgtgtgcttcagcctctgtcactaacaaaggctcctcccgaggcaaccttgtcctgtgttgatcccccacttcagcctgggtccaggaaggacattgaccctgtggccatcggccaggtacctttacctacctcaccccttttgctgatgtgccatggactgtgactttattagtataagccgatgagttgttgagaagtgttataccccatggctgttagggggttgtgtgtgctccctcccccgggctttagtgtgatcccaactgtcagtgccagtgcacaagggtgtaataaaaacttgtcagccgtgtgtgatattaatgtttaacttgattccattttgtctgccccag

SEQ ID NO: 20467 - DNA, 1400 bp, Mus musculus
gtccatgatggacaggtgcccacgactgccctgggcagccctcaccccactcctgttctgtggctgtgtccctgcagagagggactctgttcctgtgttctcctccttccaaaggctctgcccctctcaccgtgagctcctggcctgcccaggccatggacactggccatgcccaatgagacgttctaacccaggacgcgtggggacccttatttccaaaggaaaaacatacatttcactccgtcgaggagcaaagtgagcccccatccccaccccatccccttcctcaacactgccggagtcccattgtgccatgccccctcccccaccgtgcctccttgtccccctcaattaagtcctcctgggccgctagggacacccaggggccctgtacccagcctcccactgacaccccccaccggggaggtgggaggctgcctccactccactgcccagccctgccacggctctcctccaaacattccaacttcctatgaaaggtcagacgccgaggacctgccctccctcttttctacggagaacgttgccttatactcacttcagatgatgacactgtggacgtgtgtgctttaaccacattttatttaattgctcccttcctctctttgctagacgcctcccccttgcttgcattcagtttagggttttgggggcaatgctgagcataggagggtctttttttttttgctattttttttctcactttaacaattcttttctaaatgacacatttcaactcaaatctggactcacctgagaacaccttccatcctgaccccgccacgccctcatctccccctgcccaagctccactgtgtacagtgtatattgtataatagactattgtgtctaagacatgttttaaaaacatattgcttgttatttttgaggcttttaaattaaacagaaatccaactttattttcgttgtaactgcttgaggatgttttattaattaagtgaagatttgttatcctttattaacgatgtattttgttggtcagtactgggctgacaaaaagtttcttgctaataaatttagttgcccaaggcaaagtctgcgtttggcagttgggcttcctttgtctgtgatgtcagaggtcttacagaaggattcctgaggcgggaactgtggactcaatttaccctcctggtcctggtcccaaaggagaccggctctcagagcacctgggggcctctggagccagagcccagtgcagtctctgcttttttctcccactcccagtcttgcttcagccacagaggcgaaccctagaagaacttcctgagctggccgactgttgtacctcccaccccagccccgaggaaggcactgcctcccagtctgtgagaagctagaggagtcaaaagccttagccc

SEQ ID NO: 20468 - DNA, 1813 bp, Mus musculus
gaagtttatgaggcactgatgttagggagttttagactctggcggatgtttatttatgttttcaaggaaagaaagaggtgatgcatccccaacagtgggctgaggcacacgtgtgaccctgaatttaagaccaaggtgggcaagaaggcagattcttgggtttggcgtttgcagggagcctgctgaccctatgttcttgcaggtggctgcgttgatgacaccatcctcagcaggcagggactcgtagactatgccaagctgcccagcctggatcagctacaggggcagctggtaggagggcttactcacctcatggcccagacccgctacctgcttcagcaccagcctgtccagctgacttccctgttggatcagtatgtcaaagagcaaaacgagggagattgtgccacgtcagccaatgagaagctacatcctcccgatcctgctccagatgcctagccggcctgttttacccagctctgcccataaacacactctgtccctgttgtctgtctcgttgtctggcagagatctaaaagaatttggagtggggagtggccttgtgtgacttggctctcattcacaatgacctccttggggacaggcctcttgatgatacagagaaattccattccagactgaggctgcccattgtccttggtttcactgatcactgtctttagttgttccaactagggacccgataggagcagtctccttgagttctccctgcacaaggcagggagaacagagactcttgcccagcctcctcacccactaccccatgctgttttcccagtccacattctcagtgctcgtgccatggtggaccggctaggaagacttgtgaatggcacctcctgggtcttgtgccaagcactctacagacacagatgccagctcctttagtcctcaccattcaggaaacagcagagaagcctgagttctggataaggtcttgaattcggttctctgaagcctcaaattctcaaagtagaacacgagtgggtcctggtgggctgacgttggcgttccacccttcgggtgtgctgggctgtggaaagaatagggaaactgcttcgtgataaaaataaaataaattttattgccttttttattttttaagaattattttatgtgtaaaactgtgcttacggggctgtagagatggctcagcagttaacagcactgactgctcttccagaggtcctgagttcaattcccagcaaccacatggtgactcccaagcatctgtaatgaactggtgacctcttctggtgtgtctgaagacagctacagtgtactcataaataaaataaataatatttttaaaagcctgcctatgtttatatctgtaccctttgtatgagcctgtgcacacagaggtcagaagagagcattgatctggagctagagttcctggtggtggtgaaccaccatgtgagtaggagattgaacctgagtcctcggaagagcaagtgcttacagccaagtctccagccctgaactcctgatcttacaaagttattgtctgggttatttcaagtcctctccaaattctcacttttcttccttaaaagccatcttccctagttgcctgtccttccaaatactacatctcacgtgcttttccttacgaaggctgggggaactagagttctcatgtaataggagccctgggggctatggcaggaggccctccctgagtcttgggaagtggcacctcccgcctgtggcctgccactgttcttgatcctgagtggatcagggtgaatgtggagtgactccttagcattccttcccagacttggag

SEQ ID NO: 20469 - DNA, 2492 bp, Mus musculus
tactactcagcctgtgtgtctcaagcacactattgttggtgagcgaaggatgggcttctaaaagggacagaagaacatggacccccttagggacaggcctaccagttccctcctccaagcctcagagcctgggctcctttctgtctgtcggcatggtaacccatttcagggcccgagactttcactaaatcagtgagtttcctgagtgtctcagctaccccttgccacttggaaggactaaaatcggggttgtatgtggcttaagttgactgtgtttcagtcattccagaagcatgcccaggtcttggttcccctccttactgatgtgcctgaggtaacagagcagtgactcttatctgctttcccagccctgtgggcagggcagtaaccgctgagctgctgacttgcagtggatgctgaggatggcgctggagaaaggatagccagactcctccatgcctgcctccatgcctgccgcaaccctccctgatagccgcagctctccctgatagctgcagccctccttgataggagtcctaggaaagggcaggtggtatgtgagaccgaatctaagtgccttcattttcttcccacagctactgatggagacggtgggctctgatatccgcagctgccccctctgccagctgggtttccctgttgggtacccagatgatgctctcatcaaacacatagactcccaccttgagaacagcaagatctagggcacctctcccacaattggctgtttctctgttctctctctcatcgcccccccaaacactcactttgaatgctgcatgaatctcgtggggggcccctgccccttgcggtccccagatacctccactagctaccgagtcaatgtgtgtgccgtcttccctggtccaggcaccactcagctctggctctttcctggaggtcgaccaaggctctccccatcttcctggtttccactggggagcggggatctggtctgggatgaggaggatataccctccacctctctctgcctttctgttcttcaacagggttgtctccaagaggaagtctagtgctcaggggagggagaggaggaggtgtcaagagctctgggagccccttcccaaatgtctgtctttcctgggctgtgttcttccaggaaagacctcttgatagggtctcagagcctgccctgcacactgatgccagcccttctgtctcatgaccgaccagcttggggctcgtggtactggggaaggaggcatcttatttcttgttagtcactgcaggccagctctgttctccccctctgctcaccctgggaaaccaggtggcagaggggtgggaggaccctgcaggccttggatgatccagcccaaaggggctgccttgaggctgggactcctgggccattaccctcaatccagggaactgtctgccagcctcacaggcctgggctcttcaggagcccctggcactaaggtgcagatcaccaaggcagatgcctccccccatcacccccactgcagctcctgacaccacaggttccccagagcccaagtgtgactcagcctgtgtttgctgggtaggtgtcatcagcccctgccttccaggccagaacctgagattgggcccagggtgctgtggagattaatttcaaaagagctaacccccttcccatacctacccacccacccctatattccctctgtgaaatctacctcagagtcctcccctcagaaagacaggggagtgggaggctggggccccaggctgaggtgggagcctcccgagggagtctgctgcccactatgaatccacccctcgctttgagcctccctggggcctcggccagccgatggcagtgaacgccactgtccatcgaatgtgccattctgatccaaatcttccaggccccctccccacacccctccttcctctgtgaagggggtgaggggtatgtcagcagggaaggggccaaggactccagagacatgtcattgtaccctgagtgttccccagggaggggacatggggaagggggcctgtagaggggagagagggccaagtgctctctgaacaagttgaaagtccaaataaaacttacctgttccatctgtgtgcgctcaggctgtgcttccgtgggcgggaccggggtcttggccctcactcggaaggtcttggaaaccactggggagctggggctggcgagcacggtcagatctggggctggctggtggtcacaggtgacccatgtcctcactgaggacaggtttgaagcagctgcccatccctgaccagctgcaggggctcttgagtttttcccctcagcatgtctggctagcagaagttctagagctctgggccaccttaatggatcagtagtagcccttatttttctcagataacttctgaatgctaggaggcaagctggaacagcacagaaggaagctgtgttccaggtcctcatgagtctaaggctatgaggacagggcaaggctttaggctca

SEQ ID NO: 20470 - DNA, 4517 bp, Mus musculus
agggtaagttattctttttccatgtgggtcctggggatttaacagcaggcagctttacccactgagccggggctaccatatagctcttctgagaccctgaggctatactgggacatagctttacagctcaaaggcctagtgcaatttccctttttttgagaaggtcttgctatgtggcccgtgttgacattgaattcatgatccttgtcagcttcttccttgatttctgacattacagggttgtaccatcacactcagtgagctacagccttgggcaaatcttgaactgatttgcccaattgattccagaaatctcttacaaacaatttttaagaagcgaatggatgctaagaaacatagagttgcctcactcagtcattcgtgggtgtttgttttgcacagggacttgtgtacagccttcgggaaggatgtactgaagttagtagaagctaggccaatgatccatgaactattaactgaagggcggagatcgaagactaacaaagcaaagaccctcgctacgtgggcaaccaaggaactgaggaaactgaagaaccaggcttggtaagctcttgtctgcactctcaggtctcaggagggtttatgttctataggatttctaatattcgctgcctactggtattttggctacacactttttggtacctgtgtttgagcaggcagccagacacagccagacaaatatttctaagccatatatttgagtccttgtgttgaacgacaacacaactcactgaccaagacactgaaaatactttggaacctaataaaatgttcccatatttgttctctttctactcctccatgtccttttttatttgtgcagagtggagggtctttttgtagtctgctagcctagatactgctttgtagattagactggcctcaaagtcagacacctgcctttgtctctccctcctgagtgctgggtttaaaggcgtgcacctccgtgtatgtatggccttgcatgaccatttatttgcttggtttctggaaattgaactcaggacatcacaaattgaagtaagcacatttaccactgcactacaatatatgcttatatatggcagcaggtatacagaacaaaggaagagaagaaaaataatcaatctttaagacttgatgggtcccatttttagctttgggctacttggttgtaggagttggggatacatatgacctcagagttgacctcttcgtccttttgtttttagatctggtaccactgggatgatgacctgagacccccactggaaatctccaatcttttgaaaaacccggaagtgaggagtgtgcacggatgctgaatgcttgggaatgagaggatgagtgagtgaggcttgaaaacaccacactgaaaatcctgccacagccaacagcagcagcgctgttagacatgagctaagtaagcactgagtttgtagaaaacataacatcagccatcttggaacagagaaacaatggatttacttacttattaaaaacaaaaaagctgtctcttcccagggaaggctagaactagctttcctgtcttggccggtgccgaatgggtgactgatttgggagaggaggacctgggttcacctgtggggctgtgttgtgaaaggcagcctggcccctgctactgaggagaaagatggagcccgggtcttgagcccaccttcactgtaccgttgcacttggtactgtctatgtgcccttgagaaggcgcgtgggggatttcacagtctgagaatgagtgtgtgtgagtgaggcggtacccacattctcaacttcaagtcattgcagtttctttttcccagaaaacaaaggggtttgatgttgcatttcataaactaactgaagttctggctactgatgcagcacaagagacgtgttttttttttaaatgaggaaagacgctgtttaggtttggtttggtttcattttaattactctagggaaaacactgacgaatggtcagcgctcctgtcctgatcttttcatcaaggcgcctttcctgtactatggttcagctgtgaatgtagctatggggggaggggggagaaaggagaactctggagttagaggatatagaaaataaaagtacagttgttacaaagaaaatgcagacttcaaagacagaaaaagccacaacccaaaccaaaatttaaatgcttgaaattggcatcataaacaagctctctcctgacttgtattgtggcagtcggaatgcccccagaaaactgtgccaaagagtttagaaaacaaatgtacaataaaagtaaatacactcaaaaccgcaaacttcaggtaactattttgaattgcaaatgacgaaaatttaatgttgaacgatctgataaaataaccatttggaaactgcttggccttctgtccctttctttgactgactgcaatgcggtattggtctcttgctgcactccaaaccaactaaccactaagacagtgtgtgtgtatccgtatacacagcatacacacacactaaatacaactgttgtgatgaaaatggcaccaggaagaaggctctatttttccactgaagttgaagattagtaaaatggtgtcagatggtgaccctgctcgcacgctttagtaattttttaaagtgtggtgtgctgtgattataataaatcagaattatttttccttttacaagggaacaaggcaccctgagttttagagtctttcagcaataagaaagcatttcagtaagctggccctcttggctcgtgcagatagtaggagattagctggcgttttgaatatgctgctttaaaaaacagtagacaccgaggaagtttttattgcttcctggtagtgtggaagaaacacaagaccctcattcccatttccatttccattgtagtcaaaggtattggcttaggtttctcccgtgctcctttcatcccctccctgcctgagcctgttcctaagtgggattggctccgcttgcctgtccgtacgaaatgcagcgtctgtagtagctctttacagggtatcagatattgtgccttttggtgccaggttcagagtcaaagtgccgatctgatctgtgaaccagtgtacaaaaaaagtatttgaaggagaaatgctccattatgagcaaagctctctaggagtccaagccctcgggagaagcccaggcctctgaacgccttgtttccatcttagctgtttttttcagatttactaaccattcctgatactagatagggttggaacagggcttagggaagggggcagaaatattgggggaaaggaaaaacaatgtgatcattcctcagtgctacccatttctgtcctgtgtgggctgcttagcgagacagcagaggatgaagtacaccgagaaccctgatgaaaacaagaccttgcctgtgttttgtcgtgttctgttccagggaagcagttgacaagtgctgttactaatcctttctcccagatgcattcagtgctcgagaggaggaaatgggctgattggattgtggtcttggtgccttgctgttctattctgcactggttacgcattttaatcctcttttagttaccttcagctactgttttctatggtttgggtgtctgtccttaatcagttcgtaccacataaggcaaatgaatgcgaaatgcattctgtccactcactgtctgggccttccccaccctgagtcttggcacattccttcaagaatgtagttaccgtctgcttgggaagatgtcagtgcaaatgtgaagaaaatgggcatcggatagacttgggtttgccacaagtggcatctgcctgcaccaattacattggttaattttgcttttcatttttctcagttacccccagtcctccctctctgttgaaatgttgaagatttagctgtcagaggcaactgtgatcctgccttagggactggagaagtggagggacttgctcagtatggtgttctaatgttcagaaccaagcagtctccttacttactattttaagatgtgtgtagtttgactttagaagaagttcaaattccatccactttgatagcatcaatctgtaattggcattcagaatgcccttggcatgccagtctgtgaaggcattaaagacctgttaaaacacttgagcccaactttattaaccaaaactgataccaccacctttatcttctgaataaagtccgctttatttttattttcaacattttgctgcttcgttctttgtttcagatgtcactgctgtgtcagtgaggtgtggtttggaagaagctggagagagtgtgtatatgtgtgtgtgtgcaccctgctggcaaactgaggaggatgtggggcggttgtcctctgcctaagaccccagtgtcagtgcccacccaaacttcctgtttagcctgcaacaacggccagtttctctttcctgaaccttgtatttaactggatcttttcctccctccttttgactaacagtgatacctgctgacttaactgtcctcttttaaagtaacttgcatgtggccctc

SEQ ID NO: 20471 - DNA, 1200 bp, Mus musculus
aagcctgctcttttcagaactgaggagagggtttggtaaccacgagagagctagggagggtgtggtatctagactaacactcgctcccatgagttttttttttaatggtttttcgagacagggtttctctgtgtagctctggctgtcttggaactctttctgtagaccaggctggccttgaactcagaaatccgcctgcctctgcctcccgagtgccaccacgcccggcagttcccgtgatttttgtttctttggtttgctggttggttttttgttttttgagatagggttcctctatgtagccctggctatactggaactcatgctggccccaaaggggttgaaggtgtgcaccaccacacccagctaccaaccatttttgcatcctatttacagttatttgtgataggtaatgtctctgaactgcatccccaacctctggttttatttttgggaaactgttgtctgctttatgagcccctttatcccttcttggctgaggcctgacttgcattgcgtccttgtagacccgatggacaccagaataacctgagaagctctgcgtatgagtctctcatggaaatcgtaaagaacagtgccaaggattgttaccctgccgtgcagaagaccaccctggtcattatggaacggctgcagcaggtgcttcagatggaggtgaggcgactgcagtgttttatcctgggcaaggtggcaaagctttggatgcacacaaaagtgcttttgcccttgaccatgctcggaggtttaatcaccatcacccaaacccaaaaagctctcagcgtgctgctccctgttacattgcagaggctcagctgacatcagcagtggaggtttcactagagcactgtttgttcttttccttcagtcccatatccagagcacatccgacagaatccagttcaatgacctccagtctctactctgcgcgactcttcaggtaggatggcatcatctctctccttttgcttttgttttacacgtgtgggtgttttgcctacatgtatgtctgtgtcccatgtccatggggttgcccaagaagccagaaaaggacactgagtctcttaacaccggagatacaaatggtcgtaagctatcttgtggtgctgggaattgaagccagatcctctggaagaccaggcagtgctcttaagaactgagccttctcgaatccttaacctc

SEQ ID NO: 20472 - DNA, 1099 bp, Mus musculus
tttttattttgctggtataaatgacagaagagctcatggtaatttaattttgtgcataaagaactgagtctgtcaggatagaagccagtgccactgtgatcacttcttgtctttacctgttccatatagactgcttgaaagtatccactacaatcttgaatcatatatggaatttggtgaagggaaagaacattttaaactgttttgtttactgttattattttgttttacaaaggatctaagaacattctatcattatatggggccagggattgttactatttcacatgaggtctttgtaactcaggctggcatcaaacctggtacatacataacacatactagccacgggtgcccttcgctgcccttagatcccaagtgctgcagatacaggcatgtgccacaatgcccgtgagtatttcttctgaatgatagtcgttatgaattccttttgttttgctttattgtatttacaggctatgcccaccctaatagaactaatgaaagaccccagtgtagttgttcgagacacaacagcgtggactgtgggcaggatctgtgagctgctgcctgaagccgccatcaacgatgtctacctggcaccccttttacagtgtctgattgagggcctcagtgctgagcccagggtggcttcaaatgtgtgctgggtaagggattttcttcctggtgaaggcaggagcttgtccgagccattaggaggtgtgggagagaaaggttacttgtctcattgaaaggcgtgctctgagttctgtctcttaatgtcttgagaagccagagggaactgtactccgattcgttcccagagcacttggactgcacctgctgtactcctatgcttgtttttagatgaaaagctttgtttaaatggggttttttgtttttataacaaggaaaaagacagggatgaaagccaaagggggtaggcagcctctgtgctgactctgtaggctgtgtaacttactggggatagagtttgggaaaggaggagtggggctaaaatcctgtggtctgtgtgtgtttgagacagtttttctatatagccccgactgtcttagaactcagtctgtagacgagacag

SEQ ID NO: 20473 - DNA, 1286 bp, Mus musculus
aggctttgcaagccctctaccaacagctacatttccacctgctgttggtttgagacaggatcgttgtacacctggttagtctcaaactaagatagtcctctttcctcaggctcttaagtcttacttttacaggtgtgctccaccagcctgggcattcttataggtagtggaggtttcttaattctattgtacatgataattgtattcttccatctgtttcttggggtgacgtaggttatgctgtgatgaaatgtgaaaaaagttttttgtttttttaaatcagtgttttatattttactccctgattaagctctaatgatacttgggagtatatagcaagccttctaagtgaattcattgcaagaaaagcttacttaggctgggcgtggtggcgcacgcctttaatcccagcactggggaggcagagacaggtggatttctgagtttgaggccagcctggttgcaggacagccagggctacacagagaaatcctgtctcaaaaaaaaaaaaaaaaaaaaaaaaaagcaaagcaaagcttacgtagtgccacatctgtcaccaggatgaaaacgatgacgacgatgactggaacccttgcaaagcagctggggtgtgcctcatgctcctgtccacctgctgtgaagatgacattgtgccgcatgtccttccctttattaaagagcacatcaagaaccctgactggcgataccgggatgcagcagtgatggcttttggcagtatcttggaaggaccagagcctaatcaactgaaaccattagtcatacaggtaaagcccggggaagttttagatttgaaatggaatgggggtggagagtgcgcacatgtaatatatgtgtgactctaaataatcacaaagatttccaaataattgaatggttcgtagcacaggcctacaaacccaaatcacacattcttgtggggattaacaggtcagttgctcaagggtgccacccttaactggataatagtgagaccatcctatgctatgcaatacatttcctgtcttagtatagtttcttgtcattaatggtgaaatatataacttttaaaatttagtcatgaccaagaaacttgaaaaaaagaaaaggctttaccttatatctcttaacttagcacttgttttctgtaatttttggagagcaggatatggagctctcactatgaagattgtcttaccaggatcttttcttattttcttttttttaaatgctacattgtaagcattttcctgttgcttttggactggagagcctccacatatatc

SEQ ID NO: 20474 - DNA, 2197 bp, Mus musculus
cacacatatgttagaaaggatgccttacatgagatcacagggctgtcctgatgtttttgaacaagatttttttttttttaatatacttttcaagaattcttttcgttgagctgatttgcagtactggacattgttgtacatgcttggagaaagttgtcactaggattgccgtgtcaccaggcatcgacttgcctttaattctggggagatatttattagacttgggctcaaaacatgttcttgataggaggaatctgtttcttcatatagcaggtgacttgtccttgaagtggcttttgttgcttagtcaggccttaactttttgaacccaaggaaacctcttcaatgttgagtctaggcaggtactatttcaaagagagatttcccagtttcctgagataccttgatttgatctaaattttgtgtgcttctctagtttagtactttataagcaaggggaaattgctaatatgcttgcaaatgcaccttctccacagcccacgttccttgtggaactgtccagagtgctggcaaacccaggaaacagtcaggttgccagagttgcagctggtctacaaattaagaactctttgacatcgaaagatccagatatcaaggcacaataccagcagaggtggctcgctattgatgctaatgctcgacgggaagtcaagaactatgtaagtgactgtccaatccttgatgtcacatggtctaaggaacagcattgtaagggagtgttcatttacctggcatagagcatgacagatttctgagacctcaactttaactgaatgtaaaaatttattctgattagtctcttggtgtggaaatgggtgtttggtgtgttgttgggttcagcttgctaaggtgacctgcagcagcttgggaaactttagttgggtctcttaaaagatttcactcctgaagtactgggagtgccacactgcactccggggtatctttgagtgtgtaacaaggtgttaagtagcccagtccatcctcggttttattaaagggtggctatgaactcctaacatttctgcacttactctaaaaggggtcaggtgtttgccaccatgcctggattttcatagatatcttaaacatattttctactttaaaaatgtgtgtttatgtatgttttagcaactttggaagccagaagagagtgttgattcccctggatctggagttacacgccatcgtgaggatcagacaagggtgctgggaactgaactctttggagagcagggagggttatgctgttttgctctccccaacacagtcccacagctcccctttgttttagggatggcaggtcctgttgtttgctggtttttacaggataatgtgtaaagtcagggagataaataagtaattttgagtcaaacaaagagcttgaagatttgtctatctatttatgtttcactatgtagtctaggctggccataaactcacaatctaactgcctttgcctctgagtcctgggtgtgtagcttgtctttttatgtacttaaaaccagttatggaaaactttcttgagatctcagcattgtgagtgagttctttgctggttttgcattgtggcctttttatgattttgttgttgttttgttgttattgttgaattagaaagcacaggattcaaacatagatagataggcttgcctttttcttgttttaagtactagttacttagtggtctttatggataggggccaaaggaaacttgataaattaaatagtcacagtcataatttgttcagggtattaaggtggaaatgagaggagtttctgtttgtatttaggcaggtcaagattatgggcatcataattgctggatttagattctacttttaggcaaattagtgtcctgtgaggcaggtgcttccctagcagtgaccccccctcccttttccagtcatcctgtctactgtcacttggcacaagttaggaaaaccaaattactttgattcttccttggagtatataaagttatttttacccaaaattgtgtctactcggaaatgacatttttctgaagtgttacttttagacagagtctcactatagctgaactcactatgttgaccaggttggcctcaaactcacagagatcaacctgcttctgtttctctagggctggattagaggtatgccaatgtgtctagctattgagttattttaaattaca

SEQ ID NO: 20475 - DNA, 2119 bp, Mus musculus
gaggagttgctcatttagcctatgttggcaatggtcaattctcatgatggaggctgatgagtcagttagtccacatgatgcttttagcagtcccagtgttaacttgttactgttgctaacggtgattctgcattccggattgttttcacaccaggctttcttcgagagtcacccagctccttcagctgagcgcaccatccagcagtgttgtgaaaatatcctgttgaatgctgcttggctcaagcgagatgctgacagcattcaccagtacctccttcagcggaaaacctccccaccctcggtgtgaggcctcctccgcacctgggcctcactgcctctctgcagggatgaggtggagctaccaaacagctgactcacatgccaagaatctggagtcttacaccagtgggggttggacaatgaatgtagtaggtccctgctcacactccagaattaaattctattgaaaaaggaaaatcagcagttcagcaaaaaaataaaataaaataaaataaaaaataaaataaaaatgtaaatatgatagtaataaactagagcataacgaaactgtgaaacttcctgaagcctgtcatggtcaaagtgttgaacactctcctgttagtgacggatattgttttatagcctaccagaaggaaagaggctttgggggaagagggaagagggttttgtgaagtgggtgtctgcagcctgacaagccgggtatgtccatcactggggatgctgaccaaaaggctgatagctggctcacatagtggagcctgtgcagaattataagtgggttttctttttcctttttggcatgggaaccgaccaggaaggtatcttttcctgtataactcaatctgaaccaaggattgtagttccctccctgcctcccttctgtgtgatccccaaccccccaaaaagtaatgaaaagctttaaaaaacaaaacaaaacaaaaaaaaaacacaccctccctcccttcccgggttcttctccctttagttctgcccagccctgacctgtccttagataacagaaacatctttgatggccacattaaataagaggagctgatatgcttttatttcctatgataaccttcaaggaaccctgacatgcataagaggtgaaagagtagaaataaagattatcagctaggccttctgctcaaaactgtccggttacctgacaggccaaatgctgcacctcttccgatcagtatcagtgagcctggctcaccacttgtgcatatgaggggccagtggggactgctgtggggcccagatgtccgctgcaccgctgtgtcgccagtgtgctcactaacaagccccgccacctaacccagtgtgtttttactaagtctcagccctttcccccacccctttttcttctctcttccttttatttttttctgaatccttttattttgtgttaacagaaattcatatttggtgtggcttaatgtattttggaaggtcatcagattgtgagactgcttccttgaaacatttttgtgctattgttttaaaaaataataattaaaaaacagttggcgttaataaaaatgtcaatgtgaatttgttggcctggttctttcagctttcttgaaaggaaactaaagtttctctgtgcctcagaattacaggaattcggccgggcggtggtggggcacgcctttaatcccagcacttgagaggcagaggcaggcagatttctgagttcgaggacagccaggactacacagagaaaccctgcctcaaaaaggaaaaaaaaaaaaaaaaaaaagaattccaggaattcaggtagccataggagttttgaaaatttgtattacactttatatgtatagatatatacatgccacggtgtgtatgtggaggtctgaccacaactgtgggcactgatttgccccctcctgctgtgaggaggggagatttgaactcagctcatctagctttgttgcaaaaacccttacccctagccatcttgccaactcctctttgtgtttctgaaacaacctcattctgagcctggctagactagaacttgctatggtagcccatgctgggctcaaactcaaagtgaccctcctgccttcatctccacagtattggg

SEQ ID NO: 20476 - DNA, 1184 bp, Mus musculus
gttagtcagtgctaaaagcactctgactccgcagagccttcccatccctgcccctttagagtgaggcaaggagaggctgacgttgacacagtgggcagagtcagccttgacagagcctttgtcaagaaccagagccccagctgtttttttgcaacttttctcaaagtagaagatattttaaaaaagaaagagagaaatttaaaatatcaaagtgatgccccagaaactgagtagaaacaagaagttaactgatttttattggtcccaaaatatgagattcaatctaagttttttttaaggtgttcttttatagatagcaaggaaattaacaaaagatgttgtcatgataggatttttattctaacagtattctgaacttacttagcctcgttttcttaaaccaagagaattgctagcagtagataatgccacatgcatgtttgttttcttttgtcttgttgagtctgaaggctgagctgatttgtgttttttcctatcccaggctcgagctggcatcattagcactgtagaggttctaaaagtcatggaggcttttgtgaatgagcccaattatactgtatggagcgacctgagctgtaacctggggattctttcaactctcttgtcccacacagacttctatgaggaaatccaggagtttgtcaaagatgtcttttcacctataggagagagattgggctgggaccccaaacctggagaaggtaatagatgaatgtactatctggggaagaatctaaagttagtactttctattcctgtgtggttgacagttagcagcatctctgtatccagattttagagtatattcagttggtcagaaatgtagtgttctgaacctgctagtgaaattgttacaccatcacaaaacagtagctcacgtaccttggaacctatactgactctcctgcctcagcataaatcttcacacttggcagggttcagctttccaaagtaagaattttaattgctttctgcctttctatgattatgtctataatcatgttccttttaaaacaattgtgatttaaatgttgaaagtggtaatttggaggttttaaatccattcacttgtcgccatctgcttactaaatgaggtgttctctcctgaataatcttaatctaggatttattttattttatttctaaagatttatttattttat

SEQ ID NO: 20477 - DNA, 1172 bp, Mus musculus
aagaggaagcatgttatttgtctaattatactttggatttagtttagtatttatttatttatttatttatttacttacttacttacttccttatctacctccttatttacttattgtgaaatagaatttattgtggctctgactatgtgcactagatgtgcctgatctgctgaccaggctcacatggtttgtgcaataaatacatctgccgggcctgctctccagtggttggaaatgcccaggggtttgggggtagggttgtcagtccagcttcatggtccccttggtggcctttttctctgcctgcttggcttccatttctcttctactttcctctcacttttttggtcccagctcctcctttacctgtctgctctcagcctccaagccttcctagttgttttcaccccaggagtctgggtctggcctgggctgagcgctgggaccaacagacagggcagcaaaggggtggtcgcccatgtcactgggctctgcaccaccctagttatactagctagcagtgtgctttctaggggtggctccacagagctgggttcctgccagccctggtcccaggagctgtcaacttccgagctgctccagtgtgagtccagagacttatggtctcggtggctgacctgtccggcttggctcccttggaccttggcactttagtcatcatccagctgtgccgagacagattcagcttcctgttcgatgctgccccagttatcttatatgtgtgtgtgtgcctgcttgtctgtgtgtgtaccaattatgtgcaggtacctgaggatgctagaggaggacattagatcccctaggactacagttatagtgctcttaactgctgagcctaatcactctaggcctaatctttaaaattgtgtgtctcccacaaagcttcagtggcctttaatcccatcatttcggagtcagaggcaggcagatctcttgagttcaagagcagcctggttttgccagggtgatccaggacacctagggctacacagagaaaccctgtcttgaaaaacaataaagtttatagctctcttactgaaagagaataaaaaaggattggaataccccaagaaatgtaaggcagtggttttcagttttcctaatgctgcaaccctttaagacagttcctcttgttgtgactcccctaacca

SEQ ID NO: 20478 - DNA, 1179 bp, Mus musculus
agctctcttggaattcactctagatcaggccggtctcaaacttagataaatgcccattcctctgcctccctcttgctggtattggaggcgcacactatcacacccagctcatgttaccaatttccttatgggtgctgggtgaaggggatctgacctcgtgctagtgtggcaagcacttgactgagtccccagaacagctttttttagtagaatttacttagttgtagccttgtgggtagaccatttgtttgagcctctgtatgatggacctaacagttggtaagccatgcaatgttaaaaggtatgtgaagctgggcatggtggcgcacgcctttaatcccagcacttgggaggcagaggcaggcggatttctgagttcgaggccagcctggtctacaaagtgagttccaggacagccagggctatacagagaaaccctgtctcgaaaaaccaaaaaaaaaaaaaaaaaaaaaaaaaaaaaggtatgtgaatatttgatacaggaaataaacatttccagttattgttttcatttaccttctagaggatctctgggaaagtttggaaagtgccagtggcaaacccatagcagctgtgatgaatacctggaccaaacaaatgggattccctctcatttatgtggaagctgaacaggtaagcctgtgagaatccttgcacagctgggtgtgatgtgtcatccatggaatctctgtactttgaaggagataagcagacatgagtttgagccatgtcttggctacctagccagacagtttggaaaacaaagagaatattagcacaccagaatgattgtttcttctctgaggatttcatttctcaaaactgttatgcttattaatgattacacttaatgcaaactactggttgctatttttttttctttcctttttttattttaaggctcagaacccttttaaacttcagtaggctgctgggtataatggtgcacacctttaagcttaggatgtgggaggaagaggcagaaaagagctcttgtgaattgaggccagcctgctctacatagtgagtttcaggacagccaatggatatgcatgtagagagacttttttttctttctgagactgaatatcactgtgtagtgctagctggccaggatctcttaaattctaaaatgcatgatatctgggggctggtgag

SEQ ID NO: 20479 - DNA, 2102 bp, Mus musculus
ggagttgtacccacaggttaataactgctgttctaaactattaatatatataagtgtgtgtgtgtgtgtgcgcgcgcgtgtgtatgtgagtgtatgtgcgtgtgtgtgtatgtgagtgtatatagttataatactagtggaacaaatcaaatctgtttaagaataaatagaatgttcgcagcttgactttgatttgatcaaaagagagaatctaggctatgaacaataacagggagttaaaagattacatattgttttatttaagtttgttattctttttttttttttttgaggattggcatacttttatgagtaagttaaaagaagaatatcatgagttagaagggttttcctagaaagctttttatgtaattcagtgttacaggctgtctgcttcctgtcataaccctgaatcacactgtctgccaggtcagtgtgggccatccgtctgaggttgatgagatatttgatgctatatcatatagcaaaggtgcatctgtaatccgaatgctacatgactacattggtgataaggtaaataataaaaataataattccaatcctgcattgtgaaatcacagttttaatctgatttttagtttattgacatttctttttatattggttattaaaggttcctagtacaatgatacacaaattagtatgtttgtggtaagaatgggaagctagccgggcgctggtggctcacgcctttaatcccagtgcttgtgaagcaaaagcaggcagatctctttcaggccagcctagcatatagagtgagttccaggacagccagggctccacagagaaaccctgtctcaacagaactaaacaaagcagagaataggaagctgctatacaacttacaagcagttggacatgtaaaccagcactggggagacagaggccagcctggtctacagtagctgagagccctctctcttttcatgacagggattctctgtatagccctaggtgtcctgacactcactttatagaccaggctatccttgaattcagacattagcctgcctctggcgttctgggtgtgtaggtattgttgggaataaaatcatgtacagccactgctggctaagagctgtcctgagacaccaccaccaggcagagagagccaaaggagaataaaagtctgcccctattaacacacctcctccaaaagccacaactcctaacccttctaaaacagttgtgcctactgggaatcaaggtttcaaacacaggagcctatgggaaccattctcataagagcacactgtcaagataaataaataaggcaccacattgagaaagcaaaagaaggcaattttactcttagataaaacttaatgggcttcagaaggatgcatgcttttcagcatatctgatattttaggaattgagtacatttagttttgataaatgtgtgtatctgctataaattctgagatctgactcacttttacttaaaattgtatttttttaggactttaagaaaggaatgaatatgtatttaaccaagttccaacaaaagaatgctgccacaggtaatctttacgtttttaatttttttttatgatttatttatattatatatttgagtacactgtctgcattcacatacaccagaaggagtcattgagtcccattacggatggttatgagccaccatgtggttgctgggaattgaactcaggacctctggaagatcagtcagtgctcttagctgctgagcccctcgttttagtttttccctacccccttgcctccttcccctttttgtcatgctaagggtcagtcgagaactttatgcatacaatgctctactggactaagctgcatcctagcctcaaaggtcgtgttcagtaacttgaagtagaaatacagataaaggctctgagtttgatttcctagtaccagaccatgaggtgctggagataaaatgtcgttctacatttacgatgactcctcagacgtggtgcatgaagacatggtctgcactttgagctacaaagcctagtgtttactgtgtttattccagctactgtggcattcccacagctcagggtactgtggatccttttcatcctcttggagaagtttac

SEQ ID NO: 20480 - DNA, 1202 bp, Mus musculus
gtgcattattagatgtgaattttctgttttataaatccttaaatgtcatttatttttgaactacttcctgctgtgagtgatatttctgctagatttacatagtccttaaggctgtattatatttctatttaattagaaatagaaacccaattcactgtttctcccagtcattgagtaaatgatttctacctttttcatttggccatgagagccatggtttggtttgggttttaagggaaattcttggctgcagatagccctctggtttcctgcccagcctgatcccttttgcagtaaactcaagaatctttctcttggggctggagaggtggctcagtggttaagagcactgactgctcttccacaggttctgagttcaattcccagcagtcacatggtggctcacaaccatctgtcatgggatctgatgccctcaaatatgagttcattactaactggtttctgttgagttttactttacaaaattacaaattttcaagtacaatagaagggagacatgtttttccagtaatgcagtgactattcctatgtgtccttcactcgatctgcctttttcttttttaggaatggtggactcatctctggttgaatgaaggctttgcatcctggattgagtatctttgtgtagaccactgctttccagagtatgatatctggactcagtttgtttctgcagattatacccgtgcccaggaacttgatgccttagataacagccatcctattgaagtgagctatactttgcaatcatttcagtgaaataagtaatttgttgtgtctcaggatgtttaggattctgaaatgcaaaaaaagctgcatggatggcttcctttgggtgactgatttatttttagctcatgcctgaaactcttagactaagttctaagtagcatttctctttaaagtagggaatgtaaagattttttttttttttttttttttggtaaaggcaggaactatgggtatttttattgactgataggagaaaagcagtctattgagccacactatactggttccaacagcagctgtagacaaatcattatccccatcactccactgcgtctgtctgctgtttagcttgtctttatctcttaaagctttttttgtttgtttgatttttgggttttttttgttttgttttttcaagacagggtttctctgtgtagccctggctgtcc

SEQ ID NO: 20481 - DNA, 1134 bp, Mus musculus
tctttctttctttttttttcctcttttcctttttttcttttgagacacggtttcactatgtagcccaggctggcctggaacttatgtgtagaccaggctagccttccattcccagcaacactttttctgtcctgtctctgcctcctgagagctgggattatagatggacgttgtcatgctcagctgagaagttcattttctaagagcagtgactccaagccaggcctcatggtgatgggtctttaatcccagtatacccatttaatctcaatacttgggaggcagaagcaggtagatctctgaatttgaggctagtttggtcaaaccctgtcttgagaaagaaaaacaacaacagctctcggttttagcgccatcttccttgagactcctgagccataagagcgaagtggcagaagaagataatgtgcaggctgaagcgcaagagaagataaggcagtggtccaagttagccagccggtgcagccacgacgcctgcaggagcagaagtgagggatgctgagggccgggacgccgggacaagctatcggactgtgtgctgccattggtaatgagtctcagtagaactggaatgtcacctcgccacgatcgcctggagaaatgacctcctttcttataaccaaaacagtcccgctggccctctgccctggacccccggcactctggactagctctgttctcttgtggctaagtgtagctcgtgtacaataaaccctcttgcagtcagctgaaaaaaaaaaaaggaaaagaaaaagaaaaacaacaacaacaacaatagcgacagcagcagcagcagcagcaatcagaacaacagcaacagagcagagaatcagtaaagccacaatcttgacgttaaccagagagctcactgaagaattaagagccctggacaggaggtcaagtccacagagaagacacagtttttttattttcctaagacagggtttctctgtgtagccctggctgctctggaactctctttgtagaccaggctggcctcgaactcagaaatctgtctgcctctgcctcccaagtgctgggattaaaggcgtgcgccaccacgccgggccttattttggttttttcaagacagggtttctctgtgtaatcttggct

SEQ ID NO: 20482 - DNA, 1190 bp, Mus musculus
tttttacacttctagaaagaatgaaatttctctagtttgtagaagtagaaacagactctaggagaagttaaaatactctttcttttcttcttgttttattttttttttagatttatttattttatatatgagtaaactgtagctgtcttcagacacaccagaagagggcatcggatcccattacagctggttgtgagccaccttctaggtgctgggaattgaactcaggacccctgtaagagcagtcaatgctcctaaccactgagccatctctccagccgccccccccccttcttgttttttcttcctttttttcctcaacataacaaaagatatctcaatagtgcaacacttagttcctggtacttgcacaagtgtaacaaagttttctctatgtgcaagtctacttgattagtccaccttgtatgaccacaagatgatgttgtctaagtctttcaatggtttcttaattttcttctctcctcacagctggtatatttgatccctatgttccaccagagggtgatgctcgaatgtcatctctttcaaaggaaggattgacgcagagaactgagcgattgagaaagaatgcggcatcacagctggcgtacgtgtccgagataattaggcttcaatattctgggctgagaagaacatgcaatatttaattctttttttttttaattgggtattttcctcatttacatttccaatgctatcccaaaagtcccccatgccctcccccgagatatttaattcttattgtgttctatggtatatcatattgattttcctctctccatctttttttttttcaagttcacttttcatttatttatttattcaagggggtgtgaacagggcattagcctaccaaagagcaactttgtgaagttagttctctcattccaccacacaaacttcagggatcaaattcaggcttagtggcataaacttttacctacaaagtcattaccaggcccaagttcatttttcaaaaacaaccctttatacaaacaagtagtgggaagtgatctagctaatctctcagttcatcatgtcctaggaattcccccaatgcactatgcctcattcatttgaatgcagccagttgtggggaactccctacctctccaggatctaaagagattcaaatcatgttctccagtgaaaactgtaaccagcttcac

SEQ ID NO: 20483 - DNA, 3867 bp, Mus musculus
atgttcattcttgcaacccggacatttcctgagtcagaccctgttgcctttcctcactgggaacctgtcagatgctagtttgcctttcagatggatgtggagggagggaagaacttcggtgcttgagtagtctttgtgtcacataagtttgctgtcctacagaactactcaagatggacagtggggttgttgggttcattactcttaaccctgtagtatttcatgtgatggccttttgagttccccctgcttgtgtctgcctcaggtgacaaagtaaatatcgtcagtcttgggtttcctgatggtggggtgaagccctgtgtctaggtaacttagagaactgtcttatctggaaagtggcctgtgggttccctctgtgcgtggagtcaccttcctcctccttgaactaaacacagagatgtgttttctcagccgactataaagaacggagccccaaaaggaacagttatgtgtcagtccatttcactgttaacatagctcatggtcatcctaaggtcaggattcagagactggcgtacctgtcagctctgcctctggagggtgcaggccacttgccatcttgtagaaagggccgtgtgtaatggagtccaacgtccagagtcatagaggtcttcacgggattaatatttgcagtccagagatcgtttctcccatttcagccacccatgatataaaaattccctttcagccgtgtttgcattgcttgcatggctgtgagctaggtagtgtggacggatgtgaggtagaagacaagacccctgccctgagggaactggaaagtaactgttgctcaggaaggaattggaacactactcagtgttgcataaaatcaaggaccatctttaaagatcgagtgggcatgatcagggtagaccagatggtctgggaaagctctggtgataaggcttgtaggtgagggcgctgtgacagagactcaagctaaagtacagagcagaaatgtgtggcaaggtcaacagcatcagagtcctactggaccgcagtctttggacaggtctgaaggctagggagaatgagagtgtgatggaagacaaagccagcgtcagcagacacctctggtcctggggtcacccatggagaatttctatactcaggtgcaagccagacctgctccagagcatggcagcctcaccctttctgtcctgggaacttgtgttgtgctgttcttaggagcttcggtgttccagtcacaactggcctgacccttcctcagcaggatgggccacaaaacagcagtgtgggagacagctctaggaggaggcatggcctggccccaggaggccttgttagaagggagtgagcagttgagcctgttgactggggaagggagggagcgaggcgagagggcatggatgggtcttcatctttcgcagatggtggggcagtgctaatggaagtgcagtctgcaggaggaactcaacttgtctttggtggttatgtgccagtcacaaactgggaaaggcagtcacttttagagactaaaactgctgcagttttctaagttgtggttgggggtgtcgctactcctagatgcagcctatgtaaccttcactcgtttataactgatctactgtaaccttcctcaaacgggtatgttattgtaagctagtgacaactactgctgcaagttgtagttacttgaaacgtgtgtctgtgctggtagtgcaggcatgggggaacaggagcttggctgtggatccacctgtcctgacttgatcgtggttgtgcaccaagtgacatacatgtgcatagaaaggtttggaagtgtctcagctcctgtctctccttgtcccactgtcacttggactaagcctctgaggccaagcagggtgtggtgggatggctacacatgccctgtgatgcatgtcccctgaggactaggaaatggtacagccctagaagagccccagggagccaccctttcagccttgcctcatgtctctaggagggcatggcctgcttgaagctccaatcccatgggaagtagggacaggaaaagcttccctgggtaggagcttccttcccttccttgttgcttttctcttacctttgagcccaggagtgagaggccaagtcggcgagatggaaagagccgttcacaggtctagagttttgcgtaagcgagcgagaaagcgccctcatttgtccaagtcttgtctgcagttggggtgttaggaacatctccactggcggggactagggttcgctttccactctgatgagagaatggcatgcccacgtgtggaggggatgagctctgagttagacattttccctatgggaatcctcttggtttggtttgtggggcgaggggagtggatatgtggtttttatttgtagtcatcaacacagctgtccttacactgaacctgtgctattgcatacatgtagccatctttcttttcactgcagcagtgtttatcggtagttcaaaacgatttatttgctcctggggagtaaaaaccttttttattaaaaaagaaaaaagaaaaaaaaaaagaaagaaagaaaagaaagaaaggtgtgccccattatgatagctgtagaattgttgggccacaagagtcacgtctgcaagtcccctgtggtccatctgttttggcactggagccctcgtgctcagtacagtgtgacaggggcccttccttggaaacgtggagaacattttgggagtgaggttgggttgaatcactgagagggctctggggacagaactgcagttgaaaatagaatactgattctgtaatctgccagagaaaggacctttctttacatacagatttcatgtgtccttgatctttcattgcttcctggtgtcctggataggggtcacctagtttcttctggtgtccctcttgtctttcctgtcctttgtcctgtcccttcccacttcatctacctcccagaaagcccaccctgcatgctgtttgtgacatgctttcactcatcccatcttcagagggttttagagggtccctggagtcgctccctgccccactgacccctcctcatagtgccaagaggcagcaaggagcagacaagcagccaggcagacagcaacattgaatcgcagctggactgtgacggcagctgctcctggagacagatagggaaaacaaggcattcttcagcccacttgctgtgctctgtgggcagtgggctgatgccaccactcctccatccctggtgctcccaagagggacgggcaagagccaggcaccgctctgggcaggccagacatgaggatgcctgcacaggtgctgcactggtgctgcatagcacaggcactgaccgctgtgcattctggtgggttttcagaaactccgtgctgaggggtgtcattctggactcagtggttggagtttttttcaccaccggggagctgtacccccataaccactctgtcctgcttagccacccctgccctccaagccaaagcgtggcctggcttttgtcttcccatttagtttccctactttattctcccttttttgtgcttaatttattaaaatagttgctgtataatttattttcataaagtataaaaaaataactaaatggttaaaatagacttgcaggccaatcttaaatgggggtgggtctggggtgggatggggagagggaaagatgttttgatataaacaaaacaaatgcactttgggtgtgttttggtatttttctgggcatagaggggtgggtgttgggatgtccctgtagattagttccagagtggggtgtctgtaaatactgtactaataggcatgtgtgactcttgtaaagggacattagtagctgctgcaggtcctgtttggaaactgtgtgtataat

SEQ ID NO: 20484 - DNA, 1211 bp, Mus musculus
atcactggtgtgtcactgtggtctgagaaggagagcccaggtagggaagaccttttgagtcacctggtgccagctgtctggagcagcccagggtcccctgcttcgctgccgatgtgatgcatgtcagtggagggggtgggagcttcagcctgcctggcctgcttgtcaacttggcctgttagggcatgtcagaaggggcctctgctcgatcgaagctgggaactgagctgtgaatggggctaaagggtggaggaggcccaggaggcactgccctgaagggaggagactaggccagggggcaggcattgtctgtcacatgctcccatggctaccttagccctacctctggatttgtcactgtgtgtgaggttgtgggtggctacgggtctgtgtttgatggtgtgagagaccagatggataattctcgggggtgggggtgggggctcctattggtcacctgcggttcggggacctaaggtctcggaggaggtgctgagcaagcagaggaaggaagagcgggcgggcctgaccttgagccctgtgactctggcttcctgagctcaggctcagcagtgtatctatcagcttccctccttctgtccctgaccctcgggctctgggcagctctcctccctgcccctggttcctggtgactctgcagacttcttttcctctgctttcaaccctcgtctcctggagggctagcctgggacagcccattacccattactgctcttctttgaagtccaggcccctgacagcatgtcaggattcccctttgggtgtgaggactgcctgacccgtgtcaatgagagcagctggctgggccagagtctggagctgggggacgctggaggcactcctgacacaagggccctgctggcagggactgtgcgtgccttagatttccaaggggtctcaccctggcccatggcaccactccacatgtggtagttgaatggataacccagaaggtaatgtcgagggatctagggggaggggggtcaggccctgggatgcagtcctggtatcacaggggtgaagccttctctttctccatccttgtctttaagggggttgaggtaggagggtggaggtagacgtggcggtgcatgcttttctttccagcacccagggggcagaggcaggtggatctctgtgaatccaaggctagcctagtctacagagttagttcaaagcctcacctcctc

SEQ ID NO: 20485 - DNA, 1147 bp, Mus musculus
agagaggaggagagagagaggaggtgctggccttggtaagcaggattcctgccagggtatctgaaaagagggtggcccagcgggccctgccagcttggcatgttcttgtttgctcctgtgagagatgcctgttccctgtaccccctcctcacttggcctgagggaacatggctctagaggtgtgtccatagattcgaactccaaacaccacccttcaacacatcccacggccagaggtaccacttggtacatatcaggacgctcaatcctgcatagccctgtacaactcagctccatagaagacacagcattgccgggcaggactcacagagcctctccctgtctctgtgccagtgtaccgcagtacccaggtagcacacagtgggacctcacagcagcctcacttgcacctctgtcttgtagcacaaactctgtacacatctggattctgtgctgttgtgacataagcatacactggtgtgttatcgcaatgctgcccacaaatgtcaccgcatgccacagcccctttcaggcatctatgcttagtgatatcatagaatcccaaattcatccacgtgagatacaaagtctgaacttgtcacaaccagtgtctcagcacaccgagaacataaaaccctttgggagggtgctacccaaaggcctgccccacatgtgttgtgtgaagcaagcccagagccttgtgtctggagcctgaaacagtcccccttgcctagtgccctgttcttggtctcttggctccaactcagatgccagcttgcttgcctcttcggtcactgcccctcagaggatggctaagggccaagcccagaggctcggagctgctgtgctggctttggctgtgtcactgtaatgacagggccacacttggcatgatgcctccccggggaacctccattcctgacctcagttgtccccttgcacttcctggagttgagagggaaagaatggaggctcagagaggtgcacggctcacccagagtcttaaagagctgcctgtgctccagttatgagagaggaacagggcatggcaccctgcctcagtccagctgtcaggggcaaggggcagcaagggcagcagccttgaactctgccagacctagacccaagtaggctggcatccccagat

SEQ ID NO: 20486 - DNA, 1903 bp, Mus musculus
tgggccccagctcacatcaccctatagtgaagggaccttggcctcttccagcctccgcctaccctcagaccacccctccttggacacacccactccgtagccagctttctaaggtcctctaaccaccttgacagatttctgcccattgcccccactgaactgcagccaggagctgtgggcatcattggacataaaggaactgtaggcaggggagggcagggtggaggagggcaggatgggggagggccctagcaaacagatgttggaatgtttgtggctaaaggctgtccttgttttaaaagtcttacagaaatctggctattttgagagagagagagagagagagagagagaatgaatcttatctctttgtcctccctcaggactctccttggagcacaccctcatccattcaggatgcccctacttaatcagctcccttgcatttccttgtgagaacctgggtaccctagggctgatgcctgtcatctgagtccggtctgctcatgcttttatgcctctgtgtttccggccaggcctactcccaggatgcctacctaaagggcaacgagccgtattctggagaggcccgcagcatcccagaaccacctccactctgctacccacggaagacctatgctccaccaaccagggcccctgcctgggctactatggtgcctgagcccatctcagcactacccccagatccccggagtcctgctgcctggagtgacccagggtcccgtgtcccatctgccacccgtgcccacctggacaactcttccttggggatgagccagccccgcccaagccctggtgcctttccccacctcccttcagagtcccggacaccccgtgccttcccagagcctggcagccgggtgcttcccagcagactggagtgccagcaggctctgtcacactggctgtccaatcagataccccgcagagcgggggagagacggtgcccagccatgccaccccgggcccgcagtgcctcccaggaccggttggaggatgtgactacccaccacccatggccctgctccacctcccaggatgccttgagccagctgggccaggagggttggcaccgagctcgctcagacgattacctgagccgggctacccgctctgctgaagcactgggtccaggagcactggtgtcccctcgtcttgaacgctgtggttgggcttcccagcgcccatctgcccgcacctctgcttgcccttctcgggacttgacccaggcccctcccccatctggcctgcagggcctggatgacatcgggtacattggatatcggagctatagcccatcattccagcgccggactggtctcttgcacgccctctccttccgggactcaccctttgggggacttcccaccttcagcttggcccagtctcctgcatcattcccaccagaggcctccgaaccacctagggtcgtccggccagatcctagcacccgagccctagagcctcccgcagaggatcatcgtgatgaggtggtcctgaggcagaagcctccaacgggtcgcaaggtccagctgaccccagcaaggcagatgaaccttggatttggtgatgagtccccagaacccgaggccagaggggaacgcctggggaggaaggtagcccctctggccactacggaagactcgctggcttctattccctttattggtgagtggtgttacaagtggctggctaagggtcccatctccctgtctactgtgccagagtctgcgccatgtgccaataggggcatctgggttctgtctctatctgttcgtccatttgtccattcctcaataattgcttctttcctcctgttttccattccttcattcttgtagccatctttccgtccacgcttcttcgtctccctccctccctct

SEQ ID NO: 20487 - DNA, 1329 bp, Mus musculus
gcagaaggttgggggtggggtgtgaagggcggcgctggtgtggcaggctggagttaggtgaggtgggcagagaaatcaaagccagaccgaagtgggagtcctcaggagaggggaggggctattgggagtcatgtcccttggatgaagaaccgagtagcccttttctgtgagtctacttagggacccttggtgacccatgcagtgtgggtggaccgcccaagtttcatacagaaggaaaaatacaggctggatttagggtctgtcctctgcctccccccccaatagctcctagccagggagagagggaggatgaatgtctgaggagcggttatgtggggttgggtgtccatgggagagggggcatgtgtgtgtgtgtgtgtgtgagagtgtgtatgtgtgtgtgtgtgtagtcacagtgcaaaggtgtttgttaccagtagctatttctaccccaattcttttattttccccgccaggaccctgcctttggtgcacacaggcaccttagccccaagtttgtcagaggctgggttgaggccacttccacagaggcaggactgaaccccactactaccggagtcgctcctcacatcctttgccgacctctaagtcacccctctaagctctctgacctgtggatctgtctggatccccttacagctggcatcttcctcctccatgttcaccctgcatccttcggcagcttagcatgcggactcgccttcagtcgggaggaactctgtccggcactgatgtatagagtctcagctgggctgttcttgcagggtgggtgggaccagcttctcttcccacacattgtaaatagacctaaagcactagtccccctctgccctcactcattccaggggagccccagtggggtgacctgctctgctgcccaggtctgtcagtctttcgggtttatgcaaagatttgctgtaaagtctctcccccctccctttcactgtaaatattgtctctaatgtgtaacatattataaagaatttataaggatttttaaagatgttttgctcattttaaaaagtgttgtaacagtgttggataaagccccccacatctgcatggctcctcccactgtgtccttgacacacctctctaggctataactaagattcctgcttctgaaagtcttgtcttaaaagtacagtctatatcttggaaataaatggccttcctcaggcatgaaccagtgtctcgcttgtttggatggggagaagaacagagcagcgctgggaggagctatctgagggatgtgtctcggcaagcagggtagccaggcggagtggcaggatgcagggaaccacttct

SEQ ID NO: 20488 - DNA, 1157 bp, Mus musculus
ctggtatcaacatgattgtgtgaggagagccttgggagtaaggacgtgtgtgatgtgtgtggacacgcctggctgttcacgtgaggaccacatagggatgggtttagataacgtcagctgtgggtatggttgtatgcaggtgcaggcaggcgtgtgagagggtctctgtgtgtgagagtactcgtgtgcatgtgtgtgttccatcatccctgcaccactcgcccggcacccctcccaagctccccaccccacctgtcttctcaaagcccacagcacgtcaatccccgcccccacccccagctgcatgcgcctcgccgctatccatcagtgtgtgcttgacaagagaaactgccacatcgggggaccctgtacctggtcccctcacccctgcccgctgtgctgtgatactcgcatggggggttctctctggccccttccacaatatactcttttccccaggggcctcgggcaaaggctctgagtgaggtcccaagtggggccccccaaggccagcccggctccacacccacccgtccaccctgtagggcctgtgttggtgtagaagtgatggcgtctgtggatattgtgacctctgtcagtgtaaattgacgatttctaaatggaaagggttgctgtgttttctgtctcctttttaatgtcctttctctcttccccacctccccgctctcttcccgtcccttttggtttttctagccgagtgttggggctttaataaaacttgtttcttttttctctcctggatcttcttcctgtgggctgtgcctcgttatttcactggggcatggaaggaagtggggtgaagagcagaggggtggggactctgaagccagcatgccctgagttagagggcatggcacagagaagggacagacagggcaggaagcacttgattcctgctaccatggggaaggacactgcaagcgccttttttttttttttttttttttaattttgagacagggtttctctgtgtagccctggctgtcctggaactggctctgtagaccaggctggccttggctcagagatccactaccttcctctacattcccggtgtgggattagaggcatgtgttaccatgcccagctaactccactaattccaaagagtcagcttcaggctggatgtcacagaa

SEQ ID NO: 20489 - DNA, 1195 bp, Mus musculus
agagcacccaagacactggtgagattgggcaagtggggtctagggagaatatagaactagggtgtttttggagatgggagtctgagacaaggtgccctagttaattgtgcaccccacagctcacctaccttccgaattgtccactcaagatttctctaaggggcctttagatactgtaagccttctctcccagcctctcctttcctcttcttcctgttcccatcaaggacgggctgaggggttgcctttctggtgtctgccagtttactcccatgcaggagtactgatgggcaaggggcccaggatagactggaagaggaaagaacagagcctagttaggggaaagagtggggtgctggcttctcaagcaaggagaaagaagccgctttcgtgacctgctccatgggcttttcgggctgtcttctgctcagagagaaatggtttacgcgtcgcgggagtcgtcgcccacgcggcgcctcaacaacctgtcgcccgcatcgcacctagcatctagctccccgcctccagggctgccatcggggctgccttcgggactgccatcgggctcgccttcgcgttcacgcctctcctatgctgggggccggccgccctcttacgccggcagcccggtgcaccacgcggctgagcgactgggaggcgccccgaccggccagggcgtgagccccagccccagcgccatcctggagcggcgcgacgtgaagccagatgaggacctggcgggcaaggctggcggcatggtgctggtgaagggcgagggcctctatgccgatccctacgggctgctgcacgagggccgtctgagcctggccgccgcggcgggagacccattcgcatacccgggcgcgggcggcttgtacaagcggggttccgtgcgctctctcagcacctactccgctgccgcgctgcagtccgacctggaggactcgctgtacaaggcgggcgctggcggcccgctctacggagacggctatggcttccgtctgccgccctcgtccccgcagaagctggccgacgtctcggcgccctccgggggacctccacccccgcacagcccctactccgggccacccagccgcggctcgccggtgcgccagtccttccgcaaagattcgggctcctcgtcggtctttgctgagagtcctggaggcaaggcccgcagcaccgggagtgcctc

SEQ ID NO: 20490 - DNA, 3338 bp, Mus musculus
aagctcttaagccaccgacgctcggcttcatctttttcctctacgttggttttgagtttgtctctctgaattcacggagcaccattttcttccaaagggctgaaacaaactttcccattttacagatgcggaaaaaccgcgacttctactgggtaaacaagtgactggacctgcgaccagctaaaacgatcccaggccatcaacaggccaccaggagccgtgcgtctggcccctcgcacttccacccgcgcgcgcctagatccacgcgtccctgctctccgccctccagcccagcagctccgggtccacgtgtgtgtgtctgtgtgcggaatggggacgggggccgtgccgccagaggggtggggtctacgtgacgtcagagcagcagcgcccaatcagaggcgggctcgcagccgcggcgctggtattggggcagcgagggggcagttctctataacgcggtctccggagccagcggggaagaaagaagctgagagggcggaaggcgccctccccgccgctgggcccgggcaccgggcgccgggccggggtccttcccgccggcggcgagcgccggctgctttgtttgcccccgcctcggcgttgaggggtgatcgtgccgggcattgcgccgggaacgcggcggcaggaagcgcgaccgatcgcaccggggacgcgcggggacccaggagtccggccgcggcgagggccgcgtgacgataccgaggagagagccggagcgccgccgcgggctcttggtggtgggccccggacgcccgtgagcacagacctccccgtcgacggggggcgatgttcccctggcccgcaggctcttcgggccgccggggtatcccgccgttgggaccagggcccccgcagtgggcgacccccaaggctgctccatggagactctgtgtcctcctccccgcctggcagtgcccgcttccccgcgggggtctccctgctcgcctacgcccctgaagccgcgtcgggggaccccagagttctccccactgtgcctgcgtgccctcgccttctgcgcccttgccaaaccccggccgtcctccctgggcctggggcctggagagctggcgccgcggaccccggtgctgctgggccccccggcctcgccatgcacaggaggctgggccgcggacggcctgaagcacctcgggggacaggccgggcggccgagcgacgtgagctccccggcccgcgaggatgcagacgtcgcggtgtgcccaggcggtggagaggaggaagagggcggaggcggcttcccgcacttcggcgctggttcctgcgcacctccgggccgctgccctgctcccctgcgtcctcaggactctccgaccaaccccgcctggtccccgcccaggccagcccggggtcttgatgcagctagcagtccgccccttgagcccggctccccgcctccgtcgccacctgcgggcctctccccggagcctgcgccttccgagcagcctgtgccggcctccgaggctccagggggtggagaccctgcgccgaccgcgcctgaggcacccgcgctcagcccctcgacggcagacgcagcaccggacccgccccgcgatctccgccaggaacatttcaaccgcctgatccgccgctcgaaactttggtgttacgcgaaggggttcgccctggacactccaagtttgcgccgagggcccgaacggcccgcggccaaagcccgtggagcagccaagaaacgacggcggccagcgccgcccccgcccagtgtgcagccacggcggcccgtcccgacgcttcctacatcgagcaccttcagcctccttgactgcttcccctgtcccccagctctggtggtggaagagaacggagacctagggccggcttcctcgcttcgcctccagggagacgccaagccgccgcctgcccacccgctgtggaagtggcagatgggaggacccgctgtccctgagcccccgggtctcaaatcctggtgggtcaacttggaagaactatgagcgtcggacctcttctacccgggggcaagttgggttccccggacagactgagggctccaggagggagcatcgattctgaaatttggctgatctttgctttgcattttatgggctgtggcccgcgggacctcaaatgacagtgatcttcaagcacccgagaggtccggctgatgctctttctactcatctttgtggaagatccaaggactggcgtccgggaaagcctgcagaaagcttagtgaccatctccgtcctccctgcgggcgggcagagccttcaccgcaggggagcacagcggctaaggcccgaagaccaaaagaaagggacagagggacggaccttggtgatggacaaaccggttgtttccatgtttgaatgagggtcagtttagcggtgtgggggctgtggttggggtttgaaggtgattgacagctccctgggggcatcccccaccccccactgcccagacctttaaccctttacacctccctcttttctctccgtagtcctccccctccccaagttcaggtgattttcccttgtcaagatcttcagtcccagccagcagactttacccttttgtccagttttggagtttccctttgccggaaggttggatgaaggaaagagacctccagcctcagcgttctcctcacattctgagaggaaaggaggaagagggccatgctgtgtggcccaaggctggctttgcccggggaaggagccaaaaactcccggggaaaatgatggaagatggaataaatcaataaaatcagaccaaacaagtctttcgaggtccttgcctccgatttatgaatgggatgggggcgggtgggtaggtagaaggctaatttgaaagcatactaaagacacccaacacgggtgggtacaaaacagactggaggaaggcaagtgaaagcggtctctggggcgtggagggaacctgtgctgggcgagctaccttaaacctttcttggcctcaggcatttagggagttgacagggatctgatggatcagaagggggcagggcctgggggattaggtttggggtcagaggttctgttttccggactgagaggagctaggcctggaccacgccccagtcaggactgactcctttagtcagaagggtggagtggctttctctacaccgagtgatcaggttcagggtaggtgagttatgctgcgagcacgtgcttttgagagctgccggctactgagggctctaatggcccttgtgtctacctgatgcaagtgttcccacgtgacactgggaaggacgtgtgtttgtgtgtttctctctcttttttttttttggtgaccat

SEQ ID NO: 20491 - DNA, 1125 bp, Mus musculus
aaaggaccatgggaaggagtcagagtcctaccatatggactctagagatcacactcatgtcacgcttgcatggtcagcctgactgacacagggtctggaactcaccacctaggctaggctgcccagccagagagccccagggccctaccttcttctctccagtgctgggattgcaggtacttgctgccatgaccagctttgttgtttcaagactttaaaaaaaaatagttctgggtatatctgtgcgtgtgcatttgggtgcctaaggagctgtgagccactcgatagggctacgggcagctgaactcaggacctttggaagagcagccagtgcttttaaccactgagccatctctccagccctgccaggtctcacttttatttcctaaatacagtttctagggatcatatcaagttcaggtcttcatgcttagtggcaagcacttaataactgcctccttggctcaaacatcctcttttataaaggtgcctacttctttgagccagggtcttgctttgtatccccagcttgcttgaaactcctagtgtagactaccctgtctggaacttcctgccattctcctccctctgccttctgcattctgtctggaattgtaggtaaccattgctgtgctcagctctcttaaaatcaaatttagtattgtacaatttatatgtaattgaacatactttattttgaaatggcagaaaacacacgcaggacctcttgtattagattttttttctctaccactgagcacaccctcactctcttgaaattcactgacttaaattttatttatttatgtgtgctatgctggagattgaagccaaggtcttggcgtactagagcttctactattgagtcacactttccatgtcccagaaatgggcacacaggacattgtaacagtacaggtgttaggcatggtggtgtagcttgtaatcctagaactcatgaggcagaagcaagaggattcacaagtctgtgggcatccaaagctacacagcaagatgctattagaaaaaaacaagccagtcatagcagaattggagcacacctttaatcccagcactcgggaggcagagacaggtggatctgtgtgagtttgaggccatccaggt

SEQ ID NO: 20492 - DNA, 1179 bp, Mus musculus
ggactgacaatggaggtgaggggaaccctgaacgcctgctgaggtcagccaggccccccagcaggtgtggggtggaggctggctttccctgctcctgttggtacaggaaggttgtagacgcaggggacagtctacagcttggtgttgggaggcgtggggtcttgtgttgccgtcctgctgaggccagtccccacactgccccaggctgggcccatgtggtgtgcgccctctacatcccggaggtgcagttcgccaacgtgctcacgatggagcccatcgttctgcagtacgtgcctcatgatcgcttcaacaaggttagcggccctcactcctccctttcctggtagcaatcctgggtgccaccgttgcgctccgagctccctcggtagcacagccagagggttgctcataggtcacattttattaagtttataacacatgacaggcacagtacagcaggtacctagtgcttgccgttaatcaagacagaagtgtaaacaggctttgagatagaggataccctgtgaggcttgcttgggtatctggtggtcatggaaggagacatttaggttgggatctggggcatgagaaagaaccgactttgtggaaggctggccagtcccaggttctatgaaaaagacacagtgtgtctgtatgtagtccagcaagtgggacagtaggtacatcggggcctctcaaactttaccaaggattgcactgtctaacgcagtggctgactgcctgtgaatgtggaaattaaattgaatactcgggctgcagagatggcttggtggttaagagcacttgctgctctagcagagaatccaggtttggttcctggcgccctcatgacagctcaaaaccatgtttacatccaattccagggaatcagtctggtgccctcttctggccattaagggcaccagatatccactgtgatatacgtatatatgtacgtgtatacatacgtatggccaagtacacatctaagataagaagagataaacctttaaattgaatacttagacctcattttctcagcctcatcaagctgcatttcaagtgcttggtggtcctgtgacattgcgtttactggcttagattgtataggttagagaacctttccgtccctgtagaaaattctactggacagtactgatctggatggtgggggtcagg

SEQ ID NO: 20493 - DNA, 1149 bp, Mus musculus
aggtgtgtaggggaggctccctggtgtggggacttcctagctgtatgttggctgaccaaagtcaggctgcccgatggagggttcacatgtagggccaggtatccagcaggagcttgcagtggtcagaggtgggctgtagccaggtggcttgtgaatgtaaccaccgaagcgtccaaggccagcagcagccttcaggccggagtcattgactacggatgcctcggacaaagaggcccgtgcagattgtggactggtctctctgttgggtcatgggacaaacatgggtttagggcattccctagacttccgtagctgcctccccgtgtctgtgttctagagcttccttcccacagctctgagtcctgcaggacggactcccagttcaggttgtgcaccctcccgagtcaggctgagccggtctgtgcagctgacataaacctctcttgtctctgtcttaggtctcctcagcgacttcttcctcccaccatgaggccagcactcaggagacctctgagagtagcagggactcaaaggggagaaagtcttccagccatagcctgagtcataaggacaagaaactgggcactgggaaaggtgtgagcagtttcacctccgcttcctcctcttcctcctcctcttcctcttcctcctcttcctcctctgggggcccttttcagcctgcaggtgagtacgggtgtcctagaggaggcagagagcgggagccccttgacccgtgccgtgtggcaagggtctgtgcctggtggtttcccgacatctctcctttgttttttttataagtgctgtgggggtgacaaggcagggaacccctcccccagctggattctccaccctcttttagatttatttatatatcatatgggtgctttgtctgcacagcagaagagggaatcagaccctgttataggtggttgtgttggaacccgttactgatggctgtgggccggaacgtgagttctaggaattgatcggaagccctgtggaagggcagccagtgctgttttacactgttgcactgtttacactgttgcccagccccccccccccaaaccagagcccctttccttacaaggcccattctctaaccccacaatagtgtcccctacctttgtgtcaaaagggccatctgaa

SEQ ID NO: 20494 - DNA, 1156 bp, Mus musculus
tggcctcccgtacctttgggccttcaggaagcttgcccagcttgagcttagagtcatctctgctgggggcaggttagtgtccctgtcgctaaagaatggctccatgtacagccagtcgtgtcagcgggtaggggcataaagaagaaatacatgcatgtggaaactcccaacaggcagaacggaggtggccattatctctaagatgttcctttaaatgtctcctgcatgaagagtttggggtggacaccagcagaactcacagggttctgatagaggaataagaaaacctaagcatttcccagactggggcagagtagtagaatatgtagaaccccgggcatgctgtgttctctgaagaggggttgcttttaccgctgactggaggattctggggtagaaggtgaccttgggtttttctctgtctctttgtacctttaggcatctataccagtaataaggatcccatctctcatggtggagggatgctgcgggctgtctgcagcaccccactctcttccagcctgctggggcccacaggaacctcagccttgccgcgcctcagccggtcccccttcaccagcacccttgcatcctcttctgcttccatctccaccactcaggtgagaccctgctcctggctcctcttcctgggcaggatggggacagaagccctctgtggtccgtggcctgtgtcctcctgctcttccttgttccccaccacacagtacaactgtattcagctgtgcacgaggctctgtttgatcctcccaacaggtgttttctctggctggctcaaccttcagcctcccttcatcccacatctttggaacccccatgggcactgttaaccccctcctcacccaagcggagagcagccacacaggtatgctagtccctgctcctggtccccttctgaaggatgctcctgtagaaagcatgagagtcccctccctctgaatttacctcacatactataaaccatgaggcactttacgggaaaacctgtgcaggggcaggcgtggggtgccactccattgcacagagagacctcaaagcagtaatgatagagaatgaaatgacaaagccagttcagccaatcaggtcccagtccaatgtaaccccacccccaacacacacctcttgctacagcacacct

SEQ ID NO: 20495 - DNA, 3347 bp, Mus musculus
aaaggctaactccatctgcccctacctacccctacatggcttgagggtccttgtctggagtgggcaactgggcccagactctggaaagccaggcccagggcctgtgctgatccccagggagtgcatgcctggcgttccaggtgcacatggaggagagagactggagggagcccttcacctggcccacccctcactgcactggctgcttcagagggtcgggaggacaggctcctagcctgcctaggagaccccatcctccgcagatgcctaggggcccccaaagagcaaagtaggtctcagcatgagagatggagggttggttggacctaccacataaaccaatcagcacttgaatggggaaggtggaagaagggtggacccccaggcctatccctgtgtggaaatttcttacggagaaagggctgggcccacctgaccttccgtttcttcccagcagaagggatccatccctttgactgtttcttatcatcccttcccactgagggtcacaagctgagcttggaaaagcctacagatgtggggggctgaggaagggcaggacagcacttcttggggccccatgatggggctggctggggacgtcccgtgctgacctgggtgccctgcccctttttgcactattggcttgaggagtgccgagggtggggagagggggctgcctgactccacagattgtgagtgtgtgagtgtgtgtgtgagtgagagaaaaagagagagatggttagtctgtttaacctgtctgtctatctgtcatttcttcctctggacctggggcagccaagggcaaggacaggagcagtggccagtactggggcagtggccagtaccggggcagtggccagtaccagggcaggagctcctagctcttgcatcctctaccccctcaccaactctgctccttttccagggcatgaatggttaacttataaaaaacataaaacaaacaacagaccagtacctccagtattggagaattcctaggggctgggggctctgaatcagggtaataccctaccttccctcccctctaccccacctcagggcccctcagggcctcctcccccactgttagtttgatcagtcctggcacaagagagtaggggaggggtaaagtgccacttctttttagcaaaagtctccctctccgaagtagctagcctgcctcttgaatcctttcaccagctagtagagccacttaagctaacaaccaccccttaccccaccagctattttccagggtgtagtaataagtggcagagactttctgcccagggcggtaatgaaaaacgttgagtgggacacggagcaccgccaaggaggccttgtgtcccttttggttgcactggctgggactgagggtcagttccagtttcccttgctcatgtctgtgggtctctgcatgtgtgcattttggtgtgtttacgtttgagttttgttgttgggggttttttttgttgttgttgtttttttttttttttgcttgtttgttttggtttttttttttttttaataaagaaaaggtgtatatttttggcaaggacagaaacgtagtacagatatatttttgcctgtgctgctcaactgttgtccctcactcccaccccccatgatctgggaaatactattcctgttgataagacaggaataagataggataagataggatgggccgggacccttcagaggcaaccctttgacacttggaaggactttgggggacagttgagatgacctcagaaatacttttctaactgctattactagaaagacatcttcatctcttccgctcttgtagacctccttgtctacgagccagtgattcttcagattcgtctacgacctttttatccaggcccacacccttgccccacgcagagccaagtaccctgcattgtggcgcaggggtgctcggggctctggaactctgttctcagcagttccctgggctcctttccctgttctgggccaggcaggatgccctaacagagtcaggtcaggcttgcagaggcctctgggctggatggtttggtgttggctcctcttttttgggggtggggtggggtggggaggcgtttttcgagacagggttttctctgtgtagccctggctgacttagaactggctgtgtagaccaggctggcctcagactcagatctgcctgcctctgcctccagagtgctgggattagaggcgagctggtggtgctattccatatcctgagacatgaggagaggtgtggcctggtgccgcagcacagggagaattagggtccttgggagggaccagggttctgcaaaatggctctgatgacctcaccttttttttttttaaagacaaggtcccaagtgctggggttaaaggcgtgcgctaccacgcccggcacaaggtctactcttaatgtagctttggtcgtcctggaacttgctatgtagaccaggctggcctcagcctcctgagtgctgggattaaaggtgtgtgccactatgtctggctttggtccattttttttgataaagagcttggtagaaggagagaaaggatgcagatttggggccatctctatctgggagggggaggatgtggtttgcagagcggaagtggagtctcagaatgcatgagtggatcttaatgtcaccaccctaagtgagaagaggtgagcgggtgacagatgctgagcctgtgcccaccagggcaggggtggctgggtcatggctgatggatgctgatcagggggtcattggagctggctttacaggctactgctctaaacctaggagtgacgtgacctcagcaacagcagtgacaagcctttgtacctggccttctggtcataactgcctgactgtcaagccttttagctgcagctggttggctggctgtccctgtgtgtgtggtgagtgtggtggtgtgagtgtagtagggttgtgcccgtggcgggaaggtatctatgtagcactgactgtcttagctctgagctgacgaatcctccacagacaatgacactttaagggttgcctttaagagaagaaataaattgtatgtcccatccccctctccctcatcccccagcttgtgggtgtccctctcaagctcctgggtctactgctggtgatcccttcccttccttgtgtgaagacccagggagttcccaccctagactcctaggaagggcctagacaaatgagagcccaaagaggctaccagttccatttcctcttcccaccctggaaatgctgacctgttttcagagacacaggcccgccctgctagtctcagtcatcccaagagtgcagagggccaaagggagtaacagactgctggtgcct

SEQ ID NO: 20496 - DNA, 1195 bp, Mus musculus
ctgccgctgggaccaccacagctaccaatgggggcacttcgaactgcctgcaaacgccatcctccaccagcagggggcgcaagatgactgttaatggcgctccttgccccccttgaggaaagggaccctctccttccgcagccatcttttccctcctttttactttttctgggcccccttttccacttttgactttccctggttcctcccattttcagagtgggaggtgggttttataaataaatctatatatatataaatatatatatgtacataggaaaaaccaaatatacatacttattttctatggaccaaccagattaatttaaatgccacaggaaactcgtgtgtgtgtgtgtgtgtgtgtgtatgtgtgtgtatgggtgggggtgtctaggtctagggggtctttgtagttcactctgctcttcttggggggtgtatctggtggtcttaaggggccattggaagtattaatgtccttccctatgtcccttctgctttccagggcagagggcgtgttgggtcccctagccctagctgactagtgggtccatcttggctgttccccatacctgtccaaacccccacccccacccccccgttgttgaatgttcagagttgctgagacagtcagtgcctttcacaaatgcagtctgtgtcctctggcagtgaggaccaagtggctgtgaagaaggcatttccctcacctcctcagacagtggaagccccccccccaaccctccatccctaccctcctgtgggagacctggccctataaagtctatatgtgactttggcatggtgaacacttcattttctcctgtcctaccccaacccaagaacgcaatctagcaagactggaggtgacactcactgggggcctagagtagagggtggccccagacaagcacagactccagttctgccaaaagccaacagccctccagtccactgcctcaccccccagctgaggccaggcagggataggacagaggcatctagaagcacaagaaaataaaagaatgagctgaccccaactctacctggtggaccacctattaggggcagaccttgctctcgcctgctcttcctcaagtgtacatagatttggggggagggtgggggggaaagaggacagggtgttggcttagtgtgtgaggttctgagcccatgggtctgtttgcaccacgtc

SEQ ID NO: 20497 - DNA, 1169 bp, Mus musculus
acatcccttgctgccctggaaagtagaccctggatcactgagatattgccaagaaaggactctgtgtgtgtgtgtgtgtgtgtgtgtgtgtggtgtggtgatgatggggagtcctggagccagaagctcactcctgggacagcatcagaaacctcactttttctgctatctctggctgaagtttgacacctgtggattcaggggtcactcatttgcactgtcagattggttacaagagatccaggactggtgaggtatcttaccccgctggctcaggggagcctaggacgtggtgcaccttctgtgttgggccggacaccaccctggctcatagagatagaggggcccatcctcccctaaggctaggcaaggtacaacagcccagatgtgtggatgcgtattgccatgttgggcctgtgcgctatcctgagctactgtgagctatcaagagctactgggtcatggtgggaagagagagctgagtgttagcctgggcaagaaggggctctgactgtcttctctttgtccacactccaagtctgcaaaacctgcatcgtacgctacttggagaccaacaaatactgccccatgtgtgacgtccaggtccataaaactcgaccactgctgagcatcaggtgggcttcagaccccataccctgcctcctcgtggctaaggaatgccaggccaggagcctgcatgcctgaatgctgggtctgaagaaggaaggggtacagagctgatccccggctagcgagatgaaggacccgtggttgctaatgctcctgtataatctttcccagatcagacaaaaccctccaggacattgtctacaagttggtgcctgggctttttaaaggtatcatgagcccctgtgttgtccctgctccccccacccccacttcccagctgtcgcccactcattcctgcctcctttctttagatgaaatgaaacggcgacgggacttctatgcagcataccccctgacagagggtgagtgtgtgttcactctgaacccacaagcacattctggttcctgaagcaacgtgactgcccagggctgccccagctttggcccacactgtccctccaacttccaacagatctcccagctacagtactgtccagtggggactgggctcaatctctgagctgccctacttccctagg

SEQ ID NO: 20498 - DNA, 1160 bp, Mus musculus
ggctttctggtggccgagggagggcgccctaactcctggggtcgggatcttgggcacctcccccagaggtccctttcgtcccggtgcgaggcgccccgccccctccctgaaccacctcggctgagcttttccctacctccctcccggggccccaccaaactttggctctagggagggaaggagtggccactcggtcactgggggtgcctgatcctttgacctaggcttcgcggggaagcaagggtggaggggaaagaacgggagtgaggagagatttagcatgctctgtcttttcatgagtggccaaggggtctgatgagctggcccttctgccacaggaggcgaaaagggaagcggctactcttttctccttgagctctgccgctgctagctctgaaacccggggaaccctgagcctgcagacgccccgcgcccttcctgactcccaggggcgtctaggcaagccccctactcttccatccctcacttcccgggtctatccaaaattgctgtggttgcttgatcgagaagggtgtgtgtatgtgtaaatttaaatatgtttaagtatgtacaggtgttacctagagctgtccctgcgtctttgtctctcgtagcccccggccgagctcccgccatcccccatgttgcctcagtctcttttggtcttcctctcgctgagggaggggcttctcttagctggctctcacagtcttgggcctccctctctggacttcttgcagttgtgctgttcccgaaactcatgacaaccccacccccacccccaacatacacacatccctgctccaaggtgttattactgtaatcggaggagcataaagccagctctgttgtagcattttggtggagaggttttcccaggggttcccctggtttgaggttggggcttgcacacttagaactgtgtttggaataaggcaggaaacagcctccaggatccagtccggctgtcgcgtcgcctgatcctgttcaagttgaaggcttgggaggtgagcaggggagggggaaaggaactccctgagtggttgatggagctgttgccatgggaatggagagaggctgaagtggaagaggttacatgttatacaggtcagatgcctactgtagcgcccccctacccccaccccggaccctatagcgga

SEQ ID NO: 20499 - DNA, 2140 bp, Mus musculus
agtctggtgagagtgtctgtagtgggagaatacgtgtggcgaaatgaggctggcgaaggggagggaaccttgaaaaccataccatgtttaaatgcttgccttccgtggatggaacctgagggaccccggctgcagctggtgtggcgagctggtcctgactgaggggtggttgggggcagccagagtcaaggtgcgaagtcagagtggagaattcaggagaaggcaggtttgaggggagggcttgtaaggttgggtgggcgtgtgggatggtctccggctgctgagaagtagggcagaacccagtggagtcttcactttacagagggagtggaggctctaacaggatataatgacacttacccaatgtcacactttcaggtttgaagtgttttctgtgtcctgtttcttcccaagtaaggagctgagaggttcctatagccaaggaaccgtctctcactgcagacggcagggcttagagcagggcagccagagtccaggacataagagggtggaggagccagaatgtgtcccggatctgatcgcttgactctgttggcaggatccagaacacctgtttgaaaccatttctcaggccatgctgaacgcggtggaccgggatgccgtgtcgggcatgggcgtcatcgtccacgtcatgtgagtatgggttgggagaactcaataaatactggacagatgcagtgtccccttccccacagcaccgctgaccctcctcgggtgtgagatcagagaagtgcccccgaagcagagcctggtgactgactgcagccaggtggcaggacacttgtattctcagcactggggaggctgaggctagggggttttgaattcaagattagtttgaggaagaaggaaggagagagcagacaataggcctgctttactaaggtaggcctcgggtgacactctgtgactgagtctcctgacggtggacatttctttccttccctaacagtgtccccaaagtttcaggggtgatgatgggcagcaacttcccgcagatagagtggcttagggctccccagcgtccctgcaccctccagtctgcagcccagaactctgtgtgtgtgtgtgtgtgtgtgtgtgtgtgtgtgtgtgtgtgtgtgtgtatgtgtgtctcacattccagtctctagccagacctgagctacctactgccctctccctgtttgaggctgtcatttcctcgtgggtcctgcttactgaccatgaaaagcagaattgagccatccaagggttttgtgtcttctgtagtgagaccaggtgcttattacacttgctctgtaggcctggggtctccgctctttggagggtgtctcagtcttccccaactatctgcagcaaagctccctgcccccgtctgtcctgctctcagaacaggctgtcaggtaacagactcttggtcgccagcagcctttcccttcacagctgaggctcagaggagaggcagacaggagagacagtagacgtgactctgtgacttttctctcttgacagtgagaaagacaagatcaccaccaggacgctgaaggcccggatggactaacctgtgctctggtcccatctcccttttgtttttctttttaataaaattgcctttctttcatgcctgcctgcctgcctttgtttctgcagctttgtccccatcagggagagtccagtacagagcgagcaactttatctcagttgtctttggtcccatcctacccccactccacccccttttgtggtgcagggaattgaacctgggccctccgacacactgagcacacattctctactgagctacatctcaaccctgtgtttccttttggacttgcccttgctgcgttggcacacctggggccccctactaggcaccagtggatgccctcgctacgctgggctgtgctgtgcagagcaggctgggctgctgtgcagagcgtgccttacctaacgtagaactcagtcattgtgagccaaggcagttaagagcagccttagatgaaaagcacccatacacgtgtctaaatccgcttgctaagtggtggtgtgcaaggagataagcccatgttccaattgtccccaaacctgggtccctctcattcagctcagctggcagtctcccagtcttccagtgcct

SEQ ID NO: 20500 - DNA, 2165 bp, Mus musculus
ggttaacggtgggatttggggggggggttatttcgtttcgttgtatattgtttacaattttgagaggtagctttctgtttcaagctctctgttttcctgacagtattgttgagtgggtcaaaatattcaagctgtggtttggtggattttaggtttgttgtttttttgttttgttttgttttgttttttaggtcattctctgcgccatcttcaaaaccctgaggtttgactttctgattccttggcattcattcgtgtgtttaaaagctatttatcttcatttcagacaagttttctttctctttgtgacaaagatgtgctatttggcttcaatctccacataaccccctccccccatttatctgctcccctcttcctgagtcccaccagtcacgctctgggcagcaggtgccaaggggaagacaagacccttagcttgactcctcagggccgtgaagaacagccagactgtcttatggcatccagaatcatgttgggtcttccagaaatagacatttaagaatagagtcctggacaactgggtgaggtctggatgcggggaaagggggggattccattcccaggcccttaccctcccgattactgtgtggcagccagtccccattccttctgtggaaactgtggaactgagaaaatatgtctcgcatccagctgacacaagggatactatgaacactctgacaccaagcagtggcctcaggccgtgttcccagtctgcagggcagcgccaggagtgcggttcagttccgctgcagtgctaaatccttatctagctcaggggttactggtctgtggctggcgccatgagtggcccccaggctgttctcagtggcactatagtcccccaccccacccccaggcagctgtccccctccttacccccctccccccaaaatcacttttctcagtcctgggctttaggcctgaacaggtcccctagcagtgctcaagggaggagagactggactcctgtcgagacttccccccttcaccatgtgccaggcctccctggggaggtggaccaaagacccaggactttctcagtagccagtcccccaccccaccccaccccaaccccagttgtctttttaacaattcaggttgagagggaaaaaccattagctgtttctagtgcttgaccgactcaagtatttcgggcagaaaggacagtgcaccgagacagccctcagagctctggccttgtggtttcccaagtttagagacctcaccagcagtaatggccggtggggtgggggtagggggtctcaaagggaaacacatttagacagctagccaaaatctgccagccgtggtcccagtcctctgaagtgtgccacttaggatgagtgtcaccaaggggaagtgagacgtagctgtccttcaggttgagtcaccaggaaagaggctgaggacacccgaagagcctgtcccttgcccacagccatttttcaaggtgggagcccatacatttagggggaccatctgcttagcacatctcagcggctggtcagaacattgcacacacgaaatgtgaatgaaatctagagtcatctttgggcccgcaggattaaagttctacccaccacatgtgacttgtccatttccggctgcaagctccatttttttaaaaataggaattttcacccctgtgcttgtctaatgtctgctctgaacagttcgagcctctgttactgttttaaaatgcatgcatgttaaaaaagaatctccaaatgggaggacaaaataaaactcgaaaagctttgtgtacatctggtatgtgagtcctttgagatgcaacccaccctccttcagaattagaatgtttttgtcccagttttagaggcaaaaatcagtatatggtttggagcagcagtgtggcagcagtccgttctgaggtgcaattgttgagcaatactgacctcacagcactgggcagcctgcccacaagataatattaccatgtgccacggccccctcctcccttcagctgtgcatagacagtgcctaggagccatgtatcccaactgcctgtgtagctttgaatacagcatccttgtgagccttcagctatccatctatatacttgtactttaaaggctagtacttgggctggacggtgtatctcagtggtacagcacttagca

SEQ ID NO: 20501 - DNA, 1634 bp, Mus musculus
gctcacaggatgcagccttacttcccgagcaccctcgatccgcctcttttgcccctggttaaaacagggtttcctcttcggtatctccgtaacctatgatacccgggagctggagttgactttgtgggtttctttgggtttgtttcttcaattcactgctccaggattgctctttctaatgctgtatgtcatcaccctcggggccctccctcttcctgtcaggctctcagttcccttcagttcaggccagcacaagggacgagaagagcagttgctcagacacctcagtcagccacggtttgttctcacctagatggactcttttatttcctggagtattgtgcatcacccctccccccctcatgcttccaccttggagccaagtgaaaccttggctccctcaccccatcctcacagaagaacatggcaggttgaccctgacgccttggaccggagtcagaggcctcagaggggaacaggttcgtcttcatgagacggtgaatgaccaggaagcagccctcagacagccggttctcaaagaacccagagatcaccaccccggccacctgcgcctctgagtggaattctgatgtctgtcaaggccgccacccaccggctccagaggaactatcaagcatcgtggcatttattggggcccctgtgtttcgatgactgtttccctttgggaaaatcccagaaactaagatgtgtaaaccgggcccgtatgcaccctccatatcctaactactgacctctgggtgcagtcgcctgtaactggcaaatggtcaatgcagagctcatcgcagagctgccactccaagcctggcccgccgtgcaggtgtgtctggctcctgtgcctgtgacttctcacctggacagctttagccagcaaggtgctccacctgaggttgcctgagtcacctgaggaggtgaccccaggaaagcctgtttgtttggaggcctgacacggggctttgcccatcccccagccccagggctgacggattttccttgtcaccctcactctttctggacttgggatctgcccccggtcctccttggaaagagtgacagcccgcagcctccttcaggattctggcccagggcctcagaagggagctacacaagtcattctgatgccaccagagcaagtggttgccaggaagaaaaacaaaacggtctcgccggcctgcccttggaggaggtaaactccctacctcttcccagctccctcaggaggaatccggaatttaggatgagatggatttttgtagataaccccaaagatgtgaagctggtttgtgaagctgtcgtgggtgaatagatgattcccaacgcctgccccccaaactggcccagctcagcttggggagctggggagtggccactgtgccgtgtcctccctatccctgcactgaactaagacaggaaaagcaagatggcagtcttgggcttctctggggctgccaattgggtgaggcaggtgggggcccactccttcccaggaagagaaccaggtaaggttctggtgggcagaaccacgggggacttggggaaggactcagaaaccatgtgattcgaggagaaaggattttaatgtaggagaggggttacgtaggaataatgtctggact

SEQ ID NO: 20502 - DNA, 1178 bp, Mus musculus
actgttgccagagaagccagtgacaaggaaaaggtatgtgaaaaggtcgcttgcccggtgacaccttctgttggccatctgtcatgtcccctctgtgacccccagcccagctcccaggcatatcaacatagaaggttctgcgtcattaagtcctgcctgcccttggcacactcagcactggcttctgccttcgctgggttctttgtggttctgttgggatggagaaggtgtccgtgtccagcctgagccagtcagtagttccctaagctcggccaaggctcagcaggaggggttactcagtgtccagtacacgtcacgattgctgtcattacctgtctcacactcgcctctctgacgctgtgcatctgtgttaaggatcactcccctctctgcacactgctcccagcagacggccaggtcatgcttcctggttgagtgagttaacctgagcgagttagcccaagtgagttaacttgactatgctgttgccctcccaggctaaggacttgccaactttcaaagataatgacttcctcaacgaagggcagaagctgcacgtgggagaagagagcaaaaagaacttcctggaaaaactgaagcgggacgttgaggtatcctctaacctctgtcttcaccctgtttgccgaccaggagccttgttagccttcagagagtggaactcactgttcctagctgagagagtggtgtcggtgtgagccttgcctaaaacctgtatggttgggcaacactgtcttagttttacttttctgtggctgtgataaaacaccacgaccaactgggcgtggtggtgctcgcctttaatcccagcactcgggagtcagaggcaggtgtatttctgagttcgaggccagcctggtctacagagtgagttccaggacagccagggctacacagagaaaccctgtctcgaaaaaacaaaaacaaaaacaaaaacaaaaacaccacgaccaaggcaatggagaaaagaaagcctgtaattgggcttctggttccagagggctagagagtcctgtaatggcggaaagaaggcatggcggcaggcggagagctcacagctgcctgcaggcaggaggcagagcatatgatgagagtggcccactgagccatctcaccagcccgagagtggcccagtcttttgaaacctcaaagcctacctc

SEQ ID NO: 20503 - DNA, 1180 bp, Mus musculus
tgcacctatcaacagtgacagccagggcaggtgtggcactcgcttcctcaccacctatgaccggcgtttcgtcatcaagactgtgtcaagtgaggatgtggccgagatgcacaacatcctaaagaaataccaccaggtatggggaggcccacgcccgggctgtgtaatgcctgcagctatgaggagtcacaggcctgggctgtggagaatgggttgggagagggaaagagagagctgcagcagcagggattggcggggaggccaggtctactctggtagtggcaggcatttccttgtacattggtcccttttctcattgctgtggcaaaacacctgacagaaacagctcagagaattaaaaaattgggggcctatgcgacatctcagtgggcaagggtgtttgccgctgatctgttagatacttttctagtgctgtggaaaatcaccatgactgagacaccttttagaagaatttatttgggcttgcagttccaaggggttagcatccatgatagtggagtagagttgcaggccgaaagaaagcttacatcttgaactgaaagcaggaagccaagagagcaaactgggactggtgtgtagctttgaaacctcaaagcccccctgcagtgacatacttcttccagcaaggccccatctcctaaagctacccactcaatgctaccagctgaggaccaagtgtccaaacagctgagcccgcgaaggccgttctcatccagtctacccaccatacctgatgacttgaattcagtccacagggttgaaggagagaactggttcctgcaaggtgtcttttgacttccacaagcatgtagtaccacgtaaaattaaccaatcaagtgtaattaaaaaataaaaggggggaaggatcgatctgctttggcttgtggttttgaagatctcagtcccacttgaggagagtgtcacggtgctgggagcgcgtagtgagggagaggcaggctaggagcagagaaaggatgtgtaggaagtggctagaggacacagctcccgggaacatgctccagatactgcttcctctagctgcctccaccttctacctttcccacttgccaataatggcctcataccatggttcatcagaagatcaaatcatctcttaggaccgccctcatgtcctcatggctgtggaatatctatccta

SEQ ID NO: 20504 - DNA, 1216 bp, Mus musculus
ctgggataaacaaacattgactttatttagtagattatgtgacaggatagccaagcatcaggaagagccaagaattgaagaagctggaagagaaaacagaaccaaaagccctaagtgaactgctacccacccgggctttacgctgtaatggtgtgatgtgtatatacaaatgtatagttctatatttgctttaaaaaagttagccttgggagaacattttgttggatgaccttgtcagaaaagtaacacagtagttactggtaacagagggatactgaccttctttgtcatttggacatgactttgtcctctacaaatgtgttaggctacatttataggtatgtactggcttcaggaaggacacacctgccaagggacatacatatcctcctctgttcctcggcatcctacagtgggcacccagtggggcaggaatcaggacccatgttgtccgatgactcctgaaagaaaatacttgggaagctttttgctttctggctaatttttatttgtttgtttgttgaggcagggtctcttgtagctcaggctagctttgattggaccggggagctgacggtgaccctgcactttagctcctctgaccacacacagttgctgctcctgccactgctgctttgtggtttgtctgtgatacagggcccttgctggtccagggcagcctgatggtggctctcctgcctcagcctcctgagtgctggctgcggttaggccatccccatcctccagctgcctttatcctgtaataactaaaaatctaagacaagactcaaggggccacacccatgtctttactgccattcctttctctattctttcaccagaagccctcatttgtttgaccagggaacttctaggtgctttttaaacagacgacagattcaccctagcggtagctgaccttaaactgtagatctcctgttttagtctctggagctgtgattacagaccatctggccctcagaggtgctcttaattcatatattaagccatttcgttgttctaccagttcctaatttctcctaaaatatgtttggatttaagcactaaaattccagtcactgtaattattgttgttgttactttttgagacagggtttctcagtatagatagccctggctgtcctggaactcactctgtagaccaggctggccttgaactcagaaatctgcctgcctctgcctcccaagtgctggg

SEQ ID NO: 20505 - DNA, 1145 bp, Mus musculus
tcaaaccccaaatggacaggtaaatcatccacaaaaggtaggtagggtccctaccaactgccaagggttcagcagggccagcctgccgttctgagtcctgaatatcgtttttccccctcttctgtcttttcttttagatgctaaccaggcctaagtgtgctttctttagctctttggcctgcccaagctttttctaaagatcccctccccaccttgtggatgtgtatagccacgaagctcacttccaggccagcttatcccaaacagtatggcttctgtcccttttgtttctccattctccccctccaggagatttatatagttcatctgccttgattttaaacccttaacaattgtcctcaaacttaaaaaaaaaaaaaaaaaagatcatggagacaggaaacttgcaatctcaacgcttaggaggctgaagcaggagtagaccagtctggactatgacatgagaccctgtctgtactctctaaacagctgtgtaggggccggcatgatggctcagcgggtaagagtactgactgctcttccgaaggtcctgagttcaaatcccagtaaccatctgtaatgagatctgatgcccactttttttttttggtttttcgagacagagtttctctgtatatccctggctgtcctggaactcactttgtagaccaggctggcctcgaactcagtaatccgcctgcctctgcctctgcctcccaagtgctgggattaaaggcgtgcgccaccacgcccagcctgatgccctcttctggtgcatctgaggtcagctacagtgtacctatgtataataataaataaatatttgggctggagcaagcagggactgagcgagtggggccagttggagccagcagaggtcctaaaatattcaatccccaacagccacatgaaggctcacaaccatctgtacagctacagtgtagccatactcccatacatacataaataaatcttttaaaaaagctgtttttattgtatgtattttgcctccacatgtgtgcagtactctcaaaggccagaagagggtgtcagacactctgaaatataggagttttgaagtaattacagacactggtgagcagcagtgtatgatgggaatcaaacctgccctctgagaattctct

SEQ ID NO: 20506 - DNA, 1421 bp, Mus musculus
aagagggcatcagatttctttaaggatggttgtgggatttgaactcactcgggaccttcagaagaacagttggcgctcttaaccactgagccatctcgccagccctggatgtttacattcttatccttgccagtagctgatggaaattttatggtgttgacattctgtggagaggtttttctacttagtgactgctgccctttcttttttgtccttagtacatccagcagtggtaattcgacaacgaaagtcatatcgaagaaaagatggggtgtttctttactttgaagataacgcaggggtcatagtaaacaataaaggagagatgaaaggtacgtggaggtttaagccaccattgtatgtttctgctgggtgactctagaagagtcacaggacaaggaccctgtctgacctgtcttctcttccaaacaggctctgctatcacaggtccagtggcaaaggagtgtgcagacttgtggcccagaattgcatccaacgcaggcagcattgcatgattctccagtgtatttgtaaaatatattcattaaagtctctgctctgagagctggtcttcttgacaccttttccaatatcagctttgcagaaggaaacttaaatttcagttcagggcatgaccttcatgaccttgcagaacttcttcactttccaggttaagtaaaggcgatctttaggggctgtccagatggatcagctataaagattcaattgtagaaggttcacgtctcaatgcccacgtggtagctgtaacttcaattaaaaaacaaaaacagccgggcgtggtggtgcacgcctttaatcccagcacttgggaggcagaggcaggcggatttctgaggccagcctgatctacagagtgagttccaggacagccaggaatacacagagaaacccttgtctccaaaaaccaaaaaaaacaaaacacgcattcttttcaggtctttgctgggaccaggtacacataacacagataaatattagagcaaaccatgcacatatggtaaattatctttgggttttgggtccctaaaataaagtggtgtgttcattgtgtttctgtgagtgcttgagaacgaccttgaaggttgaagcctggatggccacttgagtgttgtgtacaggagccctgtgcttgagtgcagatgtttaggtcatctggtcattagccagaggtcacctttccatggctgtggttgattaaggtacttaacacttgtggacttttttcagaatgaaaaaatagggctggagagatggctcagctgttaagagcactggctgatctgccagaggtcctgagttaattcccagcagccacgtggctcataaccatctgtaatgggatctgctgccctcttctggcctgtagttatgcaggcagagtactgtatacatataaatct

SEQ ID NO: 20507 - DNA, 1188 bp, Mus musculus
tgtagtagactatgtagtcttaccagaaaagatcttcagttggttgtctgtccctagctgtcagtgcagatgacaatgtgaaatgggtgtatttttgtgggttgttgtccgaacacctggaagcagacacattgtccagaggccttgtgatagacactgtactgggagctgactattggtgtattaactaccctgaaatgtgttctcatcaggtagatgaacagacctcagaacctcctctgccttgagtgttccagctgtagaactttcttggcaggatctcactgtaagcttggctgtccttgagctcagacctacccacctcagcttcctagtgctatcaggcactgttctttttccagagatattctcgaagtcctttggtgtagtgcaagtgaggcctgtggggttgcttcctagcaacactttgtttccataggagccaccttgctctcagcatttagttcaaagtctttcactttaatacttgaggggacggtgacattgtagccaaacttaccctagtgtggttacactgaaatgagtctaccagggcttatcctcttctcagaacacttctagggcctggttggtggctcaggaagctgtcagtgaagagcagagcatgtccccttacccctgtggtatgatgacagctccacacactgttgtctccaatagtggggagagggatattcttagtgtgtgtcaggtaacaggcttggtcagtgtttttggtttttttgtttgtttttctagacaggatttctctgtgtagccctggctgacctggaactcacactgtagaccaggctggccctgaattcagaaatgcacctgcctctgcctcccaagtgctgggattaaaggctgtagtctgattcttaactacctttaaacaggccaggtggtactagacttaactccagttgttctggagacctaggtggggagattgtaagttcaaggcttgcctgagtaactaggttttagattgatatatatatatatatatatatatatatatatatatatattttttttttaagatttatttgcttgagcccggtgatggcggcgcacgcctttaatcccagcacttgggaggcagaggcaggcggatttctgagtttgaggccagcctggtctacaaagtgagttccaggtcagccagggatacgcagagaa

SEQ ID NO: 20508 - DNA, 3055 bp, Mus musculus
tagagaggaacctggggcctgggagtgacttggtagagccctcgcccagcacaggagaaggtctcggtgtgggcgagcctacatccgatgtctacatctgatgcccaggctaactattggctgtgctccacagaaacggtaccgtgcagtgtatgactacagcgctgccgacgaggacgaggtctccttccaggatggggacaccatcgtcaatgtgcagcagatcgatgacggctggatgtacgggaccgtagagcgcaccggtgacacggggatgctgccagccaactacgtggaggccatctgaaccctgtgccgccccgccctgtcttcaatgcattccatggcatcacatctgtcctggggcctgacccgtccacccttcagtgtctctgtcttttaagatcttcaactgcttctttatccccgcccctccagcttattttaccatcccaagccttgttctgcccctgtcatgggctccttcctctggcaggttttcccttggaccaatcaactgattgatttttctctctggatggaacaggctgggcactctggggagggcaggattgttctgagctaggtagactcccagggctgggctgaactaggagacccactaaggagatcagtttagactgggtgcagtggcaaacacccttaatcccagcgaagggaggcagaggcaggcagatctgtgactttgaagccagcctggtctacatcgtgcgtttcaggacagccagagctatgtagtgaggccctgtctcggaggaagagtgggggttggttagctctcagcttcacttcctgccttaggctcctcagaacccctgacccagctcccccgactcccttcctcctagagctggggtgagctgtgtcctcctcatacctccaggtgtggctccacacatccccagggggtcggtattaaggcctcgtgctgacctttgccctagtccatcttcctgactctctgcctcctcgggacatccaaaggagagcagagttcctgcttcagactgaatccttgcccctctgtgcagtcctccacataacagagtgtgcccattctgcccccacacacacctagggtggccagggagcgccccagaaatcccagcttgggtcagattcttgccttagttctaggggcagcagcagaaaggaaggaacagggcgctctccctccctgggcctgtttgctccctgcctcctctggccctcccggggctctctttatctccctggctgggagcctgcagtgaagggtagagcaaagggtgcctttggggcctgactgagctgtttgttcctgcttccctgggaaaaggtctccgcgtctctcctgtggccttccttccccagaacaaggctggactggctgagagctctgccaagccagaaaatggccagagtcttctggagcccaggaggccctcccgcctcgctggggaggtgggagaaggcttctgggttagacatgtgcttttctgtcgtcgtgtctgaggctacagagcccagtaccagaagggccgagtcacccacactgtggttggtacctctcacctgaggctctcctatccttgaagcaaaggagagtccagggcttcaaagctggcggcaccatctctgggctggtgctaaactcaagttccctctttgcctctggggcctgggacagtactcactctgcttcattcatctctgggttttcttgtccctcctcctgggtcccctgattctcatctttaccttgagtgagcctgatgtcaggttcctttacatactcagaccctgctacaggtgaggtttgaacctgaagactttgatcaggccagcaacgtggttgtcatgagggcttgctagagtttgcctgcctggtcaatccctttacttccgaccctcgcctgagtgaaggcagggcgtggtctggtgggcagcatggggaagagccttgtgggggcatctcaggagccacggggtggggggaggtgccagcccattccatttcctcttatctcaaagcacaatgtggttctggggaccagagggagcttgctcttggagggcctgtgttcaggaggtgctgcgagcctcctggttcctctcagctgaacctcccttcccaacgtcaagtcagctgttctagtgccctagaaatgggggagacttacaaacacctgaagaggggagaggaactacctaaggtgctgagggccccaagcctgctggagtccatacttttccagaaacatctacccctagaagagcacagaatcccccaagcccatagtctcttcctctgtaaaggtcttttcagccaatccaaacccaggaaagaaggcaccttggctagactgtgaacttaacttttgtggaccaaccccataatgcaagaagccccatggtgagcgacataggttctcccccccgggctgcttcctgttctccctcctcacgtcccttcggggacattttatttcctaatagctggacataagacaaaaagtaccaccccacagagcctatatttaaacagaaacagaagtgaccctgtgaagtccgcctctgtccaacatttcatctgtgtatgaatgtgtgtgtgtgagagagagtatgtgtgcgtgtgtgtgtgtgtgagaagccacccactcatcttttatatatcgggttgtcatctttctttggtcccctccctcctggccttgtccttgggatcatttctttctggcctgttatgattttgaacattgacttgaaccacaaagtgaatctttatcctggtgagtcaaataaaaatgtaatttttacctgcggactaggcttcttcctctttgacttctgaagtaacttctgtgtgtgtcccgtttgtcagggggcattgaccttgtccctcaccgtgaaccctgctaccattcaaagagagcaggattgctctagaaaccagagttgctcactcttcctaccctgacacttgctttctccttgaggacatagcccggcccttcagtgacatcaccagtgacagctctgcccaccctggggt

SEQ ID NO: 20509 - DNA, 1099 bp, Mus musculus
gtctacagagtgagttccaggacagtcaagactacacagagaaaccctgccttgagagagagagagaaagaatgagaatgaatgagtagactgaaatgctagaactggctagactggagttaactagaatagtcacaaaaacacggtaagctttccaataaacagataatttttcctgtctttttccaaatcttctcaagttactgtgatcactggagacccaggctcccagaatgtcttttcctctgtgtgtggatctccttttactagaagggaaagccaatgacatcactgcactgctgttattgttatttctgtacacacaacataccatgttgccactcattttaggaactgaagtttatatcttgtgatgactatgttaactgtgaaatgatgcacttgtagcagcacactgttgtggtgatgccatctgtcctcttagtccctaagtggtggcgtgtgtgttccagtggcaaagttcagcactgttcatccggcaccagcttagaagttccttatcctgtgcgcctggtcgactctgtttgcactcctaggtctttgttaataacagtttattgctaggggaactgttcacctttggagaacagagcaagcaggaggtgcccagtagaaggtgtaatgacagaaccagttcatgtctgaaaagtaaacactaccctctgtgtgtggttagcttcaaggtcaacaacctcctgggaatagtactcagtcacgtgattgcagatttgtacttgcccttgacagcctcctttcgtactggaaactgcattagcaccccactagctgtgggcagtgttatctcaagcgcattgtgttgtgctaaacatctttgaaaactaatattgtatttgttcaactttaatatcttattcattctaataaaattaagttaaaattaagtttaatctggaaatatttcttttcttttttttttttttttttcgagacagggtttctctgtgaggccctggctgtcctggaactcactttgtagaccaggctggcctcgaactgagaaatccgtctgcctctgcctcctgagtgctgggattaaaggtgtgcgccaccattcccg

SEQ ID NO: 20510 - DNA, 1218 bp, Mus musculus
aactcctgaatttaaaatatgtagcccttcaccttcagccagtgtgctgtggtcaccgtcatgctcgccactgccctctgtggctatgccgcagccgcggctgcccgaggcctcctgcaccccgtctcggctctcagccccgccaccaccactgtctgttccatttgctgctattctcatgggtcacacgagacagatgaggagtttgatgcttgctgggtgacatacttcaacaaaccagacactgatgcctgggaattgcgtaaagggatgaatacacttgttggctatgatctggtttctgagccccaaatcagtgatgctgcgttgtgggcatggagatggttaaatgattttgctagtgctgttcgcatcttggaggttgttaaggacaaagcaggacttcataaggaaatctacccctatgtcatccaggaacttagaccaactttaaatgaactgggaatctccagtccagagtaactgggccttgacaaagtgtaaactcccttccatgggcttcccaaggacttaactgctgttgctacttgattgaaacagttgcctggaaatgtttttatttgaacaaattttcctttgagtatccaaccacgtaatagcaacttggactttaataaagggaaatgagttttaactgaaaaaaaaaaaagccttgtgggagtcggttcatttcactatgtgggtcctggggattgaactgagtaaaacaccacagccaaaagcaagggagggagggcagggtttgcgtcatctcacacttgcaggtaacagcccagcaataggaaagtcagggcaggagctcaaacagggcaggaacctgggggcaggaactccacttgttccccataacttgttgttcagcctgctttcttatagatctgggcaccggctgcccaaggttggcactgccacagtgagtgagaccctcccacatcagccattaatcaagacaatatcccatagacttacctactggccagtcttatcagttgagattggctcgttccagatacatccaggtctgtgtcaaattgacaagaaccaaggagcgcagctcttcccccactgagccatcttagcttctctttccctgacacattatgacactgagtgaggcctctgccagatgcagcctcaaatcttggccttccaggactatgagctaaataaacctcaggtttttgtttgtttgtttaa

SEQ ID NO: 20511 - DNA, 1214 bp, Mus musculus
gacggtggtaaggaactgggaattttcagggcagtggctctccgaatgtgactagcaccacgggacttgggctcgtgctagacatgaagattcttggcctcctctctgacccagtgaactatccctgggtggggctagaaatatgcgttctgagaagtacttcccgtgcatgctcaagttctagaggcttacggttagaaacttgtccacgccatttgcttctaatatttccaagttgttgcttttgcctgagccccaatacaagactttatggagaacgggcaccgagactgaccgcgcacgacgacaccagaattgaggctggaggtccatcttggaacactatagaggcccttcgcggcgcctgcgcgggcagtctcttaactcttcaagagatcagctaaacggcagccccgtggctcatcacgggtccactgggtggcggtaggaggccacatctggaagggacggtttcttcgataccccagaggctgtcctgggagaattcaggcaaggaattagaaagtcaatggctggctaggtttggtgggctcacctctgtaatcccttcaataaactgaagagtgatcgtgagttcgaaaccaacctggtcgacggcgttagtccttacctggaaaactaacaaaagtccctttggttgcggggcttgccttggctcatagtattacataatattatattgaggtcttggggagaccacctctaggtttttggacccagaggagagtgacactgggattcatttcctttcttggtccttcttttgacctcagtgccaggccactcacctacttaagcccacactctacttctgtccccagctgcagccttcttctggggataagtcccaggaagcagtctctgcaccctttctttccgcactctccaggtcccctacacagaggaagccaggggcccctcagtcctctccactctctaggccccagttcttctccttcccatgaagtaggtcacaggcaccttcgtgccttgacctgattccatgccgtctattaaatctcctaaattgcgggtatttttattccatacttgaagggggtggggtgggggggaagtgccctattcccagagtccggtaaagtgtggtggcagtgggcgccacttctggctctgggtctatcttggactgatctggcctttctgtggaaggggcaccgagctgtttcaaagtg

SEQ ID NO: 20512 - DNA, 1969 bp, Mus musculus
gtctcttctgtttccactcagatctgcgtaggcgtgagcagaagcaaggatagcgatggcttcatccgcgtcagcagtggcaagaagcggggtttggtgccagccgactccttggcagagatctgacagaaaccgagagaacccagatgctacccctgcccatgcctggctcttgcttctggcctgagaaggaagcgggcatcctggccacacccttcctctcccagtctctctcctaagcatcacccgcccccacttaggagccttctgcactgaggaaggtttatttcttggttggggtatcctgaatggggcttgggaaagggagtcaaaagtgggaagaaacgaggaagttacaggtaggaccacccggagcccaagcaccacctagtcgggttgccatagtgaggcccaccctagggagtcgtctgctgtcttccagagactacccgctcatactgccttgcatgcctgactcctctctgcccacagcctttgcttgggtctgtgtatccaccctctgcaagtggggccttgagagaggacctgttggtgtcccttagccctcccctctggcttgagaagacgctgaggactatgggagagccctaagttaaccacctgtcaccccttcaactctcaggaaagttcaggaatctttccaattacttgaaacctgggcgacagagcagggtcaggactgaggtctgcaagggattgtaacacgtaggagtctgttccttgaaggcagtcctcacagaacagtctcattctcctttgtctactagaaatcggtagccaagagcagcctggacaaagacccaggtggagaacaagacgctggcccttgcttggtcaaaacatttcactgttaggactccagaaatccctaccaccagaagcagacagctaggggagtctgaggttgtgaggtctggtttctctaaaagccctgtcctcagatggaccaaacttaccttcttaccgtttgggctctatagggcccatccctgggaaggataccttggcagattgaggaaggctatggaaagttcttttggccaccatcaaatgatgctctaggagcccttagccctcctggcaggacaaaggacctcttcctcaagaggctgcttcttctttttcctggtgccagcacctgcccctccttccaagctcagatcctccttttaagccctgatcctgtcagccaatgccacccccctcagttctgggcacagtcttgccttccatacaacgagaggacactgattctctacccaacacaccttgccccattttccccctaaaaggggtctaaagccacactgccctgtttgctgccatgagggccccccccagcaaaatccccggggcgggcccaatgcccactgtacatgaggctgcatgacgggtctgcgggggcgttgctgagcccccaggcccataattaaatgtttcttgtctcagcctgcctgcttggtgtatctgattgggatagagaaagcaagctagtatcaggctgggatggaggctaagagtactggaggtattgagctctgagaggggcatcagagtaggacgctagctttggggaccacagaaagaagcagagggacccgagaaaggcgggaaacaaagtcaggctagggaggtgagctgaggtcacttctgggttctacgtgcacttgaatcgcgcaggggactgacccacagtgaccttgttgacgcagacctgcacgcttcagccttggaggccgcctctctccgcagcccctaagcctgagattcagaggtggtggaggggacagtggaggacgctgaggccaggagatgactcagcagcgtccgtcatcagatgcctggcatggggggaggggaggaggagggaacggtggagggaggggtcgcgcacgcccctctggggctgccgcccacctgctccagccaagcggccgccttcccgcgc

SEQ ID NO: 20513 - DNA, 4666 bp, Mus musculus
gagtggggggctcagagtctaccaaggctggagagggagtggggggctcagagtctaccaagcctgagcacctgacaccagagcagagggaacaaggttagtacctatggctcagtcaagaaaaagcctcttcagagaaacacacagagaatgggagaaatgagatgagttttaaggcatatttctaaaccccgatggtagaagctttgtgtgtgttcattagagtattgggagaggggcttttgggacctgagtgtgcaagcctgtgaccctggcatgttaaaagggagggctgtttcatgccataggtgcaggttctgtcagaatatataggaagaaagtctgatggatttctcattactgtagaaaacaatcagatggaaggccctcgaacgctatactcccacatttatttattgtattaaacttattgaaaatcttattttattatgctcttttgaaagctaaattacttgtgtttttattccttttcccctttatgttcaaattaccttgagagaaatctcctttttcctctgagaccgtcttgttacattgctcacctgactggtctcagtcacctggactccagttaccctccacttcagcggctgggactcgtggctagtactgcttccccagactgggtacctcctaccccccctcccccccacacacaccccatcgccccagacaaaggcttatactctgtagctctggctggcctggaatcttgtcttggcctccttactgctaggattataaagttaggcacactagctcacatacacacttgcaaatgtagataccctaggtctttcaaacaaaatcaaaagaaggtgagggactatcagctctaaactatatcgtttggggtttttttttttcccctaagtgcctaataagttgacagtaagacctgaacactgaacaggtagcagactctgattgccccagtctgagtcattcaggaactctttggtatgcattcaagtttgaatgagtttcctaactactagtgtgtcagaagtcttgaaaacgctgtctgcctgctcagagtgttgctacacgcaggtttgttggctttgtcttggtgacccctgctggtaaggcaaatcaccacctttctaggccaagaacacgagtcaaaaggagggatgaggggtctgctgatgcacagctctggccgcacatggtcaagcgggcgtcatattcctttcttaagtaacgcaggcccatcatgcatagaggagcatagagaagcactgacctctgaatccaagtgccagctcccacatgcggaatacttgtaagaattggatagggttttggttgggttgataggtttggggttgttttaggacggaccatgtgtggagcccggggccttctcaagcattaagcagacgctgagctgtaatcatcagttctagtaaggattagcgtgaaaagttcctttttgagaaagctgattgggggctgtgagtctgataccagcactcctgttggcagatgggtggtgggcggaggcaggaaaatccgccagaagcctgagggccctccatctccaacctggagcacataacactgacaagcaaaacagaccccgccgtaccaaggtgtggagggagaattgtcctgtgacctccatacaaggtgtggcatgtacgtgcctgcacttcacagtatggatataaaagagggagagtgaggtatagtggtttgtgcctatatctcgacacaggagatgcagaggctggagggctgctgcctgtacctgaccagattggagtacatagcaaggaggtggggggcggggggaagcctggtggtccatttgtctcattttacacccactcccaaacatgccttttacaatggggaaagaaaaaaaatgaggcctgagtgagatcagcctcagctacactgtgacactgcttaagcaagccaagcaaaaggaagaataaggtaccctcaaagatggtgccctaagcctccaggtggccaggagggattgctaatatggagaaagatcttgaatagacaacgtccattgtaggctccgctcccctgcgtcatctggaatatcctgcccccatttgctgctgccgctttattagacctgcaaatgtagccactgatctctccagttcttccagcacccgccctgccctgtgtctaaagcattgtggcatccagtctagcatccttggattcctttccctgctcacagcaagctgtcgtgggcagaactgagcacagcacaggggagtggcagtggcttgggatagttctcaggtgatggtccgtggggttgggggttggacttggagttgaatttgagatctaactggctctgaggagtaaagggacctaacatgacctctcccccagtgtttgaagtattaaaccgctctgctctgcttaatgttttagaaatgcggtgactggccctgccctcaccctgacagcctttctggaggtgaaagtatccctcagtttgtttttgtagatttccagtgagatttctgtgtctactaggtaggtagcaggcatgtaagtccgagatggtgttttaagcgtttcccagggaatgttgttgagtgacttaccatgctttgtttggggtgttctgtaccgtttggaatgtttgttgtagctgtgggccactgacgtccagtctggactatttgtagctgtgtagactatttgaagtctatttgatattttcagttgtcttctaaaatgtgtttgaaaacatgccttgacttggcattgttagggcgtaggagagttgtcactgaaaagaagagagagactccctgcctgtccgtgggcattgagacttggaaggcctcatagatcatgactgaccttggactgttgagatggctcggcaggtaagcactgtttgcaggccaagtctgacaacctgtttgtgatggtgaaggagcggtaatgccggctgggaattgttgtgacttccacggatgtaccatgggatccatgtgcgttaatagaaaggattatgtaaaatccaaggctgatggctctaaagtcaggcagctcatggagtcataagtgagagggtagacaaggaatgagccctgaaccttctctgagttgtacaggtgggtttctgtgctgtggtttctgctgacagaccagaggataagcccagccttcttgaagacttgaagacaaacaagtcttaagttagagggatgaggggaagtaggagtcacaaacctgctcacatttatttttgtcttaagtctgcatcagaagatgcagaaagcagtgttatctatcaatagggcatgattagccctgctgatttgagaataaaatctggctgtaaatacaatatccaaaagacctgactctacatcttcattctccagcaagaaaaaaaattaaatatatatatatgctatttaagcactggctgctgtaaccctgccttattctttttacctgctggaaaccacaggagacaggagacagagcttctggggtttcccattggagcctggttcacagtgttgtgcgctctgatttctctgcacatcgtttctgcatctctggaaaactctcagttatttagcatcctctcccttgaatgggagtttaagaaagttatttgagagggaaaagcttttgttacacaaaccatgcgtggaaggttcgaggagaacatcctcctgcaggtctttggtctctgccacaggagtgtttgatctaaggctttgtggagtcaagtttacaaagatgtcagtacttctcagccagagtggctcgtagaacaagaaccatgagcaggcagaaacctagtgtcgctttccactgtatggcatgggcaggcaaggctcgtgaggagatgctttgcctcaggaagcgcatctgtcctgtgctcataagacttcctttccatgggacacatttacttcgtttttttcatggtatcaactccatgccctttggtggcaagaagggcttccttacttctggggacagcattagtaccaagacaggagtgtggacagtggacaacagtcctcccccttggaaggggtggtgatagacaggtgtcctctgccaggtcccaggagatctttgaagttacatccttttgctccgtttgtcgtgttatctccaatctgccctggtttgctgcttacatatgtttcttcctgtaccctaacattttcctctcagctccacaaaacattcaaccactcactgtttatagccctggagaccagggacctctaaatgactgcgtggcgtggctcattagttagacaggagtgccctggctctgcagcagtgagaagggccttgctgtctgtcgccatctgggtgtccataggaaggcttgctccttgtaaggatcttttcttacatatttctgacgactgttaatctctaacaagtgctgagcccgattcctgtgacccatccctgccacactcctacctgacacactgacacctagatcctgttggcacgtcccaaaatctttaggccagccagctcttcctccctgctgtaaccccagaactgaccccaagaaccaggacaaccccgaggggaatctgggagaggctcgaggtcacttttccgttggttttatccactctggccacctctgttcttcctccca

SEQ ID NO: 20514 - DNA, 1839 bp, Mus musculus
cagataaaagatttatcttctttcattaaaaaggaagggtggctttggggggtatacatttgttttcagagtctataccctatcgtataaaaatcagtatagaattaatagttctcctacttccacaatgtgccaaaagtctacatcccagcattttgtttgcaggagagctgatgccattcctaagagctggactctttgtttctcttcatcacaagaagaaggagttcagacttaaatcactccactgtatgctccccgagataaacagttaaaaaaaaaaaaagcagccatagttcacttaaaacaatttcaagctcacttgaagtgattagggcctggaatgctaagtgagcatgaagataacccttgctaccgtgtagcacacagtcggacctttttggagaaacaggtctgagtctggattctgagggacatcaaaggaagacctcataaatagagaaatgcaggagaccgttttgagtgcaacagaagttctcagtatttggagggtcctctcaaaagtccgcggccttactttgatttcaccacctgcactgtgccattcctgatgattccgtttgggatctgtatcagcggggtgggggtggggcgtgatccccagcacaactcttctggattacaaaacaagcaaaagccaggtgattcatgtttgtgtgtgttataagtggagtgacttcatcagatacggacgatttctacatccaacactgcaggttgttggagttagcatagacttggaaaatctactgcggctttctttcctagttctcttttttttttttttttttttgttttttttgtttgttttttttgttttttgtttttttggtgttctcccttttctggtcattggttttcaacaactccgccatttctgtgtcccaaggcaataaataggaaacaaaatattggaaagtggagcaagaaaagttatctgttcccctatcagagcccggtgtcttgggtgacatgggcagggtgtattggagtgctttctcttgtggtgctgacatagtagccgtgcggtatctcagataaaaccaggttggatttctcagaaatttgccacctggttgtgaatcctatcttcttagtttctgcaggaaaattgttgttatatggggtttcattttgttgtgggtggggacaatctcatggggaaaatgtactgcatagtataaggggctcaggccccccgagcagagtcaagaaataccaaaatcagtaaactgggaagcttttctctctttctgtcttcatcccagatcaaagaatcccgagttaggatctggatgaaggataagcccctgaattgctgatgggcacaccccacacaatgacccagcatctgaacttgcttaacagggagccggggctaaactgcttcaccctgcctgggaaccagggagcactgcatttctccacagggtggaggagaagcggcaggataaaccaagcctgggacacctccctcccatccaggtgtgctcaccctcctgtttgaaagacggcaaggacatgaagtcaacgtgtacctatttgctgctgctgctgctgctggagtttatggttttttttttcttttttttgacctattcttctgtctttgggcttcatgttaagggtctttggacaaaaatctgctctgatgtacaagaatatttcagtgtatcttaaaacaagtgttttcgaggtgagcaaggggacctgatgtaattgccaaagccagcttgagggtgataactcttgaattggattttccttttgtcaggccaaggcctgaaaaatctgtaacagcaatatatcatgaatttt

SEQ ID NO: 20515 - DNA, 1177 bp, Mus musculus
ggcttatgtaaatcacaggcaaaagtagagccttttgttccaaatgatgattttattcatcaccaatgcagtgttaacttacatggttttctcctatcttacagatgtatgtccattcctgtgacgatgagggctattcggaggaaggctgaaaccatacaggctgacaccccagcactgtctctcattgcagagacagttgaagacatggtgaaaaagaacctgcccccggctagcagcccagggtatggcatgaccacaggcaacaacccaatgagtggtaccactacaccaaccaacacctttccggggggtcccattaccaccttgtttaatatgagcatgagcatcaaagatcggcatgagtcggtgggccatggggaggacttcagcaaggtgtctcagaacccaattcttaccagtttgttgcaaatcacagggaacggggggtctaccattggctcgagtccgacccctcctcatcacacgccgccacctgtctcttcgatggccggcaacaccaagaaccacccgatgctcatgaaccttcttaaagataaccctgcccaggatttctcaaccctttatggaagcagccctttagaaaggcagaactcctcttccggatcaccccggatggaaatgtgctcggggagcaacaaggccaagaagaagaagtcgtcaagagtcccacctgacaaacccaagcaccagactgaagacgatttccagagggagctcttttccatggatgtcgactcacagaaccctatgtttgacgtcagcatgaccgctgacgcgctggatacacctcatatcaccccagctccaagccagtgtagcactcccccagcaacgtacccacagccagtgtctcacccccagcccagtattcagaggatggtccgactgtccagttcagacagcattggcccagatgtaactgatattctttcagatattgccgaagaagcttcaaagcttcccagcacgagtgatgactgcccaccaattggcacccctgttcgagattcctcaagttctgggcattctcagagtgccctctttgattctgatgtctttcaaactaataataatgaaaatccatacactgatccagctgaccttattgcagatgctgctggaagccccaatagtgattctcctaccaatcatt

SEQ ID NO: 20516 - DNA, 1178 bp, Mus musculus
gtgggtatctgtgcctgtgccactagaatgtttgctagataaccaaataaattttaaaaagaaaaaaaaaacaaaactagattgcctggtgtggaatctggtgtgttcatgtttcctttaatccaagtatttggaggcagaggtaggtagaactctgagctacacagagagaccctttctgaaaataaacaaacaggttaaagttgtagcatgtaagtacagttcttgcctaccactggtgaggcgttgggttgtcagccctgcaaaaaaaaaaaaaaaagcaagtctaaaacaatatccaaaacgaatctgtaatacatgtgtattatgtgtatgtacatgtatgtggtctcagcgcatgttggtgttttgtttggttggcttatgtattcctgtagaccaggctggcctgagcctcacagagatccccgagtttggtggaaggtggaactctgggatactgagaccagcctggcctacagagtgatttccagaagagtcagagctacacggagaaaccttgcctagaaatacttaacaaacaaaatgaaaatcggtgttactcaggctaatgttgtgcatgactgtatgccagcactagataggaggcagaagcaggggcaggtagctctagacagacagtgagggtcagccaagggctgcaccgggaacctgcctcagaaaccaaccaaaccacccttactgaggaagttttacggtaatagtactgattggccacatcaaataaatgaaaagactaattgagagctgggcatggtcgtgagtacctgtaatctcagtgttagagaggctaagacgggatttggggttcaagagtaacctgtgctacacaagactatgtcataagttacaaaatgaaacaaaagtcttggccattcctggtttcagaattcactctcaatttaggctgtttactaattttttgtttttaagtttttctatgttgtaattattttatattcatgaatgttttgcctgcctgtatgtatgtgtaccttgtgcgtgcctggtgatcaactggcgatgttactatttgcataaagacaattatttgtttgtttaatgtcttaaatatggttatgatctttttcctcattgttcagattctcctgggctcctccagtttgaagtgtgtcctctctcagaatctcgcttca

SEQ ID NO: 20517 - DNA, 1198 bp, Mus musculus
tagaaaatatccccctcttctttttttgaaggaccccttctttctccgcagtcactagtgccaacagtgttgatcttcctgcgtgtttcttcttgaaatttccccagccaattccagtatctaaagcatttgttcagaaactgcaaaattgcacaggtaagctttgttttttaaaatgtttgccagcctttaatagaggtaggttttactcattgagttaaaacttgttaaaatcagaatgaaaaacttcagattatcttaaacaatttacagtcttttggcttcaaagaagtgctgctgagtacagcttttaggaaagtactagtagttagtactggtagttagtactggtagttagtactggtgctctgtaagaacttttggagatgtgggcagatgcataggaagatcacaagaagacagtgcagctgtcacagtttgatcttacgtgagcgatacaaacagtccttgtattttcaggaatcccgttgtttgagactccgcccacttacctgcccctgtatgaactcatcactcagtttgagctgtcaaaggatcctgaccctttacctttgaatcacaacatgcgattttacgctgtaagtaggccctgtggacttgcaacaatgttgtttctctatagcactagtgaggtccctccaatagcttccttttagattgctacatcatcctcagttgggcaaaagaagtcatcataaacatgctaaagcagaagagaatcagcttttgagttaaacagccatgtacatttctgtctgtttgtatttgatgtgcatcagtattttgctatatttaagtatatacataacctgcttgcctggtgccaaagaagtaagaaggtcacctaaactggagttatgtacatctgtgagtggccatgtgggttctggtaactgaagctaggccctccggaagagaagctgtggctgtaaagcaaggagcattctttcatgtccttttccttcttcttcctttcttccttcctttcttccttcctttttttttttaaggatgtatttattttgtgtatatgagtacactgtatctgaacagatggttatgagccatcatgtgcttgctgggaattgaactcaggacctctgttcgctctggcacaaagatttattttattattatatgtaagtacactgtagctgtcatcagacacaccagaaga

SEQ ID NO: 20518 - DNA, 1237 bp, Mus musculus
gggctcgcgggcccgaatatcggctcggcgggggtgggcggccgtgaggggcggactcgagcagctcccggcgtcgcgctcctcccgtgccgaggaactcttggtttcttccctctctccttcaccccccacctcatgtaggagggcgctgaggcggcgagagggaggaggagcctcgcctgcggtccctgccctccccacccccgtctaggggctcttcggggggcgtggagtcggggctgggggggagggtggggctttttggagcgccggggaactttttcccctgcttcaggcccggggaaagggaatgcccaattccgagagacatgggggcaagaaggacgggagcggaggagcttctggaacttcgcagccgtcatcgggaggtggcagctccaacagcagggagcgtcaccgcttggtgtcgaagcacaagcggcataagtccaagcactccaaagacgtggggctggtgacccccgaagcggcatctttgggtaccataatcaaaccactggtggagtacgatgacatcagctctgattcagacaccttctccgatgacacggccttcaaatcagaccggagggagaacgaggaacgtcggggaacggatcggagcgatcgcctgcaccgacatcgtcaccaccagcaccggcggtcccgagacttgctaaaaactaaacagacggaaaaggaaaaaaatcaggaagtctccaaatctggatctatgaaggaccgggtatcgggcagttccaaacggtccgtggaggggagtgatgattatgggaaggcccagctatccaaaagcggcagcaaggaatccaggtcgtccaaaatgcacaaggagaagacccgcaaagagcgagagttaaagtctggatacaaggaccggagtaaaagtcatcggaaaagggaaacacccaaaagttacaaaaccgtggctagccctaaacggagatccaggagtccccataggaaatggtctgacagttccaagcaagatgacagcccttccggagcttcttatggccaagactacgatcttagccccccaaggtctcacacttctagcaactatgactcctacaagaagagtcctggaagtacctcaagaaggcagtcaatcagcccaccttacaaagagccttctgcttaccagtccagcactcggtcacccagtccttacagccgacgacagaggtctgtgagtccctatagccggagacggtcc

SEQ ID NO: 20519 - DNA, 1199 bp, Mus musculus
ttccgaggaccagtgttcaatccccagtactcatatcgtggtttgcaactatctgtctctccagtgccagtgtatttgccctctgcagtcacttcatgcatgtggtatacagacaaaataataaaataatcgagataatgagaagaaaaataaaacaacattctgataacataaagcttatactggtgacagaacaagtgaatgaatttggttaatgataattcaaaaagctttttttgtcttgttcatttttgttttttgagacagtgtgtttttgtgtagacttggctgtcctgtagcttgttctgtagaccaggatagtctggaactagcagagatctgcctgtctttgcttcctgtgtactgggattagaggtgtacaagaacatagctgcaactaaaatacattatttcttaaagatttatttttatgtgtacatatgtggcaaggtaatatatacatgagagtaggtgccataggaggccattggtatcagatctctctacagctggagttacaggacagttgtgaaccagcatggaagtgcccagttctccataaacaagtcctctaaactgctaatccatcttttcagccctgtttgtagtttattcctctttgcttgtttgttgagacactgtggcttttgctggcctccagtatactagtagaccaggtttttctgggatttagcatgcaaccccattgaccttgaactcttagaattcctctggtttcatagcatgagcattgaattttcctttttccctccaagaggtggcatatgcctctaaatccagcactcagtaggttaaaatagaaatatcacaggaagtgtactggcagtctgttctgcttcaaagcctttcgggtacaggatgaaacttatctttaaacaaaacaaaacatgcagctgggaaagtggcacattcctttaatcccagcacctgagaggcagaggcaggcagatctgagttcttagcctagatcctgagggtatagttactagctatgtagagagaccctgtctcaaaaacaacaaaaaaattaagtgtctgactgacctgaatttcaactgtagatccatttgcttctgcctcttgtgtgctttgattaaaggtatgttctaacaagtcaggtgacaaatggttatatttgtacctacaggttaatttaaatttaattaacagaaatttca

SEQ ID NO: 20520 - DNA, 3645 bp, Mus musculus
gcaaccattcctcaagtctgagggaaatagcaactctgtggtacatgcagagaccaaattgcaaaactatggggagctgggaccgggaaccactggggccaacagctcaggaacaacgcttcagtgggggggcccagctcagtcttatggaaaaccctacaggggggctgcaagagtcctaccacgagggggaagagggagaggagttccttattaacacagagacatcaaatgccctgaaagattccttccctatccatctttccatctagttctatgaacctttaatgaaatcacctgccagagcaaggtaatcatctgcatttggctactacaatgctgtctgttgttttcacttgctgctagcaggcaagtcaaccatgttggcaccagttcttccaaaatggggcaatagccagaatatttacttccgctctgtgtacgagctatagtagaaatatatggagagaaagacacattcaattgaaaaataattgttccattagctcattgcctgcacttgagcagaagagaactattttgttttgagatggctctggagaggctttgattttttttaaaattatttgttttattttcttgtgtgtgtatgtatgtgtgtgtgtatatagtttgttttgaatttttatttagtttcctaccccaaactccctaccgcccttgaaagagaagagtattcaaaagatctgagctcctctaaggcctttgctagaagggtaacagtggactggctggctcaaatgtttccttcctctctaccatctcatatttttgcttcagtgatcactccctttacccctgttgagtatcttgtacatacctttttccaaataaatcatccttatgtttgctcaattttgacaaaagttatgtccctcttcctgcacacgcagcaggctgtagacagtggcgttctcaggcgaggaggcagacttcacccaatccttggtttttgcttgtttacttgtccctctctccctcttttctttttttctccttcctcccttgtgtgttcacccctattattctctttgtctctttttgaggcatttgtttgaaaaaaatacatagtagagatgcccgggaacctggaataatactttgcccttttctttttccttttttcttttcttttttttttttttttaataaaggaaaggaaattcaaactcctacattgttctccgtaactcttcaattctaagatttttgttttgtttttgtttttttaagccacgttctgatgggaagttgatttgttaatggacagcataggacattgctgctgagccatggttagaaatgataccaccatacctacctagaggggtaataagatcagtaagcatgtttacatgaatatttttgtgttttaaaaaaagaagaaaactttagaacagagccttgtgatattgtcagaggaaattcctgaaaatacatgagcacataacctagtttaggttatatatctgaagatttatcagttcctgatacctttaaagaacaatttttaacagagtccatcagaaagaacagtattgataagtatatgtctcagcatgtacatccaaccatttcttacagggatcatttttgattgtggtaaagagtgtagtacggtatgacttccggaaaagaactttgcctttgcagaacaggaaatggatgagaggaaggatttcagggtggggtaacttgagagacttctcatggcttccatttctcagtatcagcatctggagtattttaaaaacagattgatatcatgtaattgagctgcaccgttttaggcattcgtgaactgtagggtaagctcccttttacaaaggcaaacatacttcaccgtctcagagaatagttttcagaaactcaaataaatttcatgtttcaataccaagttcttatgttaaaatatatttagaaagatatattaattttttaaaaatttagaggtgaaaataccctcttcagctacattaaaaagttatttttcccttgttagtgataaagctaccagtgtgaatatttctttattttctgattttggtctggttttgtcataggccaaacactaagtgaaccttctagccatttggctttgatagctttttatgccaatatgtctggttaaatattctagacacactggcatgctatccatagactgcattacggtttatctataccttcagtcttctgactagttagtcctcagacgtgggccttattttaaaattttttaacgtaaggtattgggccccagactcctatttttgattaaagaaactgagctgggatacattaagtatctgttcagtgaaaaagaattgttttcccatcaaataggaataaatttctctatatattttcattgtattttggttatcaacagtcatcaataatgttttcccttcccctgtcacactatatttttaattatgccaaatagtctaaataatttatgtaagcttccattccctgtccctagggaaggggaatgagtgtatgtgaatgcgtgtatatgtgtgtatgatcccattatgccccgccccattttgggagtctagactttaaaaaatatttttataataattttgactacttctgaaagctgagaaaaatctcatttatatatcctgaaacctgtgtagaagaaaaggaatttggtcatttttttcagctatattacctgtaaacataatggaagtaaaaatttggcttaattttcaacctgaaaagtagtaatctggttaattccattaaaaagtggtttgagttttaaaaaactattacattattttgaacagatttgaaatctgattctgttcatgaataagaagcaaaactggcttgaccatgatctttttttttttttttttttaatgtggttttaatagcagatttgcttaacccagtttctttagttttttcatctgtctatagggaacaggattctcaaataacatcagatctatgtatttaaaaccagggcggtcagcacaaatttgtatgtaggattttttttgttagcttataaacatcaccgtgtgtgtgtgtgtgtgtgtgtgtgtgtgtgtgtgtgtaatatgcatatataagtacagtgctaaagtggttaccagcaggttttgagagagaatggtgcattgggaaagtgtcagttgccacctccttcttcctgatttacaggtctctgacactgtattcctttctctctcttgtttttgacccccattgggtgtaccttgtctatgtacagatattttgtaatatattaaattttttctttcagtttataaagatggaaagtggagattggaaaattaaatatttcctgttaatataccacttttgctgcattgcatttacttctaatttctgtaccccttaagcatatctaatcatgtatgaaggacatttttcctttatcttatgggttctctatttcagaaatgctatagaatcataaactactaaaacaagaaaattcctcagggtttggagagtaggaagtagagcattaaaaattgtgttagagaaatccatgagaatatggttttaaaaaggaaaaggtagcaaacagatgatagtgtgaagccatcaagagttgagcttcatgtaccc

SEQ ID NO: 20521 - DNA, 1195 bp, Mus musculus
gggctgaatggcttcaggatcggtgtctgccgaggccatgaacagtcttgcttggactcgaggtggtgccaaggacctccctgaacttctgcctgttgttcttagttcgttcttgcatttatttcctaccaggggccttcgagattgagatcaatggacagctggtgttctccaagctggagaatggagggtttccttatgagaaagacgtgagtatttaatgtacctcgggagggtggctgagacgagacacaccctcctctcctgtgcatgacactcgcccatgtctctgtccgctagctcatggaagccatccgaagagccagcaatggagaacctgtagaaaagatcaccaacagccggcctccctgtgtcatcctgtgactaagaaatgattcttggaagcttggttctggggtttaaacctttccttgtggttacgctaggaatccctctacctttagcccctcacttggccctaggtaactaagaccctgacttcactttgcctcttagggcacaaggagggactagacatttctgtggccaaaggcagaaaagagatgttctctgtgaacatcaccatcgctctcccgggatctgtgccctctgcagtttggtcctctccccagcgtggcaatacctttcagatgccacggttgctataacttattttccctgaatcctgggcagtgtcggctcttggcaataaagagtaattacaaatgcttgtgtcaactggcgtgtgtttatgtccagcctgtgcggggggcacacaggtcagtctggccctgctaacacctagtgggtgggactaacacctagtgggtggggttttcctggatggatacttctttctaaggcaaggaaaacaagtcacatggcaatgctctccacaagctcccctctcccactgggaggacaggacttcattctgggggtagccttggaatgagtgtgtccaacggagtattctgggggtagccttggtatgagtgtgtccaacggagaatgaccctgttgccaaagggccttcagaaggaatcctaactccccagtccctcaagcccaaagccaaattgtctcaaacttttggaagatctctacacactcactccaggaggagctgtgtgtcagatgagcaatacggtttgacccggcccgggaccactctcagacataggctggggtccag

SEQ ID NO: 20522 - DNA, 1618 bp, Mus musculus
ctgcacaccgtgaaagggacgcccttcgagactccagaccaaggcaaagcaaggttgctgacccactgggagcagatggactacggggtccagttcacagcctctaggaagttcttaaccatcacgcctatagtgctgtgagtactctggctatgggagaataagcagaggtaaacgggtgggctcagctggccctaaaccctcccagctttggcccttgctgtatggatgagcagagggagggaagagacatattcttgggtctcacacggggcctttggcctccctggccctgtctttcctcactggagtaagctgggggggaaggtaggtcaggagggccttgctagctagagagttgtcactccacttcttatctgggaacccatatttcctccttccctccctccctccctcccctccaggtacttcctcaccagcttctacaccaagtatgaccaagtccatttcatactcaacactgtgtccttgatgactgtgctcattcccaagctcccccagctccacggagtccggatctttggaatcaataagtactgaggttgtagccccttccccagccgggttggcaggggaagggtggaaggcctttgctgtgatgctgaagacaggagcctctggacactgccagagatgggggtgtgccctgggcctggcttccccctcgcttccccagtagccgacttggagtagcttgtagtggggttagggtggggcccttgggctctaacccattctgaagtttttgatctttttccttttgccttttgaatagagatgccatgggggtggtcaggaaagaggctgggctctctggctgactgtgggcctgagaaattgggacaggaagccaggaaaaggccctgttggcttgtttaccctcaggcagccatagcactttagcccccaaaaaggggggcagagggacggtacagcttctgcattggttgccctcattccttcagtgtgtgaagcgagactcgctgttctgtatgtattagaaccctgcgccgtgctgcctctgccgccaggcagggagcaggcgggctttgtgggcttcctggcaacccacgatgggtaggctgtggggcaggggagattaggaaaggaagatgggttgatgggacacctagaggtggggacaggatgctgccaccttggtcctggggagaggggagttctgagcaagggttgggtggggatagtaagttgggtcttacttagaatggacaagataactgcagccgatatggatcagtgtaaaaaaaaaagaggtctgggaaggagaagccagactccgcctcctctgagatgtgggctaggaggagagctggcgtggagggttaatttacccacagaacgatgctgataggaagggaggcccctgtgggtttgaactcctgggttggaatgaggatatgcacaggctggaagggcctgtgagtcctcagaagcgggttcacttcgacacttcccttagtggtgtgtgtgggcgcgcgcggaagctttctgagaggctcttccttaagcgttcaattcgtattcttgtgtagattgtgctggggcagtgcctcttgtgtggcttgcatgtgaatgg

SEQ ID NO: 20523 - DNA, 1424 bp, Mus musculus
cctttaatctcagcactcagggtggaggccggtagagctcagtgagttcatggacagcccagtctacatagtgaactgcaggacagccagggcttggtagagagaccccggtgcctttacatggatggatggatggatggatggatggatggatggatggatggtcacttcccgctagacaggagagaaagcatggcccaccatgttcagaccctggtgtctgggacatgcgaaggcccagtgattcctgcttctctttctccacctgctattttcaggccatgcgctttcctcccaaatcctacaacaaggacctggagtctgcagaggtgagcaagaatcaagggtggcccttttcaaaagggaagtgggaaggagctggagggcggggcaggcagccccttccttgggtgaagccctcagcccctctccttgcaggagcggcgagagcgggagcagcaggacctggagtttgccaaggagatggcggaggatgacgacgacagcttcccctgagccaggccgggggaggggcgggctgagtggagactggctttttctcttttccctcaggtgtcccctgcccgggaaactgttctccgtttcccacacacggctcacagactgcatatgtgcaggggtcagggatgctgggagccaaccgtccccttcttgctaccatgcctctctgtagctggtgacagtaccctgtgggcgggagagaggtggcagcctccaggaggcagggtcctgcctcatggtggtgtcggtggcaggaggggacggacagaaccatggattagggtgtggactagggcctggagttgggacacgttgggttctatgtttttgaagcttcaattatgatttttaaacaataaaaagttctccagagctccttgtgcacggtgtcagttactctgtggcacttacttgattgactgcatggttgacaggcccgagcggctttatttttcttggcatcttagccccaagtgtgatcaggatccagcatatcttcaggaacggaagccaaggtgaggtgagccgaagtcaggaggcttggggctctcacgtgttgggtacattgatgaatgccctaggcggctgtgctcctgtcatcaagtagaggactagactcagcctcctggctggctcttcaaatcaggagcctaaacttcccagaggctcctaggggcaaacaacaggaatggaagtcagttgacagagtgtttgccaagcatgcatagaatcttggtttgagtcccagcactgcacaaaccaggcttgatagcgcaagcctgttacacctagcatggcatcaggtgtaagcgcaaaccgggctccatgagaccctgcctcggaaaagtcaaggatgagcggctgacctcaagcgctgtgcacaagagaacaaagcctggcgg

SEQ ID NO: 20524 - DNA, 1177 bp, Mus musculus
ctgggctgtgggtgggagtgaggggttgaaggggcttcttcaccatgagcgtggagcttctgggcccagcttaactatgccttcctcctggctccttttgctagactggctgtgtggtgtgccctgagctcttactcttcccacaagggacaggcgtcctcccgccagaagaagagacacagagaggacattgaggtaggctgctgctggcttggtcatatgtgcacgcagcaagcattttctgatggcttaaagtagagttgccttgccaggcagaggttggggctaaggtcagctgtgcttggcctgtctgattggtcagggtctagaggagagacttgagtgggcccctgagtgtccttgatgggggaggtctttttctgctcaccgggcagagattggggtatgggaggggtcaccactggtagcgctggccaaggattgtagagagctcacttctccagtcagatctgccctccagtcctctccagctcctggagacctaggccgtcaggcatgtgacagtgacccatgtctcccaggactatgtcagcctcttccccgtggaggacatgcagccctcgaagctgatgcgactcctgagctccagtgacgatgatgccaacatcctgtcaagtcccagtgagtgctgggggtgtcccgggcctgcctaggactcacccctccctgacgagctgccttggtttctggctgatggccgtctggctgtcagcagagcaggagcctgcacctctctgtccctagtcggggctctgtcgcttgctagtggggacaggacctgaagctgtcctccaaggtccctccaaacccctcaggtgctcctcccttgtcaccactggaagggtggcgaggcacccagtgagttcccagcttgtactagtgactcaccccctctcccttccttcctaacccagagagacatgccctgtggctgaataccggccccaccaggctgcaacctggggctgccttcccgccttcctactcagagggcagcccatgtcatcctctgtcagacttccttctgccaaaaactcttgtgtggcatccaatttctcttgtttccagatttctcctgaaccctagaactttctctggagctttgtagggaccagggttcgagccacacgcttgtgtaaaggaaagattaggttgc

SEQ ID NO: 20525 - DNA, 1161 bp, Mus musculus
gaggttctcccccaatggtaagatttttgggcgagactgggaaaaccagccttttagaaaccaggaaaacgatccagaacgataggaaatgagcctctcttgtaagtcaatagctggttccctgattcaggggcatccccgggttccctgattcaggggcatccccgggtttctgggtttctgtcccaggtttgcatcacctgggccaacaggtttttaacctgggcaatgagtccttggtgagaaaggagggggatgggaaggcacctactgaagcctgacctattttcattagggtcccaccctcaagtcactcagtcaagcagtctgcccaagattgaggccacttgaggtctgcacagggtgttgtcgtgttacccagaacaacctaccgtcaaggagaataggtcttgggtcatacacccacctggccatgtacactcagtgcatacatacacatgtaaaggtgatgtttatattcatgatcataaacccctagcccctcagaagtatacagaggagctcaagtcagagcttagagtcctccatctttccttttgctacttttctttaaaaacaatttttctttcaagacaggatttctctgtgtagccctgactatcctggaactcaccaggctggccttgaactcagaaatccacctgcctctgcctcctaagtgctggggttagaggtgtgtgtcaccaccgcccagcttattatttttttttttaatttttattttaggtgtatgtgtgttttgtctgtctgtctgtctgatgtatatgcaccagatacatgtctggtgtcagaggaaggcagaacagggcatcagatcctcccagaaactggagttacactcagttgtgagccaccatgtgagtgctaggaaccgaaaccaggtgctctgtaaaagcagctagtgttcttagctgctgagccatctctccagctctggttttctatctttgatggcttttccagttcaaagaatcctgggaaaactaaggatatagttgaaaatacaaacacagagaatccaacaaagcctctaaatagtgaggtcacttctcagaatcccagacttcaaagaaaccgagtggaagtacccacactagggttctggggctatactttatggagtgctagtcattgggtctg

SEQ ID NO: 20526 - DNA, 1154 bp, Mus musculus
tatcttattgattcttttactcagaggtgtgtgtggtatttatagacctggatatttttagaacctgaggtgaatgatttcgtgttcctgaaaactgttactccagcatgctcataggttgcttgtccctattgttcctcttccagaacctggatgacagtgtattttcaaagaggcatgcaaaactggagctagacgagaagaggagaaaacggtaagaccaagacccccatcccaggagcatgtgagccttaggactgtgactgggagagtcctgggccaggcactagtgtcacagttagccagggcggttgtccttacaggcacacatgttggcctttttgtggatgccctccctcagtactactttctttggaacaccagcatataatgcagagtgctgcttcctcagcctggtagtcagttccctttacccggtcaaggaccttctagactctggagagtgggaactgcctttgtaggacagcttttaggtgagtagtaatgcttggtttgtttgtttgtgtttgtctggtttttcccagatgggatattcagaggatcagggaacaaagaattttacagcgactgcagctcagaatgtataaaaagaaaggaattcaggaatctgagcctgaggttacctcatttttccctgagccagatgatggtaagtggtatctatctaaaactgtaaactttggggctgacgaagtgtagctcagggattaagggcacttctgttcttggacagaccaaaatttggtttccagcacccacattgggcagctcagaactgcatggaattccagttgcaggggacctgatgcccttttctgacctcaaagggcactacattcacatgtacaaatccacacacagggacagaaacacaaaatcgtataaaataaagcaaataaaaaatttacaattgcagacttttcaaggggggaaaaagagtgcaagtctccacagcacagctgcttgtgacgggtgagctgtgctgtggaggtggtggtggtggcagcggtggcggttggatatttctcacctctttgctaacaaggctccatgtgattttcttccatagttgaaagtttgctgattacccccttcttgcctgttgtagcatttggacggccattgccaaaatt

SEQ ID NO: 20527 - DNA, 1448 bp, Mus musculus
ggctagccatgattgtctgatgacaagctagaagccaggcgtcagatctcattaggaatgctctttttggtttttcgagacagggtttctctgtgtagccctggctgtcctggaactcactttgtagaccaggctggcctcgaactcagaaatcagcctgcctctgcctctcgagtgctgggattaaaggcgtgcgccaccacgcccggctttaggaatgctctttaatctgaggtagatgacattgccatttggatggtgactgtgtcagctgactactgccttggaagtagccttgtcactttgctgtctttctttttgccaggaactttgaactaccctggttggatgagcgaagccgttgcaggttggagatccagaagaagcacacacctcaccggacctgtaggaagtagctgtgctggcggtagcctgtcttcagatagttgtagcatgctgttccgagagaatagcagagacctgtatgtgtgacctgtgccctcatgtctgttatcattcactggtaatgcctttccatcctccctttatattagttttgttttctttactctgatttcacaaaacaaacagaagaaagctcttgcgttggctgattgtgaattaggggttactggagcggcttttcccattttggggagatgagcttgagctcgtcctatagggggagacttgggggtcccaggggccacttgtaactcacctgcctgcctaacggggtaaagggctcttcattagcgtgtctaagatggagcaacccttcctgtaggagctgtgcctgccctgaccccgtgcctccctggtgcgccttctgaatagtgtgggtgtagtaggtttcaccgtgaactttagggcccgaggaatagcatgaagtaatgaagcaagacattcctcagagggggaaactgcagagttttacctgaaagtttgttctctttaaactgctctgtgacagtggcatgtgggaggagacgtgcagctggttcactttcttagttgatgggtaactgaagttccttcccacccccaacaaagaagatgtttagaaaagagattgggagtgtaagtttccaactagttaacagtgctaaaccgatagagctctcatttggggatggcatgccagagtctgtagagatgtctctgtcatgtcacttttcaaggattccttagtggggcttgatcctattagccaaacttttggtggtgaggtagagatttggggtggggccgggggtagggtatggaaggatatgcttcctctgcctggcagatgtctacagcttgaaacaaacagttgtacctaatgaactttattcgtttagtgaaaatagatttatacacgaaccatcttgtttcccatctcctgcccttgttttgttactgaaaagataaaaaagaaaaaaaaaaaaaaaaaagaaaaaagaaaa

SEQ ID NO: 20528 - DNA, 2436 bp, Mus musculus
gctctgaggagaaaggaggagaaagtggctctgtggctctgagggagtgtgtgttggtttagaaggtaaggtctcactctgagcccaagccagactcaaactttccctcttcctgctcttacctcccagtgctcaaattacaggtgtgggccaccacgcctgactctgggatatttttattgctgttgttttgtggtcattaaagcacattatttagaagcttagggtgtagcatgtccatggtcttagacttgatcctcggcgccaaataaaccacattatttagaagtgggcctctgagaaggcttatataaatactcaggtccaactgacacaccgttcttctcttttaactctcaataggacaggagaggtggaaactcaggagagaagggaaatacagctggctgtctactactcagagggcttcaaaggtgtggggtggccctgccagcaggcggaggatgaggccctccttctctgaggacgggtctgctggagagagaagaaacaggtggctgccttccacctcactcctcacttgagctgcctggactcgaggagcagagactggacaacccaggcgtcagaagcctgtttcttactgtctccccagagactcaagtgtcttctgctcccaagggagttccttcctgcttgtttgtttgaatgttgattttttttttaaagcttgatttacccttcttaagttaatgtttttagttttttctccttttccctgccctgccctgactttacatgaaacaagttcagtttcgtttaccagcctttctgggttccctttgactcccctgctaaccccacataattgagaatgttttgaccaagtgtaaaaatagctggccttttccttgtgattggtctttattagtctttttaatgcctctaaccctgtggaagctgtctgcacgcagtatcccactgtagaggagagctcagagtgggggagtaggagcccttgcttggggtacaggttttataaatctgagccttcaacagtacctctcttctaatgggcttcagtcctccactgaggcagaatctctgctgtggggagagagaacaaactggatgctattgtgagacgggagggtggagtgagaccctctgcgctgagtcctcagggctgtcttggaggtaagtggaagtagtgggccctgcttcttttctttgtagccttccggctacatccccttcccagttgtggaccaatgcatctctagagacagatactatccagccatctgtctgccttgtcttttgcagtacttctccatgccttccctgctacaagtgtttttagatgttattactgtactttccccaaattctgctcctgtacttgcaaactgaaggtaactatacctagacttaaatcctaaggaagcaagttaccttctgggcaaaggctgccttcccacccttcctttcacggcaccacactacatccccatgcccctgtggaagtctgttactgcagcactgtgcctgccagagttcccacagcacccgagggagaaggtgatggctgtctctctctagtaatgtccttgttcttattcttccctcctacagctggcctaaccactcttgagtcggggtgggggtaaccctcaaggaggaggtaactaagaggctcttccaggggtagctggtgggtgtgcttttcataggcttccctttgccttaaacctgaagatgtctcctcaagcctgtgggcagcatgcccagattcccagactaagacactgtgacagttgtctgtcggtccactgtgtttagttgcaaagatttcaccatgtgtgttgtttttgttactgtcttaaagggtgcacatttgtgatcagcattgtgacttggagataataaaatttagactgtagacttgactctgtggccagttattgtgtgtcttgatttgggagggaaggaagactaatttcactacagaattagtcataatttgagcccgactggtaaaatggaagagcagagaggtaaggagcccccttgaggcccaaagcttgaaaccaacagtttcttgtcctccgtttgtttgtttgtttgtttgtttttcacaccagggctcactcatgtagctcaggctgacctcttaactcccctttacctgaggcttagcttcccaggtgctaggattccagctgtgcacggccatataacaatttttgacttgtttgtttgttctatatgttgttggggtttttttgtttttgtttttgttttgtttttttttttttgagaccctgtctcactgtgtaccacgatgcccagctgtagatatctatcttttattggaaagtaaagatggcactaaaatactaaggcctacaacctgaaggacagctaccagactacctaccctgagctggaaggacaaggaaaactaagaccttc

SEQ ID NO: 20529 - DNA, 2937 bp, Mus musculus
cagagtcctgtaagccaagcacaaagacatagggaggcatgccgcccgccatctaggaggtgggtcttccctggcggccagcaatacatcgtttctcagtcttccaaggtgtagggaaacagcacaggaagtgggtgttccaacggaggccgctctgttggccaggaagtgtctcttctccactagcagtgtggggcgcctgaactccacacccagagaagttggtttctgacagtccttgacctgggcacaagctgctcagatcttacatcacggtagggagaccaggctgttctctgagttgggtaggggaagctagtgaaaaacttccagatacaccatggggttaaattatcgtaggggctgtcctttttttttttattattattattatttttatttttattctccgcccaccccactccactcccaccccctaagacagggtttctctgtgcattcctggctgtcctggaacttattttctagaccaggctggcctcaaactcagagatcccctgtctctgcctcccaggtgctgggactaaaggtgtgcgccaccacgcttggctcatagggacctttctaatctagtggaccataggctaaggatctgtgtgtaatgccaggtcagacccaaatcttctaggactggagaaagtggacctaacttagttcatttatttattgagtgttgcccattgccagctcttggaccacttggacttttgggacaggcagtggttagatcttaccggacttttaattgttcactatttatcttcttctcaaatctgttagcagttacgctcccagcatcctaacttgaacaaagggaagagagggaaaaaaagctgacacttggagagttccagggtagattctaatggttgaactgtgaagtcttcccatttgttgttgaaatgggagctgatgccttttgtacaatgttatcaaagtgtgaaaattttcccttactgaagcatagaccatcagatatatgcgtgcgtatttatgtatgtgtatatatatatatatgtatatacacacacacatatagatttgtatacacacacatacatctactcacaaagccaaacccgggctttttgcttgggctgatggtaccttcctcgacttgacctgccaccctttctaatccccagaatcagactgtgccgcgtgggtattgatgatatattttcgttgtctttgcctggtggaaccaccaccaaaaaaaggcttgaatttagatctacatgagtgagtttgctcctccagttaacggattgtgttgatgacacaacccctaacttaaatgtctttgccttattcatcatttggtcctgctgttaataacaaatttattatcatgtatatttgctattgaagatgggagtgtgatcctcaaaattgttggtctgttttatatattgtacacagcttgtaatgcaggtttaaggtagccgggctgtgaaaaccctgacactgttcccctttaaactgtccttgatgtcctcatgggaatgtcgtctcttcagtggaagattgggtggtctcatgttgaggctattacttagtccctttaatccccttgtcccctcccaaaggggagagacattgcccagctaagcagccagaagctctgtcacagctttcgtggtatttttccctagtgggaaacgctggatggctgtttcttactgccctgccctgtcaggcggtggttctgattttcaaatgagctagatgctcctctttccctttctccagtcaccaaacctggaccaaagtacttcatattccaggtgtgggttcctctctcctgggatttgctgcagctgcagagccctgcccttttcgcagccttggccacttgtgtgagccactagggccatcccagcctgatggacgggaggcggtcctcaccaggaattcaattcattccctgccccctttcctagcctaggcagagaaactagtcactggccattgccctgggggaatcccctcacgcagtggcttcccatcttagaacccggacttacctccaggcggaggtgaggggtggggagtactgtaaatagacttgctgcagagcaactcagggttggggtatgtttgagttctcctgatcacttgaaaactaatctgtaggctgaatgcttctggagtgtgggggaaatgtgactccggggtcctttgtcctctgaggctctgcgggtggagggtaggacttcagaggccctttgatagcacggctgcgctgtctgcccttctggaaacccaacctgccatcagctgtaaatcagattcttcacattccaggtgtaagctttcccttccctgtgactctcagtccctagctacatggtcagggggactctgttaaaccacccaaatttagggaatgagaggggagagaggaggccattaggagtctgccttcaagactcatttcttgaaaacaaaatggaaaaaaaaaaagataaccaccttcaatcacaggcaaaaactaaaccaagaaaaaaaaaaaaaaagcaaacaaaccaaaaaacccaacagcaaccatgtaactgaaggaagggtctggttccgctccatcccgtgttcattgtgcctttacttgtgttagatctctgtgctttcttcctccccctctatgacgtcattaattaaagccttccttgataaccgctgtttcctttctgctcctgtttcttacagcttggtgggtttcttctctgattgtcttccatcttactcgcctggtggcagaggggcttagcgcacacacgcaccctctttttttttttctaacttctcctttcccacagtttccagcctggaagttacagtcaacactgagtaagagaccagagtgattgtgtgcatgtgcgcgtgtgtgtgtccatctgcatgtgcgtcagtttcttt

SEQ ID NO: 20530 - DNA, 1184 bp, Mus musculus
tctgtgcagtttattaaaccttaaaaggaaaaaaacaaaaaggaaaacctctgtgtattcttgtcgtgagcaatactgtttcaagtgactgcagggagagaggaggaaaccccatggtctcctcttctggacaaacgtggcagtttgagttcaggctcccttaagagaggacctgtgggtgggtgtggcagaaacacttgcagctttctggggcctttctgcctgtgcgttttatttttgtttttgttttttgtttgtttgtttggttggttggtttttcaagacagggtttctctgtgtagctctggctatcctggaactcactctgtagaccaggctggcctcgaactcagaaatccgcctgcctctgcctcccaagtgctgggattaaaggcgtgcaccaccactgcccggctgcctgtgcgttttttagaagtcacccttttggcctggccaaccagtgattctgttttgtattttctgcttcattccccttgcctttctctcaaggagccccagaggctcctttccgtggggtctgttccttgtgaccccttagactctgtcttcctgtgcccgtgcttccaggccgattcgcgccagacagtggaagaaaaggtgggggcagggcccacatcttgtgaagctctgcatagtcctgctgatcctggaactcactgtgtagaccaggatagccttgaactagatcctcttgcttcttcctgtgcaaggtttggaccaccacaactgccttttcagccgagatcttagccggttttcttgagctttgactttaggtgttaaaattctaccaggcctctttgtttctgtgtttgccactgatagtaactgcagctgagtccactgaatttgactgcactttcactgatagcagaccagccagttacttccctctgggtttataatgggtgtgtgtgtgtagatagctctcaaggaatctaggtagatataatgggggtgtgtgtctgtctgtctgtctgtctgtctcttgctctcagggaatctagattaggaaaacttgctggggaaaggttactaccagagtggctgaattcctgattatttgatccattattgttattaatatgaataataaactatttattgatttcattattctttctgacttaatagcctgcattatggcatttgcttaaatgacc

SEQ ID NO: 20531 - DNA, 1579 bp, Mus musculus
ggtatagaactaccctagtgcattaacaatatgcaagttacttggctcttctctgtttagaaagcaaagggagaggaacaggacttccctgtggacttggaagacacgatagctcctcgagccaaatctgaccgggcgaggaagccaattaagtacctggaggagtccgatgacgatgacgacctcttctgaggcagaagagattgttttagggatggttttacggagccaggttagttttaaagttcttcctcctctgaatttgatttttttttttttttactaagactatccaagtgagtagagcccgtgtggccttcagctttgctctctgtaacatgctgtcgaggtgaccatctcatgggcaattgtcttctctgatttgtctgttttatgtgtgtttactttggtctctaaaatctgcctcaatttttttggatttcacagaattgtatgctcactttagcacaatagtatttatctatcatctattaaactacagtgaaaatgttttcaaaagcacttctgctgcctcctttcctcttcccacaaaataggaagtaacatggtccttgttttcagttttataggtagaattcggtcatatagaactggttagttctagtacagatacagtgctcaacctctgacgtgatgcattttgtttaagccatgagaagttgctcgtaccttttgaacatcggaggctggagaaagtcaccttgactgtgtctttatgactcagcacaagcagcaaggtgaggaaagttaggtcagttacgtagagtactgactctactcgggatgccttcccaacacgagatccctgggaggaggcaggactgctcacggttacatctccaggatcaaccaggaagtgggatccattgcagatctccataattccaacttgtgactgccaagaccttctgtgctgttgtctcttatttaagtgctgttatcaatgtcttttgtaaatatttaatatgtctgtctgttccgctaattccaactattttgtactttaataaatcttctaaacaatgcaagccatccattcctcttattttaacccatctgacatcatctcctgtagtcaggacttgttatagccatggtctgtctgctaagacggtcagcctttggcagctgagggatccaaaagagaggcactgtgacctagatgggtccagtgttacttacaatctcacatatggctgctgaggtgtccatgtcctcggggaggtatcagattagggatgtagctccattggtggagagctttctgagcatgcctgaggcctgtggaactagtactataaaccgaccaggttagcctaaaactcagaggcccaccagcctttgggtcccaagtgttggaattaaagtcatgtgcaaggccaccttgggatacatgagactctttctcaaaaaacaaaaacaaaaaagcatgtatctttaaaaagatgtctacttccattttgatagcttagacaactacttgttggactcagtaaagttatattggagcagcctgcttgatccctctaaataaaatggtgaatccaattcctttctt

SEQ ID NO: 20532 - DNA, 1166 bp, Mus musculus
cttgggtggccattgggctgtggtggcgcatgcctttaatcccagcacttgggagtcaaatgcaggcaaatctctgtgagtttgaggccaacctggtctacagagtgcgatccaggacagccagagctacacagagaaaacctgtcttgaaataataaagaagaggaaaaaaaactgtagacgacatattcctaaaacataaagttaggggctgtagagattactcagtggttaacagcactggctgcgcttggcagtagtggtgtgttcctttaatcccgtcacttaagcactggttgatctccagagtaccttggttcctttcccagcacccacgtgacagctcactaccaactgtaacttccagtcttggggatctaattctctctctggcatccacatagtacgcagacatatatgcaggcaagacattcaaacacataaagtaacatgagtgctgtggtaattaatacacacgagtagcctatgcttaaggtctgtaccctctttgcttattcgtgtatgtattcaacagcaaaagccaaattcacagtggatttagactcggatgaagatttctcaggtttggatgagaaggatgaggatgaagatttcctcccattagatgctactccacctaaggccaaaatccccccaaagtaagtattttatctaatgataactatctggattgttattggtctatttattgatgattggtgttttacacatatggagttggttggagggatgtcttctcagtggttttgttttgttcttttagaaatactaaaaaagcactgaagacccagggaagctccatgtcgggtatgtacttaggtagagttagcaggcgcgtgggagacgctcagtcagtccagcccacagcacccgccgcagagacccatagactttagcactcaggacttagaggcaggaggattgtgagttcaaagccaatctgtgcaagctctgtgccccagaaagtagaaaatttaaattcaattttattattattattatttaaaatagtctaagaaattgaaagtgggactacatatcaggaacagaccagcagggggatgttttcaattgctatcatgactgaccattttcctttctgtttgaagtagttgatcttgaaagtgatgttaaggacagtgtgc

SEQ ID NO: 20533 - DNA, 1909 bp, Mus musculus
tttttatttatttattataagtacactgtagttgtcttcagacgcgccagaaggtctcattatggatggtcgtgagccaccatgtggttgctgggatttgaactcaggaccttcagaaaagcagtcagtgctcttacccgctgagcaatctctccagccccttgatttggcttttttgaagcaatcttaatacatatccaagataagccttaaattcaaaatccttcttagactgcatcttcaggtcacaggattataaacatgtttctgcagcactcatttcttagcaccctaagtaatctcttgcttcattttcctttttagcactctgtctgccccaccaatcttgaacttgagaggattttgtttggtgttaaagcaagatctcactatgttccctgactggtctagaagtcagagagctgcctgtctttgtccaccaagtgcaggcttgtgccaccatgcccacctgtgtgtgaaaaatgacagggtcattttctaaatgatgttctttgctttctttagccctttggctcggttgttgtttcctccaaaagatgatcacacattacggtttctatatgatgacaaccaacgtgttgagcctgaatggtacattcctataatacccatggtgctgataaatggtgctgagggaattggtactgggtggtcctgcaaaatccccaactttgatgtgcgtgaagttgtgaataatatcagacggcttctggatggagaggagcccctacccatggtaagtgctctgggttggaactgtttctcatcaggcacggctgaggagattggacgctaagatagggtacaaggacgagatttgtttcagagtttagatttctttaacatttgagatgaaatatttataaaggtttttgttattaatttagctcccaagttataagaatttcaaaggtactattgaagaactggcttcaaatcagtatgtgattaatggagaagtagctattctggattctacaaccattgaaatctcagagcttcccatccgaacgtggactcaggtaagtaactattgacttcttagttttttaagagaaaaatattgtttttgttattgactgtttaagagactccttgccaaaggattattgtgttttggtttttgttcttgttttttagacatataaagaacaggttctagaacccatgttgaatggaactgagaagacaccctctctaataacagactatagggaataccatacagataccactgtgaagtttgtcataaagatgactgaagaaaaactggcagaggcagagagagtcggcctacacaaagtcttcaaactccagagtagtctcacttgcaactctatggtatgcattactttgtaagagataatatttcaaaactgttattatcataatcctagcactcgggagacagagatgaggagatccttatgaattccaaggttattctgggctatgtagtcagaccctgtctcaaaaagaaaggctgcagagctgactcaacagttaagagcacgtatacttgtacattggatctatgttcagttttcggcacccacatggcagttcacaactgtctcactcagttgagagtcaaggtgtcttcttctggcctccatgggctagtgctacgcgcacatgaggcacatatatacatgcaggcaaacatccagatacataaaataattttcaaatatcaattttaaagggtatatcaggcagcttttataagggttacccaattgactgatcatagcttaaatgttgcttttcttttccaggtgctttttgaccatgtaggttgcttaaagaaatatgacactgtgttggatattctaagagacttctttgagctcaggcttaaatattatggattaagaaaagaatggct

SEQ ID NO: 20534 - DNA, 1225 bp, Mus musculus
agctaaagttaaaaaaaaaagattgcaacctcattctctttattttatatgtgtgaatataaactcaaaattgacttgcacatatgtatgtgcattccatgagaatgcccgggaaggtcagaagaagtcatcagattcctagttgtagtcttctgtatgggtgaggacacctaaatgctggtcctattcaagactaacaagtactttttaaaccatctcttcagtcacctcacagttgattattggtcttattttccattgtttgtttgcttaagtttcccattaatttattttaacactcccttctttaatttctgtacaggtgaaaggattccgcagttacgtggatttgtatttgaaggataaggtagatgaaactgggaattcactgaaggtgatacatgaacaggtcaatccccggtgggaagtgtgcttaacaatgagcgagagaggcttccagcagattagcttcgtcaacagcattgcgacttctaaggtaaatcttaagaaatcttactagttttcttttactatatagtataaaatggtttagacctttgtctaaattatgttatgatctttttttctttagggcggcagacatgtcgattatgtagctgatcagattgtgagcaaactcgttgatgtggtgaaaaagaagaacaagggcggggttgcagtgaaggctcatcaggtgtgtacctatcaactttcccttttctaaacgtgggaaggtgaaaggggctgcatgtagcttagtataggaacttgcttcacatacacaaggacataaaagatatttccgtgactatctcgtcttttattacaggtgaaaaatcacatgtggatttttgtaaatgccttaattgaaaacccaacctttgactctcaaacaaaagaaaacatgactttacaagccaagagctttggatcaacatgtcaattaagtgaaaagttcatcaaagctgtgagtacttacttacatggaaattaaaatagaaatgtcttgtctttcattatcctctgccctatagaagcaaagattgcctgctgaagtatacttcttcagaacttctgtcttattttgttattgctgtgaagagacaccatgaccacattaactttttctccaaaaaagccatggtcaggcctgtcacaggaatttcgtgctcctggtaccaacttgttaggtttctggtgctcagacaaaacaccatgaccaaaa

SEQ ID NO: 20535 - DNA, 1207 bp, Mus musculus
ggaaagtttgtttattatggggaatatttttcctttttatggcttttccgtgtgctttattgaatggaaacactaaaggaagtaaaagcatacaggtgattgatcttcttggtattatttcctgatttttgtcctttctggtagtataattttcttttttgtttttgttttgttttttggtttttcgagacagggtttctctgtatccttggccgtcctggaactcactttgcagaccaggctggccttgaactcagaaatccacctgcctctgcctcccaaatgctgggattaaaggcgtgcaccaccacgcccagctttttctaatatttttaaatttcatgttttgttcagcgttatcagtgtctacccaggtgttagaaaagggtttctgttcccaacgctgcatggtggaaaagactgatctagctagcttcagagggagtaacggtgaaagactcttgtagatttatgtagtttattttaattattaagcattaacttaacatttgttgtataatgcaactttgtatcttttctcagagaaaataatgtaattagcatctggaataatgggaaaggaatccctgttgttgaacacaaagttgagaaaatatatgtcccagctctcatatttggacaactcctgacctccagtaactatgacgacgatgagaagaaagtgacaggtagaggactgggagaaaggaatacttgtggttcagggaaaaaaaaaaaaaccacatcctttaagctgggcgtggtggcgcaagcctttaatcccagcacttacttggaaggcagatgcaggcagatttctgagtttgcgaggccagcctggtctacacagtgagttccaggacagccagggttacacagagaaaccctgtctcagaaaaccaaaaaaaaaaaaaaacaaaatcctttaactcactatctgaggtgtaaggattccagatgggattagtgggctagagagatggctcagtgattaagagaattggctccaccccaagaggactctggttcaactgtgagcatcttagacttgtaactacatctgatgtcttcttctaacctctgtgggaccaggcatgcatatggtacactaacatacatacagacaaaacaattaaagtttaatacagatcttaatatagggataagctaaatatagtgaccaggaggcaaaggttcactgtgtagc

SEQ ID NO: 20536 - DNA, 1194 bp, Mus musculus
aaataaataattaattcttttttaaaaaattttttattcatttatttatttatttatatgtgtacaccatagctgtcttcagacactccagaagagggcatcagatttttgttacagatggttgtgagccaccatgtggttgctgggaaatgaactcaggacatttagaagagcagttggcactcttaaccgctgagccatttcaccagccctaaaaatttttttaaaaaactgagaatgtagcttggtggtagtatatgtgcagtccagacacaggactacaaaaacacgaaacttagcagatgtggtgagtggcatacacacttcattccatcaggcagaggcagatagatctttgtgagttccaggccaattagaattatgtggtgagaccctgtctctcaaaacaaggcaaatttacatatttgctctgaaccatttcaaaataatttgtagacatgacacttgatcatgcagtcatggttgataaagtgcaggacgtcagccagcatttgcagtaatgttctggtcatcagaaagatgttatttcttttttgatgatgctattgggaggggttggttgttcgagacagcgtttctctggctgtcctggaactcactctaaaccagtctggccttgaacttagagatcttcctgcctctgcctcccaagtgctggaattaaaggcgtgcgccgccactgctagtgaaacagcaagccagcagccagtagtagagagtaatttggtatttctggttttaaatgttagtgttcctttgtgggtagcaggatgcctggttcacattttttattaccttgatcagtgctgatgcagactgtttaaggctcctgtagggtgtatgtaattgatgaatgcacatacagacttgaaaacaatcttttcaagaatgctgacctagtttcaactgatagtttttgttttgttttgtttttgtttcttacagataatattaaaccagtattatttgtattctgagaattaacccaaaataactaagtcctagtaactgggctgagcacatgaatcagtttagagaacttggtgttcttgtacaggcacctgagtgtggctgccagcatccacattgggattggggagtccaatgcctctaagctatgtgggcacttgtactcatgtgcaaataggtacatacacctattaaaaataaaaa

SEQ ID NO: 20537 - DNA, 1346 bp, Mus musculus
tgttgccttgttttatgtgacctaaaacttttttaaatgaaaaaaaaatgtggttttttttttggttttaatggtgttatgtggtctgtgtattaattatttacttttccgttgatacaacatgaaggtctttgaaccctcagcatcatagcctaatgccagccgctcacctttcttagctctcaacgtctgaaacctcagagctgagattaatcaagacacccatcattctctgagaactaccttggctgctgcagaatcgactcttccaaatacctgccttcagctcacgtggtgctcaccaaagccatagctttaaacccttccagcccatccacagctttcccagtccctgtcttgtgtacttacacagagtgccctcttgaaatcatgagggggtctcttcactcaccctttctatgtcccatgtcagacaccaggagttctcttacagggtagggtgtagccagaaactggtgagacacagatcacagagatgcctctgggggcactgggggtgggggagcagggggagtacagttgttctttctgtggattccttgttggtgagagctgcgcctgcttatctagagtgctgttcagtgtagtcgatctgggatgtgttctgggaaattcatcctttttgtacaggggaaagaaacacttttttttaccagattggctttccaaagacacgatagatggcagagcttaaggaatggaatgttcttataatggactacagacttcaaagtgattggcccattccaaaaggaaaatgggaatgctgttcatccatgtgagcatacttcacagtgatgaaaacctcaagactcgagatcccatagatcagagccgaacctacttttttgataacccctgtagtggtcttagagactagaaacaagatagtttgtagtgtgtgctccctaaaatctagaatagatttttactgaatagtggtatatatgatggtatatgtttcttaaaggtccaaacataataaagaaattaagacaaaggtctcagtgtttttattgcactgtggaagataatatgtagacataatttggtcactatgatacagggacatcatggaatgatccatggtcataagatgtcacttttaggaaccttgcctcatgaactgtcagtatcaataggactgaagaaatctcagtagtgtgcaagaagtgtggccagtaagtgaatagagcctgtgctcatggagagacggcacctgcacccacacttgagtaactgccggtatagacacagcattgagcagttccctgagaggaagcctgatgtgtggggtcatccttgggccagtttttctgtgattc

SEQ ID NO: 20538 - DNA, 2605 bp, Mus musculus
tatgaacttaaaagttaaaattttaaaaaggtaatccaatcactggtcatattatttgaagaccttttaaaagcaaaaattagaaatgattaaaagaatacatgggagttcgatcggtagcgggagcggagagcggaccccagagagccctgagagccccaccgccgccaccggcctagtcaccatcacacccgggaggagccgcagccgtttccgccggccccagtcaccatcaccgcaatcatgagcagcgaggcagagacccagcagccgcccgccgccctcagcgccgccgacaccaagcccggctccacggacagcggcaggggtagtggcgctcatatcggcggcgcccaccagcggggacaagaaggtcatcgcaacgaaggttttggggacagtcaaatggttcaatataaggaacggatacagtttcatcaacaggaatgacaccaaggaagacgtatttgtacaccagactgccaaaaagaagaataaccccaggaagtaccttcgcagtgtaggcgatggagagactgtggagtttgatgttgttgaaggagaaaagggtgcggaggcagcaaaagttacaggccctggtggagttccagttcaaggcagtaaatacgcagcagaccgtaaccattatagacgttatccacgtcgtaggggtcctccacgcaattaccagcaaaattaccagaatagtgagagtggagaaaagaacgagggatcggaaagcgctcctgaaggccaggcccaacaatgccagccctatcgcaggcgaaggttcccaccttactacatgcggagaccctatgcgcgtcgaccacagtattccaacccccctgtgcaaggagaagtgatggagggtgctgacaaccagggtgcaggagagcaaggtagaccagtgagacagagtatgtatcggggttacagaccacgattcagaaggggccctcctcgccaaagacagcctagagaggttggcaatgaagaggacaaagaaaatcaaagagatgagacccaaggtcagcagccacctcaacgtcggtatcgccgcaacttcaattaccgacgcagacgcccagagaaccctaaaccacaagatggcaaagagacaaaagcagccgatccaccagctgagaatttgtccgctcccaaggctgagcagggcggggggctgagtaaatgccgacttaccatctctaccatcatccggtttggtcatccaacaagaagaaatgaatataaaattccagcaataagaaatgaacaaagattggagctgaagaccttaagtgcttgcttttggcccgctgaccagataacattagaactatctgcattatctatgcagaatggggtttttattatttttacctaaaaatgtctctttttggtaatgacaaacgtggttttttttttcttttttaattttttattaggtatttagctcatttacatttcctttttttccattttttattaggtatttagctcatttacatttccaatgctataccaaaagtcccccatacccacccacccccactcccctacccacccactccccctttttggccctggcgttcccctgtactggggcatacaaagtttacgtgtccaatgggcctctctttccagtgatggccgattaggccatcttttgttacatatgcagctagagtcaagagctccggggtactggttagttcataatgttgttccacctatagggttgcagatccctttagctccttgggttctttctctagctcctccattgggagccctgtgatccatccattagctgactgtgagcatccacttctgtgtttgctaggccccggcatagtctcacaagagatagctacatctgggtcctttcaataaaatcttgctagggtatgcaatggtgtcagcggacaaacgtgttttttaagaaaaaaaaaaaggcctggtttttctcaatatacctttaacggtttttaaattgtttcacatctggtcaagttgagatttttaagaacttcatttttaatttgtaataaagtttacaacttgattttttcaaaaaagtcaacaaactgcaagcacctgttaataaaggtcttaaataaaaaaaaatacatggaaaaatattcaacaccattagccgtgagaaaataccaataaaaagttctttgagccgggcgtggtggcgcacacctttaatcccagcactcaggaggcagaggcaggtggatttctgagttcgaggccagcctggtctacaaagtgagttccaggacagccagggctatacagagaaaccctgtctcgaaaaaaaccaaaaaaaaaaaaaaaaaaaaaagttctttgaaattctaccacattcctgtcaagaacagctgtcatcaagaaaacaaacaataacaagtgctggtgagaatacagggggagggaggaagaaaacctttacacacagttaatgggactgtaaattagtacaagctgtatggaaattagcttgtaagatctttaaaaaaaaaaacctaaaattagaaccaccatatgagcaatctaatcgactatgcaatacataaaacaaagaagcagcttc

SEQ ID NO: 20539 - DNA, 1750 bp, Mus musculus
aggcgtttaagaaggtgggtctgctgtggagagagcacgttgtatggtctaccaagggagagggtgcaaacgtcaagggagtccgtgttgatggcatggcctcttagatgctgcatccttttgtccttgcagaaatttgcctgcaatggtactgtaattgagcatccagaatatggagaagtaattcagctacagggtgaccagcgcaagaacatatgccagttcctgatagaggtgagtttaggccgccctcaatgcattatgggtttcctgaatttctaatccttacagttgagcttttaaatacatgtagacattcccactttcaaacagtacttgggggtggcatagggaagttttagtaacagtggtcaattgaaccattgtgtctactgggatagactgaagtactcttctttattgggactccttgcaaggtgtatatgggagaatctgttgacgtcatgtaacctgtccctctcccttgtcctctttttgcagattgggctggctaaggacgatcagctgaaggttcatgggttttaagtgcttgtggctctctgaagcttaagtgaggatttccttgcaatgagtagaatttcccttctgtcccttgtcacaagtttaaaaacctcacagcttgtataatgtaatcatttggggtccgcttttaacttggactagtgtaactccttcatgcaataaactgaaaagagccatgctgtgtagtcttgaagtccctcatttaaacaggttgagcagtaagccctggcagtgtccaccctggaacaaagcaatgacaaggtttcagccaagccaagaaccccaagatcacaggaggctatgtctgaccagaggctccttggggctccctggacagagtcccctgccctaggagagtgtcaccacttgaacagaatgggtaacactgccccagctatgtcactagagggagtctctggccctggtatctgaccaggtagaattcagaaagggctacctttccagagaagtcatggacatttagttcaccaccagggtggtcttttgaagcagatctatcctagccgggaggtgttgcgacatgaagggtgaggccagcccggaacaaatgccaagctggtgccattggctgtgtggctagctgtagaggcttcaactcagtacgagccagtgccatgtgaaggaacaagctggtcttttggttttctttccccctccagtttcaatgttatgtaatgtatttaaatccttatttaaataaagcttgttttcagaaacgcctgatgtccagattgcacttggtcaagctacatacagagagggatcacaaagacaggctcagttgggaagcatttaccagagctgtgcccatcacttatcaacacagatggaattcattctggagctgatatgcttacaaagcagctggagccctgtggctgttgggctatcttagtaacgtgggggggggggctgctttgtaacactcagcttgaattctagggcaggattaaactagccatgttggattttgtagtgaatttgatcctggggacctatatgatagagaactggctctaaaaggtggccgcctgaccttgcaaagtattgaagtgtagggagaatgaggatccccaaatgatggtcatcctgggtcagcatttgggaagtataaagctgcctgtagtctagtccttgtgtttagtcctgcgttggaaatcctgagggcataaggcaagcaaagttg

SEQ ID NO: 20540 - DNA, 2254 bp, Mus musculus
actttgcatacgatttacatactatttacatagttgcctccagtcccccttggctagaactgctgcctcagtgtttatttatgcaaaatctgcttacaagtccagctgtccgtccaccttcttccttggggggctgaactgggaatcagggttgggctatacacacctttgtacctcaacttcctatctctgccctatccttcatcccgaattcctctacccaccaagactccccaaccccgcagcagcaaacaaacatggggggcgggatcctggagcagcagcccagagtgccgacccaggactctcagaggctggaggaggacagggccactcactctcccagtgccagggaggaagaggggccttctggggccacctaggcctggaacgaaggcctctgccagcaagggccacagttggaccattcccccgggtgagtgtggggctcctgcagggtggtaggggcgggtcagggttccctcagcccatctagaaaccccagctttggggagctacgtgctctgagggcaggcctttccggcactccctctgaggagctgtctgggaaatcagatgacttagcatcggatcttcttttgtgttagctcctttcgtcttcatggccctgtgggtgggtacatgtgattgtgcaccatttattagaagaggaacccgaagttcagagatctgagatgacttggccaaggtcatactaggagcagatctgagcccgtgtctatgagttctgaacccctggcctggtctcactgctgtccgcacctcctgctcccatctttgcgttccacctgaagttttggcagcctccttcagtcgttctgatgcccccacccccgttttggggtgcaccaatgggtggaacatccctggctgcggcacagtaagatggcgcaggttgtaagctgggtcagcacttccgtggctgaccacgggggacctgagtgagggccagtggtggttttctgtcgtctcctctgtcagggccgactgggtttgagggtggtctggctcctgactcccatccacccccttctcttcccgggcttgctgtttcccagcagccggaagaagccccacagacagcttgagaccccctccttctgctgcctggccaagtcccacccttcctttctttcctctgaaacaggaccctaccccccgccccccccatgtctgccagaagttctccctctcctgtcctggtagacctgtctcctcttgtaggacaggctgaaagaaccccggtccctcattctgaaactggggccaaagctgtggctgctggaaccccaggggtggaagcaaactgggcagattggctggctaccagatccagctctgagatgggtgtgagtgggcgtgtccctagggtaggcagttattgggggggggggggtcctctctatcccttgaacctctcacgtaaagggacttccccagtcctggttggctttttgaacctggtccttttcgctcttttttacccttctccgtttctattactgtgtgtgacgtaaagtgtatctgcgtgagggttgtgtccctctgcccagtgctgtctctgtgtcctgtggcctgtgagtttccttctagagttctgccttcctccacatccgtgctcacacagagctgtggcctcagcgcctgccctgcttctgcagcgcttcatagtcttgtagctagtcagcctttgtattgatgtatgtgccaatgtgggaaataaagaacttgtgagatatctgccctgtctcagttgtgttccttagggatcatggtgtgtgtgtgtgtgtgtgtgcctgtgtatgaatgtgtgtgtatgtatgagtgtgtgtgtatgcctgtgtatgagtgtgtgtgtgtgtgtgtgtgtatgtatgagtgtgtgtgtatgcctgtgtatgagtgtgtgtgtgtatgcctgtgtatgagtgtctgtgtgtgtatgtatgagtgtgtgtatatgcctgtgtatgaatgtgtgtgtgtgtgtgtgtaggtatgtgtgtgtgtatgagtgtgtgtgtgtatgcctgtgtatgagtgtgtgtgtatgagtgtgtgtgtatatgcctgtgtatgagtgtgtgtgtatgagtgtgtgtgtgtatgcctgtgtatgagtatgtgtgtgtgtatgcctgtgtatgagtgtgtgtgtgtatgcctgtgtatgagtgtgtgtgtgtgtatgtatgagtgtgtgtatatgcctgtgtatgagtgtctgtgtgtg

SEQ ID NO: 20541 - DNA, 1113 bp, Mus musculus
attattatggactaggttttactccgtgttttaggctggcctgaaattcattatgtagcccaggctggcctcacgtctgtggcttttccccagccttagtgaaatcatcatcccagtgtcattttttttttttttaacactggggacagaacctattgcacctatgagtgctagggcaaggctaccattgaaccacatccctagccctggttttgccgtctgttacattgagatagtctcgctaaactgtccaggctagcctttaacagcctggagtgcagacatgccttgaatttaggatcttcccatattagccccctatagacctgcacagctggagttggggtgggggtcctccattatatttgccccttgcttggctaggccatgctcctccagctacttctaagcaaatgaggaaaaaggccatttttttctggggtcgtagacagatgtcacaatagcacccctgaacttctgggggaggcaggcctgtcaagcacctgacctcggtgtcctcatgtcccacaggcgctgtttctcacctggaaagctctcaagagcagactgtgggaggagacagaaaagtacctgagccccgggggccggcctggacttcctgctgaacacgcgtgctcccgtgctccagagagttcctccatagggattttgggatggtgtctgttcctgcttttctgtcctgggctggggatccaggctcagcactttctccccgtccccactatggctatggccactaaagctttagactcagcctgtgtccctgcacagcaattctctctgctgactccagctgcctggacccccacccccacccccacccaggccttcctttgttttttttcgggggccagttttctcacttgacctcctgggatatccaagacacaggttcaaggccccaacccctgacacccaaagcttcttttgaaaagttcagggaccttcttgggggtcggtggggagagcggagacattaagtgcccctgccaggacctgcccttcccttcaggatgctaagtttttgctttgaccctcccaaggggggagctcttggtgacgctccctccctctcacatcactccacactgg

SEQ ID NO: 20542 - DNA, 1207 bp, Mus musculus
gaacctcctggaactggagttagatatggctgggagccaccacgtaggtgctaggaatggaccctgtgtcctctgcaggagcagtatgtgctcttaatggcagaaccattcctccagcccctaattctttttttaaagactggaaatatagctcagtggtaaagtgcttgctgaacaaatatgtggccctacgtttacttcctagaactgtacttcaataaatacatattctgctgcagacatttttgtaatgataggtgtcagacatgagtcttttaaaatcaaatcatgatcttggttgtcatagagttggatgagctaggagggcctcatgctctcaatgggatgatacagacaagggcgatgatggtcccctaagaccctggttaggttcagaatcatgagtgatgccctgtactttggagaaacatgagggagcttggagccacaccttcaaggcttgccttgctcttcagggtcccagtaaaatctcctgtagctcagtcctatgtcatttggctttcaggtgacctggaataccagatgtccacaacggccagagccaagcgggtgcgggaggccatgtgtccaggggtctcaggcgaggacagttctctactgctggccacccaggtggaggggcagacaaccaatctgcagcgcctggccgaaccatcccagttgctcaagtcggccatcgtccatctcatcaactaccaggatgatgcagagctggccacccgggctctgcctgagctcaccaagctgctcaacgatgaggacccggtctgtgaagggcctggaggtggggtgggatggagctggctgtcctcagagggaggggtcatctaaggatgccacggcctttgccttccttccctctgtggaggaggagcctgaggctatctgctcaaggtctcacacacttcctccaggtagtggtgaccaaggcggctatgatcgtgaaccagctgtccaagaaggaggcatcccgccgggctctaatgggctcgccccagctggtggcggcggtggtgcggactatgcagaacaccagtgacctggatactgcccggtgtaccaccagcatcctgcacaacctctctcaccaccgagagggcttgctcgccatattcaagtctggaggcatccctgccctagtccgaatgctcaggtacttgtttctcggctgcatgggagccagggg

SEQ ID NO: 20543 - DNA, 6024 bp, Mus musculus
cgacagtggcaagatgtggaatctttaccgcttattgacaattactgttttttccagatgtctgtggtcaattcaaacttttatcagacagcatcatgctgtcccaagagttactccttagaaaatgaagaagcagtaagaaaaattgccggtcaggtgtctgatgagatccttgaaagcttgcctccagaagtcctaagcatcgaaggagcagccatttgctattacagagatgatgtcttcattattggaggctggaaaaacagtgatgatattgacaaacagtacaggaaagaggcctaccgatactgtgctgagagaaagaggtggatgctccttcctccaatgcctcagccccgctgcagggccactgcttgccatgtcaggatcccttaccggtacttacatggcacacagagataccccatgcctcaaaatttaatgtggcagaaggaccgcatccgacagatgcaagagatacatcggcacgccctgaacatgcggagagtgccaagttcccagattgaatgctgagctcaccagcgtttgcagctgaaaactgttctccctgttctgtgaggcggggatgcctggactgttacttggaaaagtatgtcaatgacttattttctacttggacttattaccctatatacaagaagtatagttaaaaaacaaatagaaactcagttcaatgtggtaatttttgttaggttgcagtcctgactttggtttgtgtttgtgtgctggtaaataagatcttattaaagagaagtgggggaaagcaggtctagttacttggccttttttctgccaaccactaactcctttgtcttagggacttacgtggggctctaagcaccagtgttatttgcacatttactttgatgctcctttaagttttttatggattgtttgttttcagtgataccaatttatgcgttaagctctcatctgtaggagagacgtgtgcaatagtgaaactggatctgaaggtaaagcacaatgtttcagcaaggatgatctcagaatggagccctgatgctttgctgtatctgcaaatgctggttttgttcattggaaagggtgacaatgagaagtttgtgagtggcacgtcctctggtttgtttggtttctttcacagctgtttatagacttgaagccatcatcctgagatgatagttgggaaggtattaatgtttacctggttgtctagttgtctaaagagggagttacacaggtgaagagaagtgctcagtgtagctgagaaagcaaatgaacaaacatttgaaacactttgaatggttgtgttgatgaggatgcagtgtgccgtgacaatcaacacaggatgccttcagtttgttttttgctccgctgaatattatatagactcttcatcatttctttctacaagtaaagctttcaaatggcaaggaagtaaccgtttagaaaataccgctaagagaagccatgttatttctggcccctgattgttatattttacctagttgccctagacttctactggaacttagagcctagaatatcaaatctgagtacatagttttggcttttaaaattttaaggctttgacataccacatttaacaggaaactatcaaaatgttacataatcaattcaatgtcatcttgcagaaaaggtttttagtatgtacatatttttattgcattccctaaagtcttttttttttttttttttttttttttgagacatggtctcactatgtagccttggttggcctggaactcactaggtagatcaggctttggccatatatagatcctgagggacaagcttccaaggaccaagaagcagtttcagcagcagctgtttctactccctccagttctctgcttttgttgagctgtgacaatgatgttggacattcacttcctctaattctttatatttattattgttttctagagctgctattttatagttcatgttcatgatcttttaatttttcagttggattaggaatatctttgcgccccattctctcttagtatctgcattctttgttgcatatggcattggaggattaaccattttcttttgagccttgtataggttgacatattgcttttgcactgtttttgataataaattcctactcagtacattggatttttttgttcatatgtagatacttggaatatacaatttcccatttttctaatctggatctaatttgtacttagtctctgaactcccttgtgcggggctttagacttggcactctcacccttaagcttttgtgggtaatcttgatcttgttctgtgactatttcaaattttgatatcatttaattctagatacagtattgataaatattgatatattgatagatgtagaaatattttttctcctgtttttgttttgatgcaaatctcaaattagagagaccttccctctcactttgtatgatctaacctgtattcttgctgattttatctttgatgtttttgttttttgagacaaagtctgttatcttggctgacctggaactctctttgtagaccaggcttgtctggaattcacatagatccacctgcctctgcctgggattaaaggcatgtcctgccatgctgggcttgatggctctttagtacactaatttccattttctacttcttcagtttgttttgtaagtagtagttcatggtgtttagtttgtctttcatgtaaattgactgtatctgggacctttagaaaagagacattagcacctcctcagttactggctcagatgactctcattggggtcgtcctggctcttctttcttttctgattagtcattccttccaacttacctgtagatattttcactcccatcacatctttctaaacactgttaatgctggattggctctgagattgtgtgaatattcttcgtattaagaaaggatttccacattgatatttgatataaccttgatgtgatctattgtaatcagtccaaaaacatcttgcataatttgattcataagagcattcatgaaggctcttctctccttatgtcaatagcttgtacataagcataagttcagctataattttcactgacagccagtgtaatgcagtctttgtttctttagtattcacttcatgttcaaaggttttgtagattggagaacacagttgctttgagcatccatgatgtttgggtcagcactgttccagtggcatagaggcacactccctttttgacactgtagagtcttcatcagatctgtgcagccactattcaaggataatcatacacacaagcaatatatagagcagataggagtacagataattcccaagaagctgcatcactgaaaagtcccatcatgtcttggactttgacctcatgggagtcacattaaggaatagccatttttctgactttatatacactcctgagctttttatgcaagttagcattcaagctaaatctttcaacactcggtgtagagagaagacttctgttttaggtactggagagatggatcagcaattaaaggaacacttgctgcaatgggttcccagggcccacttcattaacgcagctcacaagcctaaagctaccttcaggggatcgggtacctttggtacctgcactcacacgggcatacccacattcagacatacatacacatgtatgcataattaaaagtaagcttttcatttcaaaaaggctcttgttgaagttggttatggcagtatttacctgtaatctcagcatttgggaagatcaggagttctgagccagactagttagcatacatgtcaacaacaaaagtgtaactaataataagaataaaaacacataaataaaaaattaactcctgatagcactgtaaatccaatttttttttctatatgaatgtctttaccttctcacacattctggactattctgaaaaagtttaagtactatcatctgtgcctcccttattccattagagttaactttattatatgatagaatatcagaaacacaaccagaaactttggctgtttactataacactaaatgctcttggattccatactgataacttatttccctggagttaatgctagtgttcttgcctaggataaaggtttttaataactgtattggaaatctgctttaaaaccattttgagactggagtgagtatgggaaactgcaagtccctttccacagaaaggttctattctcccctttccctaactcttttgaaatgttcatccttggatttcttttggttggtcggtctgcagtgctgggaactgagcgcagggccttgtacatgctagggaaacactctaccaactgagttgctcccccagccctttctgtagctcccttcattacaagtctctgaatcctaagaggcactccttagttgtaaactaagtctgtgcaactaacagtctttgaagctctgtgaaggaagcttgcctttctctcagtccacaagtcatttaggatctcatcaggatgccagctttctccgggaaaagattcatgtattttgattttggctttttggtcccagagttgtattttgggacagtcaccattaagttgttattagagccatctttgtgttgtcttttcatttcatggcagacagtatgactcctaacttgattgaaaccactgtctttttggctcagcaggcagcctaggccctggctgaatgaaggggtaagtccttccttgcatgatggtgtgcaggtttcctgactaccaactttctaattttcatatgtgaattcacgtgtgtggcttcaccaccataacttgcctcctaaatacttttaacttgttaggaaggaaagaacctagacttgcttaaatctgttcaaggctgacattctgaaattttaaacggacataacagcatttgtaataataatcgtgcaggtctaatgtggctctttgggaaagaaatttcttttatgaaaacagttttttttaaagccagctttttaaaagcttattcaagtgaacctttgttgtgtagcttttgttttcttagctggaaaaagatttgattacaccaaaaagtaagggtggtccattattgtgagtaaggctaactttccacattataatgggacccttcctatcttcctttcaaactgagaatgtcagtcatgaacttttaagcggtcatcacttgcagctgtttgcatgattagtcttgtgtatcctgagagctttgcttttctgtgccagttcaaaataacatttttgctaagaacatttaaaattaactgatatcagttttgttttgatttacctggttgtgtgtagtatttccaggaccaaaaatttaaaactctcagtctaaaaagccagagagagcatttctgtgctttaatcctgtcacaactagtagacaggttcttgtgcacaccttcccctctctgactgcagcatgtgtgtgtttgaaatagttccttctctgcttcacgattctagtgtcaacactataagtagactggagctgtgttacatattttagctacacagactaataaaatacacaggaccttgaactaaacttatgtgcaaaggccatattagtcacgtttcgtgtctttgaacatgtatggtgttgtgaaacgaatattcttctacactagaaaaatccggtgcttcaaccttagaatatttgagcagcaattcagtctgttcttagccgtcaaaccttttggcacagctcatcatctgttactttcttgagaaaaatcgattttgttgttttacttacagcatatgttctggtgattgaaaaccaaacagttatggagggttgtaatacaacaatagtatgtttacaaagtggtcttttgctgcaaggacttcacttagccaaattactgctcactgcaaccctcagagcttcccgcttactctctgacccttgctaggagggcgggaccttgaagcacctgttaatcttccccctcctgcttcctgcacttgtgaaattcaatgcttgctaggtgtttga

SEQ ID NO: 20544 - DNA, 1766 bp, Mus musculus
gtgtgtgtgtgtgtctgtgtctgtgtgtctgtgtctgtgtctgtgtgtgtgtgtgtgtgtctgtgtgtgtgtgttgttttatggttttcttatctgcccctattgctgagggttaactcctgggaaggccttgtgcctggtaggcaaacatctcaccacagagctacatcctcaaccctgtgtctacattttgtacgtcaggaagaagttccctcccattttccgacctctgccatggcttttgaaactaataacagacatcttgactccattttagggcactaccttgaccagaagaggctgaagcaagggctgtatcgtcacccctgggatgacatttcctatgttcttccagaacacatgagcatgtaactgagccaggagccctactgtaggaaaaggaagacaaaaaccccctcctcaacaatatagtggacagatagctggaagcagagtccagtataggctgggcctggagcggaaatagccattgatgtgcaggcatggaaggccgacacccacaggcccattcagtccacacaaagaagcttagtattttttttatatatctctctatatataagcatagaaatttaaaaccaagccaatacctgtgacatttgctctgctacctgctgtatctattatatggaaaagtctcagcaagcactgtcagaatagtgttcttctagggccttatgatgttgctttcttttttttaattagttaaaaaatttatttttcctctagaggaagggaatgcaagttttaagattttaagatactatctgtaggaccactgtctggtatcccatttcccgttcagcttcacacaacgtgaagaacactgtattaatctgatttttaaggatcttttttttttctatgttatgtgttaagggtttatttagtatcccactgaaatgttccatgttacagaccagtgtctacttatgtcaaggggaggagggctgggaccattgtatccttagccattgttgcacatgtggtgtagtaacttaaatgtcaagttgtaacatacaagtgtttaaaatggaaacgcaaagcaaaaagctgtgaaatgtcttgtgtcagtgtcctctgtgttcatgcagccgacttgtctgttactgaagtgtgggtccaaagactcacagctgttctgcatctgtaacccacaaagattctgggcagctgccacctcagtctcttctctgtgttatctatcatgtttgctttaaataaactagatagtaacaatggcgtgatgctcttttatgttccgtgtcctctgcttttgggacaaagctgtcctggaacttgtagacctctgcgtgcaccagctatgcccagctcttggctttatcattttaaaatctgcctttgcctcttgaaaaggaagataatgaaaaccccagtatgtattcagtgcccccaacccctcaaaggatataaaagccctaaaggttaggcttggtggcacctttaattccagcacttggaaggcagggataggcagatcagagttcaaggccagcctagtgtatgtggtaccttctaggctttaggatatagagagcctgacttcaaacacagaaaagactgatctggagaaggggcttggggggtcagagcatttgctgctcatcctggggtgctgagcttagttcccagaaccacagtgggttgtctacaaccatctgtaactccaactgcgggggatcctacaccggtggcctcgtgtgcacataccctgcacatagtta

SEQ ID NO: 20545 - DNA, 1482 bp, Mus musculus
atccgaaaacctgcctcattcatgaccagcatctgtgatgagcgagggcaggagctcatttatgcgggcatgcccatcaccgaggtcttcaaggaggagatgggcatcggtggtgtcctcggcctcctctggttccagagaaggtgagacacatgggcaggggtgatagggcactgggcttagggcagattcactacaattttattttgagttagcttttgattgttgcacattcagaaaccttttatgggctggaaagatggcttggtggttagtaacatgctctacggcgtttaataactgcagccttgcacaggaatcaagaagggtttggcttgggattggtggtggtagtatcaggctacggaggaaagtgtgtccttgtcattgtagctcctggatctcgttccaactctgcgcctctgtgtgccctcctttaggttgcccaagtattcctgccagttcattgagatgtgtctgatggtcacagctgatcacgggccagctgtctctggagcccataacaccatcatctgtgctcgggctgggaaggacctggtctccagcctcacctcagggctgctcaccattgtaagtctggccttcctgggaggcagcagctctggaatcatgctgtctaaatgcagcaggatcctaggagcccagggtaaaaaccccaggccagattctgctcagggcatcctgggatggtctgcagggctgggaaagccatccccctcagcagtgttgctttgtctctcctacagggagaccggtttgggggtgccttggatgccgcagcaaagatgttcagtaaagcctttgacagcggcatcattcccatggagttcgtcaacaagatgaagaaggaggggaagctgatcatgggcatcggccatcgagtaaaatcggtaaactgaggcatctgtggaatgagtggtgataggaggcctggagccatggcatcacagttgagagtgcttgcagctcttaaagaggacgtgtgtttagttcccagcacccacatggcagcttacaactataactgtaacaccctcttctggattctggccaccagcaaacaggtggtggacacacataagtgcagacaaaacacagactttcaaaaggagcaagaaacactcatgctcttgactcccggtatgcagagctctggatctatagaccgatgccaaaggcaaggtgactctcccagtcatgctctagattgatggccctcagggttctttctcaggtctttcagctttcagcttcagttttccaatcgaccttgtaggagaaagatcaggaagaagtgtcaattaccttctaccagactgcacttcctgtcacacagatctgagggaccctcagcagccatacggtgtccatcatggttagccatggctgttctgtcattcaagctaagcagcacttgaatgacagaacagccatgggcttgcggggggggggggggggggg

SEQ ID NO: 20546 - DNA, 1201 bp, Mus musculus
ttatcggtacagattggcttctgggtgaagcggaggtggaatggtggccacctaggagatagtgaaagcattttagaaaagtagttttcttcatgcaaagctccagaaagtgacaaaaagaagccattcttgacatctcattggcaaagacgagaccgtcccatccttccattttcctaaagttagtgtgcatggcaagcaccccaccctcacctgaattggtaccaagtgctagtttccagcttttcatcttaagtgaagaacatgccgggtgcggctgtgcgctcctttagtccagcacctgggggacagaggcagggggatctctgagttgaggtcagcctgatctacatagtaagttccagtcctgcagagccacatattgaaactctatctcaaaaaccagtgaaggagatgcaggaggcagggtcacgtggagggtgtgtccctcaggccagaaagggtgtgtctagcagaatgtacttgtgttgagctcagtgaaaggtgagcagctaggtgaaggtgctgcctctgtgtagaaggaaaagcaagggccgtgccccaaggaagccagctaagggtatttagaaacagcccagacccgcaaggcaggcatggtgctgggcacagttgacaagtgggagaggggcaggctgggatgcaggcgatcagaagtgcgcgcttacaggcttctggcaccaggctgccattggcaccgagacttcctctcctgtcaacaggtgatcttccgaaagactggtttgatggtgaaacttttggcacgtgatctgtagtagatgaacagtcttgtcctcacagtacccagcattgggcaagactctcaagcagcctctgctgtgccctgcagtctgggcattttctccaaattgtgaatcacgagcctctttcttttcttgcagggaagaccactgggatccccatccatgtctttggcacagaaactcacatgacggccattgtgggcatggccctgggccaccggcccattcccaaccagccacccacagcagctcacactgccaacttcctccttaatgccagcgggagcacatcggtaggtgccagccttcctcccaccttaaaggaaggacccatcttgccaccctccactcccaccccccactgccctacacaggacacaatgttcctctcctggcatttagggagataagagactaca

SEQ ID NO: 20547 - DNA, 1168 bp, Mus musculus
cagtgccaaactggatcttctttttcctgcagctttgtgatcgtcctccaaaaatgttgaaaggagaggttaaggtgcaaaggggagaagccaagggtaccagggtctccaaagctccggcaaaggcctggaggaaattatgggcaaggagtccagagatgaagggaaggcttagtttgcagcaaaacagctagagcaggtaacagagggacctcctattgttgggatgagaacttgaaggtggaacccattccagggtgggaccacactgagccagctaaggaggttgaggcctgtctttgcttgtcgcctagcagaaggtagcacacagatctccttggggtgaatgctttgtgttagggtttagaaatgagactatagggcttgggtggtcccactcctggatgaggccttctgacccgcccccctgccagttgggcacccttaccagcttcacgctgtctttacttgcaaggcggaggagttctacgtgtgcatctatgctacccgggaaggagactacgtcctgttccaccatgaagggggtgtggatgtgggcgatgtggatgccaaagcccagaagctgcttgtgggtgtggacgaaaagctgaataccgaggacattaagagacacctgttggtccatgcacctgaggacaagaaagagttgagttctgagagggaacggcgtgggcacaaatggggacaagaagtccagtgtgacacgggagaccagtgcactggactcggtacaggagagagaaagcagagtgggcctccctgcttgggagccacgtgtggggggagggtgcgggcttgcaatcagtgtgcagtatgccaacctcatccctcacctccttgcccctgtctggctggtgccttctctgtccctgagcttgacagcttctttccgcctcagtgtttgaagagtgacagcctaggaaacagggttggccgggttggacagtgggggccaaagggtcaggagtggagacatgaggctgggctgtcagcaacagtcagcctgctggaggccagggagtgggaatgggagtggggtgcccagtcctgcactgacgagttaactggccttctttccctctccctcctagagtcctggccagcttcatctctggtctattcaatttctacgaggatctgtacttca

SEQ ID NO: 20548 - DNA, 1543 bp, Mus musculus
catcttcacggggtactatgggaagggcaaacctgtgcccatacatggcagccggaaggggggtgccatgcagatctgcaccatcatctgagggttcacaccgctgtaccactgtaccactgctgtgggtggacacagcaacatgccttccacctgatttttaagattttttttttttttactcaaagctaacgtacctgtaactttttaggagtctataaaataactaccagttccttgtgcccaccctttcttttcctcttaatactcagctctcaacacaggcgggtgggcagaggaagataccattcaggaacctggaccagaggtggtaataaaagggctgggtcattgggcctgcagcagcatctgcccagatgcatccaagaacttgttaaccctcccttagcccctgcccatccaaagctgggcacacgcctcagagctgccacatgctagggacaaacgctactgccacaggaaaacagtggtagcttagagagggctcagatccctgggtgccagttttttaatcactatagcccttgggaaggcttgggctatttactgggcggtaaaaggggtttacctctcacctttggtcattcctaagttcctatctccttcacactgtacctagggtgatggtttcggtcaggccatctccagcagcatgtctctgctgtgtggatggaggccaaggtcagaaagatgccccgagaagctccagctttgctttctgcccagcccatcttgcctgcatggtgcctctgggtctttaaaggagggtggtaggtaccaagaaccagtggaggggaccctgagctggcaagagtaagccccatctcctgctctggcaaagcctggctcctggagtacctcactctgccttctgctcagtaacaggaccttgctaattgggttgtcacccgagaatctgggatgtatgctcctaccctcaccctgtgttgcccacctcagccaccactaagactgatactgaaataaatcatgttaatcccagctgtgtgctatcactcttggccttctatgtccagcccagtcttccctggggttagggctgcgtacattaagaccagctttgtcccacagcttggggccatcggtcctgtctcccttctgctggctgggcacagctgtgacgaggctgggtagggcaacagtgttggctttcatgaagcagaaaggagaggctggcttcagacacatagagaaggtggggattggctggcagccagaaacttggagcacaaagcctttatctgacagctaaggcaaccgaccacatgcaggtggccatgtcccaaagacctctcagcaaggcccagagttcccagcctgggctttgtggggtacttggggaaggcaaccttgctcctcacacccaagagtagacacattcagcagtccctcctgctgctctggttcaaggcctctctctccctagctatctgtgccatcagcacctgcagtccagcttcagagcctcttgtgtctgcctagaacagcaacttagctgagc

SEQ ID NO: 20549 - DNA, 1620 bp, Mus musculus
ctgggtgcaatgccagccttgaggcactgagagttcattcatcttctttagataagggattctgctgtttgatgaaacatcctaccaaaagtgtgtatctcttgcatgagccataccttctccctagaaggtcccacaggccgttactatttatgtctgagtgctgtattaccctgtacttccttctcagttacatggacacagagcagtttgaagaagccgtgcgggactatgaaaaagtgtatcagacggagaaaacaaaaggtacgaggacaaaggggcagagacgtgttgctcgggggggctgtggtcttctcggttgttggtcgcagcacttaggaccattccatttgctcactagcctggaagccagcagttcctgggaggggctcaggcacctgtgttctggctctgtctcctccctgttagtctcacttcctatatattcagaagaaagcaccaaaagagtccctgttgtggttaccaaagtttctaccccttaggcaggcagctgggctgtctgttgatgctgcctttctccctccagaacacaaacagctccttaagaatgcacagctggaactgaagaagagcaagaggaaagattactacaagatcctgggagtggacaagaatgcctctgaggacgagatcaagaaagcttaccggaaacgggccttgatgcaccatccaggtgagcgctggaggaggtgcagcagagcccacagcgcagatgcagtgggcacccaggagatcgctcttcagtgggaaggagggggtgctggactccctgtcctacaggctgtgggaggtgccacattccaaacttggacaataatagactttgttttcctgtgtccctggtttcactgaatcctctagatcggcacagtggggccagtgccgaagttcagaaggaggaggagaagaagtttaaggaagtgggagaggcctttaccatcctctctgatcccaagaaaaagactcgttatgacagtggacaggacttggatgaggagggcatgaatatgggcggtgagttggtttgggcatctacaatgaaaatggtccctgtaccagaaaagcccccattgaagttaccaaggcttctgccctcggggcagctgggttgggacaccccagaggggaggtctacaagtactcagccagcgacataagccaataaataggctgttaaaaaaaaatgagctagggcaggagccatcagaactgttgtgacctggactaaagcgtcagggtctccaggactggtacagtggctttggtaacactgaatttgagccttctcagcacggccccagcattataggagggcagatgcagatggcgttcctagctaggtaagaagcccactcggaggcaggggaagcttcccttctagacttcacccggaagggcacagatcccagaagcagggtcagcaggttctgcctggctgacatggggagaggcttgctaacatctaggctgaaatggaagagcagagtgagcctcagaagtcttctgcatcaggttcctcagatctttctgatttcccccttttttgccctttccttcctaattaccagattttgatgcaaacaacatcttcaaggcatt

SEQ ID NO: 20550 - DNA, 1196 bp, Mus musculus
ggaatggtggtacacgcttataatcccagtgcttgccagaggcaagccgatgtctgtaaattttgtaggctagcttggtctacagagcaagttccaggacagccagggctatacagataaccctgtgtcaaaaacaaaaacaaaaaagaaaagatgatgagacacaaggaatgtattgggctggattggtgggggagagggggtattctcatcagtaagttcttgcctgtcaggtcccaggccctgggtttaatcctcaacactgctaggtacggggagaatgaaaaaagaaaaacatagtaaagatatataggtagtttattttaacaaggcttgttcttgagaatctagtcacctgtggatgaactttgagtactagagccgtgatcaagaaacagtttgactccagatggtgggaatggccaagacattgtacaccacagctgaacgtgtcctctttatttcagtgacattttacgaatggattccaccaatgctgatgctctgtatgtccggggtctttgcctttattacgaagattgtattgagaaggcagtgcagttttttgtacaggctctcaggatggctcctgaccacgagaaggcttgtgtcgcttgtagagtaagttctaagcctggtgttctgcacgtggtggtagagcttcctttcatgtctcatggtacgagtgaggctagggctgcagctcagtggtgaggtgaggtgaggtgtcacgctgtcattcctgtggccctggattccgtccctcctagcaaagtcgggagaaaagaaaataaagagtagaggaagactcacaggaatgtgacagctccacttgtcagtgtgttaaaccttccctgtgggggccgggcatgcaggggcctgtgtcccgccagacagctgggattgaagagagaacggtgagaaagaaagactgagctgaggttttttgcactgaactgaccgtcccttgcttctctccagaatgccaaagcccttaaagccaagaaggaagatgggaataaagcctttaaggaaggaaattacaagctagcatatgaactgtacacagaagccttggggatagatcccaacaacataaaaacaaatgctaaactctactgtaatcggggtacggttaattccaaggtaagtacttgatctggggtgtcagaggtcttcagagatgtgcttagcaa

SEQ ID NO: 20551 - DNA, 1203 bp, Mus musculus
tcaaaactgcccaacccctggcttatggtggccatattttatgtctcctgtcttcctgacaggaagtcaacattaaacaagaaacttgggtcttgaccttttctgttttcttttaaaagatagggtttcaagtctggaaatgcacctcactggacagtgctggcctagcgtgcgtgaggccctcgtctcagtaaagccttctgtggtagtgcacactttggaatcccattacttagacaatggaaactgaaggacaagttcaagaccatctgcagctacataacaagtttaagctagcccaggctacatgagaccttgtctccaaacaaaacaaaaaatgggtctccatgtagcccaggctaactggtctcgtctgtcttggtattggaggggtctatttgtcactaattttatgtgtattgctatgagagtatcagaccttctggaactggagttacagacagctgtgagctgccatgtgagttgctgggaattgaacccaggacctctgaaagagcggccagtgctcttaactgctgagccatctctccagcccgtcaccagctttttaaggaaatgtttaattcttattttccttggagtgggggtttggttttttgaggcagggtttctcagtgtgtccctggctgttctggaatttgtactgtacaccaggctgacctcgaactcacaaagacctgcctgcccctgcctcctgactgctgggattaaaggcttgcaccacaactgtggctccttttgttttgttttttaaatttatgtgtatatgtactcttgtgctttcgtttgtatgagggcagacttgtactggctgtggcagtgatgttggagatcagggttattgcctggaagatcatgtctcctgttctgtcttgcttaaaacagtctctctagtttttttgtctttgagacaagagtctcacatgtctgtgaatgccctggagctggatgtatagagcaagctgccctttgcttctcaagtggacattacactgaccagcaagataggatctcttgcttgcttgctccatactcactctcagctaactgacactccagctactggagagtcttattcccagtccatcttgccttggcagcactgggtttatatatacacactgccatgtctggtttaacatgggttatggaatttgatctcaggtcgtcacacttgtatgg

SEQ ID NO: 20552 - DNA, 1358 bp, Mus musculus
tacacctggtcctgagccactgcatgccgacagtccctgttctcatctgtcctctccaggtcaccatcgtggtccttggcaacaagtgtgacctgcaggagcagcgtcgcgtagaccctgacgtggcccagcactgggccaagtccgagaaggtgaagctatgggaggtgtcggtggctgaccgacgctccctcctagagcctttcatctacctggccagcaagatgacccagccgcagagcaagtctgccttccccctcagccgcaagaacaagggcagcggctccttggatggctgaatagctgcccttcttgcttcaccattccaagcccattccgggatgggtggcgagcacagggtgcataagcaagctgttcttcccagtcggtaggggagtgaccctctaggacaggaagctgggctggcccaggccagtgccacctttgtcctctcttaactccaagaagtgcaagtgaacttgattgttggccctcccttgaccttccataatagttcccacccctcccccagctgaccatattttctccactgtcacctagacacttatgggttagtgtcccttccatctgcctggtgcaggaagcagggccgtcatgccaacgcgcccagtccaggatctgcctcctatcagggatcccaactctgaatttcctgccactaacatacacacagtaccagccttaaaacaaaagactaggtactgtaagcatacatttgtgcgagctggcttagggttggttcctcatcctccaccctgacctttcctctggcctgttcaaggcctggtaaagtcaggctcctgggagtggcatttcctgtttgacctctacccatctcccagttgtttcacttcctcttcctgttccaggagcagaggtcttattggctgaggtagagtggagtgatgactgggctgtcacatgccctgagacttagcaagactcttctcccctgagcgtcagtcttctcgtatgtgagttgacagaagcttggatgtcacctagagccacgggtagcgctgtgacttttctaaagctggtggcttgggcctcctgtgtgtcttctgcccctgctccaccctctttaaggtgctacacctaccggccctggaggctggacggcctctcttaaccaccagggggcaggggtgcactctgctcagtgctgcgagcgagcggctgtctattaacctgcccaacagggtagtgtccatccctcctggttggttttggctagtagctggactttatatttatactctctctgtatttatgcacctgctgctctggtgaaggtgggataagccgcgcccccagcccttctttcttacctcaga

SEQ ID NO: 20553 - DNA, 1200 bp, Mus musculus
ctgcttgcacttggtggagttggaggcctctccagccaacttcttcccagggtgtaccatgcctgctctcaggacagaggaccgaagactccctccaatgctcacacacacacacacacacacacacacacacacacacacacaccgcttcccttacccacagagcaactccatagctagggatactgatggggaggcaagagagagacagcccaccaagctaagggagaaccatccatccaatgtagtctagaaagttattccagttttgctgtaggagactagagatgaaggagataaagaagtggtgttgaggggagatgggggcttatgctgtccacagggataggctggactcgatggggaagggtgtgcagaatcatgcagtggggtgcactgggaggaggtagggaacccccagctccctccccagggcctccctacctcccttcctccctcgctccaggacaaggaaggtcctggatggcatagactgctatagtatctcaacacagtagagaattttagctcaaattgagtcccgaagacagatgtgattctcagggctcctgagtattttgtgactgatccagggctacaacacccggattctaactcacaggctgctgtcctcaaagcccacagacacctgtatcatcagtacagagctgggcatctcaaggctgtcttcctttccctggcacatctgttgcacatgcgcacatatgggtgctggctcatgttcatgaacactggcatgtgtccctgggaaaggtctcaggaataggctacagggtgaggacaggctttgggctgggctgcagtgagtacaactagttggttgtctctgcctccccaggatgagcctctgagacctgaaggtcgggtccaggtgggtcagatctgcctacggtacctcctagtggtgtgaagtctgtcctcctcttgcgcccagctgcagcaggaccagcaggaactgctgtttatccagtcagtaggaactgagccaggccttgggttaagactgtacatgattccccaaggagaccaagactattactgacagtgggcgggggaaaccaagggactggactaagtcatttgcccaaggtttctcaagccgcaagcaggtgacgtatgatcggaatggtcatcctcctgcagccgtaggccccactgcaaaacacctctcctcccagc

SEQ ID NO: 20554 - DNA, 1232 bp, Mus musculus
tcctgactactacgaggttatccgtttccccattggtgaggacccttgtactcactccccagcctaagcccccagtcttgacagggtagcctgactcctgtctgcatgtaccatggtgggcagccccagttacagcccttcacctcttaaagtcatgtgccttctctctcgtgacccagacctgaagaccatgacagaacggttgcgcagtcgctactatgtgacccggaagctcttcgtagctgacctgcagcgggtcatcgccaactgccgggagtacaatcccccagacagcgaatactgtcgctgcgccagtgccctggagaagttcttctacttcaagctcaaagagggagggctcatcgacaagtagcccccagctgggatccgcaacatccacctccatctcctcagatccgtttgggggctcccggccccctctcccggactcagctggagaaactccagccagggaccccagatcttacagactttctggccagcaggcactcactcccaagccagcagctctctttccaccttccttgcatcccaccttggggagacgtctggtctggggccagcccgttgtagaatgtctggtggccagggcatgaactgttggtccttatagagccatgcaggctgagcatcctgagcctggtccccatgcctgtttcccagggccaggactattcagtgagtagccttcacatggaaacagcccagactggaggaaccatgaggggccttggcttatcctacactgttgtctatctgtccctccaggattgggggcaggaggaccattcattccttggcattaatccctcggagggaacaataaagctttttttttcccctgtgtgattgttttttggggggggggtccggctttagacttagcaggctgacctttgcttctcgagtcctgactcttctaacctgaaagcctaacttcaggctacactggtgccactgacccctgcaatatatagtggggtgatggacctggctgactgccgtccctcacctcctctgcttcaataacttccagcctgtctcccctgcaaagggagagcaagagcttgtccttaatgcctgcctatttcctgactcctggtccaggaaacaggcagccaaggtcagcccctccaggccttaagctcagcccagatggacagggttactgccaactgaaaacagatgaggaaatagggaacccaggagca

SEQ ID NO: 20555 - DNA, 1196 bp, Mus musculus
tgcgcttgggatgcagacagcatcagggaactgaaccttccccctccaggccaatgaaacctgcaagtgtaatggctggaaaaaccccaagccccccaccgcaccccgcatggacctccagcagccagctgccaacctgagcgagttgtgccgtagctgtgagcaccctttgggtaaggcaggcaccacctttggagctggggcggagggcaggagccaggtcctgtttgaacagggtgacataagtaccacagagcttcttggagaccttctaaggaaatattgggtagggaataaatgtgaatgtcccatggaaggaaaaaaggagatctgccttggtagcaggtagctaccaagggctgatgggagaactgagaacactgggtctccctgtctgtcaagaattggagaatcaagggtgtgtcactggctagttagaggaggtacaggaatcaagccccgtggagctcttctgttcttcccagccctaatgtaaccatcttgcagcggaccatgtgtcccacctggagaatgtgtcagaggacgagattaaccggctcttgggaatggtagtagatgtagaaaatctgttcatgtctgttcacaaggaagaggacacagacaccaaacaagtctatttctacctcttcaaggtgagttctcatggagtaaagatggtgaagctttggtgtgtgttggggatcctgctctctgagctctgctactcctgtttctgcccatccctcttccttacagctcttgcggaagtgcattctgcagatgacacggccagtggtggaggggtctctaggcagccccccatttgagaagcctaacattgaacaggtagggcgggcatgtagcaagattaaaggcgacttaagagggtggagagtctggtttatttcctcaagctgagaacaggggagaggttcaaggaagggacatggtgtttgctgacctcagagtgggtgtggaagttggaagggtcagaggttctcttcacagaatccctcctatttgacatgcctctgttggctgtccacacctcctcctgattttgtcccctccttactcctcagggtgtactgaactttgtgcagtacaaatttagccacctggccccccgagagcgccagacaatgtttgagctctcaaagatgttcctgctctgccttaactactggaagctggag

SEQ ID NO: 20556 - DNA, 1738 bp, Mus musculus
attttttaaataaaattaactggtaaaatcgtctgactcccagatgcaaaactttctaatgcctggaccagtctaagtgttattctccctgcccatgtcagagccttccattgccatgtcttcccccataggactttagctcatttgcctcaggaatccttctgtctatgagttcaaatcctggcaatgccggttgtcactcgggttttgggcaagttctctgcttcagtttctagggacacagtatacctggcacacaagccctccagtattctggctgtcactgagtaggggagagtgttagggtgacctcaaaacctacttccccttctctccctaacagctaagaagcttcccaagaatgagccccagaatgcggctggggctccgggccgaaccagaggtgtggatctgcaggagagcaacccagccagccggagccagtgctgcagcaactgagcccccttacctgccactgcccccactcctccaccacaatgacccgactggaatctactctaaccaatcgcacttaacaactcgggccaccactgggggcaggggaagggtccatcaagaattctccgcataactttgatcctaggccggagggagttattccacctgcacctttctgtacaaatactaattcaattttaagtcttaagtcacttttttaatatatatgatcttctgctcttcccaggtccctttctcccgctcccccacttgccctttgctggtagtagccatgctcctgtgctcctcatccgtggggacagggcttggagcagtcaccctttcttcccttcttgctggagagcggactcagcaagagcacccacatcttaacttgttgggagcgtcttaggctggggcagtgggcaggccctgagctggggaagggacaggctgctcttccctcagctggctgtcaatcaggctgcagcctcctccccaactgactcccagctgggagagaaaccgcagcattacttaagcatcattattgacagccggacacccatggcccaggatccctccacccttggtcactctgacctctggctctgagccctgttctgaccaaatcacgatgatgagtatttgggggtgggtgggtaaggggggggagtgggagggatggaaccaactttttctgtattttgtattgtatgttttcttcaccatgtaaccaatcagtatcttgtcaatatagtcagccgatcgatcgacctcacgcttgtcttcctcgtccttctctggcagctgatcaggccatacgtagcctctctgtttttcctgaagttaatttaaatgaatcatccaatctcattaaatggctctactccctgtgtgtgagaggatgctggtggtcatggtaaccaaaagaaagaagccctgctgttggtagttctgatggtggaagaggataggactgacctggggctgacatctgtctccccccagcttacattaaaggatatgcaacctgtatttgaagattgttggtgtctgaagtgacctgtgagggttttttgataggacctaattaggactcagaccttttttttttttttaaatatctcctctccctgacgaggaacaccgagtactggtcgtaaggccggtgctacagcccatcactaccactgtccttcgtgacacctccatgccaggttcaacactgtccatcctggttcagaccatcagctgattctgaatggcaacagctagg

SEQ ID NO: 20557 - DNA, 1183 bp, Mus musculus
gggctggaagtctagcggcaagagcagttacccaggtcctcagggaggcacctgttgacagtctcattctaactccctatttctgatttctccctgcagttggaggcctcccttcccattaagtgcctctttgcatagcaccggccccacccccacgctcactggtactactacagagcagcgcgccatggcgggtcgaggaggtgcagcacgacccaatggaccagctgctggcaacaagatctgtcagtttaagctggtcctcttgggcgagtctgccgtgggcaagtccagcctggtcctccgctttgtcaaggggcagttccatgagtaccaggagagcacaattggaggtgagtgagcaaagcaagtcaggccagaggggtctggaggaaggctgcacacgcagaaaccggacctgtctggcctgggaacacctttttgtcaatgggccctggagttgaatccagcagtcagtcttcatgcttcgtcccaaaaagcaagagtgctaagaattacctagggattgaaaactggcttcctgctctggtctggcctctttattagttgtgtggatgtgaggtcttttttttttttttttcctacagggcagtatatatgtccattcctctgctgctgacctttgttctttctctgattccccattggtcagcatttaggatgtgaataagctctggactcagtctctcacgtccgtagtcagtgtgaacctcaagaggccagggccacccttggttttgagtcatccttcttctctgctctcttggttggtaggagatttccaggcagctggaaacagaataagccatgtcagcagtcttctcactgcctcctcagctctgtcaggagctagagagggggaagtgcgttggcagtccaggctcctcagtgggctggggggggggggggagtggtaacaaggaaaaacagcttcccacagaactgtcataatcctcggctgggtccagggtatggggaaccctacctgtctacctgtctgtcccagctccaggattctccttcaaaacatgtttgccttagcctctcacatctgtagtcagtgtgaacctcaagaggccagagccacccttggacttgagtcctttctctgttctcttggtaggagatttctaggcagcagaattcctgtctcaggtggcat

SEQ ID NO: 20558 - DNA, 1204 bp, Mus musculus
ctgccaagcaggcagccagcactgtacagtgctgggtgccgggtggccgttggggattggggaaatgcagtcagtcagcgggtttcctaggaagcttggaaaactaaaagcaaagtgaaagcctcagggtgatttgttccacagtctcctctgtagtgtctccagaaggaaggaaggggctgcagtgggccgtcagggagaggggcaagcagagagcggttaccactcaggcttgctgagagccctccttggcttcctctcccaaacaagggcagaaccgtgcccaggagaggagcccccaaaaccttatttttatacatgcaagtaaataaacatattttttttacaaaaataacttctgaatttatcagtgttttactgttaaaagaaaatactcctgtgtagtaaattatttattgggagatgagtttttaaaagctgctgtttgccttgccttggttttgtacactgatttttctatgcctggcggtagcctctctgcctcaggtgctggccggatggaggaggtgtgaggcccctccctggcccctcagaagaaagctggaactgccaggggagtccaggcttaagggactcgtccccacctgtcatgcgactgtcccagtaaccctcacgagggtgtggactcgacaaatatctagatatatggtggacatggccccaagtcatggggagagtagagcagcctgggcccccccacccccaaggttctaagctgactttcaagttaggttggagaaaagggtgccaaagaagcgagacttccacatagtttttaagctaccctggatttactgagggtgtacctggacatgggagaggtttttaactggaaagtgtgtcccctatctgcatgctggtctctctctctctctgcccaactcttgcacccaaaaatgaggtgagggcaggtctccacccacctcttgcctgctcacagacccactcgtgagtcgggaaagcctcagctttggggtgtggggctttgtagaagtggaaggagatttgaagtggctatctcctacaacggaaaatatccttttataatttttctttttaacgttttatttcagatacatattttagtgtcgaggcagattagtatatagccaccaaaaaagtattgtgtataaattgaggcagccacaaaattgtgtattttatgttacaataaaggcgtctc

SEQ ID NO: 20559 - DNA, 1672 bp, Mus musculus
gatttttttttttaatttcctacttctgctatctttgggcaatctgggcactttttaaaatagagaaatgagtgagtgtgggtgataaactgttatgtaaagaggagagcacctctgagtctggggatggggctgagagcagaagggagcaaggggaacacctcctgtcctgcccgcctgccctcctttttcagcagctcggggttggttgttagacaagtgcctcctggtgcccatggcatcctgttgccccactctgtgagctgataccccaggctgggaactcctggctctgcactttcaaccttgctaatatccacatagaagctaggactaagcccagaggttcctctttaaattaaaaaaaaaaaaaataagaattaaagggcaaaacacactgacacagcatagcctttccatatcaaggaatactcagttaacagcctctccagcgctgtcttcaggctgatcatctatataaaccctggaatggttgcagatcaaatctgtaaaagagatccgagagctgtggcttggcctctggttcaaacacaaaggctagagagaacctagatatccctgggttttgtttacccagtatgcttgtcggttggaggtgtgaggtaggccaagggcactggaaagcctttgtcatcaccctactccctccccaacccagactccagaccctgtttcagggtcagcctgccctgtgggtgccttactgggcctagggtcaacctgccttcctttcccacttgaccttgctggtagtatgtccccttcccatgtccaaaggccctctgtcctgcttctattgggaatccctgcctcaggaccttgtgtcgagagggattgccttacaggtttgaacctgcctcagactacaggccctcagcaaagctcagggagtatggtccttattctatgcgcttggttcccagggatatctgtaaccacagggcaaaagctgacatatactccaggtctgccctcatatgagtggtgtattcttggcctcccctgagactggcaactgtctgctccccattgggtctcccaggtgaggtggaacacagttcctgcacctactgtggcctccatgtcgcttgcttgcttcgctcactcagcttactggaacactgagtgttcaaggcaagcctttcctgacagaggcatggctagattcagtgactcaaagccacctcattcagctgatcagtgtctgtggaattgtttccttccagttaaccagtgtctgaattaagggcagtgaggacattgtctccaagacgaactgcttgccttgaccaccccagccttctgcttcgagacagttactgctctcccaccccatcaatgttctttagttatacaataagctgaacttataaactgaaagggtatttaggaaggcaaggcttgggcatttttatggctttcaatcctggggacccaggaacaaggtgagggcttctctggggctggtgttgtacctcaggggctctgggaagtctgtgtgcctgggttaaccacccatagtgagcccctggaactgcccactttccctctccttggccccacttggccccagcctcacccagcctgcagactgcttagcctttcagtgcagtggcttgtgttctggccactgcactcagattccaatgta

SEQ ID NO: 20560 - DNA, 1489 bp, Mus musculus
ccccctgctggtgagccaacctgcacagccacatcggggcacagagccctcaggatgcaagggatccctcttcagtccaggagttcttggtcacaccttggaggaggatggtaattggtcctctcctacagggggacactgcttatgaaacacatcccactccactagcagggacagtcaggaagatgctgcggtcatcccttgcccagccctctccagttaatattcaggaaattaggctggccccacctggaccatcccaaaggtcccaggatagccaccaccctcctaagcaccccctcctcgagccctgttggcgcagcatagcatccctgggactgggggggtctcaccgacttgcagcactgggcttccggatcttaggttccctccacccagtctgtaggtgaatgggccttgcccaacactacaccccaaggcagaagttaaaattggcccatctctgagcccttctgcaccctgatcatgatgtcctgaggctgtggtcagtaaggttggttctgctggcaggcctgccttgatctgcccactgagactccctccccaagccccgcactgaccccaggtttcaggagtggtgtcctgggcagggaaggtcatttacaatttgctaagcggaggtgactgttgggctgccagcgcaggtatgggagcgctgcccaggcctgccaagccctcgccggctacctcatgtactgtggatctcagacccttctaatcatgtgctgactcctgcaattcactcactgccttccctgtggaagtgacactaaatcagcaaggcccctcccctcccccacccaggtgctcatgagaactacccccacactcgcccaggcaggaccggcccatggtgaccttgttctgaacccctctgtccttttgtgcccggttacgtgatctttgctctgtttgcagagaggcctgcagcagagctctttgtggggaccctgtccaaggccttctgtccagacatcttatccggaataaagtgtgtttgactctcagaaaagctgcctgtctctgagtgtgtgtgtaggggggtgcggggaggctgtcactctagctctgccctccggagcccatctggtgcccacacccacttcctcctgcctgccagcctttctgcttttcttcctgatctgaggccacagtcgccctggccctggctgggcggtgagtctgtgaaattagcaccttatctcaagtcgcccaggcgccttcccactgccctgagccaagtttgcattgcttgggcagtctctatctcccttcccttccctgtgtatcccaagcagagaagggggcctgggtgtctgccccgacttctctccaagtgcattctccagccctccatggcctggctattttgagccctaaagcctttggcctcggtataagtggaggcttggcaggctcctcagggcagctggagaatgtgacatgctgaagtaggcaagctaagggc

SEQ ID NO: 20561 - DNA, 1148 bp, Mus musculus
cctcactaacttctccgcgaatccggacctctaggtcttcttccttttcccccaccccggggccagatatccccgaagcgctaatgaactatccttgcaaacctaagcacggggttagacgacgcgcaaagaattctatagaaggcaccagacttcgcctctaggtgtcccaaaacactcagaaaaccaatttcctgtgtgtgaaatggggatgtgggtagagatatctagtagcatcgctgggaacattggctcagaacaagcacagcaaagcgatccgactgttcccgatcctggctttgccacctcctcctggcaaactggaagaagcaaacaacactgggaatccgcgaaaagggctttgcagctctctctgctcgcttcgtctaagtggattcggtgccagggtttcgctcagcccggaagcctctgccctcggccccgccccgccccgccccgcctcgccccgccccaggagtctctcggcgatgctttgtttgattgctctgagttcccgtagctccacgctttgaggctggtgggtagtgcttccgggctgcagcctaggacgcctccacggcggtgtaagtagaagcagaatcccaagaactcactgagtagggaagcagcccgagccacagcgtcccctctagtccctcgcctccgagtcttcgcagatggccggttcagcctaacaagaggggctgggattcctgaagccccagtcccatgactcaggggttcctggcgggttccccctgccaggattccggtttctatcagcgaacgctcccctgccctgctccaggtccctcttgagtccgagttcccctacaggcctcggcctcagcctgcctagtcattctcgcttcgtctccctgactgtctgcaggcctggagagcatggccgtgttccgctcaggcctcctggtgctgacaacgccgctggccaccctggccgcacgcctgcctcccatcctgacctcggcgtcccgcctggtgaatcacaccctctatgtgcacctgcagccgggcatgaacctggggggacccgctcagcctcaggccagccctgtgcaggccacatttgaggttctggatttcatcacgcacctctacactggtgccgacctgcacaggcacctgga

SEQ ID NO: 20562 - DNA, 1920 bp, Mus musculus
cacttactgtgatggggcaagggaagaacccagtcttgtcccctgaattttatctgtgtgctgggtggcctggctgatgcagaggcctgctaagagaacgtactcttacctgctgccagtgagacatcgtatctgtgcttagtcactgaagtgagaacatactcccgccccaagggaggcttctctccatcagggtggtacacgggcaacaaagtagggatttgattcccctttgaggaggtagtgctgtttgcttttaggtctgggtgctcaggggccctcactgatacaagagcccatctcttctcctcacctcactggagccacagaagccaggcagcagctacaggagttatcatctgtgtcttttaccatgatttgatttgtgttctcaaagcaagtgtgccctttggttctgcagagcaggcccacttcctgtccctgagcccatcttcatttctagagggctgaccctgagcactccagagtgcttgcagagtttgagaaatgtgaacatgctgtggggctgagcctctgctatatcaccgtgagctgtaggatcagctggctggctgggttggtgagtgcctaccttgaggtctcatgaaagctcctggagctgtgtggttgtctttggtgctgttaacccttggctccatttgaccatcaatctgagcaatgagcaaagcaatatcatatccatgtttatgtccctcctccttcccttgctcctcctctggagaagcactaattacacaggggatagcaaagtagcactttacaaatggccatggcgttcatcccaagagccaccagctcttcttaccataccacttcctaactcctgtaaggatgagcccagttagtaaggatgttggtaatcagcagagaccattctcaagggtaggtgttctgcagccccgaatcaaatcatgtgaaaaccccttaaatgatcattggttctcaacctgtgccagcatactgcctctctgtctcccaaatcagagctcaagccaaattcttctatcctctttccctcttgcattaacctttgctgatcctcagggaccactcccccagcacttttgtgtttgggtgagggatgttggacagagcccatttttatgtgctgcaggttgggggttgtgctaacacttttgctcttggttgatggacaagatagaggccagggagtgaataacagtgagaagaggaatggcaggtgcctgtttcatagtcagtgagtgtgaaagttaggcataataatggcatctccccactttagggttctcaaatactttggacatctctttccttagagccaggtagatgtcttacaggtgaactcgatgatgtggaaaagaacaaaaaaagggaggtgagggaaaggcttggggttttgcgtgtttgcatgagtgtgtgtagcttcatgctttgggagttggcaagaggaagagggagggaaggggagcaagcaaatccaggtcttttcttgtaccagtggaacctgctctgaatctcccaagtcctccactgtgaattgggctgggtgggggggtgcaggggaataaatcttgtatgagaacaatcttttaagagactgctgtttcgttgtgtacttccttgataagtcttctcattaatctgataatagctaatctggtgtggtgatcctcagaagaggaagcccaggtggatgtcagggaccctcctgccctttctgtttttccctcttgaggccacgtctcccccctacaaccaagacataaatataactaataccttgcgggcatttgtcaattgttattttttttctcttttagatttatctttttgtttgtttttttagacagggtttctctgtgtaaccctgactgtcctggaactcactctgtagaccaggctggcctcgaactcaga

SEQ ID NO: 20563 - DNA, 1476 bp, Mus musculus
gggtgtgggataatgccagggcttgagttttcctcagctgccaagccggggaccctcaggaaccaaccagtgctaccattttagctttctcgatcaagagttccatgtcactgactgtgctcagggttaaaggtgagcctggcaagcattgcagacagaactcaaagggagacatgtctccatgccatcaaagcaggaatttaaggatacaggaaggaaaacttaagttctttcatcctgtgaacatagagccagctagacccttgggaaaagcctaccctataggttacaggggtggcagggtggttttcaggctcccaggacatgtgccagtgacccactccttccaaagttctggctcagtggcaacatgcctaagctgcggctatgcctggttgggagtgagtactcggggtcagtgaagctgcagctgtccctaccctccattcctcagcggcttgtccatggagcagcttgctgctttcttcagggtagctgggcctaatctaggctagaggaagatgttgctggtctggtttactccctgtctgtagtacctgctgttggttgtgtttgtgggtgtgtggggtgccattgcacatttaggagtgtgtcacagtgcagggtagactgccaggcagaccaccattctctgggattcatagagaacaaagcactttaactctcttttagaaggtttatagattggagtggagtttgagccaagtctctgcccgaatcccacttctgaaggaggaagaggagagtggaagatcctgcagtttaatatcattttctgagaggcaggaggagctgacttgacacaaaaacaaaaactagtcagcatagctaccttgtgtctggtgtgctgagaataggggcttgtgctggaaggggcgtgggtggatacagactgccctagagtgttagaatggggcacaagctccttgcttcctgaagaaccagagctcctgtggcccttgctaaccattcccttctcccacactgcctcttagagatttgcatgggacgtgcatgcttgtgcacatactccttcactacactggcaggtccgtgtgtgcctcacactcagcacactctacagctcctctccccacacccagttctgaaactgacatctgctggggggttatgtctattgtgtgtatcagggataccctccagcctaacgataggctctgaattactcagtctctgggaaaccagagactggtggaggaggggctggtcatgaggaatgctttaaaacatgtcggttctagactgagctcagccttccctcagcaggcatcactggcagcccctccctccgcagttcaggccaataatactcatgcgctccagccgcccactcttggttcctgctgtcctctatttttaatgacgggtttcacccctcctctccacttctgccccacgtcacgtggtagataaagtgaggtgctgtggactggt

SEQ ID NO: 20564 - DNA, 1243 bp, Mus musculus
ggaggcagtggcggctcctattccatcaaaacccagtttaactcggaggagcagtggacaaaagcgctcaagttcatgctgaccaatctcaagtggggtcttgcctgggtgtcctcacagttctataacaagtgacttgctccttaggggatgtttgcctttaaggttttatactttgtttggtttggaaagatgctttaaattaaatttgggtaatattaaaccacatgtttacaataccaaaatccacaaaagctactttattttcaaatatgacagatagtttccagagtacgccatgtatagcaaagaaccctgccatagttttgactcagccccatgcatcctttccctctttcctgaaaacaactaatttaaatttgctttgttttcttttttaagttgaattgacgttaatgtgttttcactggattttatctctctcaacttcctgcacttaaaatttgaaacagcaaaggtttgagatgagatgcttgtggcacacagttgggtgatgtggggaaaggacaccgggtcaggagttgcaagtttaactccgtcctcacttgtagcattgaatgcctcctgtgctgtctagtgggactacagaatgctgtttgatactgtgtgcgacgtggagagatttaattatttgtaataaaggatttgctatggtctattaattaccaagtggtacgcctgtatgtttttccttaaaattgagtattttgtattctgaaagaattgagttgtagtcagttcagtagaaattctgttgaaacatgtcttagtttaaagagaaaaacaaatgatggtatttagccccagcactgagaggcagagagaggcaagtgaccctctgaatttcagcccagcctggtgtgtatagtgagttgcaaggcagccagggctgagtattgagaccctgtcttaacaaaataaaacaaaacaaaacaaaacaaaacagaacaaaacaaccagctgtagggggagcaaggaaagaaaggttacttcaaagagattcagtcaaggtcatcgaaaatgctctaaagtcccccaaaatacttatctctatctgatattacctcttagttagattaacttaggaaaaattaaaagtattatcaaacaaaaatgaactagtttcatcatcaactcagtccaattctttgatgttttttttagcctaccatgacacaacagatatgtttgtctcccataactatctctgatgtagaaaaaa

SEQ ID NO: 20565 - DNA, 1118 bp, Mus musculus
gtaggtgtggtgattgtaggatgctactttttggaccattagtttcagttttggcaaggtaagttatgttagtgctgctctcaatgttagcccaggttttcattagttctaaactagccacaggcttccttcagctacctggctttccgcctgcttgggaataagccttttctgttcagtgtgctgtgctcacagatgggaggaacagctggttttgctgcacagctgcagtctctgtctttacttgctctttgctttgtttttgagacagcatctgactatgtagccctggctagcttggaactccttatgcaggctaggtagaccaggttggcttcagactcattaagatctgcctgccctgccatctaaatgctaggctattgccagctggcactgatagtgtattagttgcatgtctgtattgtgttagaacgccgcctatgctatagtttgatctagattcctgtggcttggtattttgttgctgttgcttggtttttttttgttttgttttgttttttctgtcctagaagttgagcctagggtcttgtgcatgctatataaatgctgtaccgggctgttgagatggctcaacgggtaaaagcaccgactgttcttctgaaagtcatgagttcaaatcccagcaaccatatggtggctcacaaccacccgtaacaagatctgacgccctcctctggtgtgtctgaagacagccacagtgtatttacatataatttttacatataagatttatttacatataataaataaatcttaaaaaaaaactataaatgctgtaccactgatttatattcctagctttcaggactttcttaattataactaattaagccgagtacggtggctgagcattcagcttgcctggagaaggagaattgtgtgttcatgaccagcctgggatacataggaagttgaaggctagctgggacacatactgggatactttctttaaaaatcaagataaacctgcagttaggagacgcctcagtagtctgaatccttagctcctaacattacttctaccatatagaaggtaatgggctgagattgctgaatcaggaatttcttcatattagagccaaaggatccatgca

SEQ ID NO: 20566 - DNA, 2464 bp, Mus musculus
gtaaaaaacctagacttttaacatcaaggcagcattattaaaggactttctcgtacttctcagtgtgatcaatgcttgagccagcttaggcgtgtaggaggtggtggtgccccccccccccccccagctgtgttaagtgatgagagttgggtaaggtaagcgattgcttggagcatcgctctcttggtgaggtagaggttgaacagatgagtgatctcctgatccttcctgtcctaggtcactctccatgacatgatcctgaaaaacattgagaagatcaaacggccccggagcagcaatgcagagacactgtactgaggccagggccagggccaggggactttgtgagtctggctcaagaccgacattgccttggtttgttacatgactatcgtgatgggaaaactggctggaaatagtaatcacacctctctgtttttagttagagtctaatgaaactctcatctagttctgtgacgtgtttacctcttttttcaggcctcaggaactcttctatctccttccccaacaccccccacccagcctgtcctaatttctggagaactccaggtttgtgcaacatactggcacaagcgtaattgtgggtttttgttttttcttcccttctctcccccttcccctgttttaggttttgtattttcttccttttgatgattagttggttaaaagctggaggaactatagggaaagtgttaggtgtcttttaggaacagggggagtggaggtggaagggacatctcttgtcacaaggctagtgtctcgtttctgtgggactttgggtcctccttgcctgcccaggtgatgccttagggcttcccacctacatccatcccgctctgagcctgactgtggcgaggggtcccctagaccttcacctgcatccctgcagcttctttggatgtttttataactggggttttcacatacacatgtgtacacatgtaaacacgcatagggacatgcatacatgcttcctgctccattatagaacataccttccttcctgcaccaccactccctcaagcccttcacatacaaacatctcagcaggtgatagttgtcttagtcatccacccaggcaaaagtcccaggcccaccctcttctgataatgtagcagttggtgccagggtaagctgaaggagaaccgagagccgagcagcagagggctcatgaaggccttccctctgtggctcaggttctttttggtgttatgcaaaagctggtcctctggcccgcacttgtcttctcctaggccagcatgtgcgctggctggggagcggccggctgtgaggtgcagaggctgctgctcctcgctgtgctttccctttgggaaatgtttctcgtatttatagtattgtgcttccagggaaagcagtaattcatgtgtatacgtgtgtgtgtgtgcacatacacacgtgcacatgtgtgtgtgtgttcgtgtgtgtgtgttaatatgctgcgaaggtcaaacccatagaagagttgcctcctctcttgaatcttccagaggtaccacttgttaaagcgtttgtattaatcgcactagcccccagctttttaagtgagagttggtctctgcaattagcctgccagtgactgactctcagtgtctatttgacttttattcctctccgtcttccaatcccaaatcatatttccacctgggatgcatcactttcactcccagcattctgtaggaaaggaggcgggatgcgggatgctctcttcccaagaatagtgctcagtaacaaaccaatcgcattttcgttgggcagtgcacctatccaccctcagatcccttccagctgagcccctcccctccccccaccatgtgtttcttggttttccttttgtttgattgtccctctgcccctccttccttggattgtaatgtaaaattcttttaccatgtcaagaaattattaaaaatacaggtactttgacctctttctaaagctgcagaccctggtgctgtactctggtgactgagggacataagggtcacacatgagcattcagacacccatcttcacagacactctggctagcctgtcgtgtgtgaacttactagttgaaccttcattcctcttcacagtgcaagaactaatgggaggtggttcctgctgtgtgttgacgctcaattgtgtgaaagctgcctgtcttcaccagattccaggtccttcctggtgataccctgagctgccagcagaggctgctgtggttatgtgtgggaccagcagctcgggctgaccctgtcgatccagtccttttcctccataccagcttgcctctacatacatacatacattcatacatacatacttacttcatacatacttttttgagggaactcctggtattggtttatactgacccacagtgctcataagaggcttacatccctctaaaataacatgtcctcacttccctcctgacagtgag

SEQ ID NO: 20567 - DNA, 1919 bp, Mus musculus
ggccagagggctgagggccctggagagccggggagggagaagatgggaagtcctgtcgtgttgcccaccagcctctcacatttcatcctgtcacgatgctctaccctccctccctcccccagagaaggtctctgctgatgactgcttccctgctctgagctcgctcttgcccttcgctcagggctctccctcccccccaccccttcctgccctcaggagaggttgggaagtgaccacttggatgtctgggccctgccaaggggacagggggggtcagcaggaggctggctgcttcctgccctcccccctctccctgggcctaccatgctgcttttgtgccaaggttagccaatccctccctgccctatcctgtgtgcttccacctcagcctcatcctccctcctgccccacccccacccaaagaatctatgcgtcagctcaggacgtggggccgatctgtgtgagtccagcatgtacctgtgtcccccgtagtatccccgcagcccaggccgacgaggcccacccctggacttgatcagtattcaaccttgtctcctgtccccaatgtcgtaagcacaattagacttcttccggcttgagtttgctgcctcctacagcaaggacaggaatcagaccgactccctagcttacgctctgggaggggtactgggtaccccacccttcactgaggcctttggatttgtctcagtgccttagcatctgaaaacctgtgcttgtatatgtgtgtgtatgtgtaggggcagcccctatctctggctccttttccacccttctccccagtgccttcctcgtcctggtggagctgaggcctactcctccccagtccaacactgccaaaaatctgtgtatgtgccaggggtcgggggtctgggggtaggggacagctccagcctctggggaccaattgcttttactgtggtctgtggcctgtcctgtctctgtcagtggagaagaaaggcagtgagctggatcagccagagttctgggagacaacgctgggtcttattctgggaccaaagtgagaattcaagcacatttctttcctttgctatgtagggaggctgctgccttcccagagcctggaggcagctctgctgttcagccccaaactttgtttacactgctagggaaggaggagctccggcaagggaataactaggctggttaaaagagtcagggctactggagccaaggtggggacctttgaggctaggtgggggtcacctgctgcttctgagcttggattagagaaagctcttaactccagccactgtcagagggagtgtggagggagggacccggcctctctgttgtcaaattgaggcctccatgtgggaagtgtgatttctgcttttgtgtcccatccccaccccaccccattaccacagctgcctttgtgtctgtgtcaataaaaagccaaaccctgagtcctgaccagatgttgtatctgagagttgctggagaatgggtggtagtgatgcgcacctttaatctcagcagttggaggcagagacaggcagcttggagttacaggccagcctggtctacagagggaacgtctggaatatacagagaaatctagtctcaaatgaaagagagagagagagcgcgcgcgtgcacgagcgagccatgggaaagccagtgtcaaggtctgcgttctgccctctctctcagctatcttgaagtaaagaagaccatcacaccaggttggcactttgaccgttcttggtagcattaggcagtaagtgatcctagtccccagcaggtggacatgcaggcctagcttgactcggaagtgaagatagccaggccctgctgccctgaaggcacaactgtcagggcctccacctccccgcccccacgagtgggcttctggaagtggatctcaaggatgtcat

SEQ ID NO: 20568 - DNA, 1194 bp, Mus musculus
agtgtgcagactgcaggctgatagaaaaccccggagtcctcactgaaatcctcttctccccagcttccacactccacagcttccctacccaagaccagctttccacatcatttcttaccgaggaggtttagaaggatatgtgacatctgtatgcatggagcaaagcttttccctctatccctctccacccctctataactctatcttccacctccaaccagtggcaaggagagactcaggagttttgccccaatgccaaggtggtgctggttggctgtaagctggacatgcggactgacctggccacactgagggagctatccaagcagagactcatccctgtcacacatgagcaggtgagacccctttacctccaactgaattcgaacctagacctcacacccatctctgggttttttggttcctgatttttgctctaacctctgaccctaacctttaattctttccccatctccgtttgaccttccaccttagcccacagccctcacgctccttcccaaacgaaggcctataatttccacccatctgctgcttttccagggtactgtgctggccaagcaagtgggagctgtgtcctacgttgaatgttcctcccgatcttctgagcgcagtgtccgggatgtcttccatgtggccacagtggcttctctcggccgtggccataggcagctacgtcgtactgactctcgccggggactgcagcgatccactcaactgtcgggacggccagaccggggaaatgagggcgagatgcataaggatcgagccaagagctgtaacctcatgtgaggggttgcagtggggcagagaggggagagggctgggtgagagacacggttgttcccgtgggtgctcctggactttttgacctcctggccctggctggaaggtcagggcaggcagaggagcaattctggttggaggagctagagggtagaaggctgtcactcctcaccccattctctacacccttatcccttctctgctgctagctgagagagctgacagggtaggcatctggtacatgaacttggatagggcaggtgggggtttgggaaaccaagcaatgactttggttgagtctcctatgtaaagtgtaacttccttgcataccctggtccccatatcccatctgccttccctaaggaaagtgtccatttgatgaccttctct

SEQ ID NO: 20569 - DNA, 1787 bp, Mus musculus
ttcctccacaccatctgctctctcgtggcttttcctaaaacaggttgaagttcgtattatttcagtctgggcttttaccacgctcactcctttggcttttgaataaggtcctaatgtgttgtttctgagtacctgcttagccctaagaacttatatactcagatcttagaatggtatggttggagtctcgtctagaaggatgacttacaccagtctctgcttgtttctgtctgcagatattgggcagctgtgcaaggcacgtcttgtgatgtgggactgggtgttggacagtctatccagctaccggtgtcgggatctggatgcctacctggtacagaatatcacctgtgacagtagtgagccacaagactccaatgattaatttaagaaatggtcttccatgcccggggagcacctctcagtctttggtgcttccacaccctacttactaagtatttttcatgcatccgcctggaaaaaccagcttctacctatgtgagggtgggtgccttaaaggttttctaaccaagtccccctttgaagtctgtcttgaacacaaaaagttttcacctgagaaagctttatcccaccaattgagcaagatgctaatctgttgcatatcgttcttggagagacagtagagtggcttggctgatctgagctgggcatggtggtacttgcctataatcacagcatttggtggaaagagatgggcatgtcgtgagttgtatatgactgaagaacaaatagctagtggtcctgatttgttccttataaaattgcatgttcataaaggccaagagtcaagtccttcaaggagatggcttgagatctgtggtttgacttaaaatcagtgctcctcaaggctccaggtttagtagccagcaccaaacaacacccagaatagggtttgtgcaggacactgaggaaattcagagccagattatgtatttgatgtgaatgtgaggtttttcaagtgccagtgtcaaggagagccttctaattccccatagcttatgagcagtgtatctgttgtagcagctctaagtaacccattcttctttaaatacacggactctgatatgaatatttcatgtctgtacaatgatggattccaccaggaaaggagttgttgctttctttgaagtaatttcttcccttttgctccctgttgctgaggcatactacttcataaataattttgcttgctgaaggaagagaacatatttttcatgaactcataatcttggactgtttatagatattggggggagtaggtcttctctggccccccccagtatgcaagggcaatggagacctgattatataaagtatgtttataaatgctgtgctgttaatactgcaaataaactaaatagcaaacattttgacaaagaatgactgattgggggcctggtgaaatggttcattggataaggtcctgctgccacaactgacagacagccagagttcaactaacccctgggatccacatggtagaaagagagccgactcctgcaagatgtctctgacctccataaatacaccatggcctgtgtgctcatacacttgcatgtctaaggagcccacatgtttcaggtttcatgaaaccaagagcaaggtagcagcaggcctctgtccgccctgaggatgaacctgctttaaattctttcaagttagctgggcagtgatggcccacagctttaatcccagcactcaagagtcagaggcaggcagatctctgagttcaaagatatccagggctatacagagaaatcctgtcttgg

SEQ ID NO: 20570 - DNA, 1170 bp, Mus musculus
cacaagagcagcccttcacaaataaattaaaacgtaagagaagtacatcccttcaacctgaggacttcatcaagaaagcagattcagcaggtgttcaaaggactcctgacaacataaatcagggaactgacctaatggagccaaatgagcaagcagtgagtactaccagtaactgtcaggagaacaaaatagcaggtagtaatctccagaaagagaaaagcgctcatccaactgaatcattgagaaaggaacctgcttccacagcaggagccaaatctataagcaacagtgtaagtgatttggaggtagaattaaacgtccacagttcaaaagcacctaagaaaaataggctgaggaggaagtcttctatcaggtgtgctcttccacttgaaccaatcagtagaaatccaagcccacctacttgtgctgagcttcaaatcgatagttgtggtagcagtgaagaaacaaagaaaaaccattccaaccaacagccagccgggcaccttagagagcctcaactcatcgaagacactgaacctgcagcggatgccaagaagaacgagccaaatgaacacataaggaagagacgtgccagcgatgctttcccagaagagaaattaatgaacaaagctggtttattaactagctgttcaagtcctagaaaatctcaagggcctgtcaatcccagccctcagagaacaggaacagagcaacttgaaacacgccaaatgtctgacagtgccaaagaactcggggatcgggtcctaggaggagagcccagtggcaaaaccactgaccgatctgaggagagcaccagcgtatccttggtatctgacactgactacgacactcagaacagtgtctcagtcctggacgctcacactgtcagatatgcaagaacaggatccgctcagtgtatgactcagtttgtagcaagcgaaaaccccaaggaactcgtccatggctctaacaatgctgggagtggcacagagggtctcaagccccccttgagacacgcgcttaacctcagtcaggagaaagtagaaatggaagacagtgaacttgatactcagtatttgcagaatacatttcaagtttcaaagcgtcagtcatttgctttattttcaaaacctagaagtccccaaaaggactgtgctcactctgtgccct

SEQ ID NO: 20571 - DNA, 1231 bp, Mus musculus
tgtgtgtctggacatgtgtgccttgacatgctggtgagatccattctcttcttcgatctttatgccttctgaggattgatcttaggtctctgagcttgcatggcaagcacctttcccagctgagccttctcacaggctcaacctaaacagtgttagtatttaagtcaagtgtattagtacacccttctctgtagtcacagtgtggcatgtttggaggccattacaccagtagcaagtgactaagcatctgcatctctgtccaggcttcctttgcagccctgtgccccagttatgccaacactcagtgcagcatttgtggatgagaatttgcctgatgggactcatcttcagccaggaaccaagtttattaaacactggaggatgaaaaacacggggaatgtgaagtggaacacagacacaaaggtacgttttccctctgagggttaagacgcggatgtgcaatagcaaagggcgcacctgacaagcatcctcctgttcctttcagctcaagttcatgtggggaaacttgactctggcttctacagagaagaaagatgttttggttccctgcttgaaggctggccacgttggggtcgtgtctgtggagttcatcgctccaaccttggaggggacatacacttcgcactggcgtctctctcacaaaggccagcagtttgggcctcgggtttggtgcagtatcatagtggatccttttccttcctctgagagccctgataatgttgaaggggacaggatcagctcaagcaaagctgacgatttctcctgtgagcaagaggtgagcacttgggccattggcccaggcccaggttatttcctcagtcataggaatgtcaggcttgtgacacgtgcttatattgtagtccatgcacttcggaggctgaagcaagaatattgcaggctcaagactagttcttgctagggactgagagagggacctgaacgtaaaagaactcactggtagcttgttattcttgcagatttcccaacagtttactgtttctgaattcccatcagtgtgtcagaatatagtatagttaacttctgaagagagagggtcatttggatggcagtttcagaagttcctgtctgtgattaggcagatccagtgctttcaggcctctagactggactgacaacatacagcatagcaaaaacaaacaaacaaaccagaaaacacacttaggccaagatgacaagagaaagaggaagg

SEQ ID NO: 20572 - DNA, 2049 bp, Mus musculus
gagcgcgctgctttcagaaagtcctctgaagcatcctctgtcaccctctccttcagttacgcacacacatagtcagcagcactgtcaaccccattgacttgttagggaaacaggaaagttgtgcccttgcatctgatcacccaacactttgaataaggaggaaacactaggatgacagtgtaatacagatttgcaaagaagcaaattatatagaaaaatgtctccttgtctctgcacagcccatcgtttctgaagatcagaccacagccctgatggcccatctctttgaaatgggattctgcgacaggcagctgaacctaaggctgctgagaaaacacaattacaatatcctgcaggttgtgacagagctccttcaagtgaataacaacgactggtacagccaccgctattgaggactgaccttgtattaaataactgcctgccgctcagaggtggtctctctgctgtcattgagtgtgggtggaagcccttgcttgctttttaatctgatgaatctatgtctctgaattgtcaaaacagtacctgttacagtattttttggagcaaatcaaaggccagaacttaaattttcactgtagaaatgggatgaatggtaggaagacagttttcaactcagctggacagaactctcgccgctgtagtccgtggaagcgagtaacttggacttccttagatcgcttttccttctgcttgtattgaaattgagtattttcctttggttcatgtggatgtttttaatgggctgttaaatattagtttggtttttgttttttaaagattaaccttgaatgtttccaagaattattcacctagtttctataaccaatcgcaagcctcatagctacataaagacagcagatcaagaaagtcatgttcctcaaagacttagaaatgaggaacactttgctttcagaaggcctagcaggaacctggaaggacaggaggcattcgggttaacccacagcacccactgagcagtgtctgtcaaagtaattttgcataaattttatttaaggagaatcctgggtagtgtgaaatattttgctaatcctatggggggggcacctgttacagaaagggaaagttagtagtcgtccttttactgactgtcacagtggattggaaggacaagcatgtgcaaatactcatctcagtaaggtcgggtgtgggtgaaaggacacagaactgctgctgactttccgaatgtgtggaatccccttgtgaggtatccagccctagaaagccgagaacaggaagtaatgctttggggctaacccacagaaaggttagtttaccattagaatagatgggaagaaggctctgtcaagagttctaggtctcatttagtttataaagggaagctttgggtccagatggtgaaagaaaaggcaacacaacactaaagattttattcatgtttgagaaaaggtatctgaactccagctcaaaggggatagttaaaatagtattatttaacttagttggtatttataataaatggcgatcttaattactcataatatgtttatttacaatctaactcttgaatgcttctaaataaaccacaattcaaactgcaagccaaccaagctgtttattgtttaaaatgttttcctggggtttggggtagaggcagagccccatgatgtgagaaattgggtatatttggagggacctgtccatctaggtccagtttttcgttccgttgtacttgcacgtagcaacttaaaagaattgtgaatacgtgttatttgaaactcgtacctgaactagtttggtcctggcgatagcaacatttgtcctgtgagactcgcagagccggaagtgtcttccagtggcctctcaggaggagagggcggggcgggagcgaggggcggggccgagcccggcttggactccgagcttgtgttaaatgtgcagctcccgcagtttcgattttgctgagggcgttgtcacctggtaaggcgtccctgggaccccatctctttacccttttcaaagcaagaattcagagacgtttgggcttac

SEQ ID NO: 20573 - DNA, 2049 bp, Mus musculus; identical to SEQ ID NO: 20572

SEQ ID NO: 20574 - DNA, 1463 bp, Mus musculus
cttgagaaatgacgccaagcaacagatctggtggggagttatttgggggaagagaggggagggagggcttggagaaggggttgaggtagatgaacagataggcagacagaggggaacagagtcacgagggcagagaaagcaggggacagagaaggagagaatgggggctggggccagagaccgcaaggaacacgtgggaacagagagagctggagtggtgaagcagtcgttatcaccacacctgaagaagcaccataagctggttgcttgatcctagggaggagcctagcggaatcgcctgtaaactaataaattaagcagaaaatcgaaaggccccttttcctcaaggaccttttgttgtgggtgtggtctgaaagactgcgaagaagaacctggttgtatcgcagggaaaggtcaatacgtcccctctgcgccccggttgcgctctacagcgcagaagcggaaaaagcagtccaggttcgagctttcggcgcgcttgggcggggcatgcaaataactgctctgtggaactctgggagcaaaaacaaaaaactgcaaccaaaacttctcggcctccttgaatcttacaggcttttcgtggcgtaaaggtggtgtactcaatgaagaggagagtctgtgttggctgcatgtttgagtcggttggttggtgactgtgaattaaaggtgtggtcggtgttgagtgtatggggcgtgtgggcgtagttcggtatcgcttctcggccttttggctaagatcaagtgtagtatctgttcttatcagtttaatatctgatacgtcctctatccgaggacaatatattaaatggatttttggaagtaggagttggaataggagcttgctccgtccactccacgcatcgacctggtattgcagtacctccaggaacggtgcaccccctctggggagtaaagttggttttaaagtcagagcatggtgattgtagggcagtccagctttttaaatatgtctgtgttttcttcttcttaactttcgttagtttgtatcctgattgggttgtgtacacgataactgagttctcgtttgcgccagagctggagagatggcttagtggttaagagtaccgactgcttttccaaaggccctgtgttcaggtcccagcaaccacataaataaataaatcttaggaaaaaaaaaaagaaaaaagagtgtagcactggagctaatgtggggtggaaacattttaaatatgtgctttgtgggaagttttaaggaaatcgttaagctccgccctttacttgtgagggtttaaatttcgcggtagtagcttgcgcaggcgcactggctttaccatggcggagttgatctctttcgtagttcccacccagagcgacaaagttttgttggtgtgggatctgagcactgggcccccagccgaagccttaagtgtgaggggctgcgcggagagggcaggggaagggag

SEQ ID NO: 20575 - DNA, 1352 bp, Mus musculus
caagtcagcagtagatgcactgtaggtgaggggactattagaatagattccgtcttcaaaccaacactatgtgtcccgccatggcaggacactggtgtgtgtggctatgtgcacaggagtggagatgccctaggaagccagaggcatctgatccattgaagctagggttacaggtgaggcctcctgggaactgaactcagctcctctgggctctgacgctcttcactgctgagccatctgtcgatccagccccagccccaagatgaaggctttttttttttttaagcaattcacaatatgattattgtccgaaggaggtcagctagttagcttctctgtgccagtgtgtaccagaatctcttgtgaggtagtagctatatctgtgagtgaaggtggggtgcgggtgtttccccaattcacagctgtgagtgaggaaacaggataccagatgatgaggggctagggggacagcgacaccggagcagccacagcctgtactctcccgccatcccgatgggacttcatcttgcaggtcagctgctcctcttggagtcagtccagccaaagggaggaagaatgtctctcggatttcagcctggaggaggaagacctgaagctgtgtgatccgcactagcacctctgaccgtgtcaggtgacctgacctgccttctgactttgacaggaagttctgcgtgtccaatcagtgggttgctgccctccctccctgagcatccaagtgtgaagccttgatcttgctgggctttgtaggagggctctgggggagaggtctaaaggaggcttgagccccgtcactaaggtggaaaaaggttccccatgcaggcgtcccatcctaataaagactacgtaacaaaggtgtcttgtaaatagtgtgtggtttgggtccctgacttcagggagcttcagtaaggatttttgtctactagtgagggctgtgtcttgaaggtccagcctaatccactttgtcctgtgagccccaaggagaaagtggatttccctaaggagaaacagcacctggctgttttttatgttattcaagtgtgtgcgtgcacacacacacacatacacacacacgcatacacacacacacacacacacacacacacacacacacaccaggcagagttggatctcgactttgacttccctgctctttgaacatcttgggtccactcctccctcttagatgttcgccccatctaaggagttcacgacagtttgctttcaaaccaggattccaattcctctggggagctataccctgaatctgggcagttgactgctccaccccagaaggttccagtgctaaagggccatcaaaatatggctctcct

SEQ ID NO: 20576 - DNA, 1277 bp, Mus musculus
aggggaaggcccgggggaaggccaaaaatcccagagcactagttctagcaaaggagctgcaatcccaaggctccgaccgccccttgaggggatgagatccggtcgtcctgggccgccaaatacttagatagataagagagggggagtgtgtgtggcccggtctaggtttcctcttgctgtgagtgttgccagttcagtgcctgaaagattgtgaagaggagcccggccgaacctcggacaccgggtccgtacagcgtcgctctagcggcgccaggcagcgagatcggaaggcgcggtgggcggggcatgcaaataaggacgcggccgggtctccgcggaactctgggaacgaaaagcgcaacaaaaacttctcggcccccttggattcctcgggctttccctggcgtaaatgggtggtgggcaggatagaagaggagtttcggcgtcgggcgcgtgtttgcggtcgcgcgagtgttggggaccgtgagttgaaggtgtgtgcggtgttgagtgtatggggcgtgtgggcgcagttcggtatcgcttctcggccttttggctaagatcaagtgtagtatctgttcttatcagtttaatatctgatacgtcctctatccgaggacaatatattaaatggatttttggaagtaggagttggaataggagcttgctccgtccactccacgcatcgacctggtattgcagtacctccaggaacggtgcaccccctctggggaataagaatggtcagaaaaatagactttcgaagcttcctctctcctgcctgtggctcttacttcgcttttcttactcatgagcgttttggtagctgtctgtttctgtcgtagcttcccacctcggcctacaatataacccacgtctgtcaccgttttctttttctgagccatatactgttattggtcaccctaagaaataaatggcctctgccggccagtgcagtggtggcgcacacaaagttatttctcataatactggggttacaaatcttagcttgaccccggcagtagaggtgctagcctttaaccccagatttctgagttcggcgccagcctggtctacaaactgagttcctaaagctcttggtatgcacaatctggattttagttgttggtttttcgttacaagtttggataggtatttgtattttctcttttgaaggtccctcttcattccacaagtgtccctacattcggttctcaggagcctccatggcatactccaccaccatgtctgcttcatttcttgagttctttgta

SEQ ID NO: 20577 - DNA, 1191 bp, Mus musculus
agttctagactagctcggtctgcatagcaagtttccaagatggctaggctttgcagagagaacccctgtttttttttttttgctgggggaaaaaagagtacttcttgcgtgtaacctaagctggccttaaatatggtgcctcacttaatctttgcccccaaaagtgaacaaaagtgggatgaggaaaggcttcgtatgttgtatgctagccctctgtatgtgtttctctcaggattaaatttaggccctatgtatgttaggcaaacactctatcatttagctatatatttataatcctttttaaaaaaagatttattggtttattgtttgtatatgagtatactgtcactctcttcagacacactagaagagggtatcagatcccattactgatggttgtgagccaccatgtggttgctggggtttgaactcaggacctctggaagaacagtaaatgttcttaactgctgagccatctctgcagcccctgtatttgtaatctttagggtgagacttcaaaatataattgccccataaatccaaagttttttttttaaagattgccatacacatgttcagtgtttgtatcattgtgtgtgcgtgcaccgttgtggggccccacacaccatggacgtcagaagaaggcttcagatcctctagagctggagttgcagaaggtcatgaactgcctaatgggtgaactctgctctctgcagtctccaagaacatgaacatgtgcgtacgtacatacatacgtacatatgtacatacatacaatattatacatatcattttaatgttcagctcattaacctagctgttctgtttccaggaacatatcagttagatatgattgggtacatgctcaaggaacaataatagctgttcacggaaggatgggcctggatcagccagaaggggaagcagcttactccagcatagaataaccatgccatagagtactgtgtggaattaactgctgctgtgtatttatatttaatgttgtaaacgtgaaactggtatattgaaggaagtgagctacaaaatatgataaataaaacaaggcaatttttgtttagaaaacacatgctaggcatttctgggctgagcctatggctgtggcccacactgcaagcctgcaggcaggatgttcgctggggctgctttatggggctgctgtacagattgctg

SEQ ID NO: 20578 - DNA, 1437 bp, Mus musculus
acagaaaatgtaaacccctaggttcccctgtaaagttgctagacaatgaatgaatagtcccaagtgtgctatgattgagatgagacgtgaacaagaaccagaagggagtgggtttcaagaagaaccagtgtaagaggcaaagaggtcctagtgcatatttgtggcccatgagaaggggaaagtctccaaattctctactgaggcagagcgttcgtgtctggcctgacaaccctctctccacaggtggctggcgaacgctacgtgtacaagtttgtgtgcgagccggaggccctgttctctctggccttcccagataatcaacgtccagctctgaaggctgagtttgaccggccagtcagtgaggaggacacagtccctttgtcccacttggatgagagtcctgcctacctcccagaactcactggccccgctccgcccttcggccacagaggtggatattcttactaggcaccagtggcttccccttgacatggtggggttgctcagtgtatatatcaactgatttggtattggtgaaggccctctttctgatgcctgtagaagtctctggggtcagagctccactatcccatctgatactcctggccagactcagctgctaaccagagtctgcgggaaagacagtggaggcaggccaaatctaaaggcagtagccgaagttcgctgtggctcacctgtaccttcagttcagcttggcctctgcctaggtcttgctcagaggccaagttcctcacccccaccacagagatccagtgttctattctggggacatacagggacttcccttgtttattatggcaacagggccaaggggattctcagaacaccctgtgtctcccctctcccaaccccccatgggagacaaagttctgcctgggttctgccctgaacaggggggtcctgtgttcttggtgctgtgctctgggaggcaggagcatgtgggcggcagctgggggggggggttgggtggaagagtagggatggctctctgccctaggcctacccaggcctaattccacctttgcctcttatgccagaccttaataaagcctctgcttctccggttgtttctatttgctctttgcttccatgaggcaaggacctggggtgggaagagctatggccatgcagcagttgaccagagtttggagtctgtcccctacaaggccttccgtgaggacctgatgccctgttcctggagtctagctcaggccctcacttgcgtttctggaaatcccttgccgttggttttcctctagaaaatggattttggaaactctgctcttacctaacctaggaccgtgtgaggatctagaaataatggagtgtactgtttaacccagcagggcttctagaccacgccttgccacggttagcctgtccctagaaacatcctcgggtaaagacgtggtctgt

SEQ ID NO: 20579 - DNA, 1329 bp, Mus musculus
cctccccatgtctgttcctggtcctcacagcccgacacgccctgctgaggcagacgaatgacattaagttctgaagcagagtggagatagattagtgactagatttccaaaaagaaggaaaaaaaaggctgcattttaaaattatttccttagaattaaagatactacataggggcccttgggtaagcaaatccatttttcccagaggctatcttgattctttggaatgtttaaagtgtgccttgccagagagcttacgatctatatctgctgcttcagagccttccctgaggatggctctgttcctttgcttgttagaagagcgatgccttgggcagggtttcccccttttcagaatacagggtgtaaagtccagcctattacaaacaaacaaacaaacaaacaaacaaaggacctccatttggagaattgcaaggattttatcctgaattatagtgttggtgagttcaagtcatcacgccaagtgcttgccatcctggttgctattctaagaataattaggaggaggaacctagccaattgcagctcatgtccgtgggtgtgtgcacgggtgcatatgttggaaggggtgcctgtccccttggggacagaaggaaaatgaaaggcccctctgctcaccctggccatttacgggaggctctgctggttccacggtgtctgtgcaggatcctgaaactgactcgctggacagaaacgagacttggcggcaccatgagaatggagagagagagagcaaagaaagaaacagcctttaaaagaactttctaagggtggtttttgaacctcgctggaccttgtatgtgtgcacatttgccagagattgaacataatcctcttgggacttcacgttctcattatttgtatgtctccggggtcacgcagagccgtcagccaccaccccagcacccggcacataggcgtctcataaaagcccattttatgagaaccagagctgtttgagtaccccgtgtatagagagagttgttgtcgtggggcacccggatcccagcagcctggttgcctgcctgtaggatgtcttacaggagtttgcagagaaaccttccttggagggaaagaaatatcagggatttttgttgaatatttcaaattcagctttaagtgtaagactcagcagtgttcatggttaaggtaaggaacatgccttttccagagctgctgcaagaggcaggagaagcagacctgtcttaggatgtcactcccagggtaaagacctctgatcacagcaggagcagagctgtgcagcctggatggtcattgtcccctattctgtgtgaccacagcaaccct

SEQ ID NO: 20580 - DNA, 1167 bp, Mus musculus
gcctgcctctgcctcccgagtgctgggattaaaggcgtgtgtcaccacgcctggcacctgttgttgtttttaaaagcaaggtcgtgcttattcctttgtcatgaagagctgagtgattgcctcaccacgaagcttacgatatctactccgtcctttacagacaaagtttgccgctctagttctgcgtactgaggcagtgcaggcacagccactctcctagaggctagcaaatgagggctggtttcaccttactttcagtggcaatggactgggcagagagggagtttatcagatggaaagaagtggaggctgtccggagaattcagtacttgcctcagagaacctcagagctggcattctctggctcctgttgcccacagctgccctgtgatgggtgagccatgtctcccaacagatgaagatgtctctgttgcctctgcttctttacctgtgccatggagttggcgtacagcctgagatcccccccacccccacccccgccccgtgcactcacagtgttacgggttacattggtccagagaggagtatgtgatatacagtgatgtagggactttggaggccagggggcaagtggcctcaggtgggcagtgggcagcctctgtagttagcggaatgtatccttctgtgctgacaacaacatgacctctgttatgacaaacgtgaaatgtttgcacgaatcatcagtaacaaacgacaaacgttcattggacactcactgtttccatgggacatgcatttcccttataacaaccttgcaacaacctttcatgttaaatgatcttcctcatcctagaggagccaggctcagagagcacaaggggactctctagctgaggccacaggatttctagtcagtggcctagttgggtatcagtcttggggtgtctgtacttggctcccctcccccctcatcgctgtgctgatgtgggactggaacgtacctggtacaggaaattgggagctcattagtgctttttttttttaatctgtgaaaccatctctttgtgtttcatgggccaaatcctggtcctgatgctctggagggggcataattggttcctgttggcagtaacagaaggcccaggaacactgggactggctcgaggcaggttgagaatttgctagcacatactgtcctcattatta

SEQ ID NO: 20581 - DNA, 1372 bp, Mus musculus
ctggcgtacctgaaccatcttccaggaggggagctgatggtccagctgttcttcgtgctttatggggtcctggccctggccttcttgtcgggttactatgtgacgctggccgcccagatcctggccgtgttgttacctcctgtcatgctgcttatcgacggcaacgtctcctattggcacaacacacgacgcgtcgagttctggaaccagatgaagctactcggcgagagtgtgggcatctttggggctgccgtcatcttggctactgatggctgagttccacggggagagcctggtttgggcacaggaggccaccgccgaaggccaccttaccttcctccttgctggcccagttgttgtttatttatgcttcttggtttgtttgtttactttcttgtttttttttattttaatagttacatttttgggggggaagatgggagcccttgcgctaaagcttcatagggttttgttgttgttttcttgcctgttttaggggagagctgaggccagctgcccctcccccaagtggccagggagggaggagtccctgagaaaggagtaaggcagagctggggtgcaggtagaagttggggacagaggaagatctggaagtaagcaaatgtgaaaattccttttggaacctgacagatgcagctaaactaaacagtgcttttcagactagtgtgtgtgtgtgtgtgtgttcacacatgtgtgtcttcacatgtatagaagtagccctgtaaggaggggcagagtggctggtgctacagacgtcacatgggctctttgggggtctgtctgctggggcaggaataatcccagttctctgactctcgctctagagttgagaacaggcagggcctggtgtgctctgggatgtgcaaggtggagcaggcctgtcagtcagcctgctgctgcatctgttctcagcttcttggttggctggctgagtggagcacccacccaaacaccagaccacactgtcctccgaaaataaacattttatacagacattgtgtctttgcttctgtcttccccgtgggcacttggccattggctgaggttgatttgggggctcttgaaagatcatcttgggttataccccattctggtcccctatggttccaccaccaccccagttctaagagttcccacagttcttcaactatcttaaaagaaaaaaaaaaaaaacccacacacttcctgtcagacgtcattaatcccagcacttgggagatagacatctctgtgagtttgaggccagcctggactacagagtgagatccaggacaactaggactacatagagaaaccctgtcttaacctctttcccaaataataagtaattaaatttaaaaaaaaatcttaa

SEQ ID NO: 20582 - DNA, 2160 bp, Mus musculus
aagccaggcagccaggcctgggaagcttggctcatattgtagaggagaggagaccttgtctccatttctgacttggctgcttggtctcttgcaggttgaaaaacattttagagacgtggaaagccaaaagatactgcagcgttcacaagcccaacaaccacagaaggaggctgctctgtcatcctgagtccacaaacagggaggactcttccagcatccagccacagcgatggtggtggtggcttcagtggaggccggccgggggagggaagggatcctatatttcctgctgactcttattagggtcagtgtttcaaaaaaaaaaacctagacttgaacaaacacccaacaaaaaaagagcaagagaataatttaaaagttgaatcattacttgactaacagacttcggcccaccatgcccttctcagtcctctgaacagtcatcttgttagttttatttttgcaaattccttttcactctgccctcctccacctgtgactttccttccctagtctgtgtctgccatcctgattttataagtggatatacttgccttctgaatgattgaaagaaacttttacatcttttcttccaaaataaaagtaacaagctgactgtgattctgatgttgagaccagagcagaagaaagaggtctcactttgaatttttcattttttttcttttttttttctttctttttttttgcacagggcatggcttgaattagttttatttttcttaactttaaatatatatatggaaatatatattaaaatgttctctaagtattttctgcttcttgcaggtctctttttactagatcatggccactcttcccacctcattcctctgaaaacaaaaatgtgttgtcctttctaccacccagaacccgacgattaacttgacttagttcacagcgaggatctcctgcagccctgcagagccagtgtgcagacgggatttggccttgagggtcctgatggctttctggtctttaactatatgtacctgtctcccattcagtcccagcctcaggactccctctgcctttgtcttcacggtactagacgaactctcagcactctccacccgggagtcagccgcccctcccctgtgcctctgcaggaagaacttgcttgcatggcacatctcagctcctcctcctccgggctgattttctcttctaagaacctggactccatctaccccagtctttcttaagtctatgtccagagcctctagcccaggaaaaagcttgaataacttctagtttctcttctgccgtcctcctgctcttctgccccccctacccctgaaatcttacaagctgatgacagtttgtatgtgctcagccaatgggcagaaaacctggaaagaatttctggactttagcccaccagtttgtctggtttgactaacctgctgagagccgaaactggtacttgttgcccctgcacctccagggtagtctcctggggcagagtgccaccacctgagtatcaggcactgagtgggacatgggtgatgctcatgtgactggctagagctttgggagtagggtggggctaatttttttttcttttttttttcttttttttttttttttttttggccatgatctcttttcccttcctttttttttttttaattaaataaatggatcaaaattaaataattcaagccctgccttcaaaatggaaaaaaactttttttttaagtattgtttagcaaaaacaataaaacccaaatttttttaaccatcactgatgtctcaggtttgtgcggtgcgtactttagcaccccaaatgaggggtctgaaatgtagagggatggggtgtgtctgctgagctcagcctttgtctgtatattgcctgcttttctttttccccactcttcttacccccaagaagtcattcagaggtgctgggtaaggtgtgttataaagagcagctagggtcagagcgatgggtgcacaagcctgcttaccccggtgtgaatcttgggacacacataagggaggagacccaactccacatacagactgcaatgtgcatgattatgaacacataagttttaaagggggaaggacccagggtttctctgtgtgtgtgtgtgtgtgtgtgtgtgtgtgtgtgtgtgtgtgtgtgtgtgtgataga

SEQ ID NO: 20583 - DNA, 1135 bp, Mus musculus
ggcaggagcaagctgatggaggtttattgagagctaagattcctatgaggcttgcttggggatgcttttcctgtaggttggtatcgttttttcctgtgtgtgtgtgtgtgtgtgtgtgtgtgtgtgtgtgtgtgtgaatgtgtggtttttggagacagggtttctctgtgtagccctggctgtcctttaactccctctatagatctgctagcctcaaactcacagagatccaattgcctttgcctcccctgagtactggaattaaaggtgctcgaccccccccccccaacttggattgctgtgtatgatatttatgcaatgtacctttgtcctgttgtccttaactttattttctcaccagaatgtccctcttccagtggaaaacccaaccatgcagacatcttgcttataaacttacagtatgtttcagaagtggaaataattaatgatcgaacagaaacccctcctcccctagcttcactcaatgttagtaaggtaaggactccagggcagctgttgctgtctgaaatgtcgggaaggagggggggtgctctccggtttgtggtgatggacagtgttcttttctgcttttttttttttaaattgatttaccattgtggtattctggtttttttccctcgggataaggcagggactactctcttcccttttgagtcaggttcttgtgtattttatgctaaccttgaacttaatatatagcttaagggtgactttgaacttgagattttcctgactcttcctcccaagtgctaggattacaggcatgctaccacacagtttctggaatgataggatcaaacacaaaccctttttccttcacgctaggcaggcactctaccaacttacttcttccccagcctttttttggtttgtatgagacagggtctcatgcagcctaggctggccttgaactttgctatgtaaactttgtaatagttactttgaactgagatctccctgactacatctcctaaatggtaaaattacaagtgagtgctactatacctggtttggtatcttttctaaagtatatttgtgtaactccttcacacccctttatttctgaacatttttgttgcaccttaagagataccttcgaaccaggcgtggtggt

SEQ ID NO: 20584 - DNA, 1203 bp, Mus musculus
gtacctaggtagtggatttcagttgactatagaagcatgcattaactgtttctagacaagagatatggggtcataacacatgggcgcagcccccttgtgagatggctacaagccagtggctctctggatcccaggctctcctggcaaagactcatcttccccacaggtccatcaacctggcttccaagtggtgtgaacggcccgagtgggtgcacatggacagtcggccttttgcctcactgagccgtgactcaggatctgccctgggtctgggcattgccctccacactccctgctatgcccagatacggcgggcgcacctagggaatggccagaaaatagcttgctttgtgctggccatggggctgctggtcttcctggaatggctgggctacccacctcagatcagcctcttctacatcttcaacttcctcaagtataccctctggccgtgcctggtcttggcccttgtgccctgggtggtgcacacattgagtgaccaggaagcaccgcccattcgctcctcttgatgtgttttgcctcccttgccccaaagacaacactcctcgaccaaccaccacactctaagagacagcccttttcctgggctccggagcaggcccgctcaccttgaacttcatttctgtctcatgctttgcagtcttagctcccttttaaagaaggacctctgtttccaggaggctaagccatcccccaggtccccacaaagcaaaagcaacaggaggcctggtggggagggggagctgctcaggaagaccccaataaagcccttggaacttgtgaattcttttcttgtctgtgctctcatctctaccgacctctataagtaccaacagagcctccaccccattcctgactctacaaagacaaaagtaaaagggggttggaaattctgctgggacctaccccccacctccccgccaaggccatggcagacaagatgagatatggcagtgacagttcactggaacccagccttccacagtaggacagatctcctgccctggccttcagcttctcagactgaattctgggccaagagtgaagaaaaggcagcattttggctaggaaaggagtgagaacttttactcccatttgcgagcccacagatcagacattattcccagaaagcactgccacaaataagtttatttacacgaagacaaaaaccatgtgttggga

SEQ ID NO: 20585 - DNA, 1216 bp, Mus musculus
gtttcccttgcacttcagtggaatgggttctgcagggagataaaccatattcatcccatggctgtagagccagaattcagtgtcacagacccggagccactggtgggctcatcttcagagctaatggtagggtgggtgtggaagagctggcatgctgagctttggattagagcttagactgttgcccaaagcaccctcccatgtccctcatcaggatattcaccatggcaacggcacccagcaagcattctacaacgatccctctgtgctctacatctccctgcatcgctacgacaacgggaacttctttccaggctctggggctcctgaagaggtacagttcctaggccccctttggagtccttcagggaggtaacaggccaggacctgccaggaaatcacagttcgtgatgctggtccccgtgacatctgagggctcctagtgggaggatcacacaggtctgactgccagttgagcaaagcagaggtcaaaggaggcaagggttggggcagtgtttggggtggccaggcagtgatagcaacctctcctaccttattgccaggttggtggagggccaggtgtggggtacaacgtaaatgtggcgtggacaggaggtgtggatccccccattggagatgtggaatacctgacagccttcaggtggggactgagaagggccaaaggaggggtggggcccagagctggcaggggcagcaagcactcagttggggtggtggaggggtatggcctcgatggagaacagagcatggcgaggtgcagcctggcctctgctggcatcagcttgggccatccctttacaggacagtggtgatgcccattgcccaggagttctcacctgacgtcgtcctagtctccgctgggtttgatgctgttgaaggacatctgtctccactgggtggctattctgtcaccgccagatgtgagcctactaggggtctgggagggtgtggaacactgaagtacaggagacagagaagaagttagcattacagggagcaagacttagagccatcttgctagttcaacccactcctctgctggccttggtgtgggccccaggtagaagtggagtagcaacaaagtatctttcactgaagctctctggccttgatcttcccgagatgctcttagatgatccagatacattccatgttagcctgttctccattaagttcactgacatttcacttcgtt

SEQ ID NO: 20586 - DNA, 1205 bp, Mus musculus
cagcccccttaaccggcagaagctggacagcaagaagctgcttggtaagctgcaagacacggtcccacatgtgccctgcgtccgagtgtgagagtgctgtcttagagaccaccaagccagagtaggcagtggtccgagtgggtgtcaccagcatggatactgattgaacatactttggggtgggcgtcaggcattaagggtggacctcttctagaggtaggtccccagaacaggagctggaggctctaaactggcatggaccatgcagtccgtgccaactggcaactgggacacctttcagagcgtttctgtctctctgccctgcaggccccatcagccagaagatgtacgccatgctgccctgtgggggcattggggtgagttgggtctgtgggagtgggagtgggcaagtggctttcccagcttggccccttcctcccccatccccgtggctgctggcctgctctctggtgcccactcccattcctcccctcccccccgcagagggcacactgaagcccgatctcctgcccctgcaggtggacagtgacacggtgtggaatgagatgcactcctcaagtgccgtgcgaatggcagtgggctgcctggtggagctggccttcaaggtggctgcaggagagctcaaggtaaggatgtataaggacataggccacgctgtcctttgcagcatggcaaagcactcagtcttgagtactaagatgggcaggagctgcagagacagccgtggtgtgagggtcgtgagggaccaagtaggcactaaggcctgagactcttgtgtttatctgcaggagagagacagctgtttgcccgaggggcctgcagctggcatttataaaagtgtttcttttcccatcactgtctggcttgtgcttctctcctgagtctgtctaccctgcctttcctgactggtgtccttctgcttgtacttcagaatggatttgctatcatccggcccccaggacaccatgctgaggagtccacagccatgtgagtacccctctgacctgacatccttctgccatccttcccacctttcacttgaagcaaatctcccatccatcgctcaagctgaactccgcgctctcttctcctccccacacccctcaggggattctgcttcttcaactccgtagccatcacagctaaactcctgcagcagaagctgagcgtgggcaaggtcctca

SEQ ID NO: 20587 - DNA, 1238 bp, Mus musculus
ctgggggtaagatcacctctcctgtcctaatggtgaagggctgggaggaggggtggctcaaagcaggcccaggtgacagctgcttctcctgtagtgtcgtccgtgtgtaacagtgcgcccggctctggccccagctctcccaacagttcccacagcaccatcgctgagaacggctttactggctcagtccccaacatccccactgaggtacaggattgaccgaggcccgggggtggggtagggggcacagaggtgcttgctttcttttggaaggaggagtttggctctctctggacttgagtgctcagccaagatgcctctgtgtacatttggagggttcttgcctggatgtgttgccttgaaaagagatttgtcccacaggctcctgaagggctctgatctctgtcaccctcgcttggggctcaggtccaggagtgagagaccaatcagagtccttggccttggtctaggttgctctccttggctgtctctcccttcatgttcttctctcccgactgctcctctagatgatcccccagcaccgggccctccctctggacagttccccaaaccagttcagcctctatacgtctccttctctgcccaacatctccctagggctgcaggccactgtcactgtcaccaactcgcacctcaccgtaagtacagggcacgtatcctagttagtatgttgaccttgccctaagggagccaagacggctcgacctgatctggttgggagggcagagagtacctgagggatgctggtccggagttggcaagacaggggcagtatcagtctgtgccttatctgtcatcaccctccaacttcaccaggcctccccgaagctgtcaacacagcaggaggctgagaggcaggcccttcagtccctgcggcagggcggcacactgaccggcaagttcatgagcacatcctccatccctggctgcctgttgggagtggcactggagggtgacacaagcccccacgggcacgcttccctgctgcagcacgttttgctcctggagcaggcccggcaacagagcacgctcatagcaggtgagtaggcgcatggagtgcctgggaagggttgtttggctctcatggggcctcaagtcaggcctatctcttagggaaaaggagccagggatactctccagccctgccacaccatcaaccatatcagtgatttcttccacattctgaaagcatcaggtaccaatgtttggtatgccag

SEQ ID NO: 20588 - DNA, 1170 bp, Mus musculus
cattggtgactttgaagcacctgatcaagatgaccttgacaaggccctggcaagcatggagttcgagggagctggcttggagctagaagccgacagtggagccacccagatcctgcctgccaagcactgtgaggatcctgtgttggcaaaaaaggcccgagtagctgatctgagtggatcgttacggaaggagcctatggtccactgtagaaatccatggccttccttgagacctacgtcagccacaggcagccttcctgtcccagctacatcatgtgtctccacttcccaacaaaggggctcccctgctcctgcacctcagtatctgccagtggctggaaggaccatccgaagcagcccacagaattatgggccgggccagccacttcagtctcccagagcgtggtcaagtggcaaaccccgtttttctggacctcaacgtccccacggcagctctgcagcattttgtcaggggcccttgtcatcccgagccccagtgtcttctgttgaatctcctgtcagcacccccagaaatacttccaccccagttactcagccagctcttcagacacctgtagttaccaaccacctggtacagcttgtcactgctaccaaccggacaccccagcagccctcccgcccctccattcgagctaaaacccgccgctttcctggcccagcaggacttctgcctcaccaagtgagtgactggttttcctgggctctaagatccggggaaagaagcagtagtctagtcttagaatatcttcactgtcaggagacaggcaagaagagtggagagaaaggacttacgaggccaggagagatggctcagggacggtgacacatgctttaatcctaactctggtgaggagatgaaagcttcctgggacttggtgactaccagtctagcatatggggggtgggggttgggggggttgggagggtcagctccaagatagagaccctgtctcacaaaacaaaggaggagctggagagatggcttagcagttagagcacttgtagctcttacagaggacctgggttcaattcccagccgctacgtgatgattctcacaacccaggggagtggacatactgttctgccctctgtgagcacaggcacatacatacatgcaggcaaaacagccacacaataaagtcatacgt

SEQ ID NO: 20589 - DNA, 1291 bp, Mus musculus
cactgcctctgagcaggagggaaaggagccacggaagcatagggcattccccattcctactggaagggcccaggggttgtatcctgcctgttgttgtgcgtagtgtcatagggagccagggaaaggtagaccaggccaccctcagacccattggcatgggcagactgccccaggggagccacctttctgtcctaaatggcagaggcttcagagctgagttttgtgggatcctgtggttgccactgaattgacccctgtccacctccctctgcagatgacctggatggactcctgagtgagctccctgaggacttcttctgtgagcccagcagctagggctgcctcaagacagggcatccaccatgagctggcagcctctctgctcccagacaagctaggtgcatctgggagagaacgccagtgcactggagacagctcaagcccatggtctgatgcctcccataaccaccttgaaatgcctagtgatgggccagacagtgggctgcctggcttaacgactcgacgacttcttttggcatgggcatcctggaaatctggccagggcttgctcccctacatccttatccctctggcacattgtcctccagccaataagaaaagtgggatcctcccaccccatcctaactttcaagaggctggacttgatttccttgttcctttattcctcaatcccctgccagctgaggagcccaaaggagccacaaccacagcagaggtgacctaaggcctgttgtccaccagggtgactgtgaggtgcaggctgctgtacctggttctgaaataaagcgtcccttcctcatttgccagcctccgtcccacacctccttctccaccctctcatcctctcctggccagggcagccaagctctaaggcagagcaaacggcacggagagagagagagagagaacacgtctccctctgcctccgcctctctagttttggtttgtgtgtttgctttttggttttttatgtgtatgggtcttttgcctgcatgtatgtctctgtgccagctctgtgcctggtgcccttggaggccagaagagggctttagatcccttgggactaaagttacaaatagttgtgagccaccatatggacttgaacccgggacctctggaaaagcaagtgctcttaacaactgagccatctctccagccactcattcttttattcgtatgatgcagacatgcacgtgtgtggacctgtgtgtgtgcgtgtgcaccagaggaatacaacaaaagaacaaaaacagaaacgaggctggggaat

SEQ ID NO: 20590 - DNA, 1187 bp, Mus musculus
ccggtcgcaagcgtcacacgccactgcacaacgcctgtgctaatggctgcggaggtctggccgagctgctgctgcgccacggggcaagccctggagtcaccaatggggcaggccacacaccaatggactgcgcgctgcaagcggtacaggacgcccccaactgggagccagaggtcctctttgcagcactgctggactacggggctcagccggttcaccctgaggtgtgttggggggtgggggtggggggctgaggaaggaggagccaaccggaacgggaatcctagactagaaatgtcctgactgaaaaggtctagaagttcaaaagcttcctccctgactagagatccatatccattttggcagagggcagagaactggggactgggaccaggaacttggaacttgtacacagggcaagctgaggctcgagaaagaccaggttgtctgcggcaatttatattagccagcctcgggcttgcctcagttggggcaacacggaactcctaaactcctattttgatttccagatgctgaaacactgtgccaactttcctcgggccctggaagtcctccttaatgcctacccatgtgttccatcctgtgacccctgggtggaggccgtgctcccggagctgtggcaggtatgtccacgccaagggccaagttctttactagggaggctagagaggccagaggcctctcccttcaagctccaagaccaggttcagaggaggaagatggacctcagacaaaagagggtgaaagccctgggttcctggcctgtctggagcagtgcagacagaactttgatcttctatactgcggagcctcttgctgacagacattcataaatcagtcagctatgacttggtgggaattccaccagcatgtctgggggggggggtaggagtggcccatgactaaaatccagtctatggcagggtgctatgtgctgaaaatttccaagccagaagtggtggtgcatgcctttaatctcagcacttgggaggcagaagcaggcagacctctgtgagttcaaggccagcctgatctacaaagagagttccaggacagccagggttgttacatagagaaaccctatctcgaacccaccccatccccccccccaaaaaaatgagaaaatgcccttctaccacagaattatcttatggaagggaaaatca

SEQ ID NO: 20591 - DNA, 1226 bp, Mus musculus
cccgctgcccccccccccccccccccccgctgccccgctgcccagctttctctgcactttgcatgtcctccaggagtagcttgtccctccactgacatcttaagccacctgctgatcttcaggccttctcagcctgtccccaaagaaacctttcacccacctgccatcaatagatggcctctgtagccacccaagcgacaagcaactgatcccatgcagtttctcctcaccgcctatatgcctgctctgccggtttcatagggacaggcccttagttggacttgatggctcagacctctaactcaggaggctgaggcagtagaattgtaggttcaaagctagcaagattttgggggagggatgaggggaccctgcctcctggcctgtgtgttctatccagacactgggtagaacttcaaagaatggtagttttgcttggttttcttctcagcactaggtatggaaccccaggcttgacataccacgctgaacaagtgtccagttacaaagccacacttctagctcttaatgaaacccatgtcctggaggctggcatgatcttttttttttttctctctccactaatttattcattttaaatatcctgatcgctgcccctcccctgtcagagtccctctcccccatcctcttctctgttaaagccacaattgtgacagctccttttagctcttcccaaccttctggctaaagtgaaaactcagcaggggcctgggatggagctcaatgttgagcccctgcccggtgtgtgtgaggcctaggctggatccggaacggaaccggaaaacagcgaagccaaccttccacagtgagtgacatcatttgggaggtggaagccggagttcaaaaccagcctgggctacataagaccctgtctcaaaaaacgaaacgagaagaaaaacctcaacaagatgtaggcaagattctgttgggtctgtcctccgacctcctccgtatacaggcccagcaacgtgggctcagtaaactggttaccacttccagaactgaacccttcttggaaactgcttggcacagtcttccccactttttggcctggacgacactctgttggtgatcctgagcttgaggctgtagtctttgaagaggcttttataatgtgttttcccttctgcccaaatgtcacatggaatcttaattggcagtcactctagagtggcttcgggggcccagaaagctagaaagctgtc

SEQ ID NO: 20592 - DNA, 2170 bp, Mus musculus
cacagtgctgtctgctacggtgggcatccagaactgcctcacaggaggcagccctttcccctcagtccccatgggcctccttggcagcaggagctgtccttttgttgttgggtgccgggaaaggacctccagcctctacagcttcaaggaatgggaaggggagggtaggaagagggagcctgtatcagagtggccccctgccctccctgccccagggctgtgagatggcccaggtgagagggacggtgctgctttatttgaaatgtttcttacctcattccctgccccaggaaggggcccagcctcaccctcctggggtggccccgtgttctccctcccatcctgccccctgccctgccctgctggggcagcctgagctcccagctgctgcttgccccccaccccctttcccttgaccagcttcagttcctctcagtgctctcgcctctaaagcctgccctctctcccctcccttgccgcttttaagttatttattctgtacttgtggtttggggctctgaggaaaaaccctaatcttgtgcctctctccctttgctaggagtaggatgggatgagaaggtagtctctgccctgggttgtcagtggagttaggaggggtgctcttgcccctctgtgggactgtcatgccagagcactcacctacctgacctgtatcccacctcccagcaggtagcatcacaccttggagctggaagatctggctatgggctgattgacagggatggggttgatcctgagcctagttttctggctcttgctatacatgtcccctcttcccaggaggaggcactcccacattgggtagctagtacccaagactggttggactgatttgggttagggacccagcgggctaagggaacaaccgtgctagggctgcagcgccctgtctggaacccagtctccctggggtggcgctcattgtggctgaggcctgcttacaagttgatttttaacccaagtattgtgattattttttaaaaagtcaagctaattttggcaggagttagaataaatccttggagcctgggcccctctgtccttggccctccatagccttctcgctagagggggaaagaaggttctcgggccggccccactaccaagcatagcttgggaacctgctgaaggtcaggggaagccggcccaggttcttatccctttggagtagctgcagctcaggccaactcactctgctctccttcccacctctcccttttccctctggttggagggagtagtttgggaactggtttgtccacaaaaacttccccattgttccttggctcaccctcagggcagaaccccctgcccaggctgggtgagagatgggcttggtccagcagggaccctgagggaacaaaccccttctttggggagtatgccctccctactgtgtagttgaacaggggctaggaactccccactccctccctctaacagcaggctgtgtgggtttcaattcccatcctccccaccctggctaggtgtcgtccaccctgtatcctatcatgtgtctgtgtgtgggggggttctgtactaatttccatggccggtggcttttccttccatgcatcactcccccccgcatgcccaggggccacccgcctggcattaccgcatgctggggtcattgggggaggggggtggggctcacgctgtcctgtggtcttgagatttttatttttgcatatgtaatccatcctgtacaggtagctaactttgtaaacgctgtgtattcccctctgccctcatggctgctggtgtaaataaactgcatttcccgttggtagcccggcctgcccactctcattgccatgttgctgagggcagagcagtcacaaagaggctccatagccacaaaatggatttttattcattcatactgaccatctaagggcttaggggagggcagtctatacccagagctcatccttggaactgggcagggcactggattagggccagtactcttgcagtctagaggcctaggataacagcagctgtggcctggcctcaatgctgggggcttggccttctgccccactccccttcctgactgagctctatacaggactatttacaaacaaacaaaaaaagagcaagcaaagtgctttaaaagaaagcaaaatatcctattcctgctaca

SEQ ID NO: 20593 - DNA, 3038 bp, Mus musculus
gctgggactcacttcagcccccttcccatcctttctgtcagaaacgtaagaacatgaccaagctccgaggcccaaaccccaagtctagccggaccaccctgcagtccaagtcggtaaggcacccctgcaaggtgggtgggtggctggcaaggtgggtgtatctggctgctgatgcgtctccacacctcccaggagtccgaggaggatgacgatgaggaggaggaggacgacgaggaggaggaggaagaggaagatgatgagaacggtgactcttctgaggatggcggggactcttctgagtccagcagtgaagatgaaagcgaggatggggatgaggtgggcaggaggcgtggtgggagggagggttgttgtagatcaccaggagggccacacacacggtgacggtggggtctttattctcccagaatgatgatgacgacgacgatgaagatgacgaagatgacgacgatgaggatgaagacaacgagtctgagggcagtagctccagctcttcatcctcaggggactcttcggattctgactccaactgaggctcagcctccaccccaggcaggcaggcaggcaggcagccaaggagagagcccctgcagagctcatctccccaactgacaacctttgacaacctttgtctctccctgtgttctgtcccgtaccctccagacttccccactttctttctttctttcttttttgttttttaaatcagtggggggtaggaggctgcatgagcccaagctaggactctgcagccttggagcctcagctccagggttctccagggacagcaaccatcagactgagccagcgctggacgggcccaccctgcccctcttctgcatttgcagttccggcatggacaatggactggggagtttgggggtgggagagagtcttaaagagtttggtgagacctccacacctgcagcctgcagcaaggtggatgttcggggggcctttccttcccagatgggcttgctacctggaccccccacattgaactggagggagacaagggtgctgccttcaagaaagcaggcagtggccctgtccctcttccctgcccctgcaggaaggagctgcctggacccgttcgtgggggaggggcagagtgtttttttatatatgtgtgtatatattttttttttaagctctgagctgtcaacgagacgtttcctaccgatctcggctgccgtctctgttgtcatttctgggactgggagggcctgggatggggtggattgagacttaaaaaaaaaaaaaaggtctaggtatgcatagaatgtgtgtgaggctgtgtgtgtgtgtgtgtgtgtgtgtgtgtgtgtgtgtgtgaggctgtgtgtgtgatgtgcacacacgtgagcgagcgatacagcatgactgcgcctgtggataggagagagagagaagagtgtgtgtgtgtgtgtgtgtgtgtgtgtgtgtgtgtgtgtgtgtgtgtctagagcctgtctctttgaatctggaaaaagggtcggtagaggcctgggagatggtgtccctagcaggaacaaaccaaggctgcccctccctgccatcttccattgtggggttcagggacaccacctgatgcttcctatactagtttgcccctgccaaggccatgtccctgagctgctgcaggtctgtgctgtccagcaggaaagtgggaggggcaaaccatggcatgagccttaaagcttttctctggtgccctgggcttcaggaagttcttcctgccttgccccgtgtcctctggccatccccatttcctttgagttctcaggtctgctccctctttcctgccgccacccctgtatgcagaagatgctctctgcaactgctcctctaactgcttgccagcagtttgggaccttctgaagagggtcagtcccttgacggtgaaatcctagtcacctttacctgtggtgattatcagttttactatgttggccagaatttttgttcgtgctattgggttttgcttcttaaatgaaagccagaggtgggaagtaggctctccacagaaagtaggctgcagcccagctgccagtccctcttgaaagcaaagacatttgcctggactgtgtgatggagattcctaaagagaagattccctcccaccccaccccctgccctcagcgcgcgcgcacgcacacacacacacacacacacacacacacactgtccttattctaaaatttagtaccagggttttaagttcctgagagggcttgcagagaactccatctccttgtttgaacaccctggactgttacacttgagtgaaatgcgttttcacttagaaacaactttgaacaggacatgtgttcctcccactgcaagtattggaaaattcttagaggtagggctgtgggggtgggacatgttggtgctgtcagaggttgcccaggatatatttcagcactgggacccttctccttttttctaatatttaaggagtcttttgtaggtttcaacaaccaccacacttgaatttgtaccacgggagcggcttagacgtgactgtcccagatcaaggcccactgtggaggttttgttttcccctttttttttttttttttgtataataaagtgaaaaaccaaggtttgactttcgtctggtcactggaattaaataagtgggtggcaggggtgacccaataacaggtttgacatagagcccttgaagccagcttgtcctttctcgagccaagtgcaggtgactcgccttcccattgttctcagttcagccctttaacttgggcttggggagttgcagagtagataactttttcacccagagggcagtgctttaggtaatgagccactggggtgaagggttcagccaggctttgcaagccctttcaggtggctcagggagaggcaggcttagctgtggctcccctaactctacccagacttctggtgagaagctgctgaatccagaggacatgttctctggattaagacctgccttgcctgtgcaggctttgactaggttcctggacaggtaactg

SEQ ID NO: 20594 - DNA, 1199 bp, Mus musculus
ccagctaaatgatgctggaacacacttgagtttggaacctcttctgccctccagtgctcttccccctgccgcgtcacataagtgaccttgttttcccgtgtacaagggtacacggtctctccttgcctcaggctgcttcctcctacagaaacagacccctgtccagattctcaggggtgtaggcctttaggtaaacgttgtccgaacctcctgggcagagatggataaagcccaagacaagctcaggggggttccctggaagacagggaagcaaaatactgaagggagttcaacacgttaaagatgggagagagccaaacgtgaggaggagatgctgggtgatgaggccaagggtgtcagtgccgggcagtagggtctgaaggatgcacactggtgggcaaagaacacagagtcaaacgaattaatctggctgagctcatatgctcttactgttaaatccaaaatgggataggcttggttgggtaaaaccagctgtctgtggcccatacccaagcccaagtagcattaactggcagggctgccattgaccccatgggtgaggacttgggactgtgactacacacaccaccagacccctgaggggtgggagagagaggctaagaagcagaagcagggagggacagagaaacttgagtggagaaagcttaggcacgggcacactaatgtgggcctgtcatattgttgccggtcggctgtgtctggtccttcaggtaagtcacttcagtactcctgattgaggcgtggagggtgaaccctgagatgccttttaagttcccgtctgaggaggactgagggtgccctagggaggccgtgctgtttctggtttctgttgggaagcatggtggaaatgagctgcctccttgcttgctcctggtgcctcttacaaggaggagtctagttcagttgtgagcctctggtcctttccagtgctatcttgacccagaattgagaaaggaaggaaggagaaatggatgttatgcaagagggaagaggcataagaggagggaggggtttctaaaagcctggggctccaggagcacagaggaagggacaaggcaggaggggacagtgaccaagaagacaggaatgccggagacccagagctggtgctggatgggaaagaaactgcagatttaggccatttattgggaggtggtttacgttgtgagaactcatct

SEQ ID NO: 20595 - DNA, 1174 bp, Mus musculus
ttcactgggagccttaggactcacacctcaacctcaggccttgcatgtttgacactcacatagagcctgaccacatttagatacgttctttccctgatccctccctttctgatgagccctttgtccataggccctaaatcactagacttcccactccatctcatactgtaaataggggcccatggcagcctagcatgttaaaagtgattgctttgaggtaagcaagacaggattcccagtgtaacttaagtatggtggttattttatctggtccagagtcccttccctgatttaataggaccacggttatttttcttttttaggactgagccatgtactggttcagatgagaagcaaccaggggctttggggaggagggggtgaactcagaggctggggaacagatcaagagaagggcatgagccaggtgtggtgacttctcttacatgtcacagaccgctggtcccaggaagatatgctgactctgctggaatgcatgaagaacaacctcccatccaacgacagctccaagttcaaaaccacagagtcgcacatggattgggaaaaagttgcgtttaaggatttttcaggagatatgtgcaagctcaaatgggtggagatttctaacgaggtaagtgcttcccactttttgactcctgtaaataaatacatattgtatatgctatttttttttccttcagaaacagggtttctctgtgtagccctggctgtcctggaactcactctgtagaccaggctggccttgacctcaaatccgcctgcccctgcctcctgagtgctgggattaaaggcgtgcgccaccacgcccggctgtgtatatgcttttcatctcagagaaaacggggaaagcaaaccagtcactttggacagaaggccttcacgtgttcttctgtcagctctaatgtatgccttaggggaggaagtggcctgggcgatagcaaccgcctagtgctcacagttctaccacaatcttctaggtgactttggatactctaggggctgaatgagatgcaggcatggaagctacgttgaaatcagtctgtgactgctcttaggttgtccccaactacttgggcctctgtagcagatatgagcgagtgcctctgggtcagaagttgcctataatctatgttgtcgctttattttcttcatt

SEQ ID NO: 20596 - DNA, 1186 bp, Mus musculus
ctcagtctcctcctcccgcttttccccggccggttccccccgcctccgcaacccggcggggacccggacgccgcgcagccgccgccagcccgggagcgcagcggccggaccgcccccggggactagatctggattcccgctgctacccccctcccgacctcccaacgcggtccccgcctgtccgggcaggcgagcagtcggagaagcggcctagcttgtcccccgtccccgaaccacccggggccggagacgccgccgccaccacccagccaccccaacacgcacggaagaaacccggcgcagaggcgcgaccgcggcgggaacggccgcctcctccccgagcctgcggcccagccctgccggcgcccccgccccggcctccggggagccgagccaagcagagggcgggaggacggcggccgcgaggcgggggcgcttcgctcaccggccccgccgccccctccggcggccggcgagaactgcgcctgtcggccggagaaacgcgggctcctccacccggggcctcacttgggcctcgcttcctgcccttcctacccccggctcacggcgcccttccccgttccctgatcatcttgtctacagttctcccggtatcgccactcggcgtctaccgcagccgcggctcgctccctagccccggccccggcgcacgtcctccgccgcctcggttacccggcgcagcgcggcctctgagctccccgctccggcggctcccttctcggctctgagcgcggcgccctcccccgctcggccgggcacagccgcaactccctcccgcggcggcagcggctcctcctccgggcgcggcggcggcgctggggcggcggctgctgctgctgctgtggcggcggcggctgtggctgctgcctgctgctcctcgcggcgaaaagcacaaagcacagcgccctccgcctgcaggcagcccgcccgcccgcccgccggccccggcctcagctcgcacaccccccgccgccgcagcagcctccgccgccggagcggggaggagggagaagggaggaggaggagcgggagggggggcgggagaagcggggcagcgagcgcgtccttccccgtagagcgcacaccgacccccggggagcgagcgccagcccgcccgcctcgccggctccgctccctcccacagcctgcccgggcgggctccgcg

SEQ ID NO: 20597 - DNA, 1242 bp, Mus musculus
ctgccctgtttgaccctccctctcctctcccctcccctgccccccacccacccaggttctctgtgaaaaccctgctagagaagtacacagcagaacccattgatgactcttccgaggagtttgttaatttcgcagccattttagagcagatcctcagccaccgatttaaaggtaggccatccatcacctaccccttccaaccccagcctgtggcgcccagctactatcccgggctctaataaccttgatggatttctaacccccattcctggtcctggaccccattctgggctgtacatagaaacgagagcatagaaagcatagtgttgggagactggggagagggtggtgtgcccacagctccatcgctgtgcatgcagcacttcctctgtctctctgtctctctctgctgtcgagcttcggctcaagcttggggtggggggggctggggctaggggaggcattacctgtgtgtctggtggcttaggcttatgcatgcaagtgttttgtgacatggaccttttccaaactccctggtatcgctgagtcccctccctgccctggctcagcttgtgccccagcagggccagcgagctggttcagctcagatggacaacggggcttctgggactacatccggctggcctgcagcaaagtgcccaacaactgtgtgagcagcattgagaacatggagaacatcagcacagctagagccaaggtgaggggccataacgggaacacccctgatccccgccctggacagaggggccctttgcccacagcactccgaatggggaccataccagagggacagataggtccctttgggacagttaaaggtgatcgatccatgcttttcagggccgggcgtggatccgggtggccctgatggagaagcgtatgtcggaatacatcaccacagctcttcgggacaaccgaactaccaggtcagacctcttaggcagcagcatgctcattcgttgcctaagccttaagtccccacagcaaacttcaatacctggactacaagttccggcatgcagtgatagttggcttctcgaagatgacatggttactggactacagaggcctcagtcacatgccattttacttggccttatgccaggacctacaacacatagccctgccagctctgcaaacaaaggcagtcactctgttcttggatcccagtgttcagagcttcagtgcttagagtggggtttgctgagaagttgggtcctg

SEQ ID NO: 20598 - DNA, 2711 bp, Mus musculus
gggtagtggtagatagggttcttcttgtaatagaccaggctggcctcaagctcccagagatccaccttctccacctcccgagtgctgagactaaagatgtgtagcaccaacgtccatccacttccttaaggtttaaggggtggactaggagtccacctagaaccaagttggggggcgtggagtggggtgtgagtgtagagctaactggctcttctcaggactcaagcaagactctaggcagaggctgagccagtccatcgcaggccttgttcatctctgtcttctttccctgggctgcctgctggcttggtcaggatgcctttgtgaagattgtgcggcatgagggcactaggaccctgtggagcggcctcccagccaccctgtgagtaccctagtcatggctgggtagggaagggggtgcttgagaggtttgggagcccttaagtgattttcctggcctctccatactcccagggtgatgaccgtgccagctactgctatctacttcactgcttacgaccaactcaaggccttcctgtgtggtcagtccttgacctctgacctctacgcacccatggtggctggtgccctcgcccgaagtgagcacaactaaccattgaccttctgggtcccagtcccagcctcttgctagcctgggggtgggggagtatgttaaaccctcaggccctggggcagcagctgggtttgaatgcatgacctctttggcctgacctctttctgctgtcttaccaaccctcgcctccttagtgggcaccgtgacagttgtcagccccttggagctcgtgcggaccaagctgcaggctcagcatgtgtcataccgtgagctggcttcctctgttcaagctgcggtgactcagggtggctggcgctctctgtggctgggctggggtcccacagctcttcgagatgtccccttctcaggtaggcgctcggggtcagggcctagggtaaagggctcttggtaatgtttaaccaagtccctccttcgttactaaaatggccgtgaagtcataatcacttccctgaaccttgggtccctcattatataaggacaggtctagcagggacctagggttttgcctaggttttcctgacctaagtcgtgaggaggacctggttgagagcaggcaagcctgcacctgggatggtgtggctgtgggggtgaggggtgagaagtctggagcccacctccctgccccccccatttaatgagtgtgtatctccttctcaagctctgtactggttcaactacgagttggtgaagagctggctgagcggactgagaccaaaagaccagacatcggtgggcatcagcttcgtggccggtggcatctcaggaatggtgagttgactgccctgggggtagggccaccagaggtgacctacagaacattgcaatgcctgccagggagcctgtgtgctttcctcagccgcccttgagatgcgttagtccctctcagggcttgggaatggagctgagccctgtcctcacctgaccaggtggctgccacccttaccctacccttcgatgtggtgaagacacagcgacagatgtcactgggagcggtggaggctgtgagaggtaagctgggctggtgaggggagagggcaggcaggggcctgagctgagccctactgagccgggccttgcatctgcagtgaagccgcccagagtggactccacctggctcctgcttcgcagaatccgggctgaatctggcaccaggggactctttgcaggtctgtctctgtgaatgcactgcatatatgatacatatccatgctgtgtgtgtgaggggacctggacccctcactgtggtctgtctttccatcacaggcttcctccccaggatcatcaaggctgcaccctcctgtgccatcatgatcagcacttacgagtttggcaaaagcttcttccagaggctcaaccaggagcagcctctgggccgctgaaagtcggggagcaaccggctcttgcacgggtgggatcaggagactgagccaagtgccttccctcccagtccagtcacccaggctgtcctcagacctggattcctgctgtttcccttcccaggattgcccctctcccgcctcccgaattcaagaccaaatctgatgatcgcccttttttgtatccccatgtttgttatagcttggcccgaggagcttgggccaggcagtatcttggccccattcattccttgtctaaagatgatggtcttctgtgcacagctgtggctgtagtgtcttggggtacgtgtgcacgtttgggggtccccagtcagacacagtggcccacacctgttattccttcacttgggaggctgaggcaggaggagtgcctccaataccaagccagccaggactacacagccaaattctatcttcacaaaaaaaaaaaaaaccaacagcaacaaaaagctggcatctacaggtatggtggccccgagagttcatggcgagcagatctgaagcctgcctggcctacatactgagctccaggccatccagagaccttgtcttaaaagcttcccaccttagggggtacccagacagatctgggtgaaaggtgcctgtctggtaggtagtaagggcctttcatgtggggcccactgtgttggggtgagagcaagtcttagaagggtcagatccagaaagcacctgcagatgtacagaatccggagccccct

SEQ ID NO: 20599 - DNA, 1193 bp, Mus musculus
agacagagaatgtcctgccatccaggcctcacggcctgtcctctctggccccaggcaggcagtgtgggggagggccagcaatcttgggaaggaaggtggaccttcctctatcagcagatttgtttacacgtttctctcggtgcccgactcgacctctcctcgcccggggcgctcatgtgtccgcccagatgttgggtggaggggctcaggtgtttgatctttcggcctctggtctggaggagcatgtggctgagaaaatagccatcactgtctttggccgacggctattctagcttctttccaaacgaatgacgtaaccttgaaggtcacagcaacctttgagccttagttttcccctcggcaaagtgagcacatttctagattttaaagattatagaggcaaactctggatgagacctgagtgcgctgtcgttaaagtcccagagcaccttagctcatgcttgctccccactccccccactcaggcctgccttgtcagggggtaagctccatttgactgtggtgtgtgttttcaggattgaaattccaagatggatgatcaggaccctgggggcattagcccccttcagcaaatggtggcctcaggagccggggctgtggtcacctccctcttcagtaagacctggggagatgggggatggggcagctgggggttaatgtgggctaaaggttggaggcagtttggttctgataaagaagagggtgagtggtgtcctgaaggaaccttcagacctacctccttccccagtgacacccctggatgtggtgaaggtccgccttcagtctcagagaccctcggcaaccagcggtgagtaccagatcaaggcgagctgcctgacaaaataaggatttcccagagatggggttctagtgggggaggctgcattcctgaccaccagggctgacctttgtgtttcagaattgacaactccctccagattctggagtctctcctacaccaaatgtgagtgccccaagccccaggcccttgggagggcccagggaagaagtgttgagtatccctcgagtacctgggttacccatgatcatagagtagtacatgagcccagcagtggtggtgcacggtgcgcacctttaatgtcccacttgggaagcagaggcaggcggatttctgagtttgaggccagcctggtctatggagtgagttccag

SEQ ID NO: 20600 - DNA, 1198 bp, Mus musculus
gggtggggtggggggacagttgtgggtaggcggtggctggcccatagggaagccagaccagaccccactgaccactgcacttctgtttttacaactttctccactgctcggtttcccatatgatcatgtgactgatgactgtccctctccatcccccaaggcttttgaaagctacaggtggcagttcagtgccggcagtggggctggccatcctcctgtgtctgctgaggtctcctctgcctcccagttagcccacagtcccatagataaagccacaaaagccacatgccttcctgactgccataccccgtgccccccccccccacttacccagagtctcagccgtatgtgaggccatgaatccacacgtgttcatgcccacagtgtgtgccagctgacgcatgtgcgcttgctgcacactggtaggacgctgacacaagcgacacatctgcttgctttcctgttggcttgttgagaagactcaatgaagccagggccttggtcagagcacaggggagtgcgtggcctcagagtagaaggtggcacagagtttaaggtggctgccaaactttgcttggcatttgtaggcagaccatgtgggtcctgatgagctggctggccttcgcggcagggctggtagccggaacacagtgtccagatgggcagttctgccctgttgcctgctgccttgaccagggaggagccaactacagctgctgtaaccctcttctggtgagtgcctcctgccccagttggcaccccgggccttttgaagggctggctaccttggattgaccagagcaaggctggcacagaccctttggttgatgtcatctcttctttccaggacacatggcctagaataacgagccatcatctagatggctcctgccagacccatggccactgtcctgctggctattcttgtcttctcactgtgtctgggacttccagctgctgcccgttctctaaggtgacagtgccattggcttggggagttggggtgtgtgtgtgtgtgtgtgcttaaaatctgtgtttacctctttccttcactctaatagtcccaagcaaaagcgtcttgctcacacagacctctctgtgtccatagggtgtgtcttgtggtgatggctaccactgctgcccccagggcttccactgtagtgcagatgggaaatcctgcttccagatgtcaggtgct

SEQ ID NO: 20601 - DNA, 3151 bp, Mus musculus
ctggttcacacacgatgcgtttcacccacgggcacccacaccctactaaagaagttccctgcacaaaagaccaacagggcaggtgaggaggctgggagccacccagccagcagcacctggggggtgaagccacatttgactcttggatgggaaaaagtccccaccatcctggcaacccctccacatgcctcattgctctttcagtgtctttgcctttttctgtcgtgtgccctgatgctaagacccagtgtcccgatgattctacctgctgtgagctacccactgggaagtatggctgctgtccaatgcccaatgtgagtgaatggctggattcccctgagcccatatatagtcttacaaggaggctccaagcactgggctgatccctgagagctctaaggctcatgctgccccctagtggcggtttgaaatagtgtacgctatcagcctggctcgctccctgtcctcactactggagttcagagacttatacttgtcccaacctaggccatctgctgttccgaccacctgcactgctgcccccaggacactgtatgtgacctgatccagagtaagtgcctatccaagaactacaccacggatctcctgaccaagctgcctggatacccaggtacaggaccaaactagaccccatttcattccctcaataaagaggggttcttgtcagttatggaatggctatcagctgggtgggttttgatggccgcatggagggacctggcagttgtagaccctctccactggccttgcatgaggctcactgtgactgggttagctgtgtgctccgttctccgcacctggtcccactgcctttgatgatttggtctctgcccacctcacagtgaaggaggtgaagtgcgacatggaggtgagctgccctgaaggatatacctgctgccgcctcaacactggggcctggggctgctgtccatttgccaaggtacctgggagcagtgggcactgcagtccaagcggaaggggcagccagcttggtaccagtgcttattggctttgccctgtctaccttaggccgtgtgttgtgaggatcacattcattgctgcccggcagggtttcagtgtcacacagagaaaggaacctgcgaaatgggtatcctccaagtaccctggatgaagaaggtcatagcccccctccgcctgccagacccacagatcttgaagagtgatacaccttgtgatgacttcactaggtgtcctacaaacaatacctgctgcaaactcaattctggggactggggctgctgtcccatcccagaggtaacatagaaagggaggcagccctgagggggtagagatagcatcttggcctgggcaggtgggtggcaagagtcccgtggctttatttcttctgcactctgtctagtccagggtgggtacccagtgctgtgacctgtccccagcaggagaagctatgagctagagaggtagactcccatggtcctctgtagggacattcttctctgcccacccctaggctgtctgctgctcagacaaccagcattgctgccctcagggcttcacatgtctggctcaggggtactgtcagaagggagacacaatggtggctggcctggagaagatacctgcccgccagacaaccccgctccaaattggagatatcggttgtgaccagcataccagctgcccagtagggcaaacctgctgcccaagcctcaagggaagttgggcctgctgccagctgccccatgtgagtctccaccccaccgccctgggggaagggagctgtgttcttgggatatgagtgtgatcccatcccctcgctccacaggctgtgtgctgtgaggaccggcagcactgttgcccggccgggtacacctgcaatgtgaaggcgaggacctgtgagaaggatgtcgattttatccagcctcccgtgctcctgaccctcggccctaaggttgggaatgtggagtgtggagaagggcatttctgccatgataaccagacctgttgtaaagacagtgcaggagtctgggcctgctgtccctacctaaaggtcagtgtgaccctgactctggggctgggtgtggccatgggctgtattctgccctgtctagtacttactctcctttgactatccagggtgtctgctgtagagatggacgtcactgttgccccggtggcttccactgttcagccaggggaaccaagtgtttgcgaaagaagattcctcgctgggacatgtttttgagggatccggtcccaagaccgctactgtaaggaagggctacagacttaaggaactccacagtcctgggaaccctgttccgagggtacccactactcaggcctccctagcgcctcctcccctaacgtctccccggcctactcatcctgagtcaccctatcaccatgggaggtggagcctcaaactaaaaccttcttttatggaaagaaggctgtggccaaaagccccgtatcaaactgccatttcttccggtttctgtggaccttgtggccaggtgctcttcccgagccacaggtgttctgtgagcttgcttgtgtgtgtgtgcgcgtgtgcgtgtgttgctccaataaagtttgtacactttctgaatagtatctgatttgttgcgccagggccctctgataccagcattccccataggaaaaaaaaaatcacacatacacatacacatacacacacacacacacacacacacacacacacacacacacacacacacacagagagagagagagagagagagagagagaaagacagagctttaacctcaccagctttgtattttttttgttgtcaagagtgttatcacattatcctctagtctccaggatcgccccagccaccagccctgtgacatccaagcagcacccctcccctcccaagggtccacagagattgcccctcccttcccagccctcaccctagcagctgaggctggctcgcccctcctgctctcccacaatagatctttctatgtacagccacgtttatacaggcactgctcccccaccccagccctcttccccagcccctcccatgggggaccgggtccctcccacctccctctgtttggaggccaatccagggtcccttcccaagacactcccccagcacataccacagatg

SEQ ID NO: 20602 - DNA, 1195 bp, Mus musculus
agaccagaggatactagagttgggacagttctctctttgttgggaggtgagcacgtttataggtagagagatttttggcttcaaagttctgtgccgtctgcccagctcgattgctatttcagcagtagaggttcctttttttttttttctccagtgacactgaccagaagtctgtccatccctctcccctttgcccttcccccaggctctcagccctccttaacactgacccaaaggtgcttgtaatgcaggtctcatctcctttgttagtgctcttcctatgactagaactggttaagcagtcaactgactgttaaccctgcttgcctaggccaaggttctctgttcctgccttctcaaattcccagcagagtgggctgtgttagggaagtgagtgctgggcacttgaggcccgtccctgcctgagcttctcctaccttctgctcattgtccccttacaagtatcacttttaggataactagccctggaaaaacggtatctgtttgaagtgaagggactggttcttcttgctttcagcccgtgtaaatatttaaataaaacagtattaacatttttgtgctgcttctcgttaggttgtagatctagccatgctctggccgcctctgccatcctggaggtagttttccttaacttccagaatagtgattttaaaactttaaaaaaaaaaagggggggggataacctatccttacatacaagcataacagattgtatctaactttatcacatatgatagagatgtatatgctgtaaagtgaggggaaggagctttctaataaaccagtgctttgtgcaaacttagtggagtctgttgtgattgctgctgcataggctggggcaggtgggagtgtgggttacaaacagtgtcctgttggacgcagtctgataatgggccctctaggctagcttgaaatgttgaaaattgttatgagcactcaggtagcccatgatcaggattagtttaccttaagatgctttacctggatgcttttccagtcttaggcaggtgactggaagtgtgcacttaagattcatctgctgagcctttgacctccaggtgaaattctgtattaccaggcttgagttaccatagtcaactctgattaccgctgtaatgttggagtgcttctgcctggcctataagcctgaagccagcaaaagtcttcatccaca

SEQ ID NO: 20603 - DNA, 1302 bp, Mus musculus
gatttagatttgaggtttgctttgggtttactatcagggatatttaccccctttctattagtccctccctcctgtgtttctaagctagggaacaccagtaagtgctacccacactcctctgcagcaacatctccagactgtcaagtaagcctccttcctccctctactttctgatcctctgcacttcccctctgtaagttcaaaacattttcctcctctaatgggttgtcaccaaagcacttgccatgggcccatctggtcctgccttctcagtgccacgagaaaggccaggctgtctcttcagtggtgaaaactccacttttcggcagtgtctttgactatccgtttgtgacacgttatcccaggtgaggtggaagagggagtctaacctagaaccaaaagcaactcaggctgcaatttgatccactttccttacaaacagagccatgcatttggcactactgtcctcatgcccctcatcccagaagaggcatctacatatcccagaaaagaagatcctatcgtgagtagaagctacactgaacatagggtcacccatgtgcttcccagaaaggagctcgtgtctgaagggtatatttccttctgttatgttgatgttttcttcttaatttataggattttttaatgtaaaattgcactgaactctataaacataaatgctgctttttgtagctcatattaaaaaggttccgtatttgtagtatactgcaataatattttttacatccagctctttaagtgatccttgttctggtggctttctgtaaatatgtttgccctagttgaattaagaaactttaaaggttataaaagaaaaaaaaataaaatatttgttttctgctagatgcaaaaatgactaagcatgtatattttatcaacctcctgtattttttgaagttatgaactatataaaaatgttgacacttttttttgttttgttttgtttgctgggacagtgttaaataatttgcagtagttggttcatcctgcactgggactctcgggttgatgagcagcaggcggctgctgctgtcaggaggatgcacagttgcagtggtctccctgacgtgctttgttatacagagaaaccgtggactccatggaggaggggaggattggttcaacagctttattctctggaagcagtgacactcggtgattgtctgggaaaaggggtcctttggtttccctgggtaccttgttccagacagtcttatttgccttcctagtatttagccccctctgacaattttttaaatgtgccttgtgggttggctagac

SEQ ID NO: 20604 - DNA, 1191 bp, Mus musculus
tgtgattgtgtataccctaatctcagcactctggaaataaagacaggctgatttctgaatttgacgccagattgatctatataatgagtctgtcatctcaaaaacaaaacaaaaactgaaaaattaaaagaaaataaagttgtattattaaaaagatatattgagtgtagagcaggatagagtacctctttaaggatccaagttcttcactactgggaaaagtaaaagacaaactttgagaagagggggccaggcatagtggtgcaggcctttcatcccagcacttgggaggcagagacaggcaaatctctaggggttcaaaaccatgctggtctacctagtgagctccaggacagccagggctacacaggaaaacaaacaaaagaggaggaggaggaagatgggacagagccttggcttctgaatgctcagaaatcttaccactttacctgcaaaagcataataccgtggcgtgtgaaatatgtgtgcacctgtgtgtttcagtcactctccagaggaccattcccctcatattcttggtttggtcttagcctatacttcagatttctattttgtgtttaatttgtttggtgtatagaccaggctggccttgaactcagagatcctcctgcctctgtctccagagggctgggatcagaggtgtgggctaccatgcttggttgcagtttcttatctgacaaatttacaaattgcatttgcttcctgtgtttgtgcaaggattcatgtgccatggtgtgtgtggatgacaggacagcacttcagtctggtctgtttatccacctttacatgaactctagggattaaactcaggatggccaccctgaaccttctgaacctgctgaaccatctcatgagcccgatttgcaactttttctgtagtaaatgcatctttcttgggcatgttctaaggatatcgccacaaaagatgtatgtcaggctactttctggttcaggacatattataacacttgtttttcttcagaagcaactttagctattttataaattagcagttaaaagatggccaggtaaaaatgatcagtgtgtaggttactggtttggcactgggccctgtacatgcaacatcatttgttcattgatatgaggtagactgggctggtgagatggctcagggggtaagaacactgactgctcttccaaaggtcctga

SEQ ID NO: 20605 - DNA, 1209 bp, Mus musculus
cactgtgatagtaattctaagatgaatcgtgtattctgttgtagtctgaaaggttaaagcaacccaactaaacacttataagtgggcatgctgtgtgtgaagagagcattgaaccagatgctggtgcatgcatgacaagtctaaccctgcggaaggaaggtagggttcaaggacagactgagctacatagggcagagtgcttgcctagcttgtagaggcccctagatggagtctccagtgggtgagaggacgcaaaaggtcctgtgctctctgaactgctctagttcgtccagttaaccttgaagctctgcagtatttccctgtcaccagtgagtactatcctggatggtcttgtccagaaacaccaatccctggaacttgaattgggtacaatggccaagtacttgagaggttgcttcagtttggcagaaggctgccactgctacgttataggaaagggagacataaaacagcagggaagcgaggcctgggtttggtgttctaggactgttgataggagaggacaaggaatgtttacaggttgaaggaggtcagagcatccatatccaggaagtgactgaagcataggagcctctccatgttttatctctagctctgcttgtggccacacaagttgcataggaaggggctggtgagatgactcagcaggtaagagcacccgactgctcttccgaaggtcctgagttcatatcccagcaaccacatggtggctcacaaccattcgtaatgagatctgactccctcttctggagtgtctgaagacagctacagtgtacttacatataataataaataaatctttaaaaaaaaaaagatgcataggaagtctgcagtctgtcttcaattcactgacttcaaaaagaagagcaaccaggtggtctgtactctatagacaagtctcacactcagacctctgcctgcctcctgagtgctaaaggtgtgctccaccaatgccaggacagaatttcttacttaaaaagagatttcctttaaatagtagctaattttggtgtgtgaattttttttttattattttcaaggtttttgttttgttttgttttatgataaagtaagaaagaaaagcaatatgagcagttgtgacctgctaggtgctttgttgtggttgacaataactatagagccagcctggggaggtcagtgctagatgccctttctgaaaataaacat

SEQ ID NO: 20606 - DNA, 1190 bp, Mus musculus
gctctggtccctcgcaagtgctcttagccactgagccagctctccagccagcctttaacatttttttttaagcaagatcctgctttataatccagactggcattgaatttttaaaccaagtactaagattatagatgaacaccaacacatctggctgtctctaatcttcctactagaatttaattgatatagataaactcatattaaataattagaattcagtcttcagtaagacattttaattttttttaaaaaatttatctttagagtcaagaatgatggctctttggttaagagcacttgttgctcttacggaacacctggattcactttccagcatccacatagtggttccagccatcagtaattccactttcaggagatctaaagccattaaccttcaggcaccaggtacatgtgtgtacatgcatacatgcaggcaaaacactcacacataaaataaattttaaatttaaaagatgtgtttatgtttatgtgtgtatttctttgagactatatgccacatgtcgagggctccctgtagaggccagagagagtgttggattcctcggagcaggaaatatagttgtgagcttcccgaagtaagtgctggattttgaactccaatccttttgaagagtagcaagcatttttaacaactaaactgtctttccagccccaagaggtttaattttcagagctaagatgacagtgatggggggctggagccctagctcaatagttgagagcatttgttgctcattcagaggaccagggttcagttcccagcacccacatcatcatctgtaactctagagctaggggatcctataccctctttctgtagacaccagccatgtacatggtgcacatatactcaggcaaaacactatgcatatacaatacatatttaaagcagaaaaggcaggcctagtgactcatccctttaatccccgcacttgggggatagatacaagcgtatcactgtgagttcgaggtcagcctggtctgcatagtgtgttccaagacctccagagttagtgagaacttaagcaaaaccagaaaatactagaaagaaagggattggagaacagtagccggaaggaaatggtgaacggtagacaaaaagtacggaatgaaaagatcacttagttttcattataggggttgtctgtttgttgtttttcaat

SEQ ID NO: 20607 - DNA, 2231 bp, Mus musculus
gagacagtcatccagactgaggaaggagcaagagtattgcctacaggacttgggcctgaatcccttaactcactggtagccttgttccgaaacaccaatgtggaagatgttctcaatgctcggaaattggagagagactcacttcgggatgagtcccaaaggaagaaggaacaggacaagctgcagagggagaaggacaaactagccaagcaggaacgcaaggagaaggaaaagaaaaggacacagaaaggcgaacggaagcgataaccttggcccactctgctccttccacccatgaattgtgtgtctgtgtatttaagagaactgagactaatgtattttccaaaatttcctaaggctttcccccgttgtttacatgttgaaaaggaaaatcacaatcacttgtaaatgtgccatgctctggtggtgtgggcagtcaattattgttagaatctttaccaaagatctggagttagggtagcctttctattttagtactgaactcctgtgcccttcttttttaaaaaggtcttccctcattttgtatatttagccagatacagaaagctcacatcctgaaggaaacatgaccattctgagtttaaaaaaaagtacaaattgcttctgaggcactatttgccctaaaatataatgggcttttgttttgagactgggtttcattctgtagcccaggctagccctgaacttgttacagtgtcctttttttctcagcttcaggattatggacatagatctccacacctggcttgtaactattttgaggctgaaagagctaatgaagggccctgcctagatccagactttctgacatcaaattagggaagtggaggaaattatttggaatgtgatctaagtttttgtttttttttaatgtgtcaacttgggctcaggctgtagttgtgttgcgtgcctgcttagcatatacaagggcctgggactgggccccagtatggaagaaagacttaacctgtgggaaaaacaattatctttttaaatagagagctatgtatttttcatgtaatctgtgatttcaagaagatgattggagtataaggattatcattttgttaggtagagtttctttttttctttttgtaatcatgagttcccttgactcccctcttgattttctatcttgatttatcctgcaggcatgtcctaccttttgacattgtgacttggctttgttaaaaacttgcaaaaaaaatcatgttttaaatgttatgattttgtgttaggctgaatttatagctgtccttgacctcgggttggacacacctgcaacatgaatagtaagacctaataattcctggcttaaagaaactgaaggaattactcttttagagaaaaacactggaaattttgctaacacaatacttaaaagtatatagttggtggttaagcttatgagatgagtgaatggaaaacctgggagaggaaagggtggacagaattcaagtctgcttctgtcccagccacatccacttgtcaataaaggccttctgtacctgactttgggcaacaggtatcaaaagcctcaagagaacagtttctctgataagattattttataccaggggtcagaagactccactcacgggccaagtttggcccagtcatttttgtatggggaaaaaactaaaaaggttttttacatttttaaaaggaagacattcgtgactgagaccatacgtggcctataaacctagcatttggagaaagtttgctgacttttgtaacattggctgcctttgtgcagaagaaaaaaacatggtagggaaggagctctgctgcctctttgccctacaaccatggcattgcaaaaataaccacctttttctttttttaaataaactttatttaagtcagtgtcttctgtcttgttctttccaactcctggtggaaaggtgcttgtggctggtcccttgggagtgatctttattgtctgctcagcatagtagccatactctgcaagtggagtgtcttttcccttaaatgtacaaatcctttcaaagttttctgtgaagtaacgattagctcagaggagtaccttggtttttggagcatgagtaagttgactttgaagttttttgagggagtagtggttttagtcctttattatgtaatacctgtgagctctgcagagaagcatatgacatgttttagtaatccttactttatttaggacttggattctcaccttcatcttg

SEQ ID NO: 20608 - DNA, 1291 bp, Mus musculus
ctttttagcctctaagaagattttagagaagcttcaggcatttcccgccatgttaagattttcagaaatgagtctcggcgatgcccccatcctcactgcatccagcctgcttcctacccttgtcgatgaaacacttttcacgcttagtttgagatgtgtgaaggccttttttcccacctggttttccttaacgtccctcactgaagcagataagaaagatgatgcgggtgcctcaacagcaaacgtcagttctgacagaagtatccttctctttgtccatcccttgtgtttctcacggtcctcctggagatgagttgtcattttgctgtcactgctacaggctccctctctccagggaagtcctgtcctgtcagtattgggagccctatgcctagcacagccatggatagccaacttagcaaatactctacccccaaaccaagttaacaaggcctatgcaagcctccaacgtgctagggtgactaagttcctgatctctgtctccacctccaagtactctgtttaaaagcatgccccacacctagcaaaggaggtagcttttaaaattaatttgtatgattttcttattaattaattaattaattttttattatgagacagggtcttactagatagtcatggctaaactggaactatctatatagaccaggctggcctggaacctacagagatatgcctgcctctgtctcttgagtgctacgattaaaggaatgcaccaccacacctggcttcttgttgggtttttgttgatgtttggtttctttgtttgtttggtttggtttggttttttgagacaggagtttcttttagtccagactaaactcaaactggctatattggaggctgtcctttaaggtatgagccatcatacccaacttgagggatatatatatatatatattttttttttttttttttttttttttttggcctggaactctggttgcctgggggctgtggaaaagttttaaatgtgaaggttttatctttattcttaaaaaccttgtaattgaaaagagaacagaggctaaattcttgaagctgaaaatataaaatattaaaatatgtgttgagggagaaggtcccactaacaggtcactctgagatgttccctaagcaggtgaatgtagaactcccctttgaagtaagagggtacagtgcgctatcagggattatctcaggaattcacttttggcgtgacagactgacaggaaggccttgtgtatgcttaggctagtgctcttattgtatagcctaaagtagaaaaagt

SEQ ID NO: 20609 - DNA, 1584 bp, Mus musculus
cactggaaagctttctcttcccatcaaactcatgtttgtctgaaggtgctgagtctctcttggtaccatgaacagagctttaggtccagcagcaagcattttatgtgggtgtcttgctctttctaatagaaagctgttgcaagacacctctcattttgaaattctgaaagtattgttttgtttcttaaatctgaagtactaccaagcagtaatggtgcacacctttaatcccagcactcaggaggcagaggcaggtggatctctgagtttgaggacagccagggctacacagagagaccttgcattgaaaacaaacaatctggggctggtgagatggctcagtgggtaagagcaccgactgctcttccgaaagtccagagttcaaatcccagcaaccacatggtggctcacaaccatccgtaatgagatctgactccctcttctggaatgtctgaagacaactacagtgtacttacatataataataaataaatctttaaaaaaaaaaaaagaaaacaatctgaaatgcccgttctctctcactcacagcctgggacagacccagtgtgtatccgtttgcctttgctgctgcccgtctcttccccatacttaccttatcatctaggcatttatttatttacatttgctttttaaaggatctttaaacttcagcctagggaagatcctcattgtccctaacctttttagcaggtggagttaaagggaacttttcaaaaaagagtatatttttatatatcatgagtaattgatagacaatagggaaatgcctataattctaataagacgggcacgattttaaccacctaagtctagctaagacaagccccagttcttgtattactagctcattcagcagacttctactaaactgaaagacagaaaaagcacacacactctcagccatctcccagagcctaggggagaacatagtagcctgccagcagagtggttgggaattggggtaaagaggaaggactgaagcagaaatgccagaaaccaccaggcaaaggcattggatgccgggagcatccattggtttctaacaatgcccccagtgctgctgcttgacccagaatgatgagaatgttatttttttggtctagctaattcttcagcttctcagagtgtacagaaagttattctaggtcacctccttatgttcatacacagtgaagtttattttaccctcttgctaaagagttaatcatggcaaggattccccaactcctcatgcctccttagcatatttctttcagattttgagcatagactttttgcagaatacagcatttactccttatagagttctatggacctacattaagaaaaatgatcctggggctgggaagaagggtcagcagttaagagcactgcctggtcttccagaagacgggttcaaatcccagtaccacatggcagctaacaactggctgtaacttccattcgaggggaatcttttggcctctgcagacactgcacacgtggtgcacatgtaggcagaatacctgtacacataaaataataaacctttacaaataaatttgatttaaaaagaagtcatgc

SEQ ID NO: 20610 - DNA, 1618 bp, Mus musculus
atggcgaggcagacaagaaggcagctcggagcaaaccctatgccatgcgttggaaacagcaccgggctctggaagaaacggaagaggaccatgaagaggatcctatgatgtatccagagatggagttagaaagcgaaaaagaaaataaagagcagagccaaccaaaacctaagcatgatggccgacgacgaattcgagaggatgggctcatgaaaatctatgtgttgcagctgctggccaggactgtgtttgaggtgggctttctaatagggcagtatttcctgtatggcttccaagtccacccattttatgtgtgcagcagacttccttgccctcataagatagactgctttatttctagacccactgaaaagaccatcttccttctgataatgtatggtgtcacaggcctctgcctattgcttaacatttgggagatgcttcacttagggtttgggacaattcgagactcactaaacagtaaaaggagggaacttgatgatccgggtgcttataattatcctttcacttggaacacaccctctgctccccctggctataacattgctgtcaaaccagatcagatccagtacactgagctgtccaatgctaagattgcctacaagcaaaacaaagccaatattgcccaggaacagcagtacggcagccacgaggaacacctcccggctgatctggagactctgcagcgggagatcagaatggctcaggaacgcttggacctagcaatccaggcctaccatcaccaaaacaacccccatggtcctcgggaaaagaaggccaaagtggggtccaaatctgggtccaacaaaagcagtattagtagcaaatcaggggatgggaagacctccgtctggatttaatcttggttgggcttaaaacttgggttttcatagtttatggtaagcagcaacttgctgaataatgacttccattgagtaaacatttggctctggttatcttcagggatgctgttggctcatgatccaaactcaggggactctgaaggtggagctgggatgagtcgggagagggaaacacagtgttcccaggcacatgttctcagcaataatgcagttgcagaactttcaggttgtgtcttccagatccagagaagaactgatatatttaaatcattcttgttggacagtttttgtatgtacagtattatggtacagtttttttagtataaattttttttttgtatttgtacattggactgctgtagttacacttttttatattaaaggaaaaaatccttgtaaataatgtctgttaaagggtaatgttattactttgtttagcaaatattatcttgtgattagaattttggtagatggtacacttaataaaagtgcctctcgtgtttcaggaaaggtttaagatctatctatagggaaattgagggagaaacaccagtcttcgagtgtttggaagaagatccctgttagaaagaggttgagatctttcttctgtctgagagatcttgaaatctccttcctgttaccagagttgtggccgttcttggaaaatgtttccaaaggaagacagtgatttactgctgctgtgtgctttgatggaggatctatgacttgaaaga

SEQ ID NO: 20611 - DNA, 1193 bp, Mus musculus
tttacttaatttgtgtgtataggtgttttgtctacatgtatgtctgtgtaccacatacatgtcttatgcctgcagtggccagaagaaggcatcagatcttctagaaccagagtaacaggtggttatgagccattgtgtctgcttggaattgaattccagttctctggaagagcacctagtgcaagaataaaaagaaaagaaaagaaaagaaacatcgtacaatagttactgctcatcccatggttcccttgtactgtttttgggaaactattctttttattcagggggtggaaggaggagctaagcaagttgtaggctagctaagtccaccacaagagatgctgaaaatccaagaaaactaactagctaactaaataaatagaggcagctaatcacatttctattgttgaccttttttcctcaaaagaatttgagagccaaatgactttaaacagccatagccaaaatgaaacatctccggggaaccaaacaaatgggtgtctgaaaaacgtgaacaaagatgagaaactgaaacttgaaagtaaaatgcttaacttctagcctgacactagattctgtacaccattctgttttctgcttaagccagccacgaaagccactgcctcggaaaagacgtgttccccttcccctttctcttctctctcctctcctctcctctccactcctctcctctcctctcctctcctctcctctcctctcctctcctctcctctcctctcctctcctctcctctcctctcctctcctctcctctcctctcctctcctcgggagaactggggtgaagtcctttctacatgaaacctgtatgtgatccctcttgtgctggggatgtgagtgatgctgggaacccagccaggccctttagtgtgctaagtgaacactactcctgagctacacctcagctgtatagcacaggtcatcactcgtaagtgccaaaccgtagtgcaagactggctggctttaggatactcggtcattagatgatcttggacaacttgcacacattgtccaattctcactctggagtttatggagacccaggaatagactacctgagattgtcagacatgtgctttatacttaattttgaaaaatcctatgaactctgtttaacagaagaatgcaccaagattttgcttgtttctaatagtacataacagaaaaatgttat

SEQ ID NO: 20612 - DNA, 1153 bp, Mus musculus
ccttctggtgtgtctgaagacagctacagtgtactcacatacatgaagtaaatagtccagagtgacatgaaactcagaatgtagttgagcatagccctgaatccctgatctcactgcctcacctccaccaggtgtgcaccacatcctgttagcataaatagtttattatttggaccacaacagaactctcaacaattaggagctttgtttctagttgctttttatatgtttttcatggggaaacttacccctccacacacacacactttggaggtttgaaattgtatatatatgagcataatttcttaagataggaaaaataaaaaggagatctgtacacagagtagtgttcttaaactctaatagctagtcgtaaagctgtaaagtaacatttgggtttttaaaagcgtgtctaggactatatattaatactgcagaataggcccattgagcttaaactgaatctcatggcatgttgatattccaacaaaagaacacttgatatgaaggaaagtgattagaagatgaaaatttgcataacattcatgttgcaaataaacatttaatggaactcatatttgaaactgatttaaaaaaaaacacctgtatatgtgtagagggattaagccctcagcctcctgtgtgctaagcagtgctctcctctcctgatctaaatccttaacctctggtggctgttttaatcagtttttcaaataaaagtaaattccttccaaatactcaatactagatgaaaatcagtaaagaataacagcagccactgtggattttcaggcactgttgggctgaatgttgcgcagacctttaatgtcagcacgaggcaaaggccgggaggtgagttcagtctttcttggctgcataggaggtttgaggccagcctagactacgtgaaatgctgtctacaaaagcccagcaatttaaaaacaaaacaaatattagatgtgataacttccccttttttaattagaaaattaagttatgcatttgtgtgtgtgtgtgtgtgtatatgtgtattatgtagacaggttcatggcatgatgcacagatgaaggtcataaaacaacttttgggagttagttctctgttaaccctagtgaggcagggtctttcttggtgttgtgttgtgcagcttacc

SEQ ID NO: 20613 - DNA, 1169 bp, Mus musculus
ggtctcgttgactggagttactctgcggacactctgctgtcttgagtctagttttcttcctgaggaagcgcctggagttgggaggaggtgagcgaggtgattgatggcctgcgtatgggagagaagtctgaattcaggtgctaacatcactaaatgtttttcagctatgctatactgacatcctcttcacagaacaagaggtaagtgagtgtgtcttgggaaatcagactttgcctacacagacccaccagccatagttttgtagagactggggaggccttttccggagcacctccatttagtcttgccttatgcttctctcctgccgctttctgtcattccataatgagaactgggaaggcaagctgagtacgggggcagagcctcccagcccttgaatatattcaacaaatactgagaggtgatgttcatacttgtaaaactctatgtgatctctacaatatcccacagttcctaagatgtctcctgtgggaccatctgcttccaggaggggcttctctgtgaagggctgaggtccagtgtgccgcttgtctctttcagcctgaatctgtcccctcctttatcatctgtcccttttttccctaaagaactctgtggaaggctctcatacgtgcacaaagttaactaaaggaattgagggcagtgttccacaggataagccatcccagtagcgctgttagtgttgtaacagttactgttggagtgaggcagagcaccactgttcacaggataagccatcctagttgcattgttagtgttgtaacagttactgttggagtgaggcagggttttgtttgggttttgcttctttcagtggttccatgctgacctcagactccacatcatttgccgcagcctcatcagtgctgctgttagaggcctcattgtgggtttcagaggtttttcccttccctccctccctccctccctccctccctccctccctccctccctctttctttctctctttctctctctctctctctctctctctctctctctctctctctctctttctttcttcctttaaggtggttgtgggtgagatagggtctctctctatagtcctgtcttggaatttgctatgtaaaccatgctgaccttgaactcacagagatcctcctgcctctgcctcctaagtgttggca

SEQ ID NO: 20614 - DNA, 1199 bp, Mus musculus
ctgtccatcccctgccctgggtctcatgcatcccaggctggttttgatcctgctgtctccaccacataagcactaagatcactccgtaacccatcgtgccagcctcgtctgaatttaacctttctttttcaatcattttactgttgagatctgtataatggtaaccatgaaacccagatgacagagaacccctaaagttgtcttccaacctctccatgcactctgtggtgcatgcctgtatactttcatccagagggcactggtctcatgatcttggtttccagcctgtgttgtcttgtgagcaccctgacctagggctctgaatggtctgcagttgatctgaaagttgttgccggctagaaatagctggaccacctctgtgcctccctcctcggggagcttctgccatagtttgttttctctttgtttttccttccagtttcttagcagatctgatggacaactctgagctcatcagaaacgtaaccttgtgtggccatctccaccacggcaaggtgagaggctgttgtgcttcttggaatgggatttctctttgtacctgcttaacttctgagcctttatgaagtgctaaggctgggcaagtgattgggggacatgaagacaatgctccctgcatgttcttatggaaccgttgtgtcattccatccacttacatgcctgagccttgtgtttacatctagacagaaaaagggaaattaaaccttactctggtttttataaccttttatttcctgagggaggactttccaagaaagatttcatctttcattgaaaactaatcttgtggcttctgtgttaatcctttgctgtcccatagttctctttgtttttctctaccttccttcatgcctaaattacatggggcattgggagtgtgggggaaaggcacagattttcttccacaattgcaggtcttatccatctcttctttttcagacctgtttcgtagattgtttaatagaacagacgcatccggaaatcagaaagcgctatgaccaagacgtaagtagaacttgggctgagcgcaaggggaatgccttgcccctccggtccctcagctgcactcatcaacaggggtgtcttccgacggctgctgtgtgattggaatctattaataggcgtaagctttctcaagagcatggaggatgttaacctgcattatttttaggtgatccgtt

SEQ ID NO: 20615 - DNA, 1220 bp, Mus musculus
gccactaggaaggtggaaggaaggccatttgatactgaagcatacactagagttggtgtggtcctcatctctctgcacaggtgttgccatggtgatggctgtggaagacagcgtggttcgggtggtcgtgcgggtgaggcctcccacccctaaggagctagagagtcagcggcggcctgtgattcaggtggtagacgagcggatgctggtatttgaccccgaggagtgtgatgggggatttcctggcctaaaatggagtggttcccacaatggccccaagaagaagggcaaagacctgacatttgtctttgaccgtgtctttggtgagatggccactcaggaggatgtgttccagcacaccacacacaacatcctcgacagctttctccagggctacaactgctcaggtgagaactgcctgctgggtagtttctggcttgccttctgatatctctgctttgggggtggggtccactcattcacttgaattcctctgggtcctagtctacagtagccaatcagttagacaccaagtttgaactcgtggtgcttacaacactctagaagaaagaaacgtggaccatgaaaccacatgtgtgtgtgtatgggagtgtgagtgtgtgtattcacaaactgtggacctgtatcagaagacagccatagcatagggaaggaaggaatagttctcaactccagtgcagatcctactgaccagaagcccacaggctaaacttgagcactgaacggtaccaatggcagaagccttgggactctggtcacaggcagcaggggaaagggacttgggaaggccgagcttggtggaaatgttctgggaccgctttggggagaaagatttggccctgctgccacccgttccacattgtgtcctttatagtgtttgcctatggcgccaccggggctgggaagacacacactatgctggggagggagggagagcccggcatcatgtacctgaccaccatggaactgtacaggcgtctggaagcccgccaggaagaaaagcaattcgaggtgctcatcagttacctggaggtagggctgctcccgctctggcccatgtcacacttcattctcagaacacctggagggggtggggtggggaaaaggctccagggaacagatagagcccagtgagagaccaggtgaaaaggaaacctgtccttctgctcttgtcatcatcacaaagtaccactgcaggg

SEQ ID NO: 20616 - DNA, 1645 bp, Mus musculus
gaggctgggatccatggtcacgtttgctctgccctcagtgaccgtgatacacagctggcgcggctgatgaagcggaacaacctgaaccgggaggatgcagaggcgaggatcaacgcccagctgcccctgaaggacaaggcccgcatggccaatcacgttctggacaactcgggcgagtggagcctcaccagacgccaggccatcctcctgcacgccaagctggaacgctccatggagtatctgccgctgcggcttgggttcctgacgggcctcgcaggcatcgccagtctcctctacctgctcacccgttacctcctcccttccccctagctgggtacacccaggcagcaagccttaggcttccttctccttggaggcctgagttaggtaccatgtccacaacactacaactctcttgactctgagactggcccctgcggtggggcggctttggagtgtaaccagtctgggactcagcaaaagaagcccactaccccccgcgccccacacacacacaccgacaccccaccccacccgagccctaccattcctaactaccactgcagaacaacatccatggtggcaggaaaccagcggttagcaggctctgcggctctccctatggttacgactgtgtagccaaaagtgtcttgggcttgaacctttccagagcatctgccgcatcatggccacaagctgtctagtggaccacagcaaatccttccagactgaaggcctccttcaaatagagctctcctgtgtgcagtgtggttctcctcctgggcgtgccgtggctgggtcgagcagagccctttggagcagtccagcttctgatggagctttcctcacagctagccaccaccccgtgctctcggcattccccaggccccaagctctcctacctctgtgccttccccacatgctccctgccctgcagtatcttacccctggctgccccaggtcaggctccagcagccccagactgagttaggtgctatagagatcaccttcctgtctcatccaaatccacgagagaataacgcgtaacctggttgggttctcccagactgtacgcctctagatggcagggccgattcatctccactctagtgtaccacagcctgccccacaggtgctcaataaatggaattgctctaaaatgtccactgaattccacttggcctttgttcacactgagggggcctaagcataggactctagtcagacctgtgcacctctgggaagtcggtggagccgtggggagatcacatacactcgccacaggtctgctttttttcttccccaacccaattagaccggtgcagacatcagccttcccggccggcgtctacagacctgctgatgtgtagatcttgttcgcagcagcctattaaggccaaaaatgagtgtgactaatgtgaaggcagcagtggccattcttaatgcccctttcacagagctgcctaagcctcggagagcagctcattagctccccgcacatttccaagcaacaaaaaagggctgggacggtcagtgaagagctgtcactcacagagtgtcacagtggcctgctccctcgggtgggtggggtcgagcagaaacctggcagagcagagttgtgaaccccagcggtgccctgtaactg

SEQ ID NO: 20617 - DNA, 1166 bp, Mus musculus
tcatgtgcacttggggggctgtctatgggtttgagtggtacttggtttctgccttgctgtgctttgaaaagccagtgggcctttgcttcagcctcctttctggcagggcctaatctactcattgcctggggtacaaaggggcttttgggccaggccagggccagcatcatctgaccatcctgctccccaccagccggctctgttccccccagctggtttcatttgctctggtctgtctgcagttttcccacagggaaagctggaggtttccatgggttgtctgagaggtccctggcacattgctgcaaagcacagaggagcttagtcaacagctggagagggaatgagtcacccgggcttgctagacaggaacagctggttcttacccatccccttcaagccggcagccaagagcctccccgtgcatgtgttccttcaggcttccagctaaaggcaaagtgactggccatttctgcagatggaagtcgaaggcactcaaaagggtagctgctcatttggttgccatgggagcctgcacttcccatgtgtcttgatcgttgtgagcaagcaccctccctccctttctgcagaacaaaactgtatgataatcaagaaaccagccactgggaatgatgtacatgcttataatcccagtgcttgggaggatcaggagttcaaggtcatcctaggctatatagtaacccgagctagcctgggcaggtcccttcaggctctgctcactatctgttgcaataaaagtgtgaggagccagcacttgggaggcagaggcaggcggatttctgagttcgaggccagcctggtctgcaaagtgagttccaggacagccagggctatacagagaaaccatgtctcaaaaaactaaaaaaaaaaggtgtgaggatcgggctggcgagatgtctcagcggttaagagcactgactgctcttctgaaggccttgagttcagatcccagcaaccacatgatggctcacaaccacccataatgagatttgactccctcttctggtgcatctgaggacagctacagtgtactaatgaataataataaattaatttaaaaaaaaagtgtgaggatccagtctgagccctgccatacaccagagttgctctatccccagagattgtgattgcacccattccgagga

SEQ ID NO: 20618 - DNA, 3841 bp, Mus musculus
acactgaccgggagctgccttggaagccattggcccagtgttcttcaggatgccaccactgttcttccttgaaggaaatagaaacccagcaaaggctgggttaagaggtctgggctcggcatctgccctcccatggcagacattttcctctgaactcagtagacctgacctacacgcctggggaggcaggaaagttcctgcgtattgtcaactcaacatgacctttccccattggctctcctaggttgggttggtgttacagtaaccagttgccagtgagattctggataaagccactgagaattcaaaccaggaaacggaacccttccacttgttggtccaactttcacagatgtgagatctctggcaaacaaaacagaactgaaccggctttaccaaaccgccagcgaacttgacaattatattgcgatggcgtaggctgcgtgatgtcacctttagccatgtttctggtctccctattttcaatgaattaacatgctcatgcagccgtgatcaagggaatgtaactgctgaaacctagctcgtgattggcatattatggagttaacgggtgaataataaaagtatatatattatatatatataaatattctaaatatctttcatgttccaaatgtacaaggatgtttggtctctgatgagaaagaactgaatccagtcattcttcacaatgagagcccaaggacagcagcagacagatgtgcattgcacaattactgtctcttcagaagcggtggctgttgtcaggggcagcaggagaaagaggatctggggagcctcacctgttcccctttggaattggctgccaagcaggctttgagcaaggaggtaaggtctagggactgccagctcaggagagggctcagatctccagcatgacaggacaagctcttagggtggaactggccctgggcagaggccagactactgcatcctgagaccaggaagtggtgacaatcatggaagtagattcattaatcaagtccctcttccatctcctgggccttgtcccggaggacactattctaccaagtgattttagaaggcttctgagctggctgttggcagcctaacaggtgtgtgtcctctgagagactttgtcctcactgcttaggatgggtggcattttgaaaagaactttggaccttttgtagaatctggaacctcgttgagaccacatgagcgcaagctctgtctaaggcatattagagcaaggagggagctggtatcccagggaggctgagcaggcgtggtgtggcgatgcccaggctggtgagtcccagcccctgcctgtgccttcagcccctcagccatctcctgtgctcctttgtctccttcccagggcgtccagcccacagtggccgcaagaagcagtaactagagatgatctagacttggcgacatcgccagtgtctgagtctgattatcatcggtgctgttgtgggtttttgtggtggtagtgatggttattcaatgctgccagtttttccagaagtcgtcaagcccctgaccacgttggccgcccatgtgggcattcttgagtggtgttgagccaagtggctcaggattgggctgaactgtcagcgagccacacccagcctccttgtagcttgtgctacaagagagaaagctccacgtgacacatagtagggaatttctttgctctttctcctcttggcatcttgggggtcagggagaccttataagggaaagaagccttagccactagccaggttcagccttgtccccagaactgaatgacgctgtcgtacaggcgagcaggggtttgaggcatgctgtggcttctggtggtggcctgcagaaactaatgccgcatcgcctctgctgaaggaaactgtgctagggatgcgtcctgcttgctagactgctgctggagacagaagctctgcttggaggagtctcatcagaggcttagggacctccctctccttcactgtcctgtgttgccaactgcaagtgccagcgaaggtggccgacttgtgactccaagatactcagaccaaagaaactattgttcttggcaaaatgtgcactgagttctccagaagggaggggtcagaggcggggctcccctcagcctcagtcatcagacactaccctaagtgcccacactttaaaggacagagtgctcaaggctttccttcttgggcgggcctggaatgtggaaagccttcctgtcttactctctatcagctgcaagccagcccccggctcaaattgcttctggggtttggggaacacaaatctctggagtgagctttggtttcattgaccctggtcatgggacaaaaacagtgaaccccagggagacgctctggaagagctgctggcaaggcctctgtcccaaaaaccaggtggcttgctctgcttctgccgctgccttgagatgggcgccctgcccaggtctacaggagttggctcaggggttgtttttaagtcttatttttatctaaaccgttctggtatcttcatttaaccctcgtgggattaggggctaaagaggttcagagctactccacagtatggcagccctgtgactagcttggaccaaacaagaagggctttggggcatccaagctgacctgcctcaggcagcctctgttggaagaaggccttctgtgagcctaaccctagtcttctgccatgtcctgaaggccaccttttccttccctgcctttggatcgactctccacgctaccatagacactagtttgtaaagtgagctgggtagaaaggccttaactctgaattgaggcctgcgtgggcttgctatccccacccagacctgtgtctgaaagtattgctatctgaggattggctcacaccaagctctgctaacactcctttttttaatggaaaatttcaggccttgccccttctttctgccatttgttgccctcacttgctagcgctctgaagcccagaggcaggtgtctttgtggttttgaattctgtctccagagatgaccagcattcaactaacctgggggccccaaggctctgaagaggtttcatggagctgtctacgtctaagagagaaagagactctcagaaaagggagctagagcgtctctctagccctgtctgcctgtccttgaaccagaggagacccattgtgtcttgctgcagagtgaaggcaggtctacagacgggctgtgcccgaggaggagagctggggcggttttcattgaatgaaactaaagtgttaactgtggccatcaggtgctgcatctgagggtcggagagcttcactctattgtcttggcttttctttgggccgtgctgggggcgttcattgctgggatacccaatgtactgttccactccgggcatctcacttgtttctaataaaggaagttcaacggtctgctctctcctggtgttcttctggtcagcggtaggtggtatgtatagctaggggcccccagggccaccaacacacggccagctttgcaagacttctttcagggtgcatatgactctccccgggctttcccacctaccacagagaggctggtactgatgcagaagagcagccacgagctaaggaagaaccctgccactagccctgcacagtcgtgtgcgtgcatgcgcggcacaggtgccacagggtacggtctcccctcccatgtttccatgggactccagggattgggctcagatcatccattttgtagtgagcaccttaactgccgatatactttttatttgagatagtctcactaggtttccaaggctggccctgaaactcagctggccttgtttgagcctcctaaatagagaggttaagggcctctcc

SEQ ID NO: 20619 - DNA, 1167 bp, Mus musculus
gagctgggcttctctgcgttcagcttgggtagctgctgggccgttaacacctaaaggaggaagggagggagggcagcttctgcctgttccccactaggacccataccccaacccttgcccctctggagctccaagtcccttgtcctcacgctgacactgtccttcctgcacaaatgctcacccgtgggctgccctcatgccaggcccattcctggcctcccttgtctttcttcccctcagactggtgcctccccagagctagccttgacctgaggtggagacttggaccagccgactcacctggattgccagagtagttctggggggtccagggcactcagggtcaaaggtggtgttgagttgcctgaggtaagcaggtttgaggacgtagccacattgcccgtttatgaggaagcgccctgtgttgaggtccatctcataaccaggagtctgaaagttcagagccactgtggagtagacaacagggtcgaataggagcattttagtggctttctcctcccctcagattcagaaaagccaggctggacagatggtaatgcccagtccctgttgagacctattgaggaggggaccatgcagtcacctcctccctgcatttcttcaagaacagcgaagtggggttggaggggggatgtgatgacaaagactcccacccctgcccccaccgcccacccctcggatcagagccaagacctgaaaaagcttggcattgcttatctacctccaaagggaacatggtctcctttggccaggccctttctcccagaatctgttcatctcagtatttacttggcaaaatcgtcaggtaagggagtgtgtgagtgtgagtgtgtgtgagtgtgtgtgtgtgtgtgtgtgtgtgtgtacatgtggaaataaaggttttgaattcctttcttgctagttttgtttgtttcggtccagtctgaccacataacccaggttagcctctataacaaagctgggcttgaattcatcgctctcttgcctctgctccctgcgtgccggggttacaggtatgtgccaccaccccagccagttgttaatgtcaaccttcagaaaaatctaacttgtgggagctgaggaaacagctcagggaataaagggcttgctgggcaagcatgaggccccacgtttgaatcccca

SEQ ID NO: 20620 - DNA, 2607 bp, Mus musculus
tcatggaatcttcttgtattcctgaagcacaatggtatggtccagaacccgccccatctcctctgtaattggtcttccttcctcggagagacgaataactcttgcccaatgactgctcacgtttcttcagcgagagctaagcgatggaagaaggcggcctgggagacgccccctacgcattctatgattggctacgttgcacggcgcgcgaggacggcgggcccgaaagaagggaactacgactcccggctgccccacacctggactccgttacgcatgcgcatgggcggggcttacaagcttctatatataagaggcgccgagggcttggagacagcagttggaagttggcaggtggaaagtcaggttgggaggggaagccggaggaggaggcggaagaagagctgtctgaagggggagggagggagggaggaaaagaggaggaggcggaggagaactgagcggagcatcgagccagaggggagatgagtttgtctgtcctcggctaaggctccggcccggcctgaggaactgggagctcgggttggagcgacacccgtggaagtgggaggtggcggctctgggactttaaccccttgtgggctctgcggcaggggatttaaccctttgtggattcggcccctccgaggcagcgtcatcgggtagttttaaccctttcgggttgggtttaacccattggacttaaacctcctctccttgcgcaccaactcctcgtctgtgggagcactcggcggggaggcgtgaagcccacccctctgcatatttgcatacggtgcctgctgctgaacccccggacctgctagttggccacgcttgtgtgcgcttaaccctttattgactggactccaagttgcgattggagtttgctgacaggacggacggaaggcgtcactgcagaaattactgaccgaagaggactttgttggacatattttgaaaagaaagaaaaacctctttccttaagccagaatttctcaaacttccagaagagaactctactaagccatggccgagccactcttgacagaacatcaacaccagcctcaaactagcaactgtacaggtgctgctgttgtccatgaagagcatacctctgagcgccccccaagcgcggaggaacgggtgcccaaggaggacagtaggtggcaatcgagagcgtccttgcagtccggtagccgtccagggcaggagggagaagggggcctgaagcaccagctgcccccattgcagacgaatgcctgtccagaattgagctccctggagaagggcgagaagggccagaatggggaggacttatccactggcggtgcctccccgtcggcggagggagagccgatgtcagagtccctcgtgcagccaggtcatgactcggaggccaccaagcaggaggctcctgccgccggaggcgaggagccatggggacagcaacagagacagctgggcaagaaaaaacatcggagacgcccctcaaagaagaagcggcattggaagccctactacaagctgacttgggaggagaagaaaaagttcgacgagaagcagagcctgcgagcttcgcgggttcgagccgagatgttcgccaagggccagccagttgcgccctataacaccacgcagttcctcatggatgaccacgatcaggaggagcctgatctcaaaaccggcctttaccccaagcgggcagccgccaaatccgacgacaccagcgatgaggattttgtggaagaagctggtgaggaagacggaggcagcgatggcatgggaggggacggcagcgagtttctgcagcgggacttctcggagacgtacgagcggtaccacgccgagagcctgcagaacatgagcaagcaggagctcatcaaagagtacctggagctggagaagtgcctctcccgcaaggaggacgaaaataaccggctgcggctggaaagcaagcggctgggaggcgtcgacgcgcgagtgcgggagctcgagctagagctggaccggctgcgcgctgagaacctccagctgctgaccgagaacgaactgcaccggcagcaggagcgagcgcctctttccaagttcggcgactagactgaaaacttttggggggagggggcaaaggggactttttacagtgctggaatgtaacattatatacatgtgtatataagacagcggacctttttatgacacataatcagaagagaaaatcgccccggctttggtttggtaaatttagctatgatgttgcttgtgtgctttctcctgttctttaattatgtgaaactgaagggttgcttttcatgttttcctccttagatgttgtttcttaatgtgcaagtaatctgaccaagttataatgcatttttctgttttaaaaaaaaaatcccctccttaagcggagctataaggtggccaaatctgagacccattacattcattctagttataataaatttaatgtttgtaaatgtaacagtttcagtgtgatttctagagattaaaaatcgtgctggtttgtgtgactgcacttttgaggtggggtaccaagattgttaaatttatctatttgcaaaaatacttgaatagaagaaattcagt

SEQ ID NO: 20621 - DNA, 1240 bp, Mus musculus
aagcgagatagacatagagactcatacctaaatcctagaactcaggaggctgaagtagtattgctgtgagttcaagaccagcctgggctataacgtgagactctgtttcaaaaaaacaaaaaacagccaggcatagtggtgcaggtctttaatctctgcatgtgggaggcagaagcagacagatctctgtgagttcaaggccagcctggtctacatagcaagttctaggacaaccaggactacaaagagacaccctgtctccaaaaacaaagtaaaaacacagtccagttagatgactcagcaggtaaaagacactcgctgcaggtctggtgacctaactttaatcccctgtgtaaaagcagaaggagaggaccaactccccagagttattattctctgacctccacaggcatgtcatagcgcatatgcccctgcacacatccacacaatagtaacaaaaccacttgtaacttagtgttccacctggggcagcccaggaactaagttgagtgggcactgaattcatgatgattctacctcccgccctgtgccctcaggggactacattcctggcacggagacccacatggcaccagaagtggtgatgggaaagccctgcgatgccaaggtggacatctggagcagctgctgcatgatgctccacatgctcaacggctgccacccctggactcagtacttccgaggcccgctttgtctcaaggtcagcaatggccccaaacagctgtgcagggaggccggcagctacgggcccaggccacaggctagtgacagttgttcgtctgtgacagatgtgagcaatggcaggtcccttctgcctgttgcccaccagcccaccacccccacccccactcccagcatcctttagactaagtctggaggacatggtatcttgttgccaggcactgtcctgtcctatttggatgcaggtttccgtgttctaggagcctttccactggctgtagtgcagtcctctccctccttatagcagacccccaatcaagcgtagggaaggagggattggtggagagcgaacatgagatgtgacaggggaaggaggaggaagcaggccttgaatgtcgccttttggcctctagattgccagcgagcctccaccgatcagggagatcccaccttcctgcgcacccctcacagcccaggccatccaagaggggctgaggaaagagcccgtccaccgagcatctgccatggagcttcggag

SEQ ID NO: 20622 - DNA, 1204 bp, Mus musculus
cttgtttgaggacaacggcgctccgccggtaggtgactgggcagaaccccgagtcctaaagcgggacgccgagggagcgggcggggaaggggcgcctcccaggcggggactgggttgcagccgggctgtccacgagggatggctgggaggggtggccgggtgactacggtctaacccgctcgcacgctcagcgccatcagcgccacgctcgaaacgccgtgctcgcctagaacctccaggccgcgcacccacgggtcacacgcttgcccggaacgcgcgcgggtactgtctgcttccctttccccaacatccgtgccatcgagttcagccgccctactggcagacctggctcctaagtgtcccccaagagaaggtgatcgctccactgccctagcagtgacatgagcagcctttccctttgaactgcttgggatcacttgttctgagaggatcactgctctgggcactcagtagagcaatgctagtcgctgatggtgctgtcctccctcctcgatggtccttacccttctctaattctgtgttctactcggaacttttggaatctgtttatatgtactagtcccgtcctggaagctcttcccggctctggcaactttcagccacctgtcaccaagtgaaaagaaacatttgtctgaggcagagattcccacctgctttggaacctcatcatgttcattaacttcagacctccccccctccactccccaccccccagttgagattaaaagatggctgacagccctaaaggatggataggggtgtgcatgggctgtcaagtggatgagtggagaaaagtttcaaatatcagtgtcttaatgacatgttgttgttgttgttgttgttgttaattggagacaatgaacactaatgactggattaagggcgctaaaagaatgaactgaacgaggagtggcaccatgaccagtggacttcggaacactggcgagtatctagaaacatagtctctctgaaagattagaggattgtttcctaacttcagttctgcagggttttgcttagtaactttcccatttagtggtaggtgtggtcagatgcatagactgttgtccagttggtaagcgaagtacctgaaccaggtgtgagggatgatatgcctcgtctgtggcctcagagccatgagtgagggtgagttctccagatccctgaataagaacagcataac

SEQ ID NO: 20623 - DNA, 1748 bp, Mus musculus
cgctgctgcggccagagatggaggaggccagcatgcccatgaccatggtgttccagaaccaggtggtggagctcatcctacatcagtgcgcggacatcttcccaccgcactgactgtggaccgtgggttagctggaggccgtgaggctggacctcctctgaggctctccgcttcccacccccgctgcactgtgacttcaacgcccttccattcagagggtacagtgacccctggtgggcagttcatgaaatgtgatttctccctctcgcgtccccattagggccatttccctaattacagcgccgcctattgtgtggatgtgagaacgtgcctggtggagggaaatgaatgtctttctagttccaccaccaccacccacccacagctgggagaggggattttggtgagggcgttctggtttccttaagcctgtacctgtccaggccttggtggagaccctgtaggccccatgctacgcaagaggtcatgaagcagctactgacattgtctctgctgccaggggaggactgaccctggctgccagcccaggccactgactgcctccctcagccttctgctccagtgccaccctgatgcaggcctcctgagaacttttccgatgcttccctctctccttgggccacacccgctctctacagacgttcttcatactaaccacataccaaacctggcaatctggggcttgcagaagtcacagtacttcaggggtccataggtgatctgattccctgcaaaggctatccccacagcaagcccagcttctagaagagggagtcacgcccctgccccactgcagcacagcctgtaggtagaccagagtaaatgctggagcacttcgtgtaggttagaggttgggggccccccgaaggcagcagggaacctaccacagctgtttgggggggcagcatgaatagaagcctccagctgctgtctacaccctggctgggtgcctacctaaagcccccaaccactgtctacatcctggctggctggatgcctacctggtacccacttgccatgcagaggcctgtccgggaggtcacagccttaggcaaacagttgaacctgtgtcaactgcccgcttcctccctcgtgcacctcaatctatggatctgagcccccagctccacccacccccactgactcaacaaacaataatagctaatatttattgagcattcagactatgccagcctttcccacaggcttctcccttggtttcatgcagtccatatttattgtgggtcctcatgtgcctggcactgtgccctggggcaggggttctacgcatgcgttctggagcttggggctcccagtgagtacggctgatgcaagcccagccctgatggtagcagggcgcagaagagaacaaatagaggcctcttgctgtacacctatatatttaaagtcctaaggcaagctaatgactaactgttaaataaaatgtttattctcctactttggcgaatgtactctggtagtagcctggaagactggattctagcttaaacaccttggactctcagcagagcgttgtaggatgtggaaagctactctgaacctcagcctgcctcagtgtacagctgaggagggccttgaacttctgaccatcctgcctccacctctcaagcattgacattgcatcatcaggctcagctgacacctttccttccttccttccttccttccttccttccttccttccttccttccttccttccttttct

SEQ ID NO: 20624 - DNA, 1220 bp, Mus musculus
gtgctttgcctctgccctttctggcacatactgccaagagtgcaagtgtcatgtgccaaatggcctgtcattgtgaggctgggttctgtggccacctttccctccactcctcacgttctcacctgtaaagcgtccctccctctgttggagctcttggcttacctaatagctgtgagtacagcacagcaggagcagggggtgaccagcaccagcactgtcagcactttgagccttccctgctcaggaaggccatgaccttgcccacctcatccccatgcccccttaccctgcagggtagagtaggctagaaaccagagagctccaagctccatctgtggagaggtgccatccttgggctgcagagagaggagaatttgccccaaagctgcctgcagagcttcaccacccttagtctcacaaagccttgagttcatagcatttcttgagttttcaccctgcccagcaggacactgcagcacccaaagggcttcccaggagtagggttgccctcaagaggctcttgggtctgatggccacatcctggaattgttttcaagttgatggtcacagccctgaggcatgtaggggcgtggggatgcgctctgctctgctctcctctcctgaacccctgaaccctctggctaccccagagcacttagagccaggggcctcaggtggaatggagggtctccctggaaatgtgcctgtcctgtctagaggaggttaccccaccctccctgaggtgaatgagctgagtcacctgaagcttgaattgtgcaataaaacataggagtaggaaggcagatggcagaggctgccaagagttcatctgtccgtcatggaagacagcgctcaccagtggttgaaacaccaaagcccccagaaccacccagtgtatctctatctgcacccccgagctagcattaacacgtcccccaaactacaacctgatcagagcctcctttccttgttttgggatcctgaatgggcaagagtctgtcccctgtgggcctgtcacatgagggtattccagaacctgtctaggagatggagccctcccagtgtctgggctgcgagcataagagctggccctgtccttgactaagcgactgactgactgctcaagtgagagacttgcccccaccagaagagtgctcacgtgaacctcagcagtgcccacactattggaaaaaatgctattttatgcaatattctgacaa

SEQ ID NO: 20625 - DNA, 1182 bp, Mus musculus
gccttaggcttacagagatctgcctgcttctgcctcctgagtgctgagattaaaggaatgtgccgcaatgctcagtgtcaataaattaaaatagtagcagtagtagtaataatttgtgaaagtaaaagttaaccaaaattgaaaaatgtggttacttctggggaggatcaaaaatagcaagacaaacaaaccccgaagtttgtcatttaaatcagagaagttagtgtaaattataacttgttaatttttaaaattcaactttccaaacaacaccctctgttcagattaagtcagaataaaagtgaagtatttatctataacttaatacttgcttcaaaccggttcttctgcagttctgtctagttctttgctaaacactaaagatttgatacactcatatctatgattgtatgattttcccaccaacacctggtgtacatttggaattgcatgccttatatatgttattgtatcagacacagtggcaagtgttagagacatgaggagaaaagaaaaaccaatttctgtcttcaagcaatggcctctgcggggcatggtggttcagatagatctctagattcaaggctagcctggtctacaaagtgaattccaggacagccagagctacagaaatcctttaaagctttgctctaggcctaggctcttagctaatataattatacatctgtggtcttgactggtctttcctccccacagtgttggggatctaatggagggctgtaactgtcaagcatactctcttgagccacacttgctggtcctttctttgttattgttctaaagaaatactctgcctccttagcttgtctctgccgagtgcccccaagccaccatttcagtagttaaatacaagattgatgtttagttttaaaaaccaaaagatacgggactggagagatggctcagcagctaagagcacaggctgctcttccagaggtcctgagttcaaatcccagcaaccacatggtggctcacaaccatctgtaatgggatccattgccctcttctggtgtgtctgaagacagtgaccatgtatgtactcacgtacgtaaaataaataaatagatattttaaaaagagagagggagagatagggcgcacttgttgctcttgcagaggatctgggtttgattttcagcatctacatggtgtgtggcccac

SEQ ID NO: 20626 - DNA, 2522 bp, Mus musculus
ttctttgactatctaccccttgaaacatattagcaatatatcaatcagctaagcctccattttccccagccctttcaggccaccctggggatgtccctgggaagtgtgtttttgtgagactttcagggaccagagcatttttactttttgattgaggctgtgtcagtacctggtgcaatgcagaatttgtgtgagggttaatgtatcttgagcacacattgtattaatctctgcaagtactagaacgatctagtgagtttatttgttcatcagtcacaggccctgtccacccaaacagttctaaatttagtagcctcctagtaggaaaaacatgccagaactcctaagaactggaaactggtcagtattaatccatcctttgattgccctacctacttcctatgtttgcttaagcgtcctctgctgtctccctcttcacagtaggtgttacgtctcacccttccccttgtgtagccgtattggtctctcgggtacatctgtggcatccttttggggaactttatcaactatacacactttaaacttgagtttcctgggtattagctcagttctggtcagatgcaatgtctgttgctctttccctgtaggttaaatgtgccatagctggtcagaaagggggaatgtgccccctctagtcctgcagagtggaaacagtggccctagagacaggagacctgcagcatctccacacctcgatctcactttggggaggcagatgggcatgggcttttggctggccatagagtttgtactgcacagacctgactcctgtgccccctggcacctgaagatcccaccagacagcatgctttggaagatgtacaagctgtaattgagccatttgaactcaaaatgtgggcagcaaaggccctagcccctgcccttcattggctgttggagcagtgttttgtagtacataatgggtttccacctttgtagcagtccttggctttagtgaacttgatgttccaccttcacagccaggtctccctttggaatgaatttgtggtgaggtcagcactactgcctgggggcagggaatggacgcagaggatctggactcaaggggcattgagctggttgcccaggctgccctccctcaaatttccattcagtgccttgtgagatgactctgacctgattgggcaaactgtccttacaggctccagcagggaagggcccctagcctgagtgggatgccctctagtggaggaggcctgcatccttatcagagcttgtcagaagctgcagctagcagatgatgtgtgcaccttggtacagtcgtctaagtgacagggtttgaagctagtagggtgccagaaggaatctaagactaagaaaatagatgtattctccatgtatggccacttgaaggaatgctaaatccaaggaccaagtaaatagtaggttttacaggtttcatttcaagctttttctcaaaagccagcttgccttgttgaatttaaatagctttgattggcaatttatttacaccccttgttttcagaacatgtcagctgaataaagttgaggtttatttagaaaactttaaagaagcacttggcattctttgtcttgactacccctttgttcctaggctaggagcattcatatacactgtttcagagccataggctgggtagctagctgtctcagaagcagctgtagaaagtgaaagacatcccagacctgattcagaacagttctgaaggttcccaggtaaactgccatgtgtttgctggagccgctacctcttagatagctgttctcttgatagcattgggaagaatctggaaccagctctgcatatgtacaaagagcaagactggcaagtttccagtgaagtcttagtgtagcctacctacctcattccagaagagttaagggcttagaaacaactgggggctggggctgtcatttggtgccagggtgctagcctggcattcacactgcactgtgttccatcagcagttcaggtcccataattaaagcaaggacgtagggcctggggtgagggctcagcagttagagcactggctgctctctctgggtttgattcccagcaccacatggtggctcacagccatattaactacacactacagttccagaggatccagtgccctcttctaggaaggtccaaggcacacacacagcttgtgcacagaaatacgggcaaaacaccatatacataaaaggaaatagataggctaaaatacaaaattaggactataaacgtgaaggcagaggcatgtcatatcaggagaacttgaacacaggtcataaagccctctcgccatatctctgggagtcctcctgtaactcgcaacggcagaggagcatgttgctgactgaatagggtggggtgtcacctgtcctcaggccaagaccagacagaccctttgtactgccagcttccccatagcctttagtgtaggagacagccttcccaatcctctgagttaggttctgtgatatgcctgctgtgcagacagtgggct

SEQ ID NO: 20627 - DNA, 2381 bp, Mus musculus
gatcctgagtaccgtgtgaggaaattcttggccctcatgagagaagaaggcgcgtaagtacacgcagtgctcacccatctgcgaggtcccaagtcttccccagcgcatatgagcccgctgatggtttccttccttcctgtatagccttgttttcacgcactagcccctcgctgtgctgtgggtctgagggaccaagcaaggaagcaggctgtcgtgttggtctgctctccttggcttgcttcacaagacttccttgtcacagagcagagaaaacttgatggtccatgattcactggaacctgcttttaagtgcccggaatgtgaccattttcttttagaaagtgcccatcaaatagcaaacaaatggtggaaaatgtagagagaacaggaagcctcgagtgtttcttagtgaatagggttgggtttttttgggtttttttgtttgtttgttttggggtttgttttggggtttgttttgttttgtttttgcagagcttacagtttagtgtgtgctttggggtttcttttgcagtagtcccctggactttgattgaaaacggactgtttacaacagtgaccaagggaagcgaccaaggtgcagatggcctgggatcgtcactcctcacactcaagacactggactacgtgaagtgtccgcctctctccacacactcgctctgcatgactagtgcagtgaactccctcgtgcttttgagatgttctcgtgttccctggactgctgggcttccctcccgtgctagctaagatggttcctgcttatgtgggaggcatgtcacacccgtgcacgctgcccacaccgcgatccctaccacctgcccgaaggtcaacttctacatgagaccaagagcaaaggtagaggttccaagggagtcccttggcgctccccatgctaacagctgtgtatcccgcagattaggtcattgtctgttcctaaagaactaggctttgaatatctaagatgctgttctcaatcattttcagagatatttccaagttgcaatcaggagagcttttctaatcggaagtcaaatcattcctggggtggctgtgatatgctctgagtgtaattaatttgctctgtggtaagagatatgctaatcattgccacttggtagatgccgttaaaaccttatgaaagatacatatggaaatctgtacatccctaaacagaaaaaaaattaaaataatttacaagcctctcaattctaattagcgtccggctctaagtgggtcagttccttaggatgacgttagaggcctattagtgccatcgtcttccttttcctcagcctgatgacttacaattcatcctccttgtatctcaagtgatctgtagtgtctgcagcacataaataaaacactactctccagcagaacaagccaccccctagtcctctccctcagccctcgaatatccattccagcgtactcaacacacctcttcccgaagaggaactcagcgagccctttggagggtggtttgcctaatcagtgggttagaaggaatgcaattaggtcgtcacgtcattcgtggagatgagtcttagggcgcatgccactctccccgctgctgcttcaaacacaaagacagccatcagaagccgcccgggaggcttgctgccacaggggcacctgggtgatactctgacactgtccccacagtagaaggcaaatcatctcctagtcttgccgtctgtataccttgtttggggttttcatccctggcttattttgtggctttgaaagagtgaattgtgttgtgaaactgtgattcccgtggctagtaccgtggttccctgtccaccaccgtggtccctgttgtctgcagttctgcctttctcctcccaacaaagtcctacatgaattaatttatgtttcttgttcaacgaagttaatgtcttgtgtttttgtccaaaattatattgaaaaagatattatattgtgtaatgcaaattgaaggaatgcaataaagagtaaatatacttgaaatattgtatagaccagtattttatatggaacaggatcaatcactaatggggctgcatgacgaagtggccacagaagagaaacccctccttgctttgttacagcataggagatttttttttgttttgtttttaaatctctttagaaaaacattaaggaggctggagagatggctcagtgggtaagagctcttaccgctcttccagaggactcagttcaattcccagaattcacatggcagtgtacaactgtaactcacatggcacacagatacgcatgcaagctgacggcacatgcctttaatcccagcacttgggagacagatctctgagttggaagccagcctgctctacatagtgagtcccaagaccctg

SEQ ID NO: 20628 - DNA, 1222 bp, Mus musculus
atccttgctattgcttattttctgagctttttgttcagttagggttttttgtttttgttttcattttgttttgtagtcatagctgctttttaagtgtgaggtaaaatttcattgtagttttggttattagggggttttgaaacagtgtgttgttgtgtatcttatactggccttgaacttgccacgtttgtgcctcagcctcctgagcactggcatgtaccacacttggctttgaagttcactgagaactagtggtgtcagccatcttttcgtgtgctcttgggcattcacagggtgtctggaaaaactctgcaggacactgatgttggccaatgctggtcccccactgtctccattccttgaagaaatgtctgttcaagtacttagttcttgttgggttttagacaccttatatattctagccattaatccctttagcatgtatgatttgcagacatttgagaatttgatatatgaaaatatcctttgtactcttcaattctcaggctgggaatactgctaagtcttcttcaactcttgtgttttgtttaatttctttcaggccagcaccaaagtagaagtagacatggagaaggcagagagcctgcaggtgacaagaggggacttccttgcttccctggagaacgatatcaaaccagtgagtatgtgtgttgagtgaggtgtggccccacagagcgagcctgtgttatcaaggaggggaagcaccggtcagtaggtcagttggtcggtcgggcggccttctgatgtatgggctgtcctctgtagtttcctaacacgagagaatctcactgtagacacagcagtacaggttggttagttgaccagtatttgcccaaacacttcctgcggtagaaagcttactatccattttgagactttctgagttttgtttttctaggttttgcttgcttgcttgcttgcttctctcttctcttctcttctcttctcttctcttctcttctcttctcttctcttctcttctcttctcttctcttctctctcttctctcctctccttttccttttccttttcccttttctccctttccctttccccctttccccctttccctttccctttccccctttccccctttccctttccctttccccctttccctttccccctttccctttccctttccccctttccctttccctttccccctttccctttcctcctttccccctttccctttcct

SEQ ID NO: 20629 - DNA, 1148 bp, Mus musculus
ctttccatgtttcctactaggtaaaaaaaaacaatgctgttcttggtttagtgctgtttggttcgtgcttgacttttgtaagaggtcctcagtgacgttacgattgtttacgtaaactgaaagtatgttttatcttacttttggactctgatcatttgcttaccactcttaatatctgcgtccaggaatgaccaatagaccagatttgatagacgaagctctccttcgacccggaagactggaagttaaaatggagataggtaagtaaagtaggtcacgggtgtgcacgcgtgcatgtttatgtgcacatgtgtgagtgtgtgtctgtgcacacgagacttcacatgtggcttcagactctattaatgatagcaacctcatattaagtaatgttcattgtcagctgtccacagctggcctgcctagaagagaactgcgaggattgtgactgggtctcctgatggatccccaagactaggaaaatgtctgtttttatctcatcaggcttgccagatgagaagggtcgactccagatccttcatatccacacagcaaggatgagagggcaccagttactgtctgcagatgtggacatcaaggagctggctgtggagactaagaatttcagtggcgctgagctggagggtctggtgcgagcagcgcagtccacagccatgaacagacatatcaaggtcaggaactcattgaacagatgagaacacacggcccgtgcaggccaggccccattctctaccacagaagagaacacacggccagtgcacacacggcccgtgcaggccaggccccgttctctaccacatatgccagtgagagtaagctggctcttgatggcgaagagaggcagagtaaggattgctgtccactaaaggacaagcagcactgtctgcccagtggtgaccaccggtttatttgcctttggtcactcccacctggcagatgtggatttgacgattattgttttcaatcttataagaagcggagtcttttgcatccaggagctgtttcttgcagcagacactggatgtctgctactttttaagtttggggctagtcatgaagatgaatcttgaccttttccctcaaggggttcagagtcaggaaaatggactagtacagagtggtggtgg

SEQ ID NO: 20630 - DNA, 1227 bp, Mus musculus
ccagctttgctgcctccaagatacatctctttctcttgggctggtcccacctcctgtgcagctctccttggcagatgtctcccagctcgggcaccccatatattggggtcccacatatgttgctgtctccaacgtacatacccaggcttcacagcttcatgcaacggcttctcgggtgtttcatgcagggccttccctgctatatgcctggcctcagtagcgctctgtaaccacagggcacgattccatggccccctttacttttgtgttcttcttaaccctaaggccagcactaaggcagcttcatctcccaggatgggctggaccttggctaccccgaaacacatttgctgcagcttttgtttgttgttcctttccaggggcagagtattccttagctcttcgtctttcatggctggaggcttgcttgagtggtgtcttgcatggagggcatccctcttattccaatgcagatcggaccccaccttaatggcactaatatgatcgatgtggtgctcctgagttctcttcgggccagggtctaagccgcgccaggcgagggacggacattcatggcgaatggcggtcactcttctcgttctgccagcgggcccctcgtctctccatcccatccgtatgccggtggtgtgtggaaggcaggggtgcggctctctggcccgagcgctgacccgcgcgcacttttctcagtggttcgcgtggtccttgtggacgcgtcaggcgcccggttgcccttacgtgtttcacttcagtcgtgtctcgcttgaccatgttccccgagccggggaatgtggctggtggcgttgcatacccttcccgtctggtgtgtgcacgcgctctgtttcttgcaagcctcgaggtgctcctgaagcgttccaggttttgccccctaggtgcccgcttctgagttggaaagggaaaaaaaagattatatatatatttaatggcactaatataaccaattacaacctcttttctgacataagccttagctgtatagcattaaacttgtcagtgtcctttgctctccacactgtgcattttgtatttctttctgccccttttgctcaccttcactgcaaacctgtgtaaggatgataactaataaccatctgacatagttaatattagtctctcttgaaatatcttccaccaaaatagtctgttacaagttcaatttggcctccaggaggttcttaaggcatggat

SEQ ID NO: 20631 - DNA, 1197 bp, Mus musculus
tgaatccgaggccagcctggtctatagagtgaattccaagacagctagggctaccaagtagagagagtctgtctcaaaacaacaacaaaatagcttagaagcatggcatacatgggtatgtacatgtgtctgtgtaaaacatgtttataacataagacatagttgaacccgggaaccaaatgttcttgtagacccacagatggacgggataggtgagcaaggagaaatgggttagtgtgtttaagtccctaccttaacatagatgggaacgaacgatctacactgcccagtggggaactgcatgtcatgtgacaacatagatggaactatctgatttataatcccaaatcctttttatgtcaaaaatagccccactgctattttttcctcttggtgctttcacatagatgacttcattgcgtgcccctccaggccgttccagagccagtggcacttcctgtttggaaggggaggaaatgggtgctgcctgtctccatctccctaccttcctgggtgcagatgccacaccctgcccctgcacagtcctcccccaggcagctcatcatggtgagcgggactccttcagaatccctgcctgctcacatcacccctgcttcctctgaaggactcagagaacatactggagaccctgcggagttaaaggagccgaggcgatgtggtacctcagtgttctccaagtctttagcaagtacacgcggttaccagccttggcaggctagctgagcacctggcagcctcagccgggagaaccttccagatgggctgtaggcttccagcacaggtgccgagaatgatgctcttcccaggctcagacccttgggctggtcacccatgtggtccaggtcccaggtcttgggcccatttttggaatttctatttggagatgtgggggtggccactgagcatgggacagatggtgcattcctggttcagctcattgcctcagcacaatgagatcgtgccagcatgtttgcagatgctttctggttttctccttaaggaagtcgagctccaaagtggcttgatagctttcccatgggcccttagctcatagcagcctcactgggcagtgcaggggctgcttggcctttttcctgtattgcttcctgagagctctcctcccatccttgctctggatgctctggtcccccaacccagcacccatttaccagaggc

SEQ ID NO: 20632 - DNA, 1219 bp, Mus musculus
agtgcagccgggagggtggcacacagtgcgcagccgcaaccctagtgcgtagcgtggagttgggaggggaagctcaaagcaaggtaagctgaatgaatggagtggtgggagtagggaggccccaccttcagcagttggagtgctcttagcatcggaggtctccgaccctggttcctccgctccatcatcggcggggggctgtgggggagactctggaacatatacagtgagccctcagacctcaagaggaacctgagaactgtgtcctattgagctgtaatctctttagtgtggacactgtagcccgatgatcaaaccaggaagggaccagtgccccttacacaaccatgttccactcttggggttcttggatgagaatgtgggtgagacagggtttctctatgcagacctggctatcctggaactcactctttagaccatactggccccgaactcacagagattggcttgcctctgcctcctgagtgcagggattaaaggtgtataacaccacctcctggtgtgtgaagatataccttttaatcacccaggttcaacggaagcaaagcccttatattgacaacctgacaatgtatctggaaagcctgctcctgcttgagcagaaagccctctctggtcttcccagtggccgctccaccttcaggtcacagctcctcattgttcagctcagggaacgcattaatggctgaaggattttctttgctgactcccctaggctttcgttagcatggctgtgctcgaagcggggataatgctctttgtccagcacgtaagactcatcatgggaggtggccattctggtggtgtttacttcaccttgtgtggtgctttgaatttgcttggtccagggagtggctgttaggaggtgtggccttgttggaggaagtatgccactgtggggaagagcttagagatcttactcctagctgcctttggaacaagatgtagaactctgagctactccagagccgtgactgtctggacgctgcaatgctattcaccatgatgataatggactgaacctctgaacctgtaaatcagccccaattaacctcagaacctgtaagccagccccaattaaatgctgtcctaagagttgccttggtcatggtatctcttcacaactaaggaaaccctaaataagacatcatggttgaagagtttttagggtagctctgtgtatcaataggaatacatg

SEQ ID NO: 20633 - DNA, 1203 bp, Mus musculus
gggtagtgggagcggggacctgcttctatgcctggctcaacagtgtgcgccttgagcatcattatcgtgcgtgttgccctgaatgttccatgcttgaagaagctggtctgtgtagcacagcgaggctcacacacagctcaacagggttcccatcctgaatctgctaccttccatgaccccctcagaagcctccaccttacttttctttcagggattcaaagaccagaatgctcatttggctgaggagggggcaggtcagaagtctcccgctcatctgttaggagcgggttttggtgtggcatcttcgtttcttgggctctggattttgggcatggagtacgtttcatctcctgtaatctgttcactccagatatgtggtgtctaggttgtcgcaaagctcattgtcttttttcctgaaatgctccctggtcggctgtcttgcttcccaagtgggttagttatagtgccactgttggctgctggaacccaaaagctctaccaactgaagaggctttttgccttgcaatcataagatacccggacatgggcatagctccctaacgccatgtatgcgcttctgtctttgtcttctgccatcctacgtggttggactgttgcttcattgttgaagaatagctgctgcgctcccaaacactgtcatctgccttggaacaagaaccatggctggtgagacagctcagaggatgaaggcgtttaccatgcaagcctggggacccgagttcaattccccagaacctttgtaaaggaggaaggacagaaccgactctacaaagttgtcctttaagttcccacacactgtgatggcatgtgcccacagagatgtattacacacgtgttccataataatgaatgaaagacaggcagaggtggtgcacgcctttaatcccagcacttgggaggcagaggcaggcagatttctgagtttgaggccagcctggtccacagagagggctccaggacagccagtgctacacagagaaacctgtctcaaaaaaaaaaaaaaaaaaagcaaataataaaaataagaatgaatgaaattgaaattaaaaacaaaaacaaaacaaacaaaaacagtcaccaaaaggaccccgaagaagccaatgtgttgccaaaactaaatcaagagttttctattataagctcctcctggatgttttcattttcattcactggccagaactg

SEQ ID NO: 20634 - DNA, 1278 bp, Mus musculus
gagcctaacaccgaggtgacaggtgtcagttgcctgcattgtttgccagagaaggggttttaaatgtctcctcctttaaacaccactggggacccccccccccccccccccgcacatcctcagcgagtccctgcaaagagatgttcttaggttccctcaatgggcttagggattccctttgttctcttggctggccggtgcccaacagggcaggatttgtaaagtggccccaggcttctccctgccagctccccctcccctgttctgggtcagtcccagaacggacctgggctctctgattgagctgcaggctccacctctcgagcgtgcgtgctggaatgcaggggtgggctctctttcctgaaagtgccgagcccacagggtttattcttgcaatgtgctcctgcctccggccccgacacctgccctgccttctgcctcttggaccgatggccccagagcagcaagtgctggccctgtggctactgccttctcacgcttactcaccgtgtctgccttttcctctgtcctccactccccgctggccgatcctgccacctcccttacttgttttgcttcctaaggaaaggcggggctgttggctacactgcggttactgccctgcctgccggttgccttctcaacgtatagaaagatatgggttgcgggaaagggtgatctttaagatcgccgtccttgtccctgggctctgtaatgttgtttatgatacgttagcttcccagcccaggctgctgtggttagggagggaagccagaagtgtctggttttgctcacgtctggtctgttgctgggtctgagcgctccagctcccaagggctgcagagggcagatgctcctgtaggggaagttgggaaaaggcagctctcagggcagctcggatcacatgctggttgtctgatgaggctgcagtgcctagggtatcagggaactttataactaaggtgtactgcagtttgccagcctttgagctaacctgtgaccttatatagaatcacaagatagcctggcctgtggcctgtggccactgttgactacagaatggacctgtggagaaagctttcttagggagggggactggtggcatttgggttgtaggattccaggcttcccatctaacttgctcctggctctctctagggtggtgggaactgcagcagggaagctgcttctccatctccacctcctggctgggctgtggcctcctctctcgggctgctctgtgggatctagtaccctagtcagctgctcccccattcc

SEQ ID NO: 20635 - DNA, 4317 bp, Mus musculus
gcagcatcgacatggtggactcaccacagcttgccacactagccgatgaagtgtctgcttccttggccaagcagggtttgtgatcaggctcccagggcagtcaataatcatggagagaagagagagtgagagtgtggaaaaaaaaaaaaaaaaagaatgatctggccccttgccctctgccctccccgctgctcctcatagacaggctgacctgcttgtcacctaacctgcttttgtggctcggatttggctcgggacttcaaaatcagtgatgggaaaagtacatttcatctttccaaattgatttgtgggctaaaaataaaacatatttaagggaaaaaaaaacatgtaaaaacatggccaaaaaatttccttgggcaattgctaattgatttcccccccctgaccccgccctccctctctgagtattagagggtgaagaaggctctggaggctgcttctggggagtggctgagggactagggcagctaattgcccatagccccatcctaggggcttcagggacagtggcagcaatgagagatttgagacttggtgtgttcgtggggccgtaggcaggtgctgttaacttgtgtgggtgtgagtggggactgaaacagcgacagcgaaggctgagagatggatgggtggactgagttagaggacagaggtgaggaaggcaggttgggagaggggacactggctccttgccaagtagcttggggaggacagggtgctgcagctgcctgcagcagtcctagctagctcagatgcctgcttgataaagcactgtgggggtaacgtgggtgtgtgtgccccttctgcagggcagcctgtgggagaaggggtattgggcagaaggaaggtaagccagcaggtggtaccttgtagattggttctcttgaaggctgctcttgacatcccagggcactggcttcttcctccctccccgcaaggtgggaggtcctgagcgaggtgtttcccttcgctcccacaggaaaagctgctttactgagttctcaagtttggaactacagccatgatttggccaccattacagacctgggactttagggctaaccagatctttgtaaggacttgtgcctcttgggggacctctgcctgttctcatgcttggccctctggcacttctgtagtgggagggatggggggtggtattctgggatgtgggtcccaggcctcccatccctcacacagccactgtatcccctctctctgtcctatcatgcccacgtctgccacgagagctagtcactgccgtccgtacatcacgtctcactgtcctgagtgccatgcctctcccagcccccatccctggcccctgggtagatatgggcaatatctgctctacactaggggttggagtccagggaaggcaaagatttgggcctcagtctctagtcctacgttccacgaatccaaccagtgtgcctcccacaaggaaccttacgaccttgtttggttcactccattacttcctatcctggatgggaactggtgtgtgcctgcctggggatgaccttggacctctgccttttcttttatctaagtggatgcctcctaggcctgactccttgtgttgagctggaggcagccaagtcaggtgccaatgtcttggcatcagtaagaacagtcaagagtcccagggcagggccacacttctcccatctttcgcttccaccccagcttgtgatcgctagcctcccagagctcagctgccattaagtccccatgcacgtaatcagtctccacaccccagtttggggaacatacccccttgattgaagtgtttttttcctccggtcccatggaaaccatgctgcctgccctgctggagcagacggccacctccatagatgcagccctttctttcccgtcttcgccctgttacgttgtagttggatttgtctgtttgtctgggttcaccagagtgactatgatagtgaaaagaaaagaaagaaaaagaaaaaaaaaaaaaaaaagaaaaagaaaaaggaaaaaaaaaaggacgcatgtatcttgaaatatttgtcaaaaggttctagcccaccacgtgatggagagtctggatatctccttcctgacgtggctccaggccagtgcagtgctaacctgctgggacatcccatgttttgaagggtttcttctgcatctgggacctcacagacactggattgtgacattggaggtctgtgacattggaggtcaatggcattggccaaggcctgaagcacaggaccagctagaggcagcaggctccgagtgccagggagagcttgtggctggcctgttttgtatgaagatggtcctttctgatcacgacttcaaatcccacagtagccctgaaagacatctaagaactcctgcatcacaagagaaaaggacaccagtaccagcagggagagctgtgaccctagaaattccatgacgacccagtagatatccttgggccctctccaagcctgggccttttcaccatagagtttgggatggactgtcccactgatgaaggggacatcttaggagactcccttggtttccaagctgtcagccccctgaacttgcacgacctcctacagcttcagggactaggcctttgaagattaggaacctcaggcccacatcagccacttctgatgtacagttaaggacaatgtggagactaggaggaagcagccagcctttcccattaaagaactcttgagtgcccagggctacctattgtgagcttccccactgataagactttagctgtccatagaagtgagtccgagggaggaaaagtgtggtttcttcatcatggttacctgtcgtggttctctctcttacacccatttacccatcccgcagttcctgtccttgaatggggggtggggtgctctgcctatctcttgtggggtgatcagcccaaaaatcatgatttggagtgatctgatcagtgctgataggcagtttacaaagggattctggcttgtgacttcagtgaggacaatcccccagggccctttctttccatgcctctccaactcagagccaatgtctttgggtgggctagatagatagggcatacaattggcctggttcctccaagctcttaattcactttatcaatagttccatttaaattgacttcaatgataagagtgtatcccatttgagattgcttgcgttgtgggggagggggaggaggaacacattaagataattcacatgggcaaagggaggtcttggagtgtagccgttaagccatcttgtaaccccattcatgattttgaccacctgctagagagaagaggtgccaagagactagaacttggaggcttggctgtcccactaataggctttcgcaaggcagaggtagccagctaggtccctgccttcccagccaggtacagctctcaggtttgtggaggtaatctgtgaacttctcttcctgctgccttcttgtgatgtccagagcccacagtcaaatacctcctaagaaccctggcttccttccctctaatccactggcacatgactatcacctctggattgacctcagatccatagcctacacactgctagcagtggccaagatcacttcctttatctccatctgttctgttctccaggaaagtaagtggggatgagggtggaggtggtaatcaactgtagatctgtggctttatgagccttcagacttctctctggcttcttctggaagggttactattggcagtattgcaatctcaccctcctgatgaactgtagcctgtgccgttactgtgctgggcatgatctccagtgcttgcaagtcccatgatttctttggtgattttgagggtggggggagggacacaaatcagcttagcttagcttcctgtctgtgaatgtccatatagtgtattgtgttttaacaaatgatctacactgactgttgctgtaaaagtgaatttggaaataaagttattactctgaataaacaaaaatctctgttcatgagttccaagtacaagaaaacaatggtttacaagttctttcccccacttagaaaattcagaacaggaaatgaaggtaaatgccagacactggagtgagagctctcttggttcattctcacattcctctgctggcatactaccctccgacaaacagtactctgtgccttggcttacaaggcagcattcaagagctcctaaagcctgcgccagttcatgcaagctgaagaagtttggcgtgggcttcatttctggaacttaagtgtcgaggactggggctgaaacaaactcaagccaatcagctacaaacccagca

SEQ ID NO: 20636 - DNA, 1526 bp, Mus musculus
tggtcattgttcctagggaagcccaccttgggagcagtctcgataaacttctccccaagtttgaggtcagggccttggctctggaaactggtcatcaccagatcatcttgtctgtccacagtcagtccagccatgggaacgacggaccttccctctggcctacagtccccaggcagaatgtgaggagcagctggatgcacaggacacggcagcccgctgcactcgccgcacctcaggcagcaagactggccgggaggcagaggtggcacccacctcgcctcctgttgtcccgctcaagagtcggcatctggcagcaacagtcacagctcagcgcccagctcacagatgagcggaaaatgagactatacagactcactactattggcattaaagcttcagaaatctctgcgtttgatattcaaacatcatatgctggaaattttcacagtttttagtgaatttaaggaatttagatcctcctttggttggtttggttttgttgtttgttttcttgttctgttttcatgtcacacctgagcacttcctccagttggcagacaagttcaggaagagaccctgctggcctggtcctgcatatcctctgcactgttggatcactggacttggaatgttagatgatcacccctctcccctgcacctgtggggtagggtgggccagccaaatggcagcaggtagatcagcacagcctccttagattaggggagtagagcaaaagcagtctgggctcttcccttccctctaatctgtgacttggcttagctctggttggtcaccccctccttggtcttctaggatggagtacccttccagccagcctctgttggctagttcttgtcactgaactctgggccagcaggatagctggcttcaccttgtcacctaaacctggaaggcccattttcagtttcatctgcatttggtcgtccgtcttggctctttgactgcagtgccctgctgcagctgctcaggtcaccctgccctcccttccccattttttctccctccatgccttcacacagataacggtagtccttccagtcagagcttctatgacccattcccactcccctacaaactaggaagtctgtggagtacacatcatcacttctgtatcatgttttcactgacgagttcacatgtcgtgtctccctcacagccctgtcagacagccacttagaccctcccacttccccacaccccttgcctgtggaacgctgttggtcctagctgtggtttccatcattccccatgaacctcctgttagccttgtgcctgtcttatgtataatcacatcaccaaaaaaggggagggggaaaggaattttctttttctgccattttataatcgtacaaaaatagtaggcagactgcttaatggttggggttttttcacaattttcaacattagtgattttttttttctttctgtttgcaagttaaaaggtttgtcattgtttctttaaacaacaataatgcaccatatccctatgcataaagtgcttctt

SEQ ID NO: 20637 - DNA, 1280 bp, Mus musculus
gagttttggggtcaaccttggctctgtgagttattgttcacattttcataaaaggggataacagaaaaaaacataataattatgaaggtgcacatactattctctagcattgggaattagaagggatttttggtgtttaagggcagtctgagaaacagtttgtctgtttgtttgtttgtttgtttgtttgtttgtttttcgagacagggtttctctgtatagctctggctgtcctggaacccactttgtagaccaggttggcctcgaactcagaaatgtgcctgcctctgcctcccgagtgctgggattaaaggcatgcaccaccatgtccggcttgtccttatatatgttaaggaaatttaaagaaaataatttgtccttgggattagtctaatatagaaattataatggaaacattaaacatccataattttttttcattatgtagtcagaagttgtgttttgtttttttgaaggtagaggacggttggagagatccaggtgcttgggatcaaaagcatacaccactgtgtttatcagagacaaattgtcagttttgttttgcttttcacaggttcaccgtaatgtccgctctggctgtgatgtgaatccctcttgtgcactgtgtggttcaggcagtgtgaacaccatgcctcctgaaatacactatgaagcacctctcttagagcgtctttcccagttggactcctgcgttcaccctgtgctagcatttccagatggtaaggaagacagcagagtttactagagtctaagcagtgatacaaaaggttccagctgaaagacaacagtgagaacagacacttactatcactcactttctgtcaacaaaaacttgtctgaggtaaacctcctgcctcagcctcccaagtgctaggattacaaatgtgtgccaccaagcctgacttttttatgtttattattttaatttttcaaggtttgtttattttattcttttgtgtgagtattgccacatctatgtgtaccaggagcatttctgatgctcagaggtcaaatctggaactggaattaattgtgagcctccatgtgggtgctgggaactgaacctggatcttctataagagccacaagtgctcttttctgctaagctatctttcctaccagattttaattttcttcttttttttaaaaaagatttatttatttatttatttattatatgtaagtacactgtagcggtcttcagacacaccagaagagggcatcagatctcattaagggtggttgtgagccaccatgtg

SEQ ID NO: 20638 - DNA, 1270 bp, Mus musculus
tcattcatactttgtatgttttatactatgccaagtatactttatttagtatgttcatgcaatcccttgtacctaccattgtctaaaagggactggccatggagtaaaacaaagtcctacaaattatttgaaggttcttaataggttccatgagcatatgaatacatattatccttagaattcattatttatagaactgtgactgctcattaatatttgcaaaattgttttcttaccttttgttagtcacatttgtattatggaagaaaaacttacggatgaaaaattgacctttgcaccttgcagacataatagatattgtgcactgacagcctgctgactaagcatagacaaaatattaacacacttagattaatgtgcattgttatccagagttgacctgttgtgtctgtgaacatttaaaagtcaggagaaggaacccacagtacagcctttgtttcctctgtgttctgaaaagtaagtatcttcctccccttttgtagtcttcagcctgtcctggcagaccaagttccaggtgacagctctgatgctgaggaacaattacataaaaagcaaaggctgaatttagtttcttcatctgatggcacgtgtgtcgcagcccgaacccggcctgtactgacctgtaagaaacggaggcttgttaggcccagcagcatcgttcctctttctaagaaggtaggtgctcagagaaccggtctgaggtcagctctgatactctccagagttggcgagcccccaagttctcctgtgaaccttcaaaactactgaatcctaacctgcttcctaggacttagtgtagttgctttgctttttttatttttaattcttttacattttgagttagcatgccgtgtttaaagtgatagtttcatatgtatcattatgctttgttcataggaaggtcatagaccatgataagcagatatgaaaacttctggcttgagttttgaaacaaatggaagagcttaaattctaccatgaacactttgaagggggatttctcatcttctctgttctcagtgaaattggaagttttaagcctggcatgctggggcttacctgcacaatcccagtacatgacaagtagtggaggaatcaggagttaaaggatcagccttaattaaaaactaaataataaatttgaaggcatccagggttacataaggctctgtcttaggtaaaccaacaaaaattaacaaccaggggtggagcagtaagccatctctgccttctcccttccacgtgttga

SEQ ID NO: 20639 - DNA, 1219 bp, Mus musculus
tttttatctgtaaaattgtgttatgatacatgttaagaaaatgaaggttcctactctgctgtaaagttttctattttgatctttattcaaaaactgctgaacttccattcttgcggtcattcttaattcttcaaggattcaaaaaatatatagttgatcaagccatgttgatatatgcctctaatcccagcagtagagaatcagaggcaggtggatctcctgagttccagaacagccagagtcacataatgaggccctccctcaaaatagataagactaaaaggatgggtggttggatggcagggacacacacacacacagaaaataccttttatctcctgagaatctaacacaatttcagaagaacattgtcacagtgtcaggtacagttagcacctctagttaggcaactttggaaggaaattgtccaaagtgacttaaccccatgtcttctatggattgtgtactttgtcttttgtgtgtgtctttacatgatagtccgtctgtataagaacctaccccacactatcctcctccccatgtggtatagatgttagcattgctcttggatttcactcagtttatttctttgtaggaaacgtaggtctgaatggagatgggctgcagaccgagcagctattgtcagccgctggaactggcttcaggcccatgtttctgacttggaatatcgaattcgtcagcaaacagatatttacaaacagatacgtgctaataaggtaaggagtacatttttggtatattctaaccagtctgaatgcttccattaatccccttccatctcttcccattctttcaataactctttaactatgtcaggataaatggtttaatggttcagtataacagtttaatgtaagagtctaatggtactagtgtaggtcaggaaacagtagaatataacccccagctgacatgcttagaaaaaatggtatctggccaaaatgagaaaaagaagcagtatattaacagactgtattgtttattttaatttgggaaaggcatatctactactttttcactttgcttatttcatcagatattttctattaataagctttttcttgaagaaatttttaaattaaaagattatcagaaactaagacacaacatagatgatagaaatgttattttcttgtgttctgtttgagaggactgataattaccttgacagtgacattgagcagtttttcttttttga

SEQ ID NO: 20640 - DNA, 1229 bp, Mus musculus
ttgtggatgtttaacatcctgttccccctcacccccaagtccttaatttctacactcaataccttaatattttctcaccaaaataattgcatcattttacttctgtggggaactgttcattcattgaactagaacatattgcatacatttcctgttagtgagacaggtgttagggtcatctgtgtgtggccttctccatatcttgtgttctagtttactgatgaaagctgttgactcatccttacaattacattctcagttcaaatggcactctgtagtttagcttatcgcaccatattttagtcgtttgcctagacaaccccagaactacatctccctgatgttcttcatcacctacagtataacagtcacatgatttcaaaatgttcagattttcctgtcataatctaaaactcaagactcttaaaatgtactgtacgcacaggatccatgctctgcttttggctgtacagtctgaccttttgtcatttgtgtcattgggcttctgtcaaactgatcttctcaatgagctgagtgtatccctccctgttggtttggggttccctgtgcttaaaaagctttgctccaaattatctgtcatcttgattcaattctttactacccttattcaggtttctgccacctttcaatttgaaagggggaaatatggtgttgatatctagctttaaaagacacacctcattctctcattaaccattttgttttgccttgcagcactcattaaaaaaccacgattttcaataaataaacattagtgattaaaactcttagttactgtgagcatagcaaagcctaagataaggaccccatgagaaggcctgcctttactttggactgtcagtgtggccagaccatagaaacaaaaagtttagtgtgtttcctaaagatcctgatacaggcaggaaccagagcaggtaggaactttgtgggccatgtaaggatgcagaaaaggggattttagctatccctgaagtagttactgtgtctaacatgtgtggtattgtgatctcttatgttcttcacaagcaactggcttgggaagtgtattaatagagtagttgagatttacagagaatgctatatttacctttgacttttaaagactttgttgccattttgaaggtaatgagcacatattttccaggcaattttctgtttttctgctttcttcttctctcactttgaactatggaacctatttccatttt

SEQ ID NO: 20641 - DNA, 1111 bp, Mus musculus
gacacttttatgggtaatagtgccaggtcccacattaggaaggctgtggttgtcaagattgccctacttcaggtgccagttgcaaacccccagatcgttttatatgtgcttttcattacttgactgtaaattaatattcccatagcttgttttcgtatttggtttgcctgagcaagtcagtacagtactcagaaacactgccttaatgtttaccagtttttgttataaatgatatttcaaaggagaaggtgaatacatgtatgtgggtgagctatgaggaagggacactgctttcaaggaactttaatgtgtccagctatccagaaatcttctaaagtttgtccttttttatttttactgggaactttggttatataggtatgaaatcattatttcagttgtcattagtgatttttcctatcatctctgttttgagtctgagactgaaaatttcaatggtttaaacccaccttagtctttttggtgactaacactcatcttgaaattacctctgaagccatcagttcaacgacctaccatccaaaaagaagtttagtgctggaagacatgcaagaccaatatgtatttcatagtatcatatattctaagaactgattagaaatgcttcagaatattttaaacattgcctttttatgtaatgcacgttttacttcttgatgctttcctttaaactgtgtgtgtatacacatgtatacacgtgtatgtatgtacatatatctaacttatacatatatataatataaaatataaatatattaaatatatatatttaaaagttagattcatcagtttttgttttgttttagaagttttttcccttttttcagattttattattaaaagtgtatgtgtatgcttagtgcttgtggaggtcagaagacagtatggggtctcttggaattggtgttaacagacaagttataagctgtgtatgtgctgggaaacaaatcttggctcttgttctttctttatgaaaccagtcttaatgtggagttttagtcctgcctttaactcagaattatcctgtcttctgaggattacaagtgtgtaccgccatgccagcttttcttttcttttttactttttggaa

SEQ ID NO: 20642 - DNA, 2409 bp, Mus musculus
tgggcagaaaaaataaccttagggccatattcagttaataatagagcagttgtgtcccccagtcctccctccccaaccagggtttctccttgtagccctggctgtcctgaaattctctctgtagaccaagctgacctcaaactcacaagagatcagtttccctctgcctctcaagtgctgggattaaagatgtgtaccaccactgccaggcaaagaggttttcttttaaataaagtaattacagccatttgtgattatttcaaaatgagactcctgttttggcactgttcagtctgtagttaacaagtgacatgaaggataaaattattttttgtaaaaggattgtgttcctctcctcctaggtaaaagatatctccaggctccagaatggttccacagttattctcccttttttggaggcagagtttggacaatagtctcatgtgatgcttctgttgaaatgtgtgctgtttttaaatgtgcttgtatttctaacttccttttttttctctttcagtgtgttctcaggggaggcagcaaggggccgtggagctggcctcagcactgggagaggctggacttcctgtctctctgtgctgaatggctgcgatggcgcccgctctcactgacgcagcagctgaagcacaccacatccggttcaaactggctcccccatcctccaccttgtcccctggcagtgccgaaaataacggcaacgccaatattcttatttctgccaacggaaccaaaagaaaagccattgctgcggaggatcccagtctagacttccgcaataatcctactaaggaagacttgggaaagctgcagccattggtggcatcttatctctgctctgatgtaacatctgttcccgcaaaagagtctttgaaattgcaaggcgttttcagcaagcagacagtccttaagtctcatcctcttttatctcagtcctatgaactccgagctgagctgctggggaggcagccagttttggagttttccttagaaaaccttagaaccatgaatacaagtggtcagacagctctgccacaagcgcctgtaaatggattggctaagaaattgactaaaagttcaacacattcggatcatgacaattccagttccctcaatgggggaaaacggtctctcacttcgtcatctctacaaggtggtgaggtggggggacctgactctgggaacttgaaggggggtatgaccaattgcactcttccacatagaagccttgatatacaacacacaactctatatagcaataatagcactgcaaacaaatcttctgttaattccatggaccagccggcacttcaaggaagcagcaggttatcacctagtacagactccagctctaacttgacaaatgtgaagttagaagtcaaaaagtctcctctgtcttccattcttttcagtgctttagactctgatacaaggataacagctttactgaggcggcaggctgatattgagatccgtgcccgaaggttacagaagcgattacaggttgtgcaagccaagcaggtggagagacatttacagcaccaactgggtggatttttggagacgacattgagtaaactgccaaacttggaatccttaaggtcccggagccagttgatgttgacccgaaaggctgaagctgccttgagaaaagctgccagtgagtctgccacttcagagggacttagcaactttttgaaaagtgattcaatttcagaagaattggagagatttacagctagtggcatagccaacctgaggtgcagtgagcaagcgtttgattcggatgtcacagacagtagttccggaggggagtctgacattgaagaggaagaactgactcgagctgatcctgagcaatgccatgtgcccctgtgagtagaacgaataatgatgcagtcattcctgaaaaatgtgggacaagatttaaataaagccccattttgtaaagaatatgattcttgtatattgacaactaggctgcactaatcttttcctagttttaggtaagtaaaagcatatatacctgaaggggagaaattgaaggcatttctgctataatattgtgttgctatgtgctaaaagttttcctttttaagacttagtgaaaagaaactagaaaaaaaacaactgaatacattgcttttgaaactccaggatattttaaactgtaatgtgtaacttgacattttgatgtttctgggatatagggacaagtgttgatttcgttaaattgattgaaatttgtagtgctctccactaaactttaagcatacctgtctgtcattttaatatgaaatttcctttctgttggagaatgactgtatcagcatagagaaggcatccatgaccatgaagagtttaacagtttctccctctcaacaaacaggcagt

SEQ ID NO: 20643 - DNA, 1140 bp, Mus musculus
aagtccagaaaatgttctctgatattaaaccttatttgggaggaaggaaccgatatcgtgctgacaaactagagtcaagagtaattaggtgccactacttttaagtcaacgctggtaagaacatgacaggtttgcttttgttgttcattgttaaacttttagcgggtctgtgaactttaatttggtagtagcaggaaacaaaaaaattactgtgtaatgaatgcgtttttgcctattttggcggatctgacaaatcaagaagcctaaaacaacacgcgggcttaacgaaaactacagttcccagcgggcccggcgctggtgggccatcatttcccctctagctcccagctgcccctgcccgggctagccccgagtcggtcctagctcgcgcctgcgcaatggcgtccgcttattttttggtttggcggctgcagagcgtggcgctagggctagcagccagccgtgtgctgcagtgtacagagcagggtgtaggacaaagggcgggtggcagggaccgcgtcactggtcagggagcttcctgcccgtctcagagcacggttggccctggggtagtgtggccgcagcagcttcttcattcactgcacacacagttcttcgctcacgtcctctagctctgctgtgtcagtccgccctcccctcaaaccggcgcgcagcaccgccagccacagagccgagggaatgtgacggcatcagcgcctcaggttagcctcacctcgatcgaagcgagggccccgcgtcgcttgccgcagtgccgcgtgtcgctgccgcacgtatcaggcaccaggcaccggtttccgcaaacagaggcgcagaagcagcggccgcggctaggagccatgactgaggcggcggcggccgcgcctcctggcagcccgcgggggcggcgaggcgggcgccccctggcggcgcgccggggcggagcggcccgccgcagccgcagccggcggaggcgctgctgtccctcctccccgtgtccccggcactcgcccgctcgcttgctcgctccattctccctccgcttcagattaaagggggggagggaaaaggagctcggccgccattttcccagtgccgccgccgccaccgccaccgctcgctgagccggcgggagaaccaagc

SEQ ID NO: 20644 - DNA, 1177 bp, Mus musculus
agccatctctctagctgtcttctatttctttctttctttcttttttttttttttttagatgtttatttattgttatatataagtacactgtagctgtcttcagacaccagaagagggcgtcagatctcattacgggtggttgtgagccaccatgtagttgctgggatttgaactcaggacggttggaagaacagtcagtgctctttatccactgagccatctcaccagccctgtcttctatttcttagtaacagttatcaccataatattaacagcaacagaaagtaccactggatgtatcctgtggacctctggtcctcagtgtgtgtgttgcctgtagtgcttgctctgggtgttcaagcctaggacatctaatattgagtggccactagttcgcttctcttgcactttgtgaatctcctaagttttctgggatcaaaagctgtttcttgttattttatcttatcttatttttatttttaaaattttcatttcttatatttagtatttggaatgtgtttaaaatggattgcctaaggacattgccagacttagaacttaactctttatagtttttgagacagtcttactctgtagcccaatgttggcttgatttcacgctgtagctcatctggtcccttaatttgtggtgatcctctcacttcagtctcccaaaacacaatgaaatctgcatctttaggaaaggatcagtggaaaagcagaattgttatatctatttgccagtcttagtcttactctttgaaaataaacagagtctggtttgataagtgtaagcaggtttggaatgagggtaggcagtagttatagttacattcttgtggtgttgaggaccaaaccaaggacctaatttgtattagggaagcactccacccctctcctttatatttttctcccctattgaacctatgaccttactatgctggcatacactccatcgttgagttatatcttaacttctccttatatacttgcttttgatgacaattcagtcaatttcaaaaggtaaccagaatggtttcatattattaaaatagagagacattaataatgtggacctgaaatgtaccagccaatcaatgtatttagtagggaactgctaaatttgttctttcatagtaaggagtgatttttttcccttcttttttctagaacatgt

SEQ ID NO: 20645 - DNA, 1112 bp, Mus musculus
atatatatattacattatcagatctagagtttcatagcaagctttaccctgagttctgttgcagacctagaaaatgctaagctcagagcataatttactgaagtgtaattatcttttttttttttagtaggagtttatgtcctgtgccagagggacttctggtgctgattttaagacaaaggataggggatggttgtggcgtggctggctggaaggcactcagacacttggcctgctttcacagtttcctcacacctgcttttaacagcatttagatgcggaagccttatttccacatagtaactgcttcttgggtctctttctttttctttgtgtctttcctttcctttgctttttttttttcccacagaatagggatcagataaacaaacacattttggtaagcaagttgtttgtttcaaatttcagagcttgctttgaagggacttaagaatcctaagtacctccttgtctttgtcacacctacacataaggacacagatacagatacacacactcacacacacgtacattagagcattggggtttttttttccttcgtggaaatggttattattactgcaccaggatgaatattttttttttcaagagaacagatggtactcaaaataaggaaaggtctcttaactctttctgtatttcgttacttaacaattttttattttacccaagaactgcaagtaacatttgaaccatgctgctgttgtaccttaataactcagtgatcaccagtgtttagtccattaaaaacactcttttcgaagaaaacagtttcgaagtctctgattagccagagtacactatgggtcttcactgagaaaaacgaaggcccattttctttgggaaaacctgggaaaatgcaagtgtgggtgtgccatgtgtgttctatttgcattgaaacaatgtacttttgtgtcgtcttttttgcttttcctgacttatttcagaaattgtatagtctttggggggaaagtcttctctgttaatatatttacagttcattaaaggatatggaaaatccaaataaattacttttgaaagcagtttataatcaaggtgttaaagctatgtaaaagctgtgtcatctgcat

SEQ ID NO: 20646 - DNA, 2100 bp, Mus musculus
gttggacatcaatgggagcactgagaaggctcgatgccctagtgtaggggaatgccgggactgggaagcagaagtggatgggttggtgagcaagggggctggggggaggggggaaatagggggttttcggaggagaaactaggaaaggggataacatttgaagtgtaaataaatatccaacaaaaaataaataaacatgggcttaatgcagaagaaataaagatttgaaaaaagtaaaaaagaaaaagaaaaaccaggggaggggcgtggggaatgaacttgaaatgcttttttaagataacatttggaattgtatggtctggggggtctcatctctgaatgtaatgaaattctccttagttttgtgaaccaagaagttatacttgtccctataccttatgtttttgttccatttgtgcagtggggacagatgaatcccaggagagcagcatgacagatgcagatgacacacaacttcatgcggcggaaagtgacgaattttaacttgtggaagtcagactctgactgtgctagtgctgacatgtccctgtccctccatacactgagtctcaactcttgagccgccattgccgtcattcgtcacctagaccatgagtgtgccactttcattggaccctgactgtacacagaatggaaggcagtgcgatacttagctgctaacaagactggctcttttaccagtatgaatgacaatttgggggaggggtgaggaacttttcttttttctttaatctcttcagttggaaatctatcatggaaggaagagttatgttttatcttgaaggaaccattagatacggaaatggtgatgaaccagaatttcttggtcatttttccaaaattgttttttatttggttctattcctgataaacagagtaactggccttcatttctaggtcttcgagaatggtgttagcaagtgccagatggaacaataaaagacattgcctataacagagtaaagttcattgccaaggaacatagcttaccttaagcttggagtctctcctataagcaaatgcagtgggcctgttcggactcatacggaggagtcaaatatccctccatacagtgtacacttattcttggcaagaatgctttaatgtctaaccaagaattttaatttattcgtcttgcttcaaagtgttgatcattgttgtcttggtattgcaaactttaaaattggtcttgacgatactggctttactccttgagctctgggatcgccttcaacactcagagatggtagcgtggttccctgatgaaaagccaagcaggcccttaataaccactgtgtttaccagaagagtcagtatgagaacactaaagagaaaccttcgagatcatgatagagaagccttaatacagctggagctgtccctaaccgtgtgtctgcctctctcccaggagtgcaagcacgcatggtgacctctgttgagtgccgttctttcagctctctacttcgtaattgtcagtagtgtgagtcactgcaacttgtcatgggcgtaattaattgggtttaaaatactgaacatttttaacctaggaaaaagtttcttatgaaagagacaaattctctcctgagttcatcataatatgggtttgtgtgtttggggactggccacaattttaaagatctaattatgcgtataaaaatgggaattattggaatttcacaataacagatttaaacagtcttaaattgtgtatctcctttattgtaatgtattgaaaattttagagaaaccttagttaacattttattaagtgccaatgtcagaatataacagattatagtttcttatgggtgacaggcctgcagttcttattttggaatgtttgatgaaggaaaacctctcctactggtcacttgtatatgtaagtcaagctgtgaaaataaggtggattacagacgatgtggaagaatgttttagcctgtagactcagtcattttctgtcagttacttaaccttctcatccagatgtgaattagacacagaccatcataaagtcaaagtcttgggttaggtattaggtgccagggaaacattttaaaataatttactgactaaatctat

SEQ ID NO: 20647 - DNA, 1186 bp, Mus musculus
ttacgtttcttcatgcctttattgtttttagattaatactggcattaaaaattgttttaatggatatttttatgttttaaaatttgtcttttacctatttctatggatatgcttatcctcaaagaagtccaagtagagcatgaatcccatggaacaggaattgtagatggttgtgagctgccatgtaatactgggaactggacaaaaaatgcttttaacaactgagcccccttaaataaattttttaacttaattacattttattttatttcatttggagagaaagagtgagcatgtgtatgaacattatgtgggatctcagggatcaagcgcaggtcttcaggcaagaacctctaactacaaagcaatcttgtcagcccaaatactggaattttttaaaaaggaataatttgtagttagcagttttagaaaaccaaacttgtatgtatttctcctttgtttatcatgttgttttctcctagaaggtttgatgagccttcttcgtgaaatgggaaaaggttatttagctttgtgttcatacaactgcaaagaagctatcaatattttgagccatctaccttctcatcactacagtactggttgggtcctatgccagattggacgggcttattttgaactttcagaatacatgcaggtaagtatacaaagatacatatatccttctagaattaatttaactttcatgcttaaggctggatcataaaggctaatatttactaatttattatataatgtttatataattattttcctagtatgtataattgtcttagttaggattactattgctgtggtgaaacaccacaaccagaagcaagctggggaggaaagaaaggctttatgttgctcacaattcatcatcaaaagtagtgagagtcctggagagatggctcagctcagcggttaagagcactggctgctcttctagaggtcctgagttcaattcccagcactcatgcaccgatgccctcttctggtgtgtctgaagacagcaagagtgtacttatatacataaaataagtaaatcttaaaaaaataaataaataaaagcagtgatcaggaactcagataaggcaggaacctggaggcaggagctgatgcggaggagggatgctgcttactggcttgatcctcgtgctcagcctgttttcttacagaacccagg

SEQ ID NO: 20648 - DNA, 1221 bp, Mus musculus
acctggtctacagagcaaattccaggccagctgggccctgtctcttttaaaagatatagatctttgtgtgtgtgtgtgagagagagagagagagagagagagagagagatctctataaatatatataagtacatagatatataattatatattatatgtgatatatatatatatataattgtgtctgtgagagattgctccgcagttaagagcactggctgcccttttaaaggacttgagttcagttactagcacataccgtctgtaacttcagttccaaagaatgtgattgatactcttttttttttttttaaagatttatttattttatgtatataagtacagtatagccgtcttcagatacaccagaagagggcatcagatcccattacagatggttgtgagcaaccatgtggttgctgggaattgaactcagcacctctagaagaacgattaaagataatgaaagatagcttcatgaagtgctttttatactgacattaaaataaatttttattttaaaggcttgcagaaggggaacagatcttatctggtggagtgtttaataagcagaaaagccatgacgaccttgtcactgagtttggagattcagcttgcttcactctttccttgttgggacatgtgtattggtaagtgcaagtgactcaagacctccaggaagagtcccctgtatagacgtgctctgcactgtgcccattttgatattgatgtttacagacacagctggctttgtagttcctaacctttcccatcatgacctcattacatttgttaaatagtaaggatgctgatcccattttacccgctacttagcctagttagtgataacagctgtagcagctctagcaagttctaatcactgaggaaagtgagtggtttcttttccttaatattaaatgccattgcgtcttcttagagtcttgaaggcaggtttcagtaatgcaaattaagtattaattattttcttccaatatagtaacctttgaagtgtgtaacaagaatttttaccatacatgaactcagaattagtatataatagtaacatggatcctgttttttaaaaaatacttttgaaattgagaaaaatagaaaatattcaaaactgcctgtagagatatttttgcatgtaataaatgcaaaatgacatgatgttatacattatgagagaagtgattaaagcctatttcctccaaaaaaaag

SEQ ID NO: 20649 - DNA, 1176 bp, Mus musculus
atgtttgagtatatgtgtgtatgtatctctgtgtgtgagtatatgtatgtgagtgtgtgtgagtgtacgtatgtatgtaagtgtatatgagtgtgtgtctatgtttgaatatatgcatgtgagtatgcatgagtgtggatgagtgtacatgagtgtgtgaatgagtgtgtgtctatgtgtgagtgtatgtatgtatgtgagtgtgtgtgtgtgtgtgttttgctgagaatggaacccagggttttgtgcacaataaatgtgcttcactactaaactacaaccccaatcttttgaatccttgcactgatgtccgtcctctgaccagaggatgacagaacacaggggtcctctgaagtgtctcccttttccctgtctttggagggaatcactagaataatcttttctgttcttcccctcaagttcttgagcacgagggcaaaggtgagacgtggcatttgtggcttggaagagcatccaatgggacaaggaggcagtgcagcgaggagagggatctgaatgggactctagaattcccgacgaaaactcttcctttgcagttctccaccctccttggcttctctgtttatcattgcctccagctgcaggaatcctgcccttgttggcagaaacagtcaggaggcatgcccacaggaaccgcaagtcatgaatcagcagacagataattaactgggcaaggagtgtgtgtgtgtgtgtgtgtgtgtgtgactgagcagcttcaggaataaaccacttggtttgtccttagcctctgtgctgcccacagagtggcctgctgtatctcaccatctcctcctctcccttctctccaagtggaaagggtcatgtgcctactgcaaactcaggccactagtggatatgaacctaagatctggagatgatgctgtctaaggcttcttttctttggaaactaccagaatttattagaacttgagactatgtagcataatgataagaacttacccttctctctaggcacaccatgtccccagaaaacttccacttcttttaaggggctaggattggggcctagagatctggctagcagttaagagcactcgatcttgcagaggagctgggttcaggtctcagaacccacatagttgattgccaattgtctgtaacttcaatttcaggggacctgacactttcttctga

SEQ ID NO: 20650 - DNA, 2430 bp, Mus musculus
atggtcagatgctttctcctcaggggagagtgcagtggtcagagctggaggtccatccccactctccaggctttctgctcctctttccgggcacctccacacacctcatcctatgcctctgtgtgcttgctacacccatccatgggggtgcttgtgtgtatctacctcttcggtgtcttgtgaaggagtcccccgagtctcccatgagtctgttgaacaacgtgccagggaggagttgaaaggccagtcagaactgcatgtgtggcctgttctcctgtgggctggacaacctcattttatctcagcctttaatctgggaggccacaagtgcaattttattttattccctatggggacacccaaaactatgatgaggcccgatcactctagaggagcacgtatataaacatacttgcattattatatttataattttgtatgatgacaaaggagagcataaaaaaccccacacagagtgtgtggcaaacattcttagtaacttgccagtcagtggctgggtctgcaaggggcttccctcttcctggaagcatgtgaagatgggtatgtggacacactgaccctttcttgaagaggtttctcgactgggttctgggttctgttggcccagcaagcatggtttgctctgctggcattgacttagatctaatgttaaaaatcagtgcttaccacccagagacaagaggcctataaacagcatcttgatgatctgagacctgagtcctggcctcgggatcgctgtcaaaacacctgaaagttaattcagaaaagccatttcccccacccctctggagttcaatattcttttggatttggtaacttggaaagtctatttcaagtgtcactattctttttttctgaaagacagggtctcatgtatcccaggatggctttgaacttgctatgtagccaaggttgacttgaacttctgatcctttttctacacttctcaggtgctacaattacaggcatgagttatcctgcctggcttatgcagtgctgggaatagaacccaggacatcacacatgctaggcaagaacattaccaactgatctgtattcccagctttagtatcaacatcctaagatgccgagagtaaatacggtatcaagcctgcggtccagattctgtgtgtgtataaggaggctggaatgttgaccagtagtagaacaagcagttaaggaatgtcctgggtttgattcccagcactgaaaacgtgtgtgtgtgtgtgtgtgtgtgtgtgtgtgtgtgtgtgtgtgtgttttgtggggggagaggtggtgttgctcctgtttgtctttcagtttccagactgaatgccttggctttcacgagagcagatgctattcttagaacttgtctcagcgagtctcattccttctcagactcccttcatcttttgttagtgggtgcatctgatgtagcacttagtttttatccaacttgttctttcttgttcactctgcatacagttgcatctgcataccagggaggaccttcagtaaggagtggctgatccagatgttggtgtggtgagcaggcctcgagtacaggagaaagccagcgactgtccggttgtgcccttgggttactcttggcttaggtggtgggagtacagtagagggacagggaagatggtcagagatccatcctttagctactgaggcagagtccgtgagagtagagtggggttttctttagagaagactgtttagatgaggaaactagcagggaaggaagaaaatgtattagaagagtgaaaggtgagtaggaatcttgacggtttctggaatgaggcttgtggtgcttgggcggcaacgccggtcaggactcgggcatatctgtagctgttctctccggaggctgaggaacagtctgagtggtttccaggggatgaacatctaaaattgtgctgggaatgaatgcgcagcacagagcggctgggcccgttctcttacaggtggtttcggtccagtctctgtctgaggacaacaggaagagacagagaatgcctggcaggtagctctgttcccgttctttccctcagagacagtcattctgaagctgcccacagcaacatcagagtctttgtccatttttggttgaaattgcttacgcgccttcctgacaccctccccacctcctctgagttgtgtaacagagaattaaatgtgctttccaaaagaactggcctgagactaccccatgttgttagatctgtttttgctgggtgcaaagagtgtcactgcttccttccaaagggacaactgtatagtaaaagcaagcttccggatgtaacaggatggtgcctgctgtgggagctggagctggcttctgagtccagagctttgctattttcaaaatgagcaggttactactttctaaggctttattattattattattattat

SEQ ID NO: 20651 - DNA, 1177 bp, Mus musculus
aatcgtcccaccattgccctcgtgtccctgaggttctgcgttctgtacttcgtccctcctggaaacctggagtcctccctccagtgcttcaagcctcctcacaggatgctccaggtgcctactcacgctccctgcccgcgaggccccgcccctgaagtcacctgatcagcccgaagctccgcccatggaaccgcctgagggatctggcgcaaagacctagccactgaagtgtccagcccggctccctgggaagccgctgagctggtgagcacctgctgcctgggcgcctcctggaaaacgctgaggtggcgcgcgcattccccacacctcataagggcctgtgacctcatccgatccaaccgaggccggttgtggacatcgttggaagaccgtcctcggacttgggtcacagctgcctcctgttcgactttcagtccttctctggtactcttagtcccgctgtggcctgtccccaacttgaggtttgtctcccatcattcctttgactatcttcaccatcccttctagcaccttccatgcctcctagtctctaaaggatagcaactcaaggtcatctgtcccaccaacttgtttatattaggcctggttgtttcctttgtggggaagagcttggggtctggggatcagggagtcccacagataaaatgaggttggcaatgtataaatcctagtctgtgaatataaatgcttttttaggatgtactgaattttaaaattctgtgaagtaaagagtgttttgagaatatttttctccagaattctgacataaagtgccttaaaaaacaaaacaaacaaacaagacaaaaaccaaaaaaactttatcacattttgtttgatattggggatgcagtactcatgccactgtctacatgtggagatcagaaaaagtcctaaggagttggctcttggtacacacttgtggaaatcagaaaaggatttaaggagttggctcttttcaccttgtggcttccaggtattgaactcatgtcatcaggtttgacagcaaaaacctctcctctctgagccatcttgctggccttcaagtatattatttttataaacagatcaatggattttctcatactgctaacccaaccagaattctcccttatttaacttggagtgaatagcacaggccttagatagatgaatacaa

SEQ ID NO: 20652 - DNA, 1206 bp, Mus musculus
gtcctagaattcagactcaggcttgacagcaaacaccttgagctttttgactgccctcaaattttttaatgactagagttttatataaaactcattctgtgaccaaaaatgaccttgaagtttagatcctcttgccatcatattgcaagatgatgatggtccacacctttaatcctagcactcagaagccagagacaggcgatctctgagttcagggcctgcctagtctacagagtgagttccaggacacccagggctacacagacaaaaaaagaaaaataagaaaggaaaaagaatgctaacacatttgagagttaagaatttaaaatccaagcctggccaagtgtggtggctcacagcagaaatccctgcgggtaaaaagctgagttaggccgggcgtggtagcgcacgcctttgatcccagcactcaggaggcagaggcaggcagatttctgagttcgaggccagcctggtctacaaagtgagttccaggacagccagggctatacagagaaaccctgtctcgaaaaaccaaaaaaaaaaaaaaaaaaaaggctgagtcagcacagggatcccgttaagatcaaggctagcctggactgcactgtaaaaccatctcacagatggtgaatatggctcagtggcatgagccctggagccagccaggtacggggtgttagcttaatctaaattggcatggggggtctgagataggagaactgccttcaattccaggccagcccaagctacatggtgaaagcctgcctggcttgtttgatcctggggcaggatggaggtgatgctgtgctccgctgcaaggtgctggattatgagggccttttactgtctccagtattagcactagaacgaaggctcagcaggtttaggcacttgctgccgagcgtgacagcctgaattcatgtccccaaaacccacatggtggaaggagagagccatcatgtgctgtagcatgtctgtgtcctcagacatacgtaccaaaataaaataattttctatatctttttggtggtgtggcttaatttagatggtgtttgataggttccctcgctgtcatctctagggcatgagagcactctggctgtgccatctgtcaccctattgaccaccaggatttattggtttgctctggtcagctaagcaggtgtcccctttcaccttcaccatcaaagagctggtcttctgtcc

SEQ ID NO: 20653 - DNA, 1872 bp, Mus musculus
ggattttgggaaaggctataaacctgttttctggagggagttctagcactggttttggtgcctcagatacctgtgtaccaggatcatcttttctatgaaacttccttttcaggcatttatcaggagatgtctggcctatcgaaaggaagatcgcattgatgtgcagcagctggcctgtgacccctacttgttgcctcacatccgaaagtcagtctccacaagtagccctgcaggagctgctattgcatcaacctctggggcatccaataacagttcttcgaattgagaccaactcctaaggccacaaactgttgagcacacacagtggacatacggcattcagcagtgggtttggaacatagtgaatccgaatggatctcatgaaacctgtaccaggtgcttttattttcttgctttttttccccatccatagagcatgacagcatcgattctcactgaggagaagccttgggcagctctggccaggcctcataggaaaaggtcccgcccaaagttccagcgtcaacggtcaccatgggtggctgctctgagtgaggaaaaaaattaaaaagagaaaactggttccatgtactgtgaacttggaaacatgcagactcagggggttccctgacggagtgcttcagaggaagaatgtggacttgaaaatacagactgggctagtccagtgtctatatttaaacttgctcttttcttttaataaaatttaggtaacatctcctgaaaagctggtagcacaaggctcggctggggatggtgtttgacttgggaggaaaaagttgctactgccattaaaggcactagagttagtgtgctagccctgaataatctcagtttctaaaaacatgcagcttccttcaccccttttttatttttgaaagaatacatttggtcataaagtgaaacccgtattagcgagtacgtggcaatgttcattccggtcagatgcagctttctcctccatctggtctcccgcgtgaatgcttccctcgcctcagtagggagaaacagtgggagttctgagatgcctgggttttgccatcggacaaagaatgaggttagaagactgcagtttggagtctctctgggttttcagatacttcttcacaatttgaacacttgacggttgtcccttttaatttatttgaagtgctatttttttaaataaaggttcatctgtccatgcagtcctcctggattctctgattatatatagtaactatgggaactgcttccagaagtagacagacggctcgaagggtgtctagctcctgcccacaatcttcttgctcatttcttgctaaccattaaactcgatcaacacatgggcttttccaactctgttagatctttgaggagaacaaatcctctctcaggcatttgaattgtggtgaatatgctctggtgtgtgtgtgagcatggaccctcttcttactcacttagagtttgttttttttaaatctcaaggaatataggtatttcagcttttcttcccccccccccccccaatttggcttatttctgagatgtgtgatctcctggaggtggagctgaaatgggagccgtgtgaccccactgtgccctggaaacagcagatgactctgcaggagagagttggagccagggcctgaacatgtggtagccagcttggaatgttactgacatgtggtaagagagccagccagaaatacttagagctggagagatcagagcaggggcgggagtcaggaagggcagagctcttaaggcaattcatgcctctagtgctctgtgcttgctaaaagtgttcctaaggacaccttttctaaacccctgtgcattttgtagtcctgccccacactccttggtatcaag

SEQ ID NO: 20654 - DNA, 1179 bp, Mus musculus
cctgtattttctactgtaataatgtgatgtacaatgaacaattcactttattccctgggttttctatataaacagttttcaagatatgatttggttaaaaataatttgtcacaaaaagatctgtttgcaaattaaactgtaaaagtattcaaagtctcaaagggcaatgatttgtgtgataacttagtgtgtccagagccctgttcatcagtgaaaatcctgtagatgattgaatccataacatgaatcctgacgttggttatatgtgagcattttcttatattcttaaccccagatgttgtttgatttctgggtatcatccttagtaaagccatggagagcaaacttgagtttgagaactacatgtggcagaggtacgaagaaggaagctgagtctttttccagaaacttctgggttcatttgtatctttccaggtagaacatgttgataactcctcacacaaacgttctaccccaggatacagctagactgttaagagttcccacaaggactgagtcaaggaaatgtcttgtcactaaaccatacgattgttgagaatgttctaacaggatctctgtacgactccattttcctttgtgaaggtgaaggacagtcattcgctgtctgccattcagttgtctgggcctggcctcattctactatagtcaagcacctagtaactcaccctagttgccattttctttttgctatccatttatagttagtagtggaagatgtagccacctttttttgggagaggctaaaagtgaacattttgaaagttttttttaattggtaaaagaaaatagtaagagaataatgacaccagagactttagtggaaattgcccattttgaaggtaccattcttagaagccaagaatttggtatttaaagtttatcttgagagaataacctgtaatataatttgaaataaaggtatagtaaccttaagagcactgtagcaaaaacattggtgggtggggtgaatttgtaaaatgaatgactttgataaagttttatgcacaggcaaatgtattcattagattctgtgtagtgatctgctttccctttgtaatttgtagtcctaaaaagatttaaaaaaaaaaataaagtccatccttgcatttaaaaaaaagaaaagcaaaacaatgtaaggaactacaataaggtatgtgt

SEQ ID NO: 20655 - DNA, 2535 bp, Mus musculus
cttcctggaagcctctctctgagctggcttctcactgggagggtggaaggttgggcatcgggaaacccgaggcatctttaaggcctggactatgattgtcttaactggaacccttggtggcttttcccttcaccctaccctacaggtccaagtacagcacgtttgaacctgagggggtgctggccaacgtgctaggcttgctgctggtctgttttggggtggttgtgctctacatcttggctcaggctgactggaagcggccttcccaggctgaagagcaagccctctccatggacttcaagacactcacggagggagacagccccagtccccagtgatcgccctccttgtcctcttggctctgtgggtttccagatatctttttgctcttccctgcagacactgagtctcttaggtccaggagtgtgagtgtggggctgtgttgttagtttagtggggttccaggctttggagttgttctcagtctcccttcctccccttcctctctgcagcttttgatacatcctgtgagccctgagtaggctctgtctgcctgtacccgctgttgtccgttcacgtgcagaaagcttggttaggggatctggggtcaagcctggccctgatccctattggagctagacaatagctccgccctccatgcagcagatggctgctgggcctgggcctgagggactggcatggagaagtcagaccgctgctttgtgtattcaacccaggagttccagcagcttgggaagcatgtgtccttggcagtagagcaagtgatattatgtgtaaaatatgctggtgttcagaggaaggctccccagaaaggttgactctggctcccaaaggagccttggcgtgtgggttggctacagtctttaggcctttctgttcttttaaaatccctgatcattaaataggcttttcgtggggaaggggattagtgatcaaaactcaggtaaatacctgccctggtggaggagggcaggctgcttgctcacagtgagggctgccctggcagagtacctcccttcagcaggggctaagccctagcttccttctgcgggccagcctgggcagactctgagagtgggaggccacacctccggagtttttggaagagggctgctgtttgccttgttctccaggggggctgctggggtaccctggcttggggtgccctgtcttggttgaagcagccctgagggatcatggtcctcccagccctgggtccatcatcgctggacagtaggactgaagtggaagagaggaacgggattggtctcctgcacttagcttcaaccccctactgcctgttgcgttgttagctgagtcactgtttggcttgagtctagagatattgggattagagcactgatcttgtattctctggcttggcacatgctctcttcttgttttccttctctcgggttttaagcctcacagtttgtgacacacatggttaacttagtgaggaaatgaatggtttctgaacctggcagttctttaagtcactaggctggttttctctgtcagatttctaataactgcgtgggccctgcttctggtgaggtctcttcccccagctgtggtgtagctctctccctgatgctccctcaccttccctcccgtctctccacttgctaggatggtgaggtttgcctccagttccaactgtatatgctgtaaggctagggaatcttaggagttctgtcgtcggttggcacacttgtacagtcaagtgtttacatctgggcgactcggccttagacaaactcacgagtaccatttcgagtctcccttgccagactacacagagaattagaagttaggtctgcaatgagagtctgtaaactagtctttttgccaaagtgtatgatacatgactaaggaccaaagaaagcccccaagcagatgtctgtggtttcttctgtctcttctgtctcctgtgacgtacagtgtgttgttggtgcaacagaggaatcaataaatgtctacagctgaccgcttgccttctgtcttcatttgctgagacaagaaaacgaaccaaagctttaagctgtcatacatgaaattctactagagatgagagacattgtcctcgggttggatacagcagattgtgaccggcagcttctcagccctgggctgacctgtctgaacccgggcagctggacatgcccagtacagtgtctgtttgaccctttcaccatgtgtttctgatccttacaaagaggagtgaagcttttaagacagctgagattagtgttaggttgatttctatgactcaggcaggctctgtgcatatggagaatttagatgggtctcactgtgcctacctatgcatggtgagccttctcatttaaagcaaggtgtggtagtacatgcctgtaaccacagcacatggcaggtaggcagatggatcttgagggcagacatcatcttaaattaacaggactcaaggtgggagatcacttgtctagtgtgagcaaggccctgggttctgttctagtactaccaccacctcca

SEQ ID NO: 20656 - DNA, 1175 bp, Mus musculus
agggtaggacggcagagcccgctggcaggaggtcggggctcagctagagacctacagtgcagtagtgtggagttactgaaccgctgaggcagaagtgtgttgatgtacgtgctaggcctgcgcgtgaggatgggttagcagatgcatggggctgtttctacaaaaaaaaaaaaaaaaaaaaaaaaaaaagtatgtggctgtcagacagaacccgcgaggatgcggagggcttgctttgtctgttttcggagagtgtattattaactgccttggtcctcttttcaaatggaggcgttgctgtcagagaattgggaggtggagctggagctgatcaactggaggagctggggacgcaggcccaagcacagctgggccagcacgggctctagctagggtggggaagtggctgccacagctcctgttggctgctgcgtgcatcttctggtgctcactgctgctgggagaagcagttggctgcggaggccagtcctgcctgcctgtctagggaagggacagtagctggagctctgatgtctctgtgctggtggcattggtggtagcttttgtgttgagtcccagccattgccagcactgaggcaaagggaacagaggccagagccagcctgttccccttccaccctctttacttatgggaacactggggcaataggagaacatgcagaagaagggctgagggctggcctgaggttggatgtcaagggtctcccgatgcaggcggtgcctccttaaatagctgcgtgcctgctgtgtcttcctgcacagatcgccagcagttgagtaaggtagatggggacacatgggttcagaatgtgaggccacagtgctgggaccttcggttctggaaacctcacctgagggaggagagcactccctcccacacttggtttgggaaggaactggaaaggagaggtggggggcgggggtgatgggggctagtgggctagcctgtggtctggtacagtgggggcagaaaggagctatgtagaacaaggggaccctctctggtgcgcccatgctgactcggggtgaaagagcaaagcttctacttctcacccgggaaggactttcccattgacctggacaaagaaggggatttgcttgcattttcaacacatctgtcagccctaccccagaaaatgcaggacctctgaaaa

SEQ ID NO: 20657 - DNA, 1151 bp, Mus musculus
caggcccgcgtgggccagtgggtgctgctcttcctgggcgtcgccctgctcgtggccaccgtgggtctcgcccatcggctctacaacatccgtaaccatcacagcctccgccggccccaccgtgggccccagtttgggtctgaggtggagctcagacactcctgaggtgaccctgctggcaaggccagcagaggagtgtcccataagaaactggatgggggacatggtgtttgagtggaacataccctagctgagccttcctcctttgctgtccccatccactctgccccacccccaccccccaggcccagcccccattctctggatacccagtgtctaacaccgacttccctgcccagtctctgtgaatacaattaaaggtcctcccccacacctgagtctgtgtcccttgtgggaagccagggacaggaccggctgcttgcctgtctcctgacagtcccagcacgaccctttactggttgtcttcgcagtcttcctccaagcaggaagctaatcccaattcctctggaccccatcccccacaacctttcccaccagccttcctaacagcccaggtgaggtggctcctgtcttgcagacccatgaacttgccagggaggagcctaggaaacagaggggaaggaagcaggtaggctgcctcctttatgtgtggatacactatagatggctcatcctgtcccatgtgacctctctgtggctgggtgtcttggaggaaggctctggatgcccttccctgctacagggtgagggccctggaagggcgtgcctcactgagcatgctgaagcggccagtatataagtggacagcctgggttccctgacggagccacgtaggctctgcccacaggaaagagcattaatccgtgaccacacagtgggttcactgctactgcccacctcctcatcccggaacacatcccctcagcctcagccatcctttggaaggcctatttggattttagggggtgtcacttgaagtaactttttatctacatatttatgtagtaaatttggaaaatctgaataaaaagcccatggtagcaacattaagaaatataagcactgttgaagttttggtatcgttcagactttttcttttatttatttatttatatttatttatttttctc

SEQ ID NO: 20658 - DNA, 4792 bp, Mus musculus
gtccaggccagttaccccgctgtctgtgttggactgtgctgtgtggcgccactgcagcccagggctgggttttaaattttcactcctttcctcttctttgcttcttcaattaaacgtttctgtatatttgtttgtcagctgttgtgttcataaacagtacaagcactggctctgtctgtgtccatttgcccatgtctgtctgtctgctgctgaggcagtcatccatctcgtgtccccatctgtgtcgtgctagcacttaagtgggaacaaaggccaacttgagattgtctttcctcctggcaccagtgtcttttaacaaacctcaactttgtatgttttttatctatcaggctagtttttttatgaaaagaatttaacctttctggtttcttgatttcacagatttccctctttgtaccttcctctcttccctcagtgcctgcagtgggtactggaccctagaccccacgagcagtttgctttcctgagtcactgcctgtggggcacagccctgacccctgaccgggagttgacaactgcgctggtgctctgaagtctactgactcaccaaccgttctcagcctgggtctcctgaaggccctcggaggcccaggagatgcaggaggcttctgttcaccctcaagtccctttctctggcttcactagttgagtaccctgtggggctgagataagcagttgactaggggtcatgcggaaggagaatcatgttcaggaaagctgaacttatattgtgtttccagtacctggtttcagaatctatttttccagtttcgaacttgaatgataggcaagagagatctctcagctaagcttctgtgtttctgtttgctgagtctcctctacctggtgggacactggcccatctttggattgagtactctgaataagagacttcctgggagctaccgtctgtgcttgaccctgaacaagatctttagactgtgacagacaggcagttctcataaatgatgagcaaatcagccaaggtagactcagggccagccagctaagactctccacgcctgtggcacctgccctctcttcagttaaggttatgagcagtattggactttgtaggctgcagttggccatgctgacttacaggcctcgcgtgtctgtttccgttaggtgtatgggttccacagaggggacttgtatgtggttctgactttagatgagtccccggcagtttggaacatggtctaggagagggtggctgtttataatctgctgagctgcttgcaggtttcttagacgctctgggacaaggagagcagcaggcctgatggctgatggctggttggccactcatgctgccattgctggagaagtcaatgtcgactcattcttctgggaacatggactgtctggcagagtctttgcttgcttccacaactgatgtagttgtatgccaaaagtcttagatttagattcactatattaggaccttgtcccaaaggaaaggccttttcagtcagggtatttctccttggccttcctaatctgtcattctgattttgggtctctggggttcctgcactaacctgtggcttgtcctggatcagtttgtggttccctctgctcttagtggcgtttgccagccaggtacagactcctcaaaggtagcagacttgctgatggttgctgctgtaggagccctcagtttcttcctgggctgagtctacagtagtaggctgagtcagggcgtcgcagggcctgtagggagcacctgtgctggggagcacctgtgctggggagcacctgtgctgggtggactttagcttggggtgaatgataggattgtcaactagaacttgaaaacaaagttttaaaaggttagcagcagttttagaatacatttgtgtgaggtctctatgtgctttggaaaccaaccacgtgatgactttttccttgctctgtggacacttgtcaactttcttcagtcttccttttctgctctccaactagattaggtaagactcttgctatctctgcctccaagtacgtgtgtacccacagttgcagggttgctggcatttgaagtctctctcttatcatatgcacaggtggcccctgtagctgaggaagaggtttctgtgggcgtgagatgcaggaagtccataagtctgctctcttccctgaagcacagctctgttaaagtttcaaagccagtctcttaatatttgctagttcttagcctgacggtgaggtgggtcagtatctccagatctgtcctctaggctccaggctctggtggggctgcagtgctattttgacgtggttttggcaagctacagctagaggctctggcctgtggtttctgtgtctgctgtaggggaggctgcatgatcggtcagactagcagagagctgagctggtgagtgggtctgaggcttttgtgggcttgcgctgtccccactggagattgatccctttcctgacctccgaggctgggcttgaggaggagagtgacatgagacaagtcggtggggacttcctatcaaaatcagcattaggtcagataactggagacagcccaggaagaacgggaaaaaggcagaatcctatagtattttgatgattgttacaactaagatttgatatttagggtagagtagaaggaaatactagagaacacagagagtctgaggggagaaacattcagatggttctgtctcatagctatgcagcggacctgtgcctcagcctaggttggcttctgcaccattaatgaagcctctgtgtcgctgggtgccaggaggtactgtgggcggagagcccttctggcagcagcgtgatgtctggtggttaaattctaggttttgggtatcccgtgacagtgcatgatgacactgtttgagacaggttctttctttgtagaccaggctatccttgaactgagtgctgggagcacaggatgagccactgccccagcatccgtgcttcttccctagcgcaggcctcaggctaggccagtgacctgccactgaaccacaccctctagcccctgccgtttctttcctttgtccctttctcattacctcgctactgtagaatgttctccctgatgctctgggcccttgattcctaggccgtaagaaaatgtaggactccggggtttaccaaacatggtcggcagttcataagtgcaccctactttccccattgtgaaatagggcaggtcctttgattgcctggctcaggctagagtaccattgcaatagaggcctcagaacgagtgttttctttagagcctgccctgagggtgaggaaggccggcctattcagcatgtgggttttctgagaggagagctggtctgagcagttactgtgaaccctgagccaggtttcccagagttgtcctctcctcctgtgaggcagcagctgagtgtctcacgtctccaatcttgttcacctcgagccatctacattctctctttctcccatactgtcattgctgctaatgttcagagtcaagcatgtggcattacggaatgagcaggtcttcttgggctgctatctgaatgtccctttttaaatgtggaaacgtgcagatgctttctccgagatgcttagactgatgtgtcagccagaagaagcttagactccaaaggatcgatgctgacatctgtgcaacagctgggaagtgtacaagtgaagccgaactgtgctatccaccattggaaagaaacgttctcaccttgggctgactgtgatgtacagtgtgttatgggaattgttgggctgaagctttcgtcaaatctgagtcccttgctttgatcccgtgtatgttatgacccctctgtcagtgactttcccctgagtgtgaattatagcatgattgtataaacctctatgtagaaaatggagatttcatgttctacaaatgttaagctctaactgacccacttctgtgcgcatgtgtatgacctgactttcttatatatttaaactttccttctgttctaaagcttttgtggcattccttgttcaggtggagaggaagctgtccctttgcagacctgtactgtaaccatttctcctttataaatattattttcacagggctgattgtatacagggcttataataaaaatttaacactgtgttgtcaacgagctgcggtttctccactggaggtgacttcaaaagcacctgagggtggagtgtcccttctgtgaccttacttcctagtacgtgaagtctaatctcagttttgtcctgtttcagcctcctgtataagaagtatcatattttctgcccatcatactttgtaataaaacttgaacatgtatagattgaaatttttcttgtgatgaattcagttcttctcagtttgtacctgtggtcatgtttcagaggtgctgggagggcattagactccactacaattcaacacagtatctgacagcccaacttgttacctggtatctcttgtttgttcactctcttcttagtcaattaagaaaacatggacacctacttcatgccaagggccataaccctcagactgcttatgctttgccagagggacatccacagacttgtagtgttctgcagtcatggggctgtgtccaggaaccctgaggccacttctgtctgggtgagaatcagagtgggtcaagaagatgtcacaagaggaaagctatctgacctgggttttgaggcttgagttctctgggactgggaatggcacttaaggcaaagagaatgcagatttttggaaacaagaaagtgtggacatattcaggtcagtaggtgtgtatgaaga

SEQ ID NO: 20659 - DNA, 1165 bp, Mus musculus
tactcatatacataaaataaataaataaacatctttgtgtgtgtgtgtgtgtgtctgtgtgtgtgtctgtgtgtgtgtgtgtgtgtgtgtgtgtgtgtgtgtgtgtgtgtgtgtgtgtgtgtttgtttttcgagacagggtttctctgtatagccctggctgtcctgcaactcattttgtagaccaggctggcctcaaactcagaagtctgcctgtctctgtctgccaagtggtgggattaaaggcgtgggccaccaccacctggctataaataaatccttttttaaaaaaagattgagaaggactgatggatgtacaactctaaatctctttaggaattacttcacattgagaggaaacaaaaccatataatttctgctagatctcttcaaaccccaatgaaaccaatgagattgtttctctctaaaacatattttagattttgttttgcacactaaagcactggaatgggtttgtattttgtatgattttctgtgtcctgttgttgtagctctccatcctgttgaaaaaccaagatgatctcgataaagccattgacattttggatagaagctcaagtatgaaaagccttaggatactactgttatcccaagacagaaaccatgtaagtagcctctgccatggcccagcaactgaagacagagtttacatttcttcattttgccttgcttatttgatagaatattgtgtttcttagccaaagtacgagtataacattcagtccagccccatcagggaccagcaagttttctacatttgatttcattggaagccagattgttagggttaattacaacaaagattatttgactaacagtgttgggggtggggggtgggagaatatttcatggtaaaggagaaaacattttacacacacacacacagtccttctattagatttttgaccttaataagagatatttatgtagcatagaaggtaccaaaagctgtcagggatttgagactcatgcgttttgaaaccagcttcctcaactccaaggccttgccttgccttgccttggagacacattataagaaacatacttttacttctgttcactggggaaaaatggctgtagagtaaaccagcttaaagtgctcatttactagatgtctgggaattttctcttacataatttcctgt

SEQ ID NO: 20660 - DNA, 2769 bp, Mus musculus
ggatagctctggcatcaagactgggagctccagcctgtaagacccaagagctttagcaccttaagctcagtatggcgggaagggctggaaacagtatgcaagactgccatgggtcctgcctaccctcagatgtgtcctaacactgcagacagcactgaagtcaagagggactggggcacaggaggtcctcaagggtatgaatagtgttacttcattcagagtgttactttgtttctctcccaatgtttggagaccaccagcctgtctctgggctgcaagcctgaggtaaagcccagcatcccccagccaacagaaggtagaggtttgggctaccccactatagcttccaggtattcggtgtcagtcctgtcttaccaaagatgaatgaagcaaatgttacactgccttattctgggaaggaggagctactcggataagcagggcctgagagatggagctgcctccagaaactggggagacccagtcttgtcaatgcaattgtctctgttttacaagttggagtcactcttatgctgttcccagttttaaaactggagactttgccctctgagctctggagacccatgtgggcttaggccttggactggatggaagagctgatggcctctgccccctggcctgccctctgttccctcactggagcagagaaagtagacaacacaagtcagggcacctggttctgggcagctcagcagagtgcagggggttgtctcaggctgtctgcatctcaaatctgtcaggcctgagcccactccatgggaaagtccttgagctgccacaaccgtgtccaaagccaccagctgtgttcctcagcccgacctgtccacttgtcatcaacctcattcccttcttgttcctcccacaaaggaggatgccagtaggggctagggaaagagttatctccaagcagcttagagttggccatatttacctcagcctgggtgctggtcctttcttccagcccctttcttcccctccaaatgtgcctatttctagagctcctccctcctaactcccaaatttttgggagttatcattaaaggaaaggaaaaaaaaaaaaaagaagccagtgcccagggatgggcatctccagggagctggggattagtgccaggcagctctttgccagccatgcccacttccccatgggcacagaacaagccaaagccttcgttgtatgttgacgatgcacttttatgaatgtagtttctatcgctgtttttagccttttcacatcatgtaatgtgaggccttgtacttgttaatttatatctcagatccatatttgatggttttatatatatatatcaattctagactgttaccggtgatggactcctgaagagagaacagaaattgaaagcagctggttttgcagatatgtgtgttgcacggtgccaattgggcctgggcccctctgttttatttcctttcccttgggggtctgtcaggccactctctaactgctctgaagccagtgagcaaagtcctgcttccacctcagcctttgcccaaagtagggactggcccctcttctagaccaaagctgccaaaaggcagctgggcctctccatgaccccatcctgatggctatatagcaccctttagcctatccctatccacaccccgaacccaaaggagatagagattggtggggtgacaagatgttagatgagacaactctgcttgtcacaggttcaggctctcacggagctccccccatatccccatggggggggggggggagtgtattacctcataggcaatgtttctaaaatgaacttaaaagtaaaccaacaaattctgcactccaaagggggggtgggggggagacacctttttttgtgccaaaaactgtggacatgctggttcagcagcctcaggaccaagctgttaatttatttttttcttattaacaaatccaaatgacaagttgtgggcctccagggtggcctgggcccaaaggttatgaaggaaggtttcctagcagcccttggcctgctgtgcaaagatgctacaccaccttcatttgttcttcattccatggggtttatctgccttcaccaaccccacatggaagggccaagcctgggtcaggtgcacgctgccaccctccttcccctccctcccacttgcccagctctgtgtctgaattgtggaatgtgcagaagaacctgcagccatagttattgactatatcttgactgagggcttgcagtgcaaagccaggccagtgcattacttacaataaaagggatcatttatatcagaagggtcctgtgaccatgctttcggttaaaggtggtggtgggaatttttacagggatgggttgggtacaatgcctaacacccaagttgaggcctcttaaatagaacttgaaatggctgccaaaagcagcctgtgataacttggccaaggtggcccctctccttcccttttatcccagcgcgtcactgggacagcactggttgtccatctgagccgaatccatcaatagctgagttcctaggaccattcatggcattttgtagtcttcctggccgaggggtttcccttggtcccttacagaacatcagtcagaggcaaggtctcactatgtagctctgctgtcctggaactcactacatagaacaggctgatcttgaatgcacagagacccacctgcctctgcctcctgagtgctggtattaaaagcatgtgctgccacgtccagcccagccactgtttctttactgcagcaagagacc

SEQ ID NO: 20661 - DNA, 1174 bp, Mus musculus
ggactcaggcaccaagacggcctgagacccctttaacacccattccctcccagcacatggcctcccgctgggcagtggaaaggagattaacccgggggcgcggggtgggagaggatgaggctccctcacacaggtttcaggcataaggctctgctccaggattccttacttttcccatgggaggttggcgttgggaaccagaattggaattttcaccatactgtgtcctttagtccacctcatctcaccccacggctccctgggaggcccacaagcccagcttccctacttaggtgccttttctccagcaaggagtcagcatgccctcctcagggtcccaagctccctcactgccacctgggccttgtgtacccccttgtctccccatctacctctgccccttagcctggtaatgagccacagagactggaagagggagagtgccatctactgggcctcatagatgccacctcgctgaggggggagggctggggaagaggcaagacagcctgcagccttcagggtctgggggtcccttgcaccacaaagctaaagctcttgctagagcctcagctgacagggtcggcagtagctatgctcctccatctgttgtgctgttctgttgtgatcaaccctcttttaaaaacatttaaacagctcttgactctcttgtgtggcctgatggggatgctttgtggcaggcatgcagcagactcctcatagcgaggggaatggaggacagcccacaatactcctggccttaaaggggctggtggtctgtgccaccttggggtgttaagctgtcaaacctgaaatcccactgtgtatcctcgtcccagagtagccaggcacactggcttgcaaccacacaaatgttttgggtttttgagacagggtctcactgtagctctgattggcctagaacacagagatctgcctgcctctgcttccaaagtgctgggattaaaaaggcctgtgtcatccatgcctggcttcggttcttcagaggttaattcactacacttgagtacagaagagaacctttctgacttggccaagaccttagtgtctgcctttctgctagctgattccagctgtccaatttcctcctagtcctttaccctagaaatctgcaaagaatggtaggaatccatagcctatcaagtgctgccag

SEQ ID NO: 20662 - DNA, 1167 bp, Mus musculus
tctgttttccttttaggtttaagtttttgaagttgaagtaggtctacacagtaggaacccatgtcttttcttgtaagtaaaccagagcgcattagggtgagtgttcccagtcttctggttttctatttgttttttcttaaaagtgtttgggttggtattacagtgggttgttttgttttatgtgacacccagagttctctggtggaaaacaaaacgggaaaggtggcttatttgatgaatcaattggtcacatgttaaatgggttgggccgtgtctgtgtagttacatagttggtaaagatctctttgcacctgtttctcagggatttctgtttttaaagtcactgtcatactgtagttactggcacacatttctaaatataatcatggagagtctttaaaactaacctgaagaacgtattatatcttaatttttatcagggactagtgagctggtcccgcaagtccaggtgcttggtgctaagcctgactacctgagttcagttcccaggacccacacagtggaaggggagacctggctcccatgtcctctgatccccacatatgcatcatgcacacatgtgcacacacacacacacacaaagaccgtctactcacctgacgggagatgccatgcaggtggtttcccaggtgaaggcttagcacgcagatatgctgacccctgcaatttcccccaattcagaaaactcaactgtgtactttgtggtagtggaaacttggctcctactctctcctgtaaaaattttaagaaaaaatatttgattgaccttaaggacaaatactgggtttaatgccaatgacttcagtacttaaggaccgctagctggctcagcaggtacagaggcttgctatcaaccctggagtcctgagttctatccttggggacccctatagtgaaaggagagaatcccacacgttatcctctgacctccatgtgtgcatctctcccctccccccaacaaaataattaaaattttcttaaagtatgttgttatctttcatcaagtacttaattttaaaatgcaatcattatttaaagattttaatcatttattaaagatttattattttaattacttaatatttaaggattcttaaaattgtatttaaagattttttatttatgagaggtgaatttgccattctc

SEQ ID NO: 20663 - DNA, 2146 bp, Mus musculus
agggtgagtggaggtgcccggtgtggagttcagatgcatcagatcccttggagctggaattaaaggcagctgtgaaccacctgacagatgcttggaacagagcttgggtcttctgcagaagcatcctgaggtctaaccaccaaaccggttccccagcccctgggttttagtgtgtccttagagcttaatttggaccctcttcccctccctgttacacaggaagctgctttgaggagagaacaaaagaagttggagaagaagcaaatgaaaatgaaacaaatcaaagtgaaagccatgtagagctggttgcagaggttgtgtccttgctgccgttagctctccgtccaccggagacaggaaaagcaggagtctgcacctaacagtcacgagtctctgctgactgagagatctttatctcaccctctcctctcggtttagagttctacagaggttatagatacaatgaaagggctctttcagttatttccttccagataatcaaattattttgattattttataaaaggagcggtatataaagtatgtgtagttttaaaatatatttaaattataatgtgaatcatcagtgcgttactttggtgtttgaagaccgatcatgaaatttctaggtagattgttgctctttgtttaaactggacagttgaaataactatggagactgactctaaaccaagaccctaatatctattggaattgcacaataaacattgcttgttttttctgtgtccacattaaacttgtgaaaaaagtggaacgtagaacactatgtggtgataaattcagagacttagagcatagtacagcgtatggtttgtgtgtgggtggtgctatggcagtattataggagggaatctgtcggtattaggatactgtaagtcagtggaagattctagatgtaggtagtacaggagcagtttctcattgcctgatactatgagctaatgacactgtgagtgctggatttgaagtagttatgtgcttatttttcttgagcaagaatgcatgacaaggtgaagtgcttcacctagctccctccgctcagcagcagtcaggtggctgggctctgtgaggtcacagtggtttgcttgcttgctgcagcctggtaggtgttcatggaggagctgatctctgtcttaggcgtgcactttgcttccacgcctgcttttatatcgtccacaaggccggtttgtactttcttgaaacaaataaccaatcgatatacacaaatatgcttttaaaaagtgagctttttttaaatgaatcagaattttgtctgactcatgaggcggaagcgatggtagggagaggttcctctctgtgcataagcatttggcttgttgagatctctgcattttataaatgcttcctactgagaaagcatttcttaagtctttgcttgtaccaggtcatttttgctggggtgggaaagggtggtttttgctttgggagcgggtagtggggttttgttgatgctttctgtgttctgatgcagtaacagtgagttgcggtgaaaactgtgtgtgctgttgccttgggaattgtatggagtttttcacatggctttgtgtaggctaatagaaatatatgcactgggatattcaagtgtaatgttttttaacagttcacaagtttaagttattaaaaataacacaaaattaaatcactttaaggccagataattttagacttaacattgttttacaaatctttaaaatacatttagaatcaaaatttatgtgtttagttatcgtttaagtaatataagctttcttaaagtcccatacatcagaccgtggcagctaattttgtaacaagcattcatatgaactacctatgacatatattaaactgattgacaaaatctgtgtgctgctttgactttttgtagttgtcctacaagaatatgtatactgttctcttattaaaagcaggaaaatcgttttccttcaaaagcattaatcttgaatattcctttatggttaccactctaaagccctgtatgtattgtttcagaaagggtctcactatgtagcccaagctggccacagtcaaactcaggatgattttctctcctcagcctgctgagtgctgggacactgacataccactgcactgtggcccacag

SEQ ID NO: 20664 - DNA, 1244 bp, Mus musculus
agggtggggctggggctacggctgccgaaaggcgccaattaatgccgctcttccgattccggaacgcaacataactacgtcacacaccccggacgggaatctggtcctgggtgaggattgtgtctgggtcgtgtagtgagggagtctgcaatgaagagagccgcggcgatggggaaccgcccgaaaaactcaaggtaataaggtgttgattggaaacttcatttacataagaatgtccaccttcccttagctcttgtcccttgccaaaaaccaaagcaacacaaaaaacccacgactcgggcaacatttcccttcatgcctctgtccacatggccccatagactatggccacctttagcttccggagcatccgatcaaagtgacgtctacccgacggacggaaccctacgggagaaacgcagcctccgctagttagagcacttgtagcccaggggacgctgggggttacgtaattttcccagcagccctagctcgccttgcgcggatgtcctgaaggccgcgccccgcccccaccccgcgcgcaggcgcaaactagctgtacgcattctacgtaacggacggctgaagctacgtgaagagtagggtgccgtgactgagctacctgttctgggctgttcagtgacatcgcggcccgcagattatctttgcgacctgaagacagaaaccagacaaaggcaggctggttggaggtagtggcctcaggagccccgggcccggttgcagcctcgggtgcaggtaggtagcggggccatgacattccagtcggtgtgaccgtgccaggccgagcggtgactaagttgcatggccgcagagccaggtactgtttccctcctaaccaaccctttaagtccggccggtggtgacatgcatcaataccctcaacttatctttccagaattaaaagaaaaaaaaaaagactaaacctctgtccatccttttctgctccattttatgttgggctttaggaagatttgggggaaggtttcgagtagatcccaaccaacaggacaaaatctgagaaaatatctggtgtgtagccagaagaataaaagagcatcgaactaggcttctccgtggtggacctaggactagacactagaagtttcacggaagcaaccgcttctagagtcgaccttacccgaaggtttctaacatgcaagttatttgtaaccaacactttactttgtaaggtgacagtaatgtctacatcatttctagaaatt

SEQ ID NO: 20665 - DNA, 1175 bp, Mus musculus
acagatacacactcactaataaaaataaatcatttttacaaactctaaagttagacgtgaccaatgtaaaatagttattttacagtttatgtttattaatcactgtacttccacaaaggagtaacaagggacaccttaggtaagcaccgaagcacactgataaatttgttatgtcaagctatcaaaaagagggcatattggagttaggaatgtggcttgttgttacagtgcttccctggtgtgcttgaaaccctcaattcaatccctgttgccatgtaaactgtacaatggtggtaaatacttctaatcccagtccttaggaagtggtagtggaaggtacagaaattgagtcatctgtgtcctcaaaaggccaagataggacctttactacgaatggtccctctcatcagaaaagcatcagctaaagatgaacaaagaagctcctccttcctacctaagtgtgtaccctgtctgcttctcttcttgggtttaaccttgaattgtgttctttgcagaatgcctggtttcggaaatctcgcttcaaaggagggaaaggcaaaaagctgaacattggtggaggaggcttgggctatagagagcggcctgggctgggctctgagaattcggtgagtccatcctacagcagtactctagggatcggcctatgtcttaaattatggtgatttgctgtacctgagcctcatgagccccacgtcctgtccttcaggggatttgtatgtactgtgctgatacgagtcagtgtggtgttgtttcacaatgaaactgctatgggagaagcatgtgtgtgcttggctgactaggcttgctcaggaagtctagctttaatggatctcaaattgcaatattctactgacaggggacccagctgattatatatgtatataattttgccccaaatgattggtttggtatggtgtggggttttttgttattgttgttttggctcttttggttggttggttggtttggttttagagacaggctttttgccatcctagaacttgcttgtagaccaggctggctgtccttagagatctatccacctccacctctgctgccacctcctaggtgctgggattgaaggagtgtgccaccacggcccgccttgcagtagcctgtctttaaaagcctctctgtactggcttagaatctgt

SEQ ID NO: 20666 - DNA, 1841 bp, Mus musculus
cagcttcagggaataacagccgtgaagggattgggggtggcaatgggaagagagagagatatactgagaaccggggtggtagccgtcatagccatggagatggtggcaatcggcatggagatggtgggcgccatggagatggataccgttatccagaaagtggtagccgtcatactgatggccaccgacatggagagaccaggcatggaggaagtgccggcagacacggagagagccggggtgcaaatgatggcaggaatggagaaagcaggaaagaaggttttaatcgtgaaaacaagatggaccccaaggtggatagcagcaggatggacaaagtggacagcaagacagataagacacctgatggctttgctgttccagagccacccaaaagaaagaaaagccgatgggatagttagagggtatgtgaaaatcagcgtcgtcagtcgtctttaattttatttttagaaagattttggtaatgaggcgtctcagggctgggttggggtccaagatatacagaccccctgcccttggtggagaactggagagtggattgtaccttcatctggtgttcattcagaggtttccttgggaacctgagctggccctggaaagcagagagctgggaagcttttgtttgttgtgggtgagttttaaggagggtaagtagaatacttagggagaaagggccttttagggcacaaaaactcactctaggtttataatagcttatattttttactaaaatgtcaccttataaacatctataaattggactttttttcttagctgtggccaggcagtcccaacttctgccctgttagggatgcttggggagcagtggtgctttcagatgtttgcagggaagatgcctgagcgctcaggttccccagactgtttccagccctgagacacgtaggaaagacagccttccagacacaggctttgaaatcctaagccattaggactgaaggaatgatcatcttggaaggattccaggataatccaggcctggagtactgctaaatttaccatttaaaaccaaccccaacagtagcattcaaagtgtctatttgttttgttttgtttttttaaacttgccctaatagtagaaaaaagtcttctgctgaaatgattttgatttttgttctatcttgtttataaaagaaaaatatacaaactttgaattttgtgatttttgtgaaggtttctttaagatgtgcattccctctctgcttgctcgatagtaaatgtcttactactgggacctgagggctgtcgtttctaccatacaagttagttgctacatattaaattatggcttggaacagtacagcccatgatgtgaaatgtggggaagtgcttgcttattaaactatcagaaaagttatctcttttatctttttattcaaatactggaaaagggtgggagaggactccgaaggaaccacaggctacaacaaaggccagcaatactgagtccccctgaaggcttcataaaagatttgatccatcacaagccaagatgtgggttgtcagtgtaacacgatgaagaaatgtttcctcagtgctttcatggtactcctctgtagcagctctcccaatcccacaaagcctccagagagaactgtacacctccctctctgtccttcagtctttccagacaattctgctcacttgcgcttgtgttttttcttctgttccttccgttgttgtgctctctgatccttcttcatccgagagtccactaccttgaaatgacctttgactccagctggcctccggaccttacggcctacaccctttttggctacaacataagtgacctggcgtttctc

SEQ ID NO: 20667 - DNA, 1195 bp, Mus musculus
cgctctgccttcaaactgatccagctcaatcgccgctttcagttcctgcagaaagcccgggccttgttggacctgtgtgctgcgcctggcggatggtaacgtttggcaggggctgctatgatgacacgttcctggcactggttggctttgagttgcttttcggggaggatgggaatccgattacacaattcagattaaatattccatagtatgtgtctctctcaaattttggaagggagcgtcattttccccctcttgtggtactgaacctaaggacttaactcatgctaaggacttaactcatgctaggcagcccctccaccaccgagttatatctccaattgctttattttgagacagggacgctgaaaaattgccaaggatggccttgaacttttggtcttaatctcttgccctccttagtggctggtaatgcagccctgtgttgccatgcccagcaggttgcttcttgaatgtatgcatagacatttggccactacacttaacaggtgcctcttaaggggatgagaagtcaccttgccaagggaggatgaaaggtatttaaatctgtctctttcacaggctgcaggtggctgccaagtttatgcctgtatccagtcttattgtaggtgggtgactcttgggtatttgagggggaggggtgggttaggtactaattttgtcctacatcttcctccaccctgtaatactgagttaacatcttttaggagtggacctcgttccaatcaagcctctccccaatgtggtgactctccaggaggatatcacaacagaacgctgtaggcaggtaataagacctctccttcttttctttcctctttatgtgctggtgtcattgcctacttatttatttatttagtgtgtgtggtctttcgagacagggtttctctgtgtagccctggctgtcctggaactcactctgtagaccaggctggccttgaactcagaaatctgcctgcctctgcctcccaagtgctgggattaaaggggtgtgccactagtgcctggctgtcattgcctctgaagagtgaatgaaacacttcccaatttaccatggtttcaagcacgtggccaaaaagactgacaatccttgtgtacatttccatctttatttacaatcaagtgtttttgtttttccctgagatagagtcttgctgtgtactttaggatagct

SEQ ID NO: 20668 - DNA, 1213 bp, Mus musculus
tggttcccaaagccttattactgaccttttagcgctggctttaattgggtttgcaatgagcggcctcagccccctgcaggcaggcaggcctgagtaggaggctggaggctgtgctttaactttgtaccagacatttccaaaccaaaggctgctgggtttgcatgtttacaggctccaccctagggccagtgccagagctggctttggggagctgggcaaggaagagaaggccctagactcttcctggcctttctaaccaaagttttttgccattcctacaagcccagtcttgctgctggtttgtccttctttttgggtatttgcactatttggggagcaggtttttctatgtgggagccacttttttgtacagaggtaatggggtttttcagggagcccacttggtgcctccttcttcctttcttttcttaatctatgcaagcggctgcagccgccatcatctcctggtatgccacaaggctgcccacccatagctgcttgggcagggggaggtggaatctcctgagagtggcaatgccagttctctaacccagttacagcaggggtgtgtgtgcgtgcgtgcgtgcgtgctgcaggggaaggggaaagctggaggactgctgttaccttttgcagtcggtcttaaagaggatgggcctaaggcttggcaaacttggaaaattccaaataaatctttttgtttattggtggtgcccagacctggtcattgaacagtgcaaccgcgtattaacaaactggagttgtagtgtttatcatcacacagacctttattggttggggggggggagcacacaaaggacacagcctcacttccatagcttcttgatggacatgtttttctcactatccttttgcatgacctggagagggagagagaagagagtgcatatacacgggtgagcagggatttaggaactgtgaacacaagcgtgacccctgctccagagccaccacagcaaaggcagacaagtggaggcacatataccttagctactgccatctcaaagtcctcctgagtgacgtggacacgccgttcccgcagggcgtacatgccagcttctgtgcacacaccctaggtggacagagaagctcagaccctgctgctggagccccttagccctgagttggctcttaaggcttcctgctattgccctgctcccctgaagcctccagttaccttcacttcagcccc

SEQ ID NO: 20669 - DNA, 1330 bp, Mus musculus
cagatgtgagcgttctttcagaagtcctagcctagggaaagggtttaatctatccagttaacagcttagacttggtggggtggttgtttctatgcctcacacatattatactagtctagagtgaacatctgtagttactacagttttcttatagatggcagtcagatgtgtctgattcacttcctcattggttggcagtggggctcatgaagtacccttttcctgtcactttgctcaaattttgaatgctacttcagggcccaagactggaccttgagcttcatgattgataaattcagcagcacacccatcttttgtttgtttgtttgtttttcgagacagggtttttctgtatagccctggctgtcctggaactcactctgtagaccaggctggcctcgaactcagaaatctgcctgcctctgcctcccaagtgctgggatcaaaggtgtgcgccaccacgcccggctgcagcacacccatcttatgtagtgcttttccactcccagcctagcaaacagaagaggaagttctcatcattctttaagagccttgtgattgagttggacaaggaactctatgggccggacaaccatctggtggaggtaagaatggttctggagcctgggagggacaagctgccaggggatacagagcagaccatcagtgtgctggtagagtgctgtaacctatctgctagtgatgaactctgctgttctcttgcccgacagtggcatcggatgcccaccacacaggaaacagatggctttcaggtgaaacggccaggagatctcaatgtcaagtgcacccttctgctcatgctggatcatcaggtgacagttgtctaggctcacaaatgaggccacaggtttcaggcagggaaggggtgcagggtccttttaactcagcagttcttaacctgtgggtcatgaccctttgggggaggatgtcaagtgaccattttacaggggtcatctaagaccattgggacacagatatttacaattcataacagtagcaaaattagagttatgtagtaagaaaatgattttatggtatggttgggaaggttaagaaccaccgttctaaccccttcagatgctgtttccgcacaagaatctttgttgactccttctgtccattcccagcctcctcagtataaactggacccccgcctggcgaggttgctgggagtgcacacacagaccagggcggcaatcatgcaggcactgtggctttacatcaaacacaaccagctgcaggacggccatgagcgcgagtacatcaactgcaatcgttacttccgccaggtcagctggaattacccgct

SEQ ID NO: 20670 - DNA, 1211 bp, Mus musculus
ttcattatacttatttgaaaactttgtgtagagctaggtgggacatgagatgctcgggacatagaggaagaatacaggaaagacttctgtctttgaagcctcctgagagtcagcagcacacagtgtcagggcagaaagaaaactccagtggttaggaagggtgtgtatttggggtttgccctgcttgtgccttaaaactgtcccatctcgaaatcagtcaggtctcgtcagctcaccttctgcccatcctctgggtgtgtcatgaaaatgctgtgagtctggatgctcagccggagatgctggctttgggtcagggtagctctgtagcgttacacatccccagaggctgccagattgtctacaagtacagcatcttcagctttagcatggaattgagctgtgtctgtgatgttgtctttgtttaacccttgtcttgtattgaaatttcagtttaggaagtgtgccgtttcattaggtaccaaagcacttgcacttttgggaacataggtgtcacttggtaaatcactaggccatctcgagactgaaggtgaacctctgattgcagaggtgtcccctgctcctgatacagcagtagccgcaggctcttcccatgatgcaatacagaaaggatggaggtctgagatcactggatatggctgagtggtttccaccaaactgaggataggcacgaaactctcctcagtccacctgactttgtggaagttttatgtgcatgcggttcagttagctgtagcagctccttttcccaaagtaaaaggctaatctgttggttgctgctgtgactgctgcagagccatctctggctgcaagctgtcttgtgctggcccttgcttgtcatctgcagggctttggtcccactctccagctgtgccaggattcttttgtctgcttctgggtctgctccgttttcaccactgccttcatcatcatggtccagaggtgtaggaagagccaggagtgcaagcagtagctaccctggagagagccattgaaattcaccctgctctgtggctgattttccagcagtgtccttgctcatccctcttgtctggaagccatggtgttggccatctggggcctgacatcagcttcacctgaaggttatcagacctctacctgaggtctgaattcttttaagccaaagtgcctgctcccctcctctccccttccccccccccatcttggttttc

SEQ ID NO: 20671 - DNA, 1511 bp, Mus musculus
tgcctgctggcccattccactgaggtgtcattccctgcatctggtgactagtatctggtttgtctgatgcaaagctttgactggcaaaggagacttgaactataatggtagagccagagttacagctgactcgcaccatggctttttttttttttttttaagtctaccaggttttatgacagcaaatgagcacattcagagcaaagctgtacaactagaaggcttccctttgccttttgactcctccaaagcttttcctcaggcagctggtgcacaatggaacatttttccactctacactttgtacgcatgactgcggccctccatccttggagaatgtcactgtggtaacctgtgtggagtgtggttttgtgagccatttcattggtggtaaaataggcatagcaacttttttcatattaaattgtgcattttggaagcaagtagccatagaacatacacacccacactttcactggggtgggcttcatgtgaacatcaggcaaagccgtgagatcaaaccatcccaaagacgtacaatcgccttgcttttcaaccaatcctgactcttctgagacatgagcgagtgtgacaatgtcaaaacactgtgcacaacgaccgattgtccctccctggtactgatgggacggggccagaaagtgggagccaaagtgttcttttctggtttttctgtgtgctgtaggatgatcgaacgggttcgggaggtttgtgggcagtccccttctctggtggccaaatggactttcctttctcctcagtggcaagcactacatccacacatgcacttgtgacctttctttaatgttgccaacttacgtttgtgcatttgtgtcagaatgtttagtttacaaactcgggggctctaattgtataatttgctttgaggagatctactaggttttcttgtttgtttaaagctgcatccaatgtcaaaattaccttgagtaacttctgataatttactgtctgtggacaaagctaagttttttttcttaaacagcaccttgcttgaagatgactttaaagaaattaatatattgaaaacttatttgagtctttattttaatcatcccattaaaacatgacaaattatttgaccattccagtcagtgtactgctttaatttctcccatttgcctgtcaagagcccacatgccttgttcattggtctttctctgcagtaactaaaggcaagactagatagacacacaattggagactgaacttattaagcttaaaataatttgggaacttaaaatcacttgcattgtctcacaaaataaatattcatgtcaaacaccagacaagcatgttattttttagagaaacccacaggaccgtgaatgcagagaccctcacaaggctagttttagccacctttgctagcctccagcactgtagaggtgggaactaaagaaatccattattacttcttatggaaccagagggataaccttgttttctagaaaaactggtcagtctatggaacc

SEQ ID NO: 20672 - DNA, 1726 bp, Mus musculus
atctggtgggaattaaaccactaaaccttccaaagtgtgacgctatggccatctgccatggaaaagcataatcgccatccaagtctggccttggagctacatgtgacccagtcacctgtggagaggccactctctgacttgttctcttcttgctgtttttttcagagcctgagcctttgcaaagccggcaatgacaagtctgaatggtcgccatgctgagaaaaccattgacatgccaaaaccatcagcccccaaagtgcacgtgcaaaggtctgtgtcccgagacaccatcgccattcatttctcggcttccggggaggaggaggaggaagaggaggaggagttcaggggctacctggaggaggggctagatgaccaaagcattgtaacggggcttgaagccaaggaggacctgtatcttgaatcccagggtggccatgaccctgcaggccccgtctcgacggcccctgcagatgggctgtctgtgtctgagtcccctgccattttgcctgtctctgagaacactgtaaagctgctggagtcccctgctccagcactgcaggtattaagtccagtgccattggctctgtctccaggatcatcttcatctggacccttagctagttctcccagtgtgtcgtccctttctgagcagaaaaccagttcttcgtctccactgtcttctccttccaagtcccctgtcctgtcctccagtgcctcgtcctcggccctctcaagcgcaaagcccttcatgagcctggtgaagtccctgtcaactgaggtggagccaaaagagtccccccaccccccgaggcacagacacttgatgaagactctggtcaagtctctgtccacagacacttcccggcaggagtcggacaccgtgtcctacaagccccccgactccaaactcaacctgcacctcttcaaacagttcacacagccacggaacacgggtggagactccaagactgcgccttcttcccccctgacttcgccctctgacactcgttccttttttaaagtgcccgaaatggaggcaaaaatcgaagacactaagcgacgcctttctgaagttatctatgagcccttccagctcctcagcaagatcatcggggaggagagcggcagccataggcccaaagccttatctgcaagtgcttcagagctctccagcctgtccggcttgaacgggcacttggaaagcaataactacagcatcaaggaggaggagggggactcggagggggaaggctacggcagcgactccaacacctccaggagcgaccacctgaagcccactgaagacgcctcgaaggaagtggagcccaagggttcccaggcgagtagtctgaaggacttaggtctgaagacaagttctctggttcttgagaagtgttctctgtctgctttagtgagcaaggaggatgaagagttctgtgaactgtacacggaggactttgagctggagactgagggcgaggggagacttgataagaccctcgatctccccctcaagccagaggtgcttgccagcgatggcgtggctctggagagcgaggatgaagaggactcggccaccgagcaccaggagttacctgtaaagacgctcggcttctttataatgtgtgtctacgcgtacctcatcctcccactcccctactacatgagtgggctcttcctgggcgtcggcctcggcttcatgactgcagtctgcatgatttgg

SEQ ID NO: 20673 - DNA, 1296 bp, Mus musculus
gaggtccccaatatccaggatagcctagaactggactttgaagttgtgatcctcctgcctctacctcctgagtcccgggattacagacatgaatcatgtgtggtggtagtggtgatgcagcttagacctcaagcattacacccaagcacccacattctcagcccctttggcgttctcgtgtgctgtactggttcaatttatgcctctctcctccggggtgatctctagtcctcagggtgtaaccctaactcttgtcttctgtcttacagagaacggaaggctcccttaatggaacttaagacagtcaaggcagtgcacgtccctgggaggtcgtccatgtcccgagaagagcagccgattcctggattgcgagagtcctgtgcacgtatttatgagcctgtccccaccgaaagcagtaatccttcaggccaagccatccaattttaaaccccgctgccttgttcatgttgggtatacagagactcagaggcgctagttaatggccagcctgacctgtcttccttgtgtttcggggggtgaaaggaggttccaggagaataatgccctggaatattctgaggctgaaatgttgtgtctcggatagacagagtacttctccgtgggtcctcctgcacagaagcccccttctgctctgttgtcaatcactgggttagttttttgttttgttttgtttctgttgttctcttctttctgggttgatcttaatctttggaaatacacagtgctgctcaggtttgcctggttcccctgtgtgaccttcccccccacacacacacaaagtcaaccagctgactgggagcaatgctcgtggaatggccagtcacttgaagacagacctcaagccagcaatggcaactggagcgagcacttaaagcgcaccttgatcttcctttccgttccatgccgaaggcccaaagaagagaaatggctggctacaacaactgttattatttttttaatagtaaaaggaaatatgtacttttctcactaatttttctttatttattccccactaaagaaacggtttcctaaggtctgagctgtttcccagggtgggctagagtgggtgggcaggagctgccgacattttgtgtactatacctaaccctcctcgccttctccgtttgcctcagccacccggctccagggcccctgaggggagttgtattaaataaaattgatttttactcttcagttatctgcattcaagtgtcatctactggaacagggcacatggcaataaagtaaacgtaggcctagggactctcagtgtgt

SEQ ID NO: 20674 - DNA, 1198 bp, Mus musculus
gccagcaaagggtcaatacttgtggaagccatgcatagcagtgtacacttgtggtcccaacacctgggaggtagagatgggaggaacagaagttcaaggccatctctggctacatagttagttcaaggtcaacctaggctacttgagaccctccctgtctcaataaatgagtggacagatgagtgaatcctcataggaaatgcaggaagagccagcagagagatctcaaggtcagagggagtcctgtcctcactcttttgtttgtttgtttgtttgtttgtttgttttttgagactgggtttttctgtgtagccctagctgtcctggcttcttttaaggccatgctgtcaagtatatgagaagcagaggaagactttttgcaggttcctaagggttaattctgctgaaagtaactgggctacaaatgtctgcggctgaggactgaggtggtacccagacacgtttcacctcccttcccacttgatgttcttcagagctgtttcccaagccgaagttagagttctcctccagtcgtctggaccaaggggagttgttggacctgtcctgctccgtctcgggcacacctgtagccaacttcaccatccagaaggaagagacggtcttgtcgcagtatcagaatttcagcaagatcgccgaggagagtgacagcggggagtacagctgtactgcaggcatcggcaaagtggtcaagagaagcggcctggtaccgatccaggtgtgcggtgagtacactctcagctgctcagatatgcaaaggttgggtagggactaggagcatgatggtcagttagctgtcaccaatgcagtcgcaaaggctgatcggattcaggcaggtcgagaagaactcctgggagggccaggaaaatggcttattgggtaatggtgcttgctgcctagcccggcaacccgagttcagcccctgtgatccacgtggaggaggcagagaaacaagtcctacaagctctcctttgacctctgtatttcatctgtatttgtgtgtgcacgtagaacgcacagacttctgtgtatatctaagacctggttacgaggcatgtggtacatacctataatcctgacatccaggacgttgagctagggattgttgtgaattcaagaccagcctgggatacatagcaagggcctgtctcgatcctccttgactcccaacataaaaaaa

SEQ ID NO: 20675 - DNA, 2600 bp, Mus musculus
gggaagctaatcaagcaattaatcccaagttgcttcagttggtcgaagacagaggttcaggtaaggatcttcgtaagagatgtttctggtaggtggcagttacctcttgtctacaaagtgggatcggaagaatgagtacttcttattttgaaacctaaagaatctaaaagcacttaagacccaacataaatagagctatctaactctctcctatcttaccacacttatgccacagataaaaattgatcaatttccacttactttcttgacaggtcgttccaggggtagaggaggcatgaaggacgatcgtcgtgacagatactctgcaggcaaaaggggtggatttaatacctttagagacagggaaaactatgacagaggctactctaatctgcttaagagagattttggggctaaaactcagaatggtgtttacagtgctgcaaattacaccaatgggagctttggaagtaattttgtatctgctggcatacagaccagttttaggactggtaatccaacagggacttaccagaacggttatgatagcactcagcaatatggaagtaatgttgcaaatatgcacaatggtatgaaccaacaggcatatgcatatcctgctaccgcagctgctgcgcctatgattggctatcccatgccaacagggtattctcaataagactttagaagtatatgtaaatgtctgtttttcataattgctctttatattgtgtgttatcagacaagatagttatttaagaaacatgggaaatgcagaaatgactgcagtgcagcagtaattatggtgcacttttttcgctatttaagttggatatttctctacattcctgaaacaatttttaggttttttttgtactagaaaatgcaggcagtgttttcacaaaagtaactgtacagtgatttcaaatacaataaatgaaggcaatgcatggccttccaataaaagatatttgaagactgaattaagtgaaattgtactttattttacatatataatgtcatgtacaacttggcttagatagtgtttttgggggggatttttgttttggtgtttatttttacacaaggaaagttgactacttcccattcctggatttaggagaggaactcagaaggcccttaggatgatctgtttgtatgggaagaagttagagacaatggattttataattccagatttattggataaaagctttgtcatttttcagtatcagggaagtaagtcatttaatagcctattttccttaagagtgaactacaggacagtaactatataaatacatgttgatttcttttgcaaaacagttttaagtaatgacatttttgctttatcaaaattttattccatctcttggttttgttgtcaactgccgaaatgtgcgaagctgaaagactgttagcccaagagctgtgtgcactgtgtctttagtgcaggattaccttgtaggttcctagtcctcgaggacttgccagagtgcttatagccacacctggaagtcaggaatgtctccacattatttcaggggattttaggggtcttgtaggctagtcacaaggaagacgacataaccaaaagcacagtaaagttttcgggttaggttcactatgggcttaacagctagaaggattggggggaaagctttagatttaagtaggatcaccagcaaacagctttgtttcagaatggctataagtaggtctaaatgtcttcccaaaaaattggtgtgttttttgcccaggacaaaagtcttaaaggaagttatttaactttttgtttttaaaatgggcttattgttaatgccttatttataaaatgttaaaacaaaatagaatgtgctgggggtgggagctgggcgtgttttccagggctgataacattgaaaactggttcatcctctagtactgagtggttttcaatggcatggctagtcagattcatgatttttaagtataggtgtagattggagcatttattacatattttactgttcaatgtcttaatgtggaccttttattttgtaaataattatggaaatgattgtggggcttggaaaaaattacctttgaagttttaaaagacagtccactttttagcatgtgtgttgtgtccagcctgtggttgtcttaactaataaatgtgatttttctccccattctcttcatttatttattcgcgtagaggcctcttacctgggtttttgcacccccgccttccccattccagctatcctggaatttgatacataggccaagctggccttgaagtcagagattgtcccttatgcatatgttaacataggagtgagctaccacaacagtcctgcaccttataatcaaactccagtatcaaaaacacccctttgtcctagtcaggtattaactgatttctacgagaagggaagtacagaggttaagagcactgctcttccagcaaccatacggtgcctcacaaccacctgtagtgatggcctcttctggtgtgtctgaagacagcaactcacaaatctttaaaaaaaaaaaaaaaaattctttttaaggaggtggttaataaattcccgaagccctttttaagacctggt

SEQ ID NO: 20676 - DNA, 1144 bp, Mus musculus
atttcaaataagattagtttgtagcttgataacatcatttgcttgcattaatgattattcatggttgtctttatagaattcaaacatggaaaagctcctattctgattgctaccgatgtggcctccagagggctaggttagtacaaactcgaattcatggcttggtttcccagaagatctccatgtagttttttttaaagaaagtttattgctttctttaacctgcattttttctaagtttttttcacataaaggtgcagtctttgtggcaaggcctaggcatgacaatcggaggactcgagggggatggaggactagtgatcggctggctgcttccagtcgattagagaggtgaaaagctgaaagtgtgccagtaatcttcaaagggcagaacataccacctctgccccataaactgttctctccgggggaaaaaaatggaagttacctcacagttcactgccgtggtatttcatctgtcccatgctttgcatgattgccatggtacagcattgtttcaaactgttcactgtgatctgtgggtctttgagtttcagtgagtttgctgaaatgtcgaagaaatatttccaaacttcaatgttcaatgaaatttttgttcaagtttgaaatggagagagcagctttaaaagccttttacaaattggtgagtactggcacatgagacctagagcaggaccaacttctcacacatagtcagtgggaaaagaaagtgccttgaaagttcctccctcacctacacagtagtcgtcatgtcgagacctgccagagagagacacattctcaagtgaatcctggcttcttggaagcgcttgcctagacgagacacagtgcattaaaacaacttttgggggacaggtatgtttttcttgcagctgcagttgtaaggtcttggcaagacaagcagtgtggccagagttttgaacttctgatgagtgtaatgcaaaggacctttacatttttgttaaaaggtcctcaaaaatgagcacatgaagagattgctgagaaacttttaattggccctactgcgcagaagcattcagatgtcacttgatgatctgtaaggggactgtcaatttgggaatgtgctaaggagaacacacattcccttgataggctgtcagtg

SEQ ID NO: 20677 - DNA, 1119 bp, Mus musculus
gcagaactttactgaacccactgctattcaagctcagggctggccagttgctctcagtggattggatatggttggagtagctcagactggatctgggaaaacattatctgtaagtctaggaaaacttgataaattgtggcagaggtgaccttagatatataactattttaatccaatttctattatttttactcttcaatagtatttgctgcctgccattgtacacataaaccaccagccattcctagagagaggtgatgggcctattgtaagtattatcttaagtttcccaccatatttgctaaaactcctttgactttcatatagggaatatagggttgccagtataaactagccacttaaaattagtatccagcccaggcgtggtggcacacacctttaatcacagcactggggaggcagaggcaggtggatttctgagttccaggacagccagagctacacaaagaaaccctatctcggggggaaaaaattagtatccaaagacagttagttggatcagccaattatagatacttgtcatgagcctgatcaagatcaactaccacaaggagagaccaacttgcaaaagttgccttctggtttctccatgtgcttccacacacaaaaattttatcctgagaatagtgcctgggaggtagaaactggagaattcaggagacactgtctcaaaaaaaagtcttatgaccacctgaattctaattcccaacacacgaagacatagggtcttagtaaactgttttatactaaacacttttttttgtttttcaaacttagtgcttggtgctggcaccaactcgagaactggcacagcaggtgcagcaagtggctgctgaatattgtcgagcttgtcgcttgaagtctacttgcatctatggtggtgctcccaaaggaccacagattcgtgatttggaaagaggtgtgtgaccataaagggggatctttgtcactgatggagatgatggttttgtgtattatagttaaagcatctactcctttttatttatttaattaaaggtgtggaaatctgtattgcaacacctggaagactgattgactttttagagtgtgggaaaaccaatctgagaagaacaactt

SEQ ID NO: 20678 - DNA, 1790 bp, Mus musculus
agatgacttaaaaaaaaaaaaaagacctcatgttcttgaatcaagaagatcaggtattttggatttactttcatcttaaattgaaatactgcatttttatagcttctcagtatgtgatggggtggattttcattctttgctgggtcagcttgtcttttatatgctatttctataaaccaaagtctctaataagtacatctaacttatattttaattaagtttctaaaaggaaaatttttgctctaaaaatcgtttaacaagtttgagagccctgcttttacctcattggttgagctggaggtggtagtgggcatggtgggccaagaatgtcatacatgcatgacgtcagctgggctgaccatgcccgtgatcctggctcctgggaagctaaggcagaagggccagttcaagtttgaggccagcctgagcgacacagcagaccttgcctcacataagagtgactctaaggcagtcgtataatttactctagaactaaagagttcatgaagtgagggactggaggccaggctgccacactgctgacttcaagtgtggaggttacgctttcaaggtgtgtggcccatcctgtgatctagaaggtaacaaaaattctggggtgaggggttgcaaccatttaaaaaaaaatcacattggattttaaaattcaaccatcagaacaatgcactattatttttaaacatggatgtgaaagaagaatagcagattttgctgagcttggcacagggccatgaggagcacttgacaggaagtgtaactcagcctggtggccgacacccgtgatcctgtcactggggaggcagaggcagaagcgtcagcatgccaaggccagtctcacctacacagtggattgaggcttccttgagaccctgtctcagaggacagggatgcagtgctaaggagacgctgctttcagtggttttccatgcagtgtaacacaggcaaatcccactgctttctgagtgccttttaactttattacagtgacttgacagagctttagaggaaactgccctatgtaacggtcttcaatagcacagacatcaaaaacatggtttagatttcgatttcaaaattacattacctgattacttccaaataggtgctaagcaaacaaaaatccccagtgtcacagaacctggacttgccttgtgtttaatgtgaatatttatctgtccccacgtcgcctgcctccaggcgctctgttccatcaggaaagcttcattctgaccaatggttccctgtgctcacatgcagtaagaggccactattttctggcacaaagttttaaagcagtgctgtgtatcctgtacatttgttttgcagtttgttgctctgtattttacagtgctctccccaccccactcacatttacaggccagagcacaaatttctcttctcctaaatccactataatttgctttcctagacaacactaaatctgccctgagcttgcagtgcatcggacagatggcactggtgggtgttagccgcttccagtgcctgcagggtcagcagcacagcctcgcccttcagctgcagcttacggtcggggccacgtgtggtggttaatgttctcacactaggatgatgattgtaccaaatgctgagttgctgattctagatgtaattagttcactttatgtaatattctccttttctctaaactgactttaaaagcaaagttttatcatttccattgtatttattacagaatgttttagccttgatattctttgtaatttcactcatttgttacatgagctttatca

SEQ ID NO: 20679 - DNA, 1099 bp, Mus musculus
attttaagacgaggtctcactgaatgcccaggcaggacttgaacttttttgatcctcctgcttcagccctcctagtgcctgggattgcaagtctgttacagtcaggccccacttgaagagcagatccctgcagctgctggccagcggtggaaggcactgcttttgtagtgcatggaactgtctggacacttaggatccacttgtccctttagtttttaacttgtttttagatattaaactaaactgttacttttttttagtgtcctttttctttcaggccagagattgaacccagggtcttgtgcctgtgagcgggactccccagctcgcctgtatctctgccctattagactaacattttgatgacagacactttaaagtataaagttgccaaagtagatctttctggcagttccacgtctgagtctctgcagtcacatgacgcccgaccaatgtttgcaggctttatgtcaactggagatttctccgaggcatcgaagctcagttcctggcgctgcagaagggctttaatgaagtcattccccagcacctgctgaagacatttgatgagaaggagctggaggtcagtgtgttaggaacaagtctggggctctctgctgtctgtggaggaaagggtgcttcctaatgcttcagagttttgtgattccgtccctgagaattcttacaggaagtattttgggctttggcgtttctgtgggtaagcaatcccttatttatggctttatgagtatgtgcgcacatgtccgtgtgtgtgcagggctgtgcacattggtacaggtgccctcagtgacctgagaggtggagctgtagttacaggtgatcgttagctgcctgtcatgtgtactaggaatcaaacttgactctaaaagtgcagcaagctgagccttctctccagccccatatggagacattcttaatttatatatcctttgccgcctttctaactagtctgggactatgtagatggcgatgacctaaaggtcatttctggctttctgctcccccgccccaactgagtgctgaaattaagcccagggatccgcactccaccagctaagctacctctcaagtcccttcc

SEQ ID NO: 20680 - DNA, 1223 bp, Mus musculus
cagtcctggctctcaggaggctgaggcaaatggattgctatgaatcacagccagcctgatgtacagagtgaggtcttttccccaaaaacaaaaccaacaaaacttctaagttattccattataaagttgggaactgtttgctatcaaattgtagggtgagttgtgtactcaggagctgatgtttaagcataaactgtgttttgagtgacaaagagccatacctagaaagaggtgctgtttccaaggactaaaggtcacatgacttgggcaaattaaatgtgtagaggaacacttacctgtcagaaaccctgtgagagggaaaatgatggaaatcaggtctaactccttctgcttagtgaccaagtagcacatatacaagtatgtatggatatttaaaaaacttaattgaaattgtgtctcctttattcatctcattttcttgcctgatttactatattctcaccatagtgtacatgttgtctagagactctggttttgatgtctaaattggtaacatttttcccttgtcactttccaatagaccggcgtcagaatattctagtcctggcagacccctcagctgctttgtggatgagaatactccaattactggaacaaatggtgcaacgtgtggacattcttcagaccccagactagcagagagaagagtcaggtcccagcgacatagaaattacatgagcaggacacacttacacactcctccagacctaccggaaggctatggtacggtaacagcaaagggaacactcaccttgctttaagaacatcagagacctaactgtttgggtttgtttatttgagacagggtttctctgtgtcaccttggctctcctggagctctctctgtagaccaggttgacctccaactcagagatctacctgttgctgccttctgagtgctgggattaaaggtgtgagcctccactaccactcagccagagaactaacttttaaaaaaattgttattgttgtctgttttgagatggggtctcatacagcccagacttacagtgtaggcagacagcccttgaactcctgagttcctttctctgcccactcatcacatactggggttataagtgtataccaccacactgtgctttaaaatgataacgtctgaaagttaattaggcctgaggatgctaacaccatcaaggcctgtgttcatctgtggaatggtcataggagagacatactacact

SEQ ID NO: 20681 - DNA, 1184 bp, Mus musculus
gttctgaaagagtacatccttggagctgggttgactttcaaagatcagtcaaggtatgttcttcatctgtccaaatcagttaatttcctcatttggaactttgtgtagtacctctttccacttttgttacatctgtatgtctctcactttgagtcctgatatagcccatttctttctttctttctttttttaaatatacttatttattttatgtatgtgagtacaccagacacaccagaagagggcattggatcccattacagatggctgtgaaccaccatgtggttgctgggaattgaactcaggacctctggaagtacagtcagtgctcttaaccactgagccatctttccagcccacacatttctgttaatgccttcttgcatttgttttctaaaaagcaaatttctgccttgttttcatttatgtgcaaattcaggctttgttcagtactctgctaaagctgctgttgccaagggtactctaatagactttcttgtttgcctgtctctctaaaaaaaaaaaaaaatttatttgtgtgtgtgtgtgtgtatgtgtgtgtgtgtgtatactgtgatactgtgcatggtgtgcttgtggaggtcagtggacaatttttttggatttttttttttttttttttaactgtgtgcatttctcacacagaaatggagacaagcacctttacccactgagtcatctcattggccctggtttacctgtctttaccgtgctactttgtttgacttacagacgctttccagagacacccaagtgctatttgagtgctgttaaaaagtaaaaaaatgcacttgcccagttcatctaatggtaggtaaactctgggtagtgcttacaattttctaataccccacccatgttcagagttgagtaagaacagtttaaaacctcttatgttcactttatttcaacactgcataagttgtcatttatatccttctctcttgccatagccattccttaaatacagatttgtaggtttgacagtagtaacagtgctcttgctgtttgcacccagcctgttggaccagtttgggtggggcagcaggaactgatttgcattttggtaggtaagcactctttatacttatagaactgctggctcccttcttctgtggcatttagtttgaataggatcacatattgataaaaattcccaggta

SEQ ID NO: 20682 - DNA, 1191 bp, Mus musculus
aacaacatcccatgttgcctaggctgactttaagtgcacagtctccttttgtctcagccttgtccgtgttgagattgtacgtgtattaaccactgtgatggccagatttttatccaccttttcagtgcactttgaaaaatcaacttcaacttttgatttttttcttttcccttaggaaattgctttctagagagaaacagcctcctatagacaacatcatccgggctggtttgatcccaaaatttgtgtccttcttgggcaaaactgattgtagtcctattcagtttgagtctgcttgggcactcaccaacattgcttctggaacatctgaacagaccaaagctgtggtggatggaggtgctatcccagcgtttatttctctcttggcatctcctcatgctcacatcagcgagcaagctgtttgggctcttggaaacattgcaggtacttgcacttataattctttggactgaatgtgtccaatgtgattaaagaaggtcctagtggcttttgtgtcaagctttgtgcttgctttaggcccttattaggaatggaagaggcatttaagaatgctactgaagttaggacaggtctgacagacagtgcattcagtagctaactaaacatggatgtttgggacagtaggttcattaatcttgcttttttattttttgagacagggtctctcttacgtagcgctggctatagaccaggataacgtggatttcacagaaatagattttggggttaaggtgttcactgccgtgctcagccaatctcgctttctgtcccaggtgatggttcagctttccgagacttagttatcaaacacggtgcgattgacccactgttggcacttcttgcagttcccgatctgtctaccttggcagtaagttgataatatttgactcttattttccccatctattcaaagacaagccttctcaataatttttctctccccctcagtgtggttacttacgtaatcttacctggacactttcaaacctttgtcgaaacaagaaccctgcacctcccttagacgccgttgagcagattcttcctacgttagttcgactcctgcaccacaatgatccagaagtattggcagattcctgctgggccatttcctacctgactgatggtccaaatgagcgcattgagatggttgtgaagaaaggagttgttccc

SEQ ID NO: 20683 - DNA, 1177 bp, Mus musculus
cagtcttaggagaattggctgtttccttgctgtccagggcctgtggaaccatctgtggatagatcagaaggaacaggcccagtagaagtgtctgtgtctgtgagagaagattggagcatctgggggttgcttctctggagctgtcctagatgtagtaaatgcctggacttgacaagatgcagaaacacacacacacacacacacacatacacacacacattatagatagagaataaaattatgttttggagaaagaaattttttcttaggtttacatttgaacgtacatctgaactcctttggtggttggggggagaactgagccccaatcccaggaacaggagagggccactactctctggaataggtagtgagcaacaactttaggctgttgattagcagcagcactctcctctccagtgcttgggtttcaagcctcttacatcacacctggctaagtctcaagtctttattgttgctctgtttttaggtaggatagttgggttagcattctgcctgcctaagtctcaacttttgagctagtattttgacaagctgggaagtatgcacaactcacttctaccaaataccagcataaaatggttaagtgactaagagcacttgtcgcgctcattgcaaacaaactggatttgattctcagcatccatatggtggtttacaactatccataactccagtgccaagagatccaactccctcttctgacctctgcaagcaggaggcacaagcagtccatggtacatagacatacaggcaggcactcaaaaataaatagacccttaaaaatgagcaattcggccgggcgtggtggcgcacgcctttaatcccagcactcgggaggcagaggcaggaggatttctgagttcgaggccagcctggtctacaaagtgagttccaggacagccagagctagacagagaaaccctgtctcgaaaaaccaaaaaaaaaaaaaaaaaaaaaaaaaaaaaaaaaaaaaaaaaaagagcaattctcagcctctggaaagtctcccagaaataacttgcattaagtggtaaatttgttccaactgataaactcacattaatacattgttaacaaaagttcataactgacattagggtttgctctgtgtatactttatagttgttacaaatgtacactgttatgtagtttc

SEQ ID NO: 20684 - DNA, 2759 bp, Mus musculus
tccaccctgtatcctatcatgattcctgtaggtgaagtacaaggcgacctctaggtgtcttttctttctatgaaaggagctgctatgtacacatgtgcacacacaactgggaatcaacaatgagtttattgttcacgggagacacaagtgaagcttgcggaaaggttgggctaagtggtcctggactaacagacttcgttgccttgaatacaccagtacaaattgtcatttactctgcaccaggctaaatgagcaaaatctatttgaaggtatcttgtttgtaaacattgtcagattctaatttttttctttttgtattaaaattcaactatggatgtatacgaatcgaaataaatggagatcatttttctcccacagatggaggtctctttgaatgtgcgctgtgattacctgtaagcctttgtgggggacggggcgggggagagaccaggaatgacaggaagacctggatttctctagaatagcagaggcccttcctttcctaagtcccttctcaccacatcagagaaaatctccagggagccggtcccttgcatctcttggtcatccctgtaataacgggaatatgacacagtacaagctgccttcatccccgccttccaaaactgtagacagattcctgtgtgggatgaagggtgtttgctggccgggttccttgggttttgtttgttgcagtagagcagggtagagggtagagcagacaggctcgccctgcatcttcctcctgcgggtgctctcaccctccctccccttggagctgcttgctgtgttgtgaaaaccagccaggattgagtcaggctgcctcgcagatgttttcctagatttgcactagtccatgttagccctgtcctgctgggttctagaatctacctagtttttgttttttaaaagccgcctctgtgcatttggtgtcgccctgctatgcaaagccttccccagcccttagtttcttgaaaggaaactgtggcagcagttggcaaattcttccttatgacaggctcaggtgtacaggttcttctgggtcacgtgctctatggaagcctactccctctgtacataaaaatgtcactttagcctgtgcttacagctaaagagacttaactgctcaatatgatagcaaagtttttgcttaaactattaaggtggaagtagttaaatacaggctattttgttcttttagtttacaaaaaagaaaaaagaaaaaaaatgttccacgttgtaggcactgtgctgatgcaagaattctacatcctaataatacaaagtgattctgcatctgcccacgtccagtattcctgtactatctattcatatatctaagcatatatgggcttaatcacttaagcttgttgcagcaaaagctttcctacctgtaggcaatagattgctatgtttttaacaaattgtagcaaattctaaataatcctttttgtacgtaataggacatttcatcctaaaaaataaagtaatgtttttgacattggattctgtgcagtttctaatgagacaatgactggttgggtcaatgtttgctatatttttctgaagctgttggcattgccaagttgtacagaaatgggggtgggtatgggttgtggatttctgagaccaggaagatgttaatttcttatttgtgtacttaatgatataaagacttttgcagtttctatcaccatgtaaagacattttatagttttatcagactgtggagttttagtctttcaacgtacatttatttcaaaagctgcttttctacagatctcatttgaccttcttctactcctcaataaaagtgttaggctgtctgctccgtccggcagaccaagtggtccgatatgcgatatgggtaggactcaggttctgtgcctagaagttgtatttctttgctttgatagatttctttggctaaaagtattttttagcatttcctgtgttcatctccagattcacagtttaagaccatttcttaagagatattttcataacggcggtaaggcttttttctcctgtgcaggttcttcagggcttgtatttactgtcctgtgctaggtcaaagaaattgcgaacttttggagatgttttctacagtaaaaaaatgacctttttctatttggagtggcctggagtgctgtgtgggaccctcccaatgtgctgctgtctgtaacctgtcctcttaagagctgcaaataaaacttctctccctgtctccgtccatctgtgtcaggtcagatctcggtccttgcggttctcgtgctgctgatgtaggagcccagctggcggctgcacactcagaatgccatcccttgcccttggtggtggttgttgttgtaaattttatttatttttacgggtatgagtgttttacctgtgtgtgtgtgtgtgcaccatgcgtatgcctgaaagtccttggggagtcagaagagaacactgaatcctttggaaatggagttagtttacttacttaagccactatgtggatgctgggaactgaacccaggtatctgcaagagcggctagtgattttaactgctgagccatctctccagctcccagaattcactgtccctggtgggggcagttttacaggcagtgtctttaacttggagtgttctctcctgaatgaactaatggctaatgccagttggggtgggggcataaaggacactgggaggagagacctcggcgtctggagcagtttgagtttttacatacactcagtgagcttctgagaaaggcac

SEQ ID NO: 20685 - DNA, 1172 bp, Mus musculus
gtttggaaaagccagcttgaacttcagaattctgttcaattggaaaaggtctttcagagtgttttagtttgttttactctttgagaaaatataaacattttcagatttttgttttgttttagcaaaaattaattcatcatgattttttcaatactcctatcaaatttagtaacacagttactgattttgtttttctctgtatttttcatgcagatacattatagactaatataaagatctttataagttgttgtcatatcaagtcttaagataaaatactttagatattatttctgtggcattggaaatgagtctcactgatttaaaattgttcagtgcacattatcctgggagcccaaatgtgttactttaaagactgtaatgccagagtctgacgcagcactaaggttgtagtcagtgccagaaacatctccttcagttttatagagaggaagagaagaaagtgtgaaagagtgtgtgtgtgtttgtagttgatctgggtttttctttcaggtatagactacagacggtaaagtccttggctggagtgagcctgatgttacggttgctgtgggccagtttgagatgggatgacatggcagccaaggctcctccaggaggagggtctacacggacaggtaagggaattgcattttaagtgtaaaagctgtgggctaaggatgtagcttagttgctgaagtgcatacatatctcatgcatgaggacttgtgttaggtcctagtgctgtgtgtgtaacctgtaagttcaaggccaatttagattatataaggctgagtagccgaaaaggtagccagacctggcagcacgggtttataatgccatctactttggaggccaaagcaagaggatctaattaatgacctgcttgagctcaaggccagctagaaaagctgtctcaaaataaaataaaatgaaataaacaacagaagaaacttgaagtgggttggttctgtggctgtcgcacttgcctagcatgtgaaaggctctgagtttgtcccctagccatgcaataaagtcatgtgctgttcactcaatttattaaatacttctcttattttatagaagtttactcttgcttaagttttctggatgccatcaaattaaggttaaggggcaaggtttagattataagtaagtcagcacacataccc

SEQ ID NO: 20686 - DNA, 1323 bp, Mus musculus
cacacgtgagcagtctggaaagcacagaggtagatgtagtcaatgttagtgagggcttccatctaaggactagttacaaaaagaaaacgaaatcctctaagctggacgggcttctggaacggaggattcgacaatttacactggaagaaaaacagcgtcttgagaagttaaagctggagagtggggtgaagggggcggggaagccccccatgggtgctctgaaaagctcctctgagtctccaggctccacaaaagcaagcgaagggcatcagggtgactcgctgagacaggaacaaagccccagttcaagtcaggctagcactgtggacttggggctggggggctcacaaagtgatcccttggttcttggcatcagtcctcctagtctaagcacgcacaaacctgatccaaaagatcaagtattagatgatgtctccattcagagtccagggccaaactgtcagaggcaaaactcagttgaaagcgacctagatgccaggatctctgaacctgccggtaagggactggaactaagtcagactaaaacagaagtgactgactcttcctctgatgactctaaaccaaccagtgcagacgatgttggcattttgatctgtaagagcagaaagctgcactcacaggacgatagcagcaccgttgtgtcttcttccaagagtactttacctgcatcagtacctaaaagtccccgtgacagagatgcccgggccttctcaaaagcagtggacttcgatgggagactaggtggtgactctgaatatagtagcactttggaaaatagctctgataatatgtgtattcgggacagtgctgaagaagatatggttgttcagaacagcagtgaagccacctcgaaacggttcatagctccagaacaaggaggagaaagcgtggagtcgacaaaatgtcaggtagtttctaagtccactgaaaactgtgaagacaaactacagggtaaggtaactgaagcaaacggtaagaaactgggccaacatcctccaaagccagaggagagagcagttaacagatgtactgaccaagtcagcctgcgacacagcgttgacagaaagaacagtgaacctcgagagtctgaaaagaaaggacagaaagcaaataaatttcaaataaacggcaaagatagcaaagctaaggggtacctgaaggggccgggcacgaaggacggctctgatggtaaagttgtgagtagtgctgtagaaccaaaggtcaataatatcaataaagtcatccctgggaataccaagtcactggctgggaaggaatctgctgcgaagccgttcatcaacg

SEQ ID NO: 20687 - DNA, 1699 bp, Mus musculus
gagtgggactgtgtcatagaaactgaagaactaagtcattgaacagcaacaacaactattattattattattattattattgaaacaatatctcactgtgtagaccaggctggcctggagttcatagatttacctgcctctgtctcctgagtgctgggattaaaggctgtgccctcacaccctgctgatgttacttttgctatgtcacaattctggggctgattccactaggtaagtgccctaccacaaagcgatactctaacctctgatcttggtattaatctaacttgcctatagcagaaaaactgactggtgtgtttgtgagagcaaggttccatattaacctgtgatgatatccttatttacaggtaggcgaaaaccaagagtacatcggcctcgttctccaatattagaagaaaaagacatcccaccccttgaatttccgaagtcctctgaggatttaatggtgcctaatgagcatataatgaatgtcattgccatttatgaggtggtgcggaactttggcaacgttttaaggttgtcccctttttgctttgaggacttctgtgcggctctggtgagccaagagcagtgcacactcatggcggagatgcacgtggcgcttctgaaagcagttcttcgagaagaggacacgtctaacaccacctttggccctgcggacttgaaagacagtgtaaactccaccctgtatttcatcgacgggatgacgtggccggaggtcctgagggtctactgtgagagtgacaaggagtaccaccatgtccttccttaccaggaggcagaggactatccctacggaccagtggagaacaaaatcaaagttctgcagtttctagtcgatcagttccttacgaccaatattgctcgtgaggagctgatgtctgaaggggtaatccagtatgacgaccattgtagggtctgtcacaaacttggggatctgctgtgctgtgagacgtgctcggctgtgtaccatttagagtgtgtgaagccgcctcttgaagaagtgccggaggacgagtggcagtgtgaagtctgtgtggcacacaaggtgcctggtgtgactgactgtgtcgctgaagtccaaaagaataaaccctacgttcgacacgaacctattgggtatgacagaagccgtaggaaatactggtttttaaaccgaagactcataatgtaagtacatctggccataatttttgtacatgtttagggaagcctttttccttcatggttgatgtgagagagtgctccccatgttgatgcaattattaaacgtgtggtttaataatgaattgtagttaaagacttgagatggaaggaatgcgggcattaatacggcattttagaaattgtgatgtaaggtgagttcatgtgccttaggtggggttctggggccttcctgcagcccaccgagagagagagctctctcgccttacttgctgttaaaggacttcggcctcctggtcacctgtgtagctcaggcagtagcctggggcagtgggaacaaacctgcctgaggctgggtattcattagtgattaaagttctccaggagatcctgacacacgcaggatcatagtctgagtcctggggtttcaagaaccaatttggaattaggcctatggggcaggaggatcacaagtgttgctttgctctacagagtgagtttcaaggctagcctg

SEQ ID NO: 20688 - DNA, 1236 bp, Mus musculus
tcacttcatttctattcaccgaactatattgtaataagtcagttagttagtgggctgaatcctattaacgatttttcttcaaattactttttctgttctcacatctattaataatcactcatataggttccttaaacctttcttttctttccagagtccaccccgaggaccctgtgttgagccacctcaatttagcaacatttggtgcatgtgcctgcgatttcactttagtgactagcaccctaggtcaaaccaagactggtaatttgtcaggtagacattatttccaggtaacacaaacacataactttgtgaagccaattctagacaggacgccatccttcctatccttaagttctggctgaggtgtggaagttcgtagctgggaagagagaaaggtgcctggaggccgctaggaaccacgctctggaatttaaccccgggctctgagggtgggaactcaggaaagtcagtgaaaccacgctgggggtgtggctcccagcgtgcattcctggaacaacttcaggaccctctagatccaagcctttgggagctctctattgggactgacttagctccagctcctgtacctgcgtgggtggctttgcgtagtgactgcccccagtctgtaagtcgtgcctctacgcgagacgcccctctcccctttttttgcattagtttcccaaaaggaccggcgacttgggaggaaaattccctgttttccggccccggtttgggagacacgcattgaggtctccctaagacctcagctgagggggaggtggtctcccaggaggagaccccagcctggggggacaccccacgctacccatctcgctcctgcgccgccgccgtgcagccgcgcaggggcgctccggggcctccccgcccccgccgcgccgctcccgcgctccccctagcggccgccgcgccgcctcgctctgtcccaggctcgtcgggcggcgcagctcacgtgaccgcgctccgggcctgcggccgctgtcggttcccccagtcaccgagcgagagggaagaaacaagatggcggctgcaggcgatccggagcggggccccggcaattcggactgagccttctccctccaccccgccgctgccgggccgcgcccctcccgcccggaccccggcgccctcccctccccctcggccccggcgccccccgcgcccctcccccaccccttccgctccccccccacccccccgcaagccgcggctccg

SEQ ID NO: 20689 - DNA, 1904 bp, Mus musculus
accgtggatgggcactgagtaccagctgcacttccagaggtcctgagttcaattcccagcaaccacacagtgactcataaacacctataatgagatcttgtaccctaactgggcatgagtaaaatccataatacttttccttaaaatttgcctataaaggggctggagagatagatgattcagcgattaagagcaccaccacatgggatctgatgccctcttctggtgtgtgacagtgtactcatataaataaaacaaacaaacaattcttgaaaagaaaaatttgcctatgaagaggtgggagtcagctcatggtagaggcaacaatacatgattgattccagtgccagaaaacaaaaatgtttttggaaaaaccactagtagtgattggaaggtgtgatgtatgtggagttccagcacagttactctgggtccttgtcgtcttcagatctccatctattccgagctcaacaagatcgcagtcagcttccgggagctgcagagattaaatcgggagaagagcagtagaggactgtactccatcgaagtgctggaactcttctgacagtcttgctggctgttctgaactggatatatggaccaggctggccgcgaactcagagatccacctcccaaagtgctgggagtaaaggtgtggccaccacacctaacttgatggatatatattttttttaatatgaatcttcctgttcgtccagggaagaaagatttgttagtacccatctcactcagtgtccagagagaaatatgagtccctggaccatcacagaccatcactccttagtgtgctgcgggttccacagaatcacttctaggttgcagacatcactggagggatgttgtgaaagtttttttaaacatgaaattgagctgattttaagtaaacgtatttgtgtctaattttttacaatgcattttgaatagtttttctttcaatcaaagaagcaaaaccaggggctggagagatggctcagcaattaagagcactgactgctctttcagagttcctgagttcaattcctgccaaccacatggtggcttacaaccatctgtaatgttatctgatgccctcttctggtgtgtctggagatagtgacagtgtactcacatatatgaaataaatctttttttgaaaaaatgaagaagctgcaaaacatctctgatgagtggatctaaggagaatgtatatcagtctgaagctgttcccagtcatctgtatcatggagcactcagggcaccaagccagcatactgcattgtgcctactgccatttcttcatctttcatcttctaccatctcttctcctttctcgggagttgagaaattccctgttccagcgtggtgtctcagatgaactgtgacaaggatatggtaaagattggtttaaattataaaatcttattaccaaataatgaaaatgtctctctttttaaaaaaaaagtattgaggccagtgagcgagttcagtggataaatatgtgcaagctctataagcctgttgtcttagagagttgatccctggagtccatgtgaagtgggaaggagagggccagtttcccaagagttgttctctgccatccacaaacactacccacaccttcaatcccagcactcaggaataatagcagactaatctctctgtgttcaagatcaacctcatctgcttagtgagttccagggcagcaagagctacatagtgaggccctgtctcaaaccctccccccaaaaaagtaaacaaaagtattagaaaatctttctagggactggagagatgtctcagtgtttaagagcacttccagaggtcctgagttcaattcccagcatccatttggtggatcacaaccatctgtaatggattctgatgccttcttctggtgtgcaaat

SEQ ID NO: 20690 - DNA, 1163 bp, Mus musculus
ttcttttggggggggggggtaattgagacagggtttctctgtgtagccctggaactcactttgtagaccaggctggcctcgaactcagaaatcagcctgcctctgcctcccaagtgctgggattaaaggcgtgcgctaccatgcttggctaggattttctttcattgctggatctagacttaaatttgtctgagatatgagtgtggagcagggtcatgggaagatgagactggcagcagtgagtggacagtaatggaaagtaagggcaggggcttgtgagtgtatgtgcaacagtcagactttagaaaaatggatgcttattttctttcagctctggtatcatggggaagtactattcatgctacatggaaaaagtctaactgtgattccatacaagtgtgaagaatcgtctctagcaggcgctcttggaaaactcaagcacacacaagagtcaggtagaaccctctctactttcttagatcattttattggctcctggttccttttttctttgggtttttctagacatagtttctctgtatagtccttactctcctggaacttcactctgcagaccaagctggcttctaactcagatctgcctgcctctgcctcccaggcgttggaactaaaggcgtgcacctccacctcttggcttagacctctcttaaattgtgcataaatggttttcctttgctgttcattgctttgatgatattagatcaaaataatccagtaattttatgttttgtatttccttaggcactcattctgtgccccactttgtaaactgggaaacatgttcaggatatgaacttgggtcctccggtgcagagcagtcaagaactgtaagttcagtagtgggatgagaaatgttagtgcgaatgtaaaaaaaaaaaaaaacaaggaaaagctgtattattgtaaatgttcctgtgtgtttcttttgtttgtttgtttttgttttttcgagacagggtttctctgtgtagccctggctgtcctggaactcactctgtaaaccaggctggcctcgaactcagaaatccgcctgcctctgcctcccgagagtgctgggattaaagctgtcagctacatcttgatttttaataacggcttcagcattgtaactgtacagcttttacccaaactgatacttggca

SEQ ID NO: 20691 - DNA, 1169 bp, Mus musculus
ctataccaaaagtcccttataccttcctccctcccactttcatgtccacttttttattttgtttttccttttttttctttctgttaacccactgagtccactcagagctgcctactgaagtattgactcaccttgttggcttgctcttatagctgcagggagttcccgagtgcctgtgaccatgtcacgaccaggatgcctttgcatcgccctgccgccctctcttcaggctgttccccagccttggggtgggggtgggtgaatatccatacagatatcccactgagcagtgctcatagcctgggcattccttttctgcattttggccagttatgatatatctctttctgaaaggctaatctttatgtatcacagttggtaaaaagtcttttttgctttcttttggccatggggttggaaccaaagtccttgcacaaactagataagctttctacccaaagggtactccttagccacactggagacactttttgggctgtgtggtttttgttcttgttttgagatgtgtgtgtatgtctatctgtgtgtgtgtgtgtgtgtgtgtgtgtatgtgtgtttattaacagggtccagagtgccatccccatcaactcaaaagaaggaactaaagaacgttttgatggctaagctcagagtttgaatatttaagttaacaatactgtctttctagtggtgaggtttgtggatagccagggactaccaagaattaaacagtagtaacaagtgtcacacggcagtgtctcatttatccctgcctggtgtaattaaaactatacttcatgttttctttcaggacttagaaggagagcaagaatgcgttttcctactcttttttctttttttttcttctttttatttcgaaacagggtttctctatgtagtcctggctgtcctggaactctctgtagaccaggctggcctcgaactcagaaatctgcctgcatctgcctcccgagtactgggattaaaggcgtgcgccaccaatgcccagctgttttcctattcttgaagtatttttaaaaataggttttttatttgtttgtttgttttgttttcgttttttaatgaggcaggcaagatggctcagtgggcagcagtgccagccaccaagtccaaggaaacctgagtttgatccctaaagtccataa

SEQ ID NO: 20692 - DNA, 1213 bp, Mus musculus
agcagtcagcactcttaatcactaagctgtccagacctgtgagcgctgctccttaaatctgttcaggcagatgtgttacatcctaattctggtcctgcttatatgaagaccatttttcctgctgcctcatttctttagcctcaacactatttattattattaagttttgtgtgtgtgccacagtacacagtactctgaggtcagcggcagctcaggagtggagagtgagtgggttctctcctgccttttttaaaaaatttatttacttatttaattttatgtatatgattgtgagccttcatgtggttgttgggaattgaatttttaaaacctctgctcaatcaggcccaaagatttattgtgtttataaataagtacactgtagctctctcagactcaacaggtggttgttagccaccatgtggttgttgggatttgaactcaagacctttggaagagcagtcaatctctgacagtgctctctcctgccttgttgagatatcttgtttgttaatgcaactttgcacactccaggccaacatgagcttccgggtgggtctcctattttcctctcccatctagcagctgaggtgctaggatccttggtgcactgcctcttctggcctttttttttttaagatttctttattatttatatgtaagtccactgtagctgtcttcagacacaccagtagagggagtcagatgtcattacagatggttgtgagtcaccatgtggctgtgggatttgaactcagggctttcacaagaacggtcagtgctcttaactgctgagccatctctccaacccctctttcgccttttacttggagtgtctggtttatcagctaagccatctccctgccccccccccccattggctgaatctgtagatttgatcccttagattaagaacatcccctccctcagtatctccaggtgtgaccttgatcctggggaggtgacccagaggtcacaggacttaggtttcctatagaaaggtgaactgtgactgctaatacctctaacccaccaggtttacctgtgtttgagtgagagtgtgtgagcacccaggcatgtctgcgtgggtttaccattcaatggtttgatggacagggacaatgacagttgctaaaagaaggaagagagtttctttggctctttcaaaacaggggctcagattccctgacattcagctaggacggggtagcca

SEQ ID NO: 20693 - DNA, 1200 bp, Mus musculus
acatgcaccgaatcaacttgcggcctttataagtttctcaggctctgccattttactctagcaacagatgacttggcatagaattccattttatgaggttttgcataatttgctttttgtataacgatatataatgcttttacggaagtatacataaatctaggggaaacaaagtagttttgagcagctgggcccagaggccatcttgctgtcctggttccaggtagaaggatgctgatgcgtcctgagacattcagtttatcctgtatcagttctgggttcaactaggcacctgcatcacccccattggagattgactgacagcactctataccctagaaaggacatccttgtcacctctccggaacctgcctggctcttgaggacagtgcaaagaaagccaggacaacacaggacaacacgccttccctgagcatgactccttcctgagtctctcaaagccctctgtgtggcaaatgtgtggtgtttatagccctggacaaacatctgctccactctgccttgatgcagaagaaggaatccagggccttgcaagtgctggctcaggactgtgccccggagctacttttcccagctccatgaatttctggattccctctgctgtggatttgttttgtatttgaacatttactgtcccctccatcccccacccccttgcttcttctcatgctagggaaagaactgagagttgcaggtccatgtgctttgccgctaatcaatgcccaccaccagtggcccaatgccagtgtatttgatgtatacttttaaaagttccttcttagtcaatgattctgattatagcacatctttttgtgtttgtgtgcgagtgtgtgtgtttctttgtgcttacatagagaccctcagaagccttctttgcatatttagtgtgtgtgtgtgtgtgtgtgtgtgtgtgtgtgtgtgccttgcatgtgtgcagtgtccacagaggccagaagaaagagtcaggtttccctggatacagggaggggccgttggcatattgcaagccaccttattggtcctgagaatcacatccaggtcctttgaaagagcagcaggtgctcttaactgttgagccctctctgctgccccagcctcgtttctgagacagacttgctgactgggaccttgtgctcactatttacactaactaggctgtctgtccagcaagcccctcgg

SEQ ID NO: 20694 - DNA, 1200 bp, Mus musculus
agttctctctgttgtttgtttgtttgttttgagacagtttttctctgtgtagtcctggctgtcctgacaacatttgttttcaattcttttagcgctattccccagggtggggttgctgcagggtcatgtgaaattcctatgttgaagtgggttgaagagctgccaactgtttcccactgtaccttccctctggcagagtgcgaggactccaatttgccaacgctcctcgttttcttttttcttctaaccaccctggagggtgtgaagtggtttggatttgcatttccctaatgacttacaatgttggacatcttttctcatgcctattggcatttttttttaaatcatttttgaggaaacttctaatcctttgtctggcttttaattggcttacatttaaaaaaaaaagagttgaaagtgtatatgtatgtgtgggtgagtgtgtggtgtgtgtgtgtgtgtgtgtatggtgtgtgtggtgtgagtgtgtgttgggtgctagactatctgttgaaggtttttatttatgtgcatgtgcgtttgtacttgaacaccaatgcaaggtgaggactgaagaaggacttcgaatcccctaaagctggagttgggagctgcccacatggatgctgggaaactgaactcaggtcctctggaagagcagtataggctcataacaattaagccagctcttcagcctccaggtcagattctgagtacacatttcgtactcacatggtaagcccactaccaactgaacctgctccttagcctgtcacagagcatggtatctagtgattgatacaaatgatcacaaatcttttatcttttatcttttttttttttttttttgttctttaacacccttcataggaatctgccttatatacctctttgttctctatgccttgagtgattcacagaagttgctgtcaggagcccggttgtcaggaacacattccgattgtctctggcttcttgtgtgtgagagtcgctctctatggcatatgcctaggagtggaatgtacgaacatggttcctttagtgattataatatttatgctgctgtgggcaatgtatgaaaattacatttggggaaacttgaggattctgtttgtttttttgtgtctggatggggaagaaagtcattactaaaaggatgtggtatttgcatctgaaatttgcattttaggcttctggtat

SEQ ID NO: 20695 - DNA, 1196 bp, Mus musculus
agaaaaccaccagactctctgcttcctgaagttgggattatagacatgtgccactgcctagagaacaggcttatttagatttactttgttttatgtatgtgactgttttctctgtatgtgcactccatgcatgtctgatgcatgcttttggagacagaggaggtctctggatccccgagagttggagttacagatggtgtgagctgctgtgtgtactgggagcccccatcctctgcaggggcactgagtgctgaatcatctctccatccctagacttgaaccttcgatcctcctgcctctgcttcttgggtaccggagttacagacatgtgtctccgtgtcggttctaggtattgaactcaggacttgatgaatgccaggcaggcactctactcccaagtttcccatttcccagatgaggaagtgtaggcctggagaaactgcctcgcctgccccaggttatgtgactcagtagtagtgtgaaagccttaacctgcagaggctcaggtcaggccatttggtctatggctctgtctgattgagttaccagatgctgggaataggattcagacacttctgcaatgatatagcaattgctaatttgttcttgtgattttgtttgtcatgtgtgttttggagacagggtagtgacgtatggcccagatcaaatcgggccttaagtcagagtgcctccgtcactcgaggggggttacagatgtgtgccagcacagctggcgatctgtgatatttaaaagctgttctctctttttcagaaattataaagagctctgatgggctatttgggtgttacccagtgcagtgaactgcaggtgagtagagatggcttaggagagcattcctgaggagacaaggctcaggaagcctgaggaagggatgcgggagaggcttcagctcatcttttccttttgttaatttttttttttttttggtttttcgagacagggtttctctgtatagccctggctgtcctggaactcactttggtagaccaggctggccttgaactcagaaatccgcctgcctctgcctcacgagtgctgggattaaaggcgagtgccaccacgcccggctccttttgttaatttttaatgtacaaaggaatgggtttcatggtgacatttttttcttttctttttttttaatggttttagagttttattgtagaaaggcaggggg

SEQ ID NO: 20696 - DNA, 1196 bp, Mus musculus
cgaactcagaaatccgtctgcctctgcctcccaagtgctgcgattaaaagcacgtgccaccactgccaggcctgggttagcttttaaaaactaaaattagtattagtagcctcataatgacagacactctgtagaaactggtgattttgatccaaccccatctgcaaagttcattttgtcagtcataggcagtgtggcgacaatgttattttagatatactcagttagcattaccaccattctttctgtggtataaaacattccaaatttcatcttactatgaggtttcctccttttgagtttgaaaggctgaggtatggctaacaagaagcctggtgggccagttggagaaacaagtaggtgaagtgcaccagggcaggccatggttagttagtagtgacagaagcccaagcagggagaggaggggttggataatactgcagagaagcctggaggccagagtgttggagccgggacagatgagggaagaccagaggagacttgatacaggcgatattaacaaatacccagttggttcagggagaagtaagaaaagggacagggcagcagcatcagttggaaggagagtatgacaggtggagaggtgttctagatctgcctgggcacactgggaactgctcagaagagaggagtttcggatgacttttaagaggccagccggaggctcagcaggcagaactcacttgctgccatatgagttcagttcctgggacccgtgtagtagcaggagagaagagactcttgcaaatagtgctctgaccttcatatgcttgccgtgccatggtgtccatacacttacacacatacaaaacaaagaaaatgtagtaaaaagtgttgagaaacaagatttcagcatgtggctatcttcaggggacgccctttctttgaggtgagccctcgagaggttcagatttggagtgaagttgatgaattttgttttggacatactgtggaacacttacgtgatcctctgtttgcttgtcatgtgagagagtgtgtgtgtatgtgtgtgtgttgatgggaatttaaaggtcagctgtgtgctgctagaggcagatcttccgatcatcagcgctgagccatcaggtatgctacttcagggttgcttactgctgtaggcactggctcatccagacctgactgtgtggagcccaagaggaagtcagagctaagtg

SEQ ID NO: 20697 - DNA, 1194 bp, Mus musculus
gcctggtggaacttgtatcacaaataggaacagatcctgaaagtctatttgaaatttgtctagtccctgtagaggtttgtgtcacctagcagctgttggatggttgacttagctatatcagtaggggacagggtgacagtaccaggccttgtcctcctgggactctggtgcactgactgactgtaagaaccttctggttggctgggtagtttccttggcttgctctggagaggactgagaaccaccaagttggtgtggagttgctttcctcctgccctgccttactgtgacactccatccctttttactttaagaatagagccaatggaaggtgtggccatttgcccagcacattatcttagtttcagtatttctactagtcacattgtattaggattttactctttgaaatgtgacaacaatgttaccttccatgttcatatcaggaatgtgccactccgacttgtagattggtttttaaaaggcatttgctaaaatgtgatcctatatcagtctgtttcggttaccatattctttacccaaacaccagtggtaattttaacatgtgtgcttgtttaaaggtatttgaagtggtggagcgtgtagaagagctaagacggaagtggccagtggcatggggaaagttagatgacggcagcatcggtgtggtgacgccatacgctgaccaggtgtttagaatccgagctgagcttcggaagaagaggctctcggatgtgaatgtggaaagggtgctcaatgtccaaggtcagtgtccattggaatgagtcacgctgttcaaatgccttaaggtgtgtccacattggatttttaattcctttaaataataggtttttaagaaatctaatattaaggaaagaaagaaatctcattactttttttgagctggcagtgatacaagttctttaatattaaatttacatgtttataaaggttccaatacccaaattaaggtagtattaacaacccaagcagctgaaggggtttgcagcctcctaggaggaacaacaatatgaactaaccagtatctctagagttcctggggactaaaccaccaatcaaagaaaacacatggtgggactcatggctccagctgcatatgtagcagaggatggcctagtcggtcatcaatgggaggagaggcccttggtcctgtgaaggttctatgcccccagt

SEQ ID NO: 20698 - DNA, 1170 bp, Mus musculus
tgaccttttgtgactaggttttgttcactgaatgaagtgcctctgagggtcattcacatagtggcatgtctcagctgggccacttgtgtgtaatcacactggagtgtctgtgctccctgggtcacatttcttggcatcatgatcaaggcttctgtgagcctgggagcagcgacctcatggagaccttgcttgcagtttggtaggatttgtctgaagtggacttgctggatcagatggtcacggtggttcatttgtgaggaactggcagagtttcagagcagccatgcactcagagctgcatgtggttaggatctctggtgtctccaccagcagctgtcgttcagccagtacggttttgaagatggaagacttactgcatcagtgatggcagagtgatgatctgtctttctttcaatgtttttctaggaaagcagttcagagttctgtttcttagcacagtgcgtacacgccacacttgcaagcacaagcagacgccaattaaaaagaaagagcaactcctggaagactccaccgaggacttagattatggttttctatccaactacaaacttctcaatacggccatcaccagagcacagtccttggttgctgtggtgggtgaccctgttgctctgtgctctattggaaggtgtaggtaagtgtgtcactgaactgagagaatctaaatagaagtatggagtaatttacatctttatgcatgtgtttgtctgtaccatcacacagtgaattaaagtctggcttactgttacctgatgatgttagtgagagatctgttattcaggtctgttgatggtacatgcatgcttcatttccgtcggcaagcagtcagcagttagacctcagtgtacttaagtctgcgagcagtcagcgatgcccccgagtgcgtttgtactctgcgctctactctccgctccgcactcttccggtctggagatggtcagtgagcaaaacacacagacatcgctgtcgtcatggtggttacactctacagggcaggaaagttgactgacgacaaacggaatgagaacactgtgtagaatttgactaagtaaatgagagtggagggggagggagggagggaggggagaggagcacttaggggtaagagatggggtgttgactagaaaggctgcactcagaggaggcctc

SEQ ID NO: 20699 - DNA, 1148 bp, Mus musculus
cctttgaaatcttgtaaactgttttcctctgaggagagcagtataattgatgtttctgtttcgtcttctgcattttattctcagtcacgaactgttgccaagcagcagggttattggggagccagagaccttcagttctcttagagaccttcagttctcttgggtctcagttggtctggggaatcccacgctgtatgacatattagagctacactacggaattctgaggtttttagagggcttccatctgattcataaattcacttttatttcctttttgaaatgtttggtgatttttttttaacttgtagagacatgaatatctctaaatttagaagttttagcctaagaaacaatttatttgattgaagtgagttaatttcagtgagaggtgatcttgtcagagtgctttgacactcctgcctgtgcccacaaagagaaccgctgaactgcaagcattctcagcctgtggtaggtcacagcctggcagccaagcagagtatggtcggaggcaagggtttcttgcctgtgcctcagcggcttctgattgtagctatttctttctggacagcctggcaacatgatacatggtctgctttaaatagtctgtctgttaggatttctgtttcattttactaggtcacagagcttttaggatataagatctctgagagtctgtgtccgccagttaaaacagtgacaacggcagatatcattttcatccctgtaatgatcatgcatatctaggcaagctcttctgtctctgtgacttaaggtagagttgagtccatcagaagcattcattaaaataatgatctgtgtgagttttgcctgccatgagccctgaatgattgttactcacgtaaggttagagttgggactccttagttttctcctccaaccttagacccagtctgttaagctatggaactgtgaagtttgacttgagaagatcattttcatgatgctctgtgacgtgtacctccatgtggagggggaatgattcaggagtataaactgcgttgatgtcttggggaataagtactagtttcaagtcctcattttccctaacctgctaaggattttgagagccaggttttggctggtaagggcataatcgcagtcctgcccattgctactgtagagtg

SEQ ID NO: 20700 - DNA, 1197 bp, Mus musculus
gagggttctggggtgggggaggtctggcccagagcatctcctgggtctcttgagtctcttacgaactttctctcagggcaactcagtggcctgtgcctcctttctcctctcctgctgtctgccattatgttatttcctttgcacatgtgtatctcctcagatcctttcttttttaagttttaaagatgtattaattttacgtgtataagtgtcttgcctgtatgtatatacgtgtaccacatgtgtgcctgtggaggttggatgaagccatcagagctcctggaactggagtcacagatggttgtgagctgccaggtgggtgctgggaattaagcctgggcaactgatgaaccatcatgtctccgttcggattttcttatttcagcaatagacttgactttatagactcctcatgataaagatgtctcactgagagtgaccttagacagggaaggactgtggcagtgacttccttagtgcctggccttgtcctctctctgtagatccttaactttgtgtctgcccgtttgtctgccattcatgcttttgtgttggggcaggttagagaggaccgtgtcagtggttggattagtgcggctggcagctcgtgtgctctagtgtcagcagggcttggctcccacctttcttgtgcattattcctctctccaggttccttagtgactcttccccagcctgtttcctcatgatgtagagatgactgctgtcaccaccatcatccgttggtgacaagaagtctcactttttatacatccttaagcctctttgctttgtcatcccagccttagatgacatcctctggagtttacagtctcccctggtcccatcacctcactgagtccatgttctcacccttctctgctgtgcagactcttttgcccatcgatcctccccaccctgcttgccgtgcagttactctagcccaggaggttctcagaagacgctttctcctggggctgtagctcagtgggagtgggtgttgatctagcacacacatgacccttgttcaatgcccagcaccacaaaagcttagatagatagatagatagatagatagatagatagatagatagatagataccttcacccctaatgccttgtcttttgtttctccctacactggcacaggctagacctagctctctgcacctcactgtagctgtgagctccatggactgt

SEQ ID NO: 20701 - DNA, 1145 bp, Mus musculus
cattaatccatactcacgtagaatgtgagagctaggtgtgttggtgcacatctgcacccccagaacagggcaggctgaggaggaggttcaagagttcaaaaccagctgagctacatggcaagatcttcttggaaaatgtgttacaagaagggagagtggctgtaacaagtggacccgggtaccactgggccagatgtgagagtagagcgtacagcacattactgcagatgcaggcatgttctggcttacagaaacccaaccgcagcctcccagaccatccctgggtgtttgctgctcccgtgggcatgggtgttcttttatggtgtttcttcaagagaggggtttaaagtgtgttgtgatgaagttgtgtatgcttggactaaactgcccatgtgcttacgctcctggagatggaggagctcgtggaggagtccctaggcgcatgtgcagaatgcacctgtggttaaacctgccgctcttctctgcttgtagctccacccaagactgtcaaaccccctgaggatcagctgaagcccgagagcggggaggtgtccagttccttcaactactcgatgctgcagcaccttggccagttcccacccctcatgcccaacaagcagatcgcagagtccgccaactgcagcagccagcagagcccggcagggagcaagcccgccatgtcctacgccagtgcgctgcgggccccgcccaagcccaggccgccacccgagcaggccaagaagggcagcgacccgctgtccctgctccaggagctcagtctgggcagcagcccgggcagcaatggcttctactcctacttcaagtgaccccgctcgcgctgtcctcagagaatatgcggttcctgtccagtctgcaggatggaggtggcggctctgtgtgcgtgcagccctccattacgttcactgcgctctcagcccccttgctgctagacctgcgcctacgtttaaaagtatattccattattttgcatttttgatgtgagtcagaattttgacagcttttatgtagaataaaaatatttttaaatttgtgtattgttacatatgtttgcatcaagctagcagctaagaggttaactgtgcaactataaaaaaaagaaaaaaaagtttgtctaaaatgtattt

SEQ ID NO: 20702 - DNA, 1731 bp, Mus musculus
cgagtattctgcatgccaccactgggttttgaaatgtgaaaaagaaaaaaggaaaaaaaaaaaaaaagcaaccctggtggcatagtcagttttctttgttttgtttttgacaagcaagacttccagcttgtctttaacattgaggtgagagggtttggtttggtttaaacaaatggggaagctgaagcatttttaggattgttggtgcttagtagacttgataactattttaaaactgcgtgaatttagtgaaaaatattttttctcactctgcatgtgtaagtgttcgtagcctggccccctcctccagggcagaaagacctgtgccaactaacggtttgggttgcttttcctccattaacaatgttggtaccttattgatgtttacgttaagatgatgtgacctacacagagcaattctaagatctttctaagatgttacatacacagagcaattctaagatctttctaattgcttgtttgagggatatcattaaaggaaaaaaaaaacattgtcaaaaattgatgaaaatctagggtatgtttcagatcctttgaatcatctgaaattccccccttgaactcattagaaatatgaaatttaagcaactgtccgcagagatccacagcctgccagttgttttgaatgaacgttgaaggaagaggttgtcctcacgtgttaacacatccgaaacaatgaatgtcctttgtcatttcctgatcccgtagctctaattttgtatttctgagaaatcttgagactacaatctatcttttttttttttttttcctttttaaactaagatgaggccagggggatatttcaaaagaggccgactttcctgccgatcacacatacttttctggaagacttttgatagaccattttaagatgggttggatgtggcaagggggcagcagaattagtctgtgtgactagaggttagtctattgcagccagccacagccccctgtgtgggctacacaggctgcgattaaaggctacgttggttaaggggcagcaaactcctgcactgatgatacagcctctcagattcagttctgcctctgtgctcaggactgggctactggaacctggcttcctgttgttcctgtctcgggctacatgcctcttctgagctgccaggtatggacggacccacagactaaagtggtgttcacagatcccggcaggcacggggatccactgagtcaggacaccacattctgcgtgacatgacatcatcacatgctggcgtgacgcaggcagaatgagacaacttttgccacaggtctctgtttgctaactctgtgcccaagtaggactcacccatgatagagctgtctgtgtcccataggtgagtgcccccacgcccacgcatgcagacacacaggacaaagtacatgccgggcaagagttcagagccatcctgctaattcagacagagttatactgtcagttttcgggtcacctctcgccaggagatcattgcctacttttttgtttttcatacttgaacctttaaaaatatatgagttttttaaattatttatatttagttaaagtcacgtgtgcaccctatcatcttatataagacactgatggtgggaccccggggatggggaacccgtcaggttgcggtgacattctcaacgtggttatgtctaagaaatgacactagctacttccttacttgactgcgctgttgcgagtgtcggtgcgttcccatc

SEQ ID NO: 20703 - DNA, 1347 bp, Mus musculus
cccaccctttatctcttgatctaaaaataaattcctgatgagaattgacaagcctcattcactgtatcatgggtattttctggtgtgtttttttcaaagaagtccattgtggccccacgcttgctagtcacgttatctcgtccttgaccagtcagtcgttagttattgatcatggagactaaggatctcggtcttcctgtcgtcacacagacatgctcgctgtctgggtcatcttgtgtgaggagaacaaaattgtctgctgtgggttctttttcttttgccttgtttctaatcaagatcgtaggatgagttcaggtttgatgtaagcatcaactggtcctttctgttcagagaacttcagggtaaggaaaatacgcggaagtctcccagagtaagcattccccagtaaacatggcggtctctggagcctatgcattggagaggttttcctctttctgaaggccttgaggttctgaggaaactgtctttttaatcttgagctcatatgctgtgttatgttgctgtagtgtagttaatggttctaagtttggtatgtttcattttgagagcaaagctgaaaacataaaagaatgtatctctctagccaccgcgactgcgagtcagggtgtggagaacaattttaggctaaatctgaacattcccacgattgtcatgggaaatgttagatttcctgaactaggtgattttttgtttgtttgtttgtttttttaaggagatgctcatgagcgaaagaatcattgcgtagtggagagttttattagtagaaaaattatgtagaaacataagtttaaaacttcccatagagtaaaacatacacattactgctttaaaatattacctaggctgtccatccctcccccacccacctctccacctcctcacacttaaacccgccttttctcagtgagtagatccgggtttgtttgtttgtttgttattcttgcctttcccataatgtttgacaaccctgctcccaaccgccccatgtgtcctgctcacatctgggcgcaggtgtcatctgatcagtattcacactgcccagaagttagagaagaggcaggtggtgcttgctctccttgttcagagcatcacttggtgtgtccctggtagcctggtacccagagtacccgtcatacgggtcctcagagcatccactccatcaagccttcacatttccctctgcgacttgacagaggcttcgaggttcacacttgccagttttatccctcgtttaactagcaattccaagaccacagaaggaggggatttttactgaagtttagcatcccaataaaacatcagaaagtggcattatatcatcaactc

SEQ ID NO: 20704 - DNA, 2142 bp, Mus musculus
cttgtgagctgtggttctaatccagcccatttgtccagtggtaagcttgaagcttctgaaatgagtttcaagagagcctacaagtcttatagtttcagtcatcagagtggtagaccagactttacttgcaatttgttcaacagagagattttattttgatacaaatattaaacataatgcatagtaagttttatataattctatgagttcattaaacaatattatgagattttcagtattttggggggggcgtctttttggctatttctacctcatatgaggtctcttctgtattttatttagtatactagcatgtgcttgcctgccttagaatgatgtacgggaggggaaatcaatattaccttttaagaaaaattttgatttttatggaataattgttttaatattttaatgtttgaaactgaggggggtaagggtggcagataacatacagtggtaactatttacaaacctatcatattttaagattttagaattgtgagcaagatcaagaaaaataaagggggaaaaaaaagtgattatgaagctgaagctggcctcagttttccctggacgggttgttgagattgctgggcccactgccagggtggcgtcacagccgtccaggaagcgcactttgagagtcaggaggggtttatctctttactcgtgggccattttaatcatcctggcacctcaagtggcccgttcgtgggaagagctctctctccctttggggtctctgctactcctcattagggtgcaggggcgctttcatttctggagtgagtttgttgttagtgacgcagctgcctggctattgttcggaagctgtgcgtttgtgggatgtgcttagagtcgacctcgatccctccacatggagacataattgtggaaagaagccatcggatgccctgagagtgtgcttgcacttgcccaggctcttagtcccggtccttcggtggcagtgacttggggcatcggaaacattagacagtccccaatgaatggagcctatagtttttaatcttatccccccctttcttattttgtatgtgtgttggggcgagggcaaaggatttaccttcgtgttatatgtttctcaggttaacaaagttattttgggttctctgccgtgcctgcaggtgttagggagagcctgggtgttgtatgtggcaggaaaaaagcaattgtttctgactccttagctaccttgaagacctctgtatgtttgccgaagagttgaggggacacaccacccgcatagcatgagtgactcctaagtcagagcagacatgggtgagcacgttagttttgagaaagaaactgcctacaacataatcaacctgacaggtctttggatagttttacatttgtgtgttgtgtttaatgttcagcctgggctgcagcttggcgggtatcgggttctgctttctggtttctagtctggctttgaatttactgggttgctagcaagaaaacaaatctatttttaagggaatagaatgtagaacggcgtaggcgtagaagtataatacacagtgaccatcatagatttacacagctttagagttcttagcccccaggacttcctacataaaaggcccgggaagctctagctgcaggttgctggtgtgctcagcacagctttcctttatgcactcccagcttataagggacttcggtttatttgcgatttgccttgcatgataccactttgtatctttcaggaggtcagaggactcttttgtccaggttgaagtcccaaagtgtcagttttacctaagattgtttctcaacgaccccccctccccccgccgccgccgaagggtccctgatttccatgtatcaggaaggtgactgcttctatctatccatgtatatgacattatgtacatcaagtactgaatctgatttctgtgccagccatctgacctgattctttgagacccataaaggtactggttataggtaatagttgcatcccgggagaatagagtggtccaaatactttctctgaattataaagctaatggggtttgcattttagtaaagcgtcctaattgtcagtgatgcaggatcttgctttttaattttttttttttaaatacaattctctaaatgtggtcagtaatgtatggg

SEQ ID NO: 20705 - DNA, 1134 bp, Mus musculus
acgaagacaaaaagaaccattacaactacggctggtctttttactttggagccctgtcgtttattgtggcggagaccgtgggcgtcctggctgtaaacatttacattgagaaaaataaagagttgaggtttaagaccaagcgggagttccttaaggcctcttcctcctctccttacgccaggatgccgagctacaggtaccggcgacggcggtccaggtccagttcaaggtccacggaggcctcaccctccagggatgcatctcccgtgggcctgaagatcaccggagccattcccatgggtgagctgtccatgtacacgctatccagagaaccccttaaggtgaccacagctgcgagctacagtccggaccaggacgctggcttcctgcagatgcatgacttcttccaacaggacctaaaggaaggtttccatgtcagcatgctgaaccggcggacgactcccgtgtgacccgcccacccctctcggcacaggcctcccccaaggtggctgtttgtgtgacacagaacagggtgacccttaagattatagacagtgaagtggagctgagtgcgatcctccctggcctccagaagacgccatgggctagctcagagtgaggggagtctggagattggaatcagggataaggtagaaacagaaggctgactttctcccgaggtaggctgttctgctgccctctgggtttttggaacttctcaagaggcccaagaattttcaagaagctgcatcagcctgcctcttgggaaccaagaaaccagtcatgccagatgtcaaacgcatcctccctcgctgggcactgggccacagggaggcttcttccgggcactgggacctctggcctcccatcgactgtttcctgcccagatgttcctgtgtcctggagcccaacatgagcctaagctcattccattcccctctgtgtctccctcagcctctgtctggccccctggtggagctggtggttgtaaatatcacccattctgaagagaaagctctatggctaactggtgcttcggcctcgagctgtcctggggcctgctgctctccacctcaggagatcaggaaaccagggcaaattcggaggctctgctggctttcatacctgcttctg

SEQ ID NO: 20706 - DNA, 1239 bp, Mus musculus
ctgaacccagagtttgcatatcaggctgctgtagcatgccagccctctgtctccacatcctggacactgggattacagatggctgccacatttcccagattttatgtgggttctgaagatccaagctcctcacactggcacaaggtgcttcacctgatggcccgtcttgccagcctttgccatttcagtggcatttccataatccaatatggcaaagccagccctgctccctagaacagcatcaccctaactggagatacaccccgttaaacaccctccctgtaccccctttccctgagattctggcgactgccaagctgcttcctctccctgtgactttaccttcaggctattttatgtaaacatgtgatgcgtgactgtgtcaggtttctttcatttcacacattttcaggatgaaacatgtattgagattgtgtgtgcgtgcatgtgtgcatgtgtgtgcgtgtgcgtgtgcatgcatgtgtgcatgtgtgtgtgtgcgcgtgtgcgcgcgtgtgcgcgcgtgtgcgtgtgtgcgtatgcgcgtgtgcgtgtgcgtgtgtgtgtgtgtgtgtgtgcagtatgcacatccatgtacattgtggagacctgtggagagcactgggtatcctgctctatctctgtctgccttattcctttgagacagggtctctccatcaactcagagctaagctagaggccagcaagcctcagcaatccttctgtctgccttcttccccccccccccccagcattcaagttacaggcacatgtggccacacccagctttttatgtgggtgctagggatttgaacttgagttggacgtttgatggcaatgcttttataacaagcactcttactcatagagaaagttcatcaatccaagagattccctccgtatgatggctgaataaaacctccctgtgttgatggaccacactgcttacacatacattaactttggacatctgggtgttcccagctgtggacatttgtaagcagaaagaaacagtctcccaggttcctgcttgagttcttgccctggcttcccttggtgatcaacatctggggagtagcaggtgtggcgccctcagtcacagtgtaggatgcctgggaacctgataggaaaacaacctacgcctctgtctaatcaggacaggttcacagctacaggctcattcccactggcctcctccgcagggtcaactgtctgatcccagatatctgtgggatggca

SEQ ID NO: 20707 - DNA, 1214 bp, Mus musculus
ctcgggggatctgctcacttgaaacagtgaaactgtagcttcaactaattttgacactgggtttttctaaaacagtctctgggctccaagaatgtggcataaatgactcgattaagttcaattcttttctaagaaacattgaaagttaattccccccacccccatgatggctattcttggttgtcaacgtgactatatctggtactaaaaaccaaacctagagggcacacctgtgagagatttttgcttaatttgaaataggaagattgatttctaatttggaccttttagttaggaacacacatcttcagtccatccaaagacatgccttcagtccagatctggagttggaaagatacacctttcatttgggccacaccttctgctggaagcctatacaagtttatacgtggaagaaggaagtttctgctcttggcccgtttgcccttgccttgctagctcatccattcattcactggcattagagcctacttcttcaggaatccagtatctgctgaaccagctgagaccagccgaacaccagatcaggcctcctgaactgagaaattactggattgttggactttcaggtcacagacagccgtgtgtgtgtgtgtgtgtgtgtgtgtgtgtgtagaggaattttcatccagcaaaatggctactctagcaagggatcatatccaaagacctaggtctgtgtgatccagctggagatgtgtatgtgtatgtgtatgtgtgtgtgtttgtgtgtgttctgtatatctttaatccccctgactggaaggaatacagacacatctttagtacacaactttaatcccaaacaatgatgtctatttgaggggcagacaaagtgacaaatcagagaaagatctgacagaatgaatcagagataggataagatgaactcctacaggaaaacacaggaaaaagaggctacttaagaccagcaacagagaaaagggggtggggtgtgtgtgtgtaagttttacagagacaggttgcagagagagcaagctagataaaagtgaagacagaaaccagagatgataatgagccagaagattaaaacatattgccaaaatttatatgagcgattcagtcagaagctgagagaagccagattgaatcagtcagcttggaatattaggttgtatggaggctagaagcttccggggttaggcctaggaataattagaacagacaaagaa

SEQ ID NO: 20708 - DNA, 1224 bp, Mus musculus
ccagggacttaatgataaatgctaggaaagtaactgtacactggctttgtgtgagtcctacaaagctgccccccggcttgtgtctggtgtggggtggggttgtgtgtgttgggtgcccctgcacatatacacacattcatatggaggccagagaccaacctaggatgttgttctaggatgggtgttagacatccaacttatgccctcacattcacgaggcaggcacttggcttactgagccatctccctagccctatgtgcactttatttccaatacttccccccctcccccaattctggggaccgacctcagggacttgctcttgctaggcaaagcacttctgtcaccgagccacattcccagcccaaagcactcattctcaacagccaagcttagtaggcacatcattttgtatcccccatgaccagaagtctactttgacttggacaggcactaggcatgtatgctgtgcatgcacatacatgcaggaaaactactcatacatataaaataaaaaattaatgaatctaaaaaataaaaatcaaggccttacatgaaacaagcattaaacaactaaaaccaaacgaggcgcctgtgggaggagaggtaaagcctccggttagtagggtgctggcggctgggttcctgccgcagatcctgctgtcgcaatcccatcctcttctgcagcagcagtgtgcatgtgtagatggggaaagccaggtcctcctgaaagatctgctgggggctggtgagatggctaacggccaaaggtgtccatagccaaatcctaacaaccaaggctgatgacctaagtttgatgctaggacccacatcgtcctttgatattcagacatgcaatgtggcgtgtgtgtgtgtgtgtgtgtgtgtgtgtgtgtgtgtgtgcacagacatcaaatgtaataaaagccactaaagaatcagctcaagaggaactgcaatggtctgtgggtgaaacttaggaacacacccttttcttctaaatgtttacatagtttgaagtcctgaaatcaaatatggaattcagggccttgcccatgctaggcaaactccttatttgtgaatacacatgcagtccttgaagcagacttaggcaaggcactgggaatatcactgtagcggctgggtagcaatcgcccagaagaggacaccattcccagctcttcctggactgctagtcgctcctgtgtatttgcagtgccttg

SEQ ID NO: 20709 - DNA, 1298 bp, Mus musculus
tttttggatgtttgtatagttaggcattaggaatggctttctctatgttgaaagtaactttattgatgcaaaatttacaacaaaattttacctaaaagcatgtttgatagtattcagagatttttattaactttcaatgatagattataggagttttatttttatgaaaatatgtgttcacatttgtgttgcccaactgcaagtagctaataaagttaaagtgtaggctggcgctatacagcctattttccagcccacacccatctgttgttgttgttgaaaagttttattgaaatgtagccatttgtttgtatgtggtttattaatgctttcttggtaaggtggctagaataagctaagccagaaattacatggcctagaaagcttgaagcatttatagttgggccctttacagaagttggctgatccccgctctagattacagtaggtacttatgcctttataatttaatgtattgtcattgcaacattaggtttcacatggttcttatgtacctacagaacggcagaggtgtgctctttggatcagaaagctgtgtgagccctcaggaacgggtgcaggactcatgggtaggaagaatcgaaacctgtatgcaaagctgttactgcatatgcttaggcgaggaatacttgaaggccctttcacacaccgcccggagccaggaacgctgaaaacattgccatcgtacatggtaggtaccaacagctgcaacagtcttcatttctttaaaaacgagtgtgatttatcatccctttgggagcggaagtaatattgagatatatgtgccgcttaatatgtaagttaaaacttttcttctcattcattctttcccatttcactaggaacattattctgttatattttattcacttatattccattatataaagcaaattttaaaactgatcttacttactaattttcaaatttgactcttaatattttaaatactttaaaaattctaccttattaattctttcatatattatttaacatattatcagtttaatggcttttagaagttcctttctagtcagttgaagcagtaagttagaatttaaacgtggtttctattgttgctttattatcttctttgttacaaggtaattatttactgctggttgatgaattgtctctgtcttgctccttgtaaacataaatttgtcgttttatttgtgtgggttttgagtatgatatatgcctaactgtagttgaatacacacacacacacacacaaacacatgcatagacatataaagttcatatatatatatata

SEQ ID NO: 20710 - DNA, 1207 bp, Mus musculus
aagcagtggtattcaacatatgggtcatgacccatttagtaaatttgtttctaaaaatatttacaattatgattcatgtcagtagaaaaactacagttgtgaagtggcaacaaaaagctttgtggttgggggtcaccacacatgaggaactgtattaaaggtcacagcattaagaaggttgagaaccactgctataaatctactagcacttaaagaaataactactcccagatttacttgctgggtagttattctattcattaggtttcttatatagtagaacataactgaaatgtaaatatactagccatattattttaatatttcataatttattatgcattgaatgataaattttatatatttgtctgtcattgaatttaatttgaatatttgaggagcttttgctaaacttaaaaattgatggaaattttaagtgttttctttatagtaacatttttgtaagaatgatttctctgatatttaaaaaccagtccatctattttgatgaaccaaatcaagcacaacccaaagattcgagcccagagaagttacctgactgggtgaggggtgagctgcagacgggcgagcagaggttaagtgactcatggcagtgctcttctggagaggacaacacgctggtgctggcggccagtgatgctcacaggtatgccaagacattatgttttacggttttaaaaacttactcttcttttgcaatcggctcatatattgaagccttttctttctttttaataataaggatttggtttactttatattttcactaatgttgagtagatgttaggtaggtaaaaataaataacaggctttaaaatttactacatagttaatattatgttacattttaagccatttaatggaatatctgttccctcccttctcccccccgcccccccccccccgccgtgtgtgtgtgtgtgtgtgtgtgtgtgtgtgtgtgtgtgtgtgtattttgttgtttggaaagtgtgcttgagaatctttttttttttttttggtttttgagacagggttctctgtgtagccttggctgtcctggaactcactctgtagaccaggctggcctcgaactcagaaatctgcctgcctctgcctcccgagtgctgagattaaaggcaagcgccaccactgcctggcgtgcctgagaatcttaagtaacacaactgccttagttagggtttta

SEQ ID NO: 20711 - DNA, 1176 bp, Mus musculus
gaggcacagctagttgattggtcttcacacgcctggctattttggaaaaatatgtgaattgtgcactaatactgtagctgtttatgagcaatgggcattttatggttaccgcattatgattatatttgtgttttaacatttcacattagaagctagatatggaggtttttcaggtgagaacacagtagcagatacatagacaagaaaaataatgaatgaaatgtgtctacatatgtggaaaaacaaatgggtaagattgaaagatgcaacatagacatagagagttagatgtggttagagtcagggagagttcaaggaggaagacgttttgctcagttagaaaggcatccttggagggggagggtatgggggacttttgggatagcattggaaatgtaaatgaggaaaatacataattaaaatatgtgtgtgtgtgtgtgtgtgtgtgtgtgtgtgtgtgtgtgtgtatgaaaggcatccttgtagaagttatgggttgaggaagggagaagttcactcacagagtatatcagactgtatcagactcacaccgtttggaaacaaataactaggcagaccggactgcagttataatatgctgtttttaacagtagtagaaacggtgggaaaccatcacaaattaccttgccaatttgaagatgtttatactctgtatacagaacaattcacaactaggttcaaaactcacaaaaatgtgtgtgtgtggacttgaatattctatgggatctttactggtggtgtagctcattaccaagtgcccatgcatggtcacttataccatggacaacaaaattatataaggtcactgcattgtgcttgtatgctaaattaatttgctttggataatgttcttatgggcatacagtgtttaatcattattaaattctacaaacattttataaagttttatatagtgtgcattttacaaacaactatatcaagatgtattaatgagatgtatgcattcatgtgcatcgaagtacaaatccatatggaaatccatacaccatcattagtaataaaagtgtggttcagcaatttaaaataaaagcaagaatgttttcttttcttaagattatttatggactggagagatggctaagtggttaagctcactggctcttctttcagagatcctgagtttaattccaatat

SEQ ID NO: 20712 - DNA, 1151 bp, Mus musculus
ttggttggtatttttaagagactatacctgagctgatactccataagcagaaacttttccacagtagaagaaggatatataaagaagtaggtgatggcattggtagcatgagtgcatgtccacgggagcccgcagagaagttgtgtttacagtgccgttttgtgatgtagaagaaacgagatggagccaagagcagctggattataaagagctgttttcccagttaagcccttgagccatatcctttaggggagtagaactttagcatgatttccagctggtcctcctgtcggatctgccatattagaggagaaatacttgagactagcatgctatttaaatgttctagggagagaataaaggctaatttaatcagtttcttctatgattatagaaatagcaaaaaacaatgaaataagagggttttttttagaaaagtaagtaagtgaaagctatctactaaatgtatcatttagatatcaaattctaatatggttcctagaactggtttaactatattgccattgtttttgacagttcagatccttatccgtgactgtcaggttatcagagaaactaaagaaaaccagataaccgagctgaagaagatctgtgagcaaagcacagagtctctgaataatgattgggaaaaaaaggtaagctctgaaagtcaggcccaggactgtgcccatctgagagagacatgctagcaagtgcagaaaatgcggaaagcttcaggagaagctcgaaattgctggtgctcctgttctggtatactttcatctcaaagtctatattctggaaatagttttgttttaaagtcatatttttgcttatttttaattgaggtaatgttttgtatttttttgtcatagccaataggttttagctaatatgattatgggaataatggtttcaatttgggatttgtgtcatttctctcttaaaatgccagtgtcattatctagcccaggctgaagctgacagtacaaagttgttgtgatgtgagtagaatccgtagtgggtagtttggcttgcacgcactggggaagcatcgaagtgttgatactggggcttagtgatcatcttggatcacttttggttctaagtgtatccctggtatgaaaacagacttcagaaaattacaggtt

SEQ ID NO: 20713 - DNA, 1153 bp, Mus musculus
aaaaacccaggagaggacattacgtgaattctaagaacttgatgttgaatattgaaaaggcagcttccgaggaatactcacaatagcacagtgtatgtattctgaccaggtaaagctaggcagtgtgatggcggttatgggaaatgttcctccccacatggcatttagctctaggtgggaccaggattgaaggacacagacagcaacaaaggccatgggtgggacgtgtaggaccagtggacagttaacgtgtgtattcgttggcctgtggagttgttcctttgtgagttccctatttttatctctgcccatttctccatactaggttattgctgacatggaggcccaggttcataagctgagggaagagctgattagtgtgaactctcagcggaaacagcagttgatagaacttggtcttcttcgggaagaagagaagcagagagctgcaaaggaccatgagactgctgtcaagaagctgaaggccgagtcagagagggtgaaaatggagctcaaaaagacacacgctgctgagaccgagatgactctggagaaggtgaggagtgtctgggaggactgtggttaggctacagtgcggatttaaagcccactgtacctgctctggtgttcatcttggaaaggtggtgggcgtgggctgcactctttagacttagaggagcagtttgaatcttgtgctgtgtcttcagcacgctaaagtgctataaggaactgcttaactttcttttgacttttatggagagatctctttcataggaattcagtacagtgatagaacagtcttgtacactgtcacataccatgcactctagggatatttgggctgtagctctgaattttcttaggcttagaatgagttgtacatttcctctaaactgttgtctaatagtcatttttagacttcatagtctctctttaataacactaacatagtgacaatgtatttttctaggttattattttagtacaaataagttcataaataaatcaatataatatttacacttttggcttggattatattcaagttgcaatcttgaatgttcttttgaaaaatttagatatttatcaggtactaaaagtgaattgctgttcatcacagcagctataattgttccctgagctcctttattaa

SEQ ID NO: 20714 - DNA, 1573 bp, Mus musculus
agcaaagggagtgagactttgactgtcacagccaatggaatttttcattaagaaaatcaatgctcagtttggagagcttgctctgtggagacggtttcctgctttcagttcctagcacccaacttaagtggctcacaacagcttgcgactcctgctgcaggacatccacagcccttttctggcctccccagacacccacacatgtacacaaacatacagtcaaaaatgaaataaatcttttggtgaaaggaagccaacacaaagaacttaaatagcggcatagtgggaaagccaagcacgctctgtgggcaggcagcatggagctctgggtctgaaccttccacttggggccacagtcagcgttgttgtccgcacccctgacccccagtacagggtcaggcaagggaaagctgaagcccagcaaagaccgaccatgtcagcccataagagaacatcttcagtgaatcagataagattgccttcctagagggagaacctcgtgaaggtgatggtcctcatgcaggcatccgacgagtgatagtagcaaataatcattcgagaactttgaaggccgaagtggagaagggttccatgtgaacagcagttaaacatgggtcagtcagtcctgagagatgggtgagtgccgttccgaagggatgggcgatggcctccgttgccctcggccgattgaaggggagtcgggttcagatccccaaatccagagtggcggagatgggcgccgcgaggcgtccagtgcggtaacgcgaccgatcccggagaagccccggggagagttctcttttctttgtgaagggcagggcgccctggaatgggttcgccctgagagaggggcacgtgccttggaaagcgtcatggttccggcggcatccggtgagctctcgctggcccttgaaaatccgggggagagcttgtaaatctccgggccgtacccatatccgcagcaggtctccaaggtgaacagcctctggcatgttggaacaatgtaggtaaaacaggacctggcatggattgagggttctccccactgaggttgcataaaaggctgtgcataagtgatccaggcctaggagctactgaccattcccatcctcctcctgttggagatgaagaagcagaggcaatgaaggggcgtggcctgtccgaggatactcagacagcatagggcaaagccgggacatgtacccactgtgctttactgagtctcagtttctaagaagtctccactgccatttaagtcatcagcctccagctagagctgagctcacatgagagcatagcataactatatgcgtatagctaacgtaacaatggagtgggagagatttggcagcagaagccttgagtgaacatagtgcctgcattgttccatgtgccatgtaccatgtcagatagctgcaaggacatagagtgggtgaaatgatgtgcccagaactctggggcacctgtcggctgtggaggaaacatggtgaaggttcttggctactaagcttgctgtcactgtcaccagcatcttccttctactacaagtagccagttcctaatggaccctcaa

SEQ ID NO: 20715 - DNA, 1200 bp, Mus musculus
ctggaagtgcctgaggagggaggaggtgagggagcagagcagattcacttgaagtcaggcgacttctcatttccctttgcagcactttcaaccacctggcttagttagcgaggtgtcgttttttttcagaccttcttaccattttaacagaccgtggtgtctttgagtagcactcacaaggagaggtacatgagttagttagtgacttaggtaaggttagttgatagactgcttacctagtatgcccaaagcctaggggttgattcgcagcaccacgtgaacggtgcgtggtagtaccacactataatcctagcgcttaagaggtggaggcaggaagtcagttcttttcctcagtgatgtaacaagttcaaggccagcttgggacacacgagagaactctgtttcaaaataattattatgtaaataaatacacaagagtttttcattttgtacagctgttccttcgtatcctcagggtctgacaaccaacccctgggatgacagaatcccagtgtgcagtcgctggtataaaatggtctagtatctgcatataacctaagcacaacctgccatgtgctttaaattacctctagcgtactcggactgtctcttacagcgcaaggctgtgtgagtagctattgtgctttattgtttggggaataatgacgaggagaagagtctgctcagtgcagatgggtttcttgcttttctgtgtagcctaggctagcctctaatttgccgtcctctgtgtgctgccgcgcctggctccagatagaaactttcttcctggcatttccagactgaggtcgtggaacctgtggatacagactgcacttggtgatcactttccaattagtgattgagagtgggatgtgcccttcaggtcttcattaagcatgcattgaagttttgccgaatgtaatatgttcgggccctgacgagaccataggagagtgcattgctgatttgccttcctgggaactgtcatgtgagaggagtgcagcagggcttcagttgacagtgctgttcctcactgtgctgtttgctgtgttccctggcttagaggacctcagagaaggcagggagttcacaattcagacccaaggcagtagggccccatagccgtgcctgttaatcagtccctgcttttctgcctctcttgctaacagagttaatcagatcacagcctagagacaggaa

SEQ ID NO: 20716 - DNA, 5278 bp, Mus musculus
gaggaccgccagaccaatcgccttacagaatctctgaacatttttgaaacaattgtcaacaatcgggttttcagcaacgtctccataatcctcttcttaaacaagacagacttgctcgaggagaaagtgcaagttgttagcatcaaagactatttcctagaatttgaaggggacccccactgcttaagagacgtccaaaagtttctggtggaatgcttccgggggaaacgccgggaccagcagcagaggccgttgtaccaccacttcaccaccgcgatcaacacagagaacatccgcctcgtgttccgggacgtgaaggacacgatccttcatgacaacctgaagcagctcatgctgcagtgatgacaagactcgctgttttaataccttgttgtgattttgattgttttctgtttgtcttgtttttctctttaaatggcagtttacaacagcagttagaagaatctcagttgtgtgtgtctaacttcttggagaacttagttcatctgtggcctttagtttgtggctgacagctgctgaattaacccattgccaatatctgctagaatttgggctttgattggtttcactgtggcttaccttcaagtccaattataacttcctggcaaccttacactaggtgtttttcaggccttgaattctcataactgtcctgcagttctaagaataggcagtatctttaagaacttgtagggatgagagtatgaaaattcagctctaaagagagagagtgccttacccagcaatgacatgcctccctatgtgagccctggtctggaagggctgttagagaaaagttttagggaggagtctcggcccacagaggcttggccccctacacacacagcagtagtttgttttccctcaatttctctaatttctgtagggcagcagtctcagcccacagaggcttggccccctacacacacagcagtagtttgtttttctcagtctctttactttctgaaggtaatgtcttactgcttaagtttacaagatggatctcagcctgatgctgatgcggtcacaaatggtacatgtgctatgttgatctgagatgagcagtgacacgcagtttcctttgccatacatgctgtcactaacttaatgtgccatgttacaacatctggagagggcaagcaccctggtgacggacatcaccatagcagccccagagtgtgactttctggtcctgtctccttggactttgtgccttgctggagagaaccactgttgggtcttcttcctttagccccactgtctcaacctcagcagctctgaactgtggtgctctcgggcttctcttgtccccgagagcttggtgggcagcatttccctgtgaactgttcaaaaaggcatcctttcagtaccctgtccctggttagtgtctctctgtgacagagtttgtatgtgttgtgtgtgtcatcgtgtgtgagacacagcttcattgaggtacattcaaatgtcttaaggatgcatctaaggataagcaatttttttttggcccatacttaaggaggtttgccttcacacacacacacacacacacacacacacacacacacacacacacacacacacacacacacacacaccattgctaacttaaaccatgcccatgaggtagcttgtgataaaatacagtggctggtgtacaaaaccatttggcatgttccaactggcctgggagtttgtagaacctgagcttgtccctgctgtccctggagagcacacgagggcagtgaagcctgttttactgtgtgactattctcaggcaagaaattgcgccctgaaagactggctgactatgaggcccaaaagcagtggctttcttcttttcttgctggagggtgccagagctgggccctagtgtatgtatacttgagagacctgacttgtcctggatttgagctttcactgtcattctggttataaagtccagtgctttcttgccttggtaatatcatgagcttaagacatgtatgtcagtatcacagtgcaggtgttgttagcataattcaccataattcatggttctacatctggtcctttttctgtcaaaaaaaaaaaaaagatatgtcatttaaatgtatggttagcatcactccaatgctgatgagcatttgagtgtgtgtgcagtaatgtgttctgtgttaatttagcaaacattattgtgcattggccacaactaagtgcagtgaaggcagcagaagtcagtcccaccagaaagcagttgtgtctggttacatttaagctctgtggtgagcacagaaattctgcctgacagagcaggatctctgacttcctccattgtgaccgtcaccaagaaaggaccagagctcctgactagagacagcatccttccgggtccctgcagcttccttctggagcgtgcagcatcttagaacccagtgcggtctagatccattctcacgtggtagattacttacatgccgtctccacaggattggttagaacttaaagaacagtgaggcccagccagaaagccacggtccacacttacagtctgacacttacacaccctgaaagtcaggtccttttgtgaagtgaaatactgttgtgtgaagagggcgatggaatttagccaacagaattgaaaaggtgcctaaccctccgtgtgctgacttctccctcctggcccctgagccatgccttggagctgaggctctgtggggcattggtctgtgtatgtctcgggtgcttggagtgactgtgcctaatccagactcctccttcaatcccgcagccttcctgcttactgacagagaaccacacaagtgtcttggttgacttcgaaatctttttatacatttcagagttgccttataaataagagaacaacccagacttagaccttaattttctttgtaatggggaaagggctttgttccacattttcttatactctcaactcaagatgtgccacccagatatctgtctgtaatggcctgagatgttgctctctgccaaatcctgtctgtattcaatagaagcctccctatcaggttttctatctggaaagggtacttgatagccaaagagaagcttcagccaagccagacaggatgtcctgaagaggagcatgttgggtttttttgtttgtttgtttgttttcctatcgcagtgcattgtgggtactccacacccaaagggtcctctggtgaagttctcaagttgggactcaacagggaaatgcttgttacgttagtggcagctgttgctgttactaaagtaagagtaagaccaccattagtaccagaagtgacaagaattgttagatccagcaaaaagcatatgcccccaagtaactcataccttctagtgtgtatgcccaaacgcttgggcatctgttttgatggcatgcatttctcagtgttggtattcacatccggttatgcctcgtttatatgaagaataaaatggccaagttatgcggttatatcctgagactcaagctatttggaaaaccctcaaattggcgctttcattatttaatgatacatttaggcaaaaccccaaacaaaccatctgaaacctgactccgaggtgcaatttgttagcgatgttatttttctcgtttgagaagaccaagcgtcagtgttaatttgaatttcctgtatgaacccctgcatcccacctttaaggcccagtcaaacgtttgtaagacgtcccctaataaacctagagaggctgcttccttaccctctcatttcttttcattttatttgaatgacggagagtgaagcttttcaggtccttttatttggaaaaatcagactttggctatctgtctctttcctgagatttcagcacgttaaattccatgagtcaagggatctttggttcttgctgcttgaatgaaagtttttttctgctttttctttttttccttttctttttaaaaaaaaaaaatgtggttggcttttcagcccagaaagcatgagggcacgtgatgcccgttttcttatggtacgagtttagggcttagtcagtttacaataggattgaattttgtgtcaaaacctgatggtggctcctcagataccatcagctagatgcttctagccgtgcccggcaggcgggcaggtatcagattcatcaaagcagtgttcatccgctaacattgtgccgtcctcccggatgtagatcagcaccggaatttacctgctcatccctccgtagagcaagcagtcaggtctgaccagccagttttgagtgccttgggtggcacatggcattgttttgtatctgttggcttgcatatttgtgcttttgaggcagggtctccttgggtaccccagagtggtcttgaatttgagatcctcctggctcaacttcccaactgcagagattaccacttgttttgtctttttgttttgtttttgttttttaaataaagcactagtcatgtgatagcgtttagtgggctgtgatgtgacttttatgacgtatgctatgttaatcttgatgaaattgccagatggtgtaaagcctacctgaatctacgaggtagaagttttgggtctgtgagggtcactgatggccacaaaccaccttctcggtatgcaatccttgctccattcacagatgcaacgttgccaaagggagtgacgattttgacactaaccgtgcctcttcaatggcaccggggatgacaggggaggaggcagtgtgttcttgttgggtgcctatggtaatgaagcatatactgtgtaccttctcttcacctcttacttgaaagcagattcgcaaaatatcctgaatgacttctctctcttacacgtgagctcacaaggcccaagaagccttagtagaggcacacagtgcagaccttatagacggtgttcctaacgagacatggtttatgctacactcaataaaagtatttgtgtctggtagggtttgtttgtttgtttgtttgtttgtttgtttctccattcatctttctaaaactttcctgaaactaagctggttacagttgtagacaaaaaagatgggttttggtcagagatttggttcaagagtcgccgtaaattattcctgtaggtagatctaagagtccaaaggtatgctttcatttcaccaaacaaattaatatgcataaaggccttttacttttgtacatattttgcaaaagtttgtccctctactattaatatttgctttgtaaaaattactgacatttaataaacatttataaatgacctggtagcacgacgttattgagtatgaaggg

SEQ ID NO: 20717 - DNA, 1406 bp, Mus musculus
gtggccagccatcaccacaagtatttcaatagaaatgataaattgcattcatgtttcctatttttcataatgcaagaaataaatgactgttgtgtctttaacttaaaccactatttattattaagttattctaggatgattaaaacgatcaaaagaaagggccagcgagatggctcagtaggtgaagttgcctgccaccaagtctgacaatctgagttcaattcctaggacccacacggtaggtcaacttctgtgagttgtcctctgacctccacacatgctatgacatgcatgtgcctgcacacagacacacacaaaaatatttaaatgtaaaaatataatctaataatcaaaataaataaaaggtgattggaggtatacaccacatatttttacctctgttctgtggctctttaaatgcttcagagagcttttctggtctcataatgtaagttttccacagcccaagttgtaacgattcttcaggtgttgttaaaggcaatgttgtgctatttaaaggggagggggataacagacgacaaatcgcctcagcttttacatatatcagctaagaatacttgaggatcttctttgatcagaattatatttcattggattgttggaacatttccagtggttttttgttgttgttgttgttgttgttattcgatctgtaactgttgttgaagcctttcttcattcatctgaaatgggagaaacgcagccgtcaccatcactgagttacaagttgcaatttccatcttctgtagaacttgattgccctaagttgccatgggtaccgagtggtacctggtcactgctgctggtgagttacactatacagagttctgcattctagcagatctctacaaaggggggggggggggtgcagtgtgagggtgagggggtctgcttcctcgcctgtgtgatggcatctccccgacagggcggccgatgcctgctgctctacctttcttcatctttactgttaaggacaactcagggggaaacgtagaacaagcctagtctggttacaggtacacacacaagcttgaatctttttctctgcactgagacgaagggggtgtggctcatcaccgcctgccacattcaatacagcatcttatcagccatagaaataggacaatctgtcaaactttggggagggtgagtgacaggacgaaagacaacgtgtctgtccaaaaaaaagcagactgcacctgaaatgggatggatgtagccaagctcggtgggacccctcccccacccccacccccccgagcaatgctttagtttaggctcctgggcaggtttacagatgtatgtgacttcggcactttaaaagctattttgtactacgaatgttcgagacgatttaatatttgtaactgatttctgagggatca

SEQ ID NO: 20718 - DNA, 1186 bp, Mus musculus
ctgcctttgcttcgttgcagactttctcacctcacttgtcatttgttttagtgttcagaatattagttgggtctttggaaacaaaaggtattttctagctccttgtcattcacaaggtaaactcagctgagccgttatatggataaagctactttgaacctttgcaatggtgtgcatggggaagctgttttctttagttacgtgaaggtttgcctcgcttgatggtaatgttgagaattgcattttcttagcacttttataaaagctaacacagtaaaaggaaggctctgagggccgtctgcagaagtaggcgagtcctgctgaggcttggagccactgaggacagctgctgtggctggccttcatgtgctgaggacacatgtgctgtggctgccttcacccggggcttttcctgggatgtgcagtggggactctagttggtagcatctttgtagagtttggttttgctcaacttttatttttttactttattttttagcaatagcagatatatagagaattcttttgattcttctatttcagagtctctggacaagtgggagcgtctcacagtagccgatgcattggagcctgtccagtttgaagatggacagaagatcgtggtgcaaggagagccgggggatgagttcttcatcattttagaggtagagagctctgcgagtgactccttaccatgcgtcacctaaaggaggggcagccagttctgatttgtagctttagttttatttagtcgttatcttttacttcagaatacagcttgctgtgtatagtctgctacagttttaaagaattagagtcagaatcctgcaagggccctagacatgattggtgagatggctctctactacactaaaaagcccctcagccataacagatacggtgattctgagccaaagtgcttaggctagttagtaatgattgacaattctaaaagtcactgttactgaaacatctccctatcatcctgcttgccaagcaggtccagatggcagcttcagagtctgaactcttgtcgcactgcagatgcagccatggagatgtgagccctgagtgtgatagtctttaaaatcttatttccaaagatgcagcaggcttgagcttgaccctttacgtaaactttactcaccggagtctgaactcctttgtaagtgcctgagcttgatac

SEQ ID NO: 20719 - DNA, 1487 bp, Mus musculus
tgtaacattaactttattcagttaatagatgagcacagaccaagcatgcatgcgcacacgcacttgcgcttatgtcctacatagcctcgactgcctggacttcattgtacagtgaagcttgttctaactggtcaccttcctgcctctggctcatgagtgttggtttgtaggcatgactgtaggggctgtgttatctatttgctagtaatactttttaatgtacaaatgttgtgtggcctctactaagttagtagggaagttgcatctttgttcacttgctcaggagtggaccctttaaggaaatagcttccataggtgatagtcgttactgtctcttttccaggtgaaattgccctgctgatgaatcgtcctcgggctgccactgtggttgcccggggccctttgaagtgcgttaagttggaccggcctcggtttgaacgcgtccttggcccgtgctcagacatcctcaagcggaacatccagcagtacaacagcttcgtgtccctgtccgtctgacccgcgcctcctgtgcctcctccccagtccatgcttcactcacgcagactgctttctctccctagccgcagcgcccagtggccactgcttcacagcttcttgtctctttatactaaaagttgctttattgcaccatttttcattgggagcgttattaaatgctcattcacaaataaatagagagttgtatggacttggctgtcaccgcttctctgtgcagtgctcgtgttcaacctgggcagcaagtgccgcgctttttgctgagggcggtccctgcaccactgaattaccgtaatgatgtaatagctgtgcagggcttttaagtgacacaggtttccatttccatatgacacaagtgacatacttagactgtggccatgtttgctgtatttctttatagagtaaatgattttaacctttaaggattagaagaatgaatatagaaaactcctagcacagtagaaagacatctgcctgtaattaagctagtttaagtgtgggagtgcccatgttttgctaatcaccaggcactgcagctagttcagccctctcagcctggtttggtgtgtctgttgctagtgtttcttctccaaccctgaaatgttttggtgtggctggccgtctatccctgcctttaagtttgaaatcatttgtagatggcaagtactggttgtgacttcactgcacctgtctgagctcacagacgctgataactttatttatccagctggtgccaaatcctgaggatgagacacagaaatgtgagaatttgaggtcttcactctggggagttaaccgtggttaactcgtgtgatctgccctcagttacagactagggcgttggaattactgagaatagacaaatagagcaagctccagagagaaggggatggaggcagtgctgctgaaggtggatggcggtcaggtgtccagaagcaggaagctgggtctgtcccctgggtttctgttag

SEQ ID NO: 20720 - DNA, 1896 bp, Mus musculus
tgcattcttacatattacttgtagccgtggcagttagcttctttgcattttctttttctctgcagtggaatgtgcgtgcaagacgagtcacgaacccagacattaacttgtttgttgctctgtcttcagaactacagtggactcgtgagaccaaagctggcattaaaaatagaaggcatatgtaaaaggaaatctatgtctgtgtatgtgtgtgtgtgcatctctatgggtacatgtacgtgtggattggattcccctggagctgacgttaccagccattgtgttggttgatgtgggtgctgggaactaaacacaggtcctctggggaggggggggatctgtaagtgctcttaactactaagctatctcttgatcctattttattttatttttatggtgtttttgagacaggatcttatgtatgccaggctgacctcaaacttgttatgtagttgaggatgaccttgaacttgcaaccctatgacctccgtctcccaagtgctgggatgctatgggtacatcatcacacctggtttttatgtggtgctgagaattgaacccagggctttatgcatattagacaatcaatcactctacccgctgggctgcactgccagttccactcttacccactgggctaaccagaggtgtgtccagcttacccatatacttgtttgtttccctaagagtagtactgaggtagtttagggttcaaagtcctctggtaagcagtgagtgtagaggctttctgttctcattgtgaacagactcatgctgaccacttgaattctgcctctgaacttgggtggggcactcctcttatggacccattagtacattgctgattcaagaggcctatacaaaatatcacctttctgaggtgatttctcttgggttgcaccacccccacccccctccgaatctcagagcctgcatccagaaagccatgtcattgtctgctgtgccagtctttgtacccttcgctctaagatggcggtcatccagagctttctgctatctcctttaccaccttcagaactggacatatttggaagttatagtgtctttattatctacatgatatccacgttatctgtatcatctacctctcagatcacacttagaatgatacacaatgactccttaagagggcctatccaaaagtttgatgaggtagtccatccatcgaaaagaatgtgttttgttttgttttgttttgtttcacctgggaaaacaaaacccgacttcaagaaccttcagaacacagctctcttttcacgggaagcatctcaccaccgaatccagagacgaccatttccctgaggctttgctcttgacagctatgcaaatatcagcctcccacagcaggatctgtggagacagggcattagttgatggttgtctttgcagttcctgatccagacttcacttttcaggcaaaactcccatggaaacatcttcctattcaaaatgaggaggagtctggtttaaaaagatacggaaatcaaggtcaaggactttgtggtggggaagttttgttttgttttgttttgttttgttttgtttgtgtctgaatgcaaatgtgctgatggaatttgtatatttcaggcattggagagatggctcaatgggaagagtgcatgatgttctcaacagccacatgggaaggctcccgactgcctctaactccccttccggggaatcgcatgctcttttctggactcctctggccctggcatgcatgtggtgcatacaacttatgcaaataaatacacacacgggttttttttttcctttttaaaaaagaaatctttaaaagaatttacatacacacagcctactattgggactctcagaaatttgtgaccataggcatcttcatgtgaacttggcagg

SEQ ID NO: 20721 - DNA, 1217 bp, Mus musculus
ttctgagttccatccattttcctatacatttcattttttcactatggctgacccaaattccattcatatgagtaccacagttcattatctcttcaccagttgatggctgactccatgtccttactactgtgatcatagcagtgttaagcatggatgggcaggtacctctgtagaaggatgcagagtcctttgccaacccttatgctttaaaaaggagcaaccggacaagtcattcagttcccttaggaaatgcttatcagcacccgtccttacatcctgtgcactttacgggagacacatttcatttgtaaccatgattgtttctttccctatgtcacaagtcaactttatttgcaaaccaccgtgtgtattctgaaggaagctcttggggtcaaagcaaatatgacttgatgcaagattgagatcacgtggacgactgttcttggtacccccccccaaaaaaaaattatgaaagaagatactagagagatgtccgcctctgcctcagaactcccaattccagcccccttaaacttcatgtgtggaacgtttagaagatgaggccatgccgggcatccccctgtagacgccatctgtgctgcctgtgccctctgcttctgaccgtcctgggctagaatcgtttttctctctgtgggttctaggatctttttctttacaaaggaggcaggctgagtcgcagaatatggaattcattcagacttttgtgcaggaagggcctcctggaaccttccaaagcctttgaggtgagtgttagatttaagtcctggccctccattttcatttatgatatacaagagtgaaggagctgtggaggtaggcttcaccttgtgttttccttgatggagacagacagggctgattttttttcccccacactagaaacatcccttatcactccatggtgaaaggaaggtgggatatcaagtaatggcttctgtagagccttggaattgtgtgttccaaacgcccattttgttgttcagctactatgctttgcctctcgtctgaggtggactcatattcttatgttagctgagctttcttctcatccaagttgaacagggtggttaggtttttttgtttttgttttttgtttgtttgtttttgttttgctttagtttaacagcttgttgaaactggcaataatatctcaaaatcaaggcaatcagtagttcatgtgtagaacttcaggtaga

SEQ ID NO: 20722 - DNA, 1187 bp, Mus musculus
gggcggatgacaccagacctagagattatatatgctcgaagttccccctgttttccaattaacaattcagccaagagcaaggggtgtgaacacttggggtttgtactgtgcactgactggcaaactcgttagagtgatttggaaactgaagagctgaaaactaatagatcctctcagggtctgtgagtaactggactgatttgtctttaactgtagtctatgtacctaaaactaaatcgtgtgtgtggttgtgtgtgtgtgcgtgtgcgcatgcgtgcttgtgcgtgctcgagagtgcacagatatattcaggactctaaataaaaagctgaaatgcagggttgtgctttcgattttgtgcagtaaatgaggcagggagacagagaagctcccgggagggactggcagaagcggccgagttccctgggtttcagtgccaagtggtcctgtggttagaggggagtcaggttgttaggcctggtgacaggccactcctcactccagggctcctctgggggcctttgctctagctttcaggatgactcatgattcagtgctccaaggatatgatggagaacctaagaagacggtgtgtgtgtgtgtgtgtgtgtgtgtgtgtgtgtgtgcacatgagcacatgcatcacatgcatgttctggtctacatgtgtatgtacatgtatgtggaaggtataggagtgagctttgggaccaggtgtagagaagacatagacattgggtggatgcctcctgtgttctagaccctgagctaaattccacaacctcaattactactccaggcaagtcatattatacccaaattataagcaggggaaggggctttttaagggttgtctgggtggaaacagagccagaggacaactcaggatgacacactcaaagcagacattcaccggtctttagtccccctctgcattaattattttcctcatggcagtaactaaaatccctcagcttgttttgctcccaattgggaggctacagtgcatcatctctgggaaggcatggcagctgtgatggatgtggtccaagctggatgaaccttgcagctgctcacatcatggtggtagatgggaagcagagggctcaggctggaagcagaggcaggttatagcccccagcatcagctcatagtgtcctatccggggagggacatgccacatcgaa

SEQ ID NO: 20723 - DNA, 2551 bp, Mus musculus
agtgtgtgtatgtgtgtgtgtgtgtgtgtgtgtgtgtgtgtgtgtgtgtgtgttcatggaggttaaaagtcaaatccctggaactataatcataggctgttgtgagcctactgatgggggtgataggaaccgaattcctaactgctgagccatctcccagtcctcctgccctctcctatttgtttgttcaagcctgggactggagagctctggtcaaatgatttccctgtgctgcagccccgaccgggaaccacagaagaccgtgagagcaggctaaggagggcgtggcttgggatcaagagggagcgttcgcttggtgtatggtacccagccatcagtgctgccactgttggtagaatgctctccgttgtggttggggtcatcagcctaaggtcagctaagtctcaccatcttcctctccttccttcctagtggcaacgggaagctggcatcctgggcctccatcctgggatttgtggtgatgatgtcccttgatgtgggcctcggctagctctgacaaaccgtgggactccgtgaaggaaagcaccaggcttctgtaggaccatgagcctctcattacaacccggttcctttctcccctccgtctccttaccccaaatcagctctgatcacattttgactcttcgttttgctttggagggagacgctggttttctttgtaatctcaaggtgtcatagaactgtagatttgtgtgtggaccactgagtggaaggcatctttcttcagtgggattgtcgaggctaacccctacttgtcccacctccagtctccctcactagactcaacttcaacacctcagggtcacctccagaagtcagctcctgggctagaagtcctgagcatgttggcctgaggttttggagcaggctgccagggccccttgtgctccttctccatagaccctctgtccacctagaattctgggacagaagccacatgaacccagaagcctgctttctgaggctgagccagctcaaacagggtctgcttcctctagggaggcgtgcgcgggaggcatgcgcgggaggcatgcgcgggaggacccacacaccaagggaaggaaggcagcttgtctctctcctttgtcctaagacaaggattgacattgctgatgttagagcaatatggaaatgagggtgaccctgaacacgcagcgctctttgaagagtactgtaagcaggttttaagctgagcttccccctgtcccccgggctctttgtagatgacaagagcaggcactttgtagtggctcccagatctcctagctattaatcttgatgtgtttacagcctttgtttttctgagagacttgtggataccagcaaatggcaaatagtcaatcccctcattgactaacagggttacttcagtcaactctagggaatgatattcagggcctaacaaggctccttctctgctggccacttggaaacttattacccagagcccctcagcttcagcgggctttgtgggaatctggccagcgggcttctaatgggaaaggaagggggctggggtaagaagaggtatttttacattccctttcttaaaaaaacttaaacttctgagatgactggacctagactacatgctaacctaccccatcatacatgtagctccgccatcagctctcccaatgcatctgagccctccatggctgagaagcatgtgggactcagagaacagactctaccccagagcctggcatttgggtactgactgggctatcagtatcttgcctctgtgtttacatgttccgtctctccaaggatggatattgtagtctgtgaatgctcaagaccccagaggccaacctcggcggggtgtgtccattcttctgacgcactggtgatcaaaggcttcaatcacacattgaagccatattcagagatttgattatctggtgaggttagctggtgtggtgattggcacgtgcgtatatatttttattcttaggtctccatgtgtagttctgttgctgcaaatcatgctttctgccggataagacctcgtgactgtgattaatgtcaataaagggaattttgttgcgcatgagctgtgttccgtgcgatcttcaacaccagcgctttctagagctgctgaggcccgtctcccacacaacgccagcaggagtgaaagaggtgctcacagcaggatgagtggtcagcttccaggctgcaaaaagccacatccaactccagcttagttaaacaaaggtgactgatggatagatgttaagaaacgtggaggatctagtggagagtcaggcttgaaaatgaggtgaatctaagacagagatccaggctgtagcccagtggtatttggaaagcagttaactccattagatgccatggcctctggtgatggtgactaaatattgggcagctcttctgaaactctctcccttatccctcccaacagcatcaggagaattaggtattgcccccatccttccggttctgattccttcttcaaggtcagggttaggagagatagtcacccaacagaggtttgcatatacatacagat

SEQ ID NO: 20724 - DNA, 1157 bp, Mus musculus
gtcttaactactgagccacctctccagtccttcctttatgtttggagggtgtcagtttcaagttaataaaattgacaactgacccaagaagatagttcttgcaccatacacacttaggagacgcaccgagctcggtctctgctgctgggtcaggtggctgtctgtcagttgtcacttaaggcgccagcctttgtttgtcaaaacctcccagtagagaagacgaatcgacccctgtatccttgtctgtctagtctgtcacccttagttgcaaatagcaagctaggtcagaggcgcagtgtatccacagagaggtcgtgccgttccagcaaatcctttgggatccctggctaggagatggctcagtgggtgaaaaacacttgctacatacacagtatgaggacccaagctcagctagcacccatgtgaaaaagccaagtttggtcatgcgtagtcctgcaacttgagcactatggggaacagagatgggaggataacatctgctggccactaggttcagctcaaggttcagtgagagaccctctcttaagggaataagaaagaggacgatagaagagacacccagcatcttcctctggcatgtgtgtgtgtgtgtgtgtatctctgtgtatgtatgtgtgtgtgtgtgtcccatacaatacacatgcctaataataaattagcttaggaaatggtgagctgctgtgcctccgtgttttgtaaacaatataaataaaaacgggaaagaggcaaagcttggtaaaggatgctgggcttgctgggaacagactgaggagaccaaggctcaaagtccccgtgtgtgcagacacacagatgatccacgaagctcgtgctaacatcccaccacctcctgcttgtaagccaatggatggtgtgtctgcacacaccgggactttgaggcacagcagctcaccatttcccaaactaaaaaatgagaagttgttgattcacaaaaagagtccaaggatcctggcttcgggcgcagtttgctccaggggcttaacgtacatctttgagcttctgcctatttttctttctcagttctgccttcatcagtttaggcttttattaccaggttctgtgtcctggagcagtggcctcccaggaacaatcccaggttcatgaccaacaaaaatagg

SEQ ID NO: 20725 - DNA, 1195 bp, Mus musculus
tatccatcttccccggcagctggtgtgcagatacttcagggaaggaagctattgtcttccaggacagaccactgaagcggccctcctgtagggagggtggtctgcattcccatagattctgcgtggcaagctgaggtagctttgggacatcagtgcctgtgtagtactgaataagatcatgtgtcaccagtctgtttctaatgattgcttggtgggggctgctgacccaaggcagaggtgtggccattctttagcaagtaagggcatttaagttctgtccaccagattcccaaactcacaaagctaacatttcctgagctccttccacgtggagaccttgtgtctggacacaggacaccttgtatcccatctttgccttccagccttttgtgtgagagaagatgatatactcactttgcagatgtaaaatgtaggttggactgctcagggcagatgtaggttttgaccccaaacagcccaactacggagcctgtgcctctaaccactacccttctttgcctttcaagataacacatctgttgtaacctaaagacttagaaagagtcctccaaagtggtagggaactggggtcagcttccgtgggggcagtatgtcaacccccatcatgagtactttggatgtcctctgttgaaatcccggctcaactgtcaagagcatcttctatctccctggggaggccgggagacaacaatgtacaaaaatcacgtcagtgagaatcagtctacgcggccagtcctacaggaagcagatgctaatgttgaggaaggctttgagtgtgtctataggtgcttgccgctatggtgagaaccatagcccttaatggctcccctgagtggtgggtaaggaagaatatacagaacagagggaggaagaggaggtgaaaggaggaagggaaggatagagaaagggaggaagggagtgggagcaagggaagggacaccccagagaggtgggaccaagatgatctggtggcacctaagtcgtgaactgcttgcctggacccacctagtgggagaggtggacagatgggcaaggtcactgagaaagacagagatacagagcaggggtcacttgtcctagaaagttccagaatggaggtgattgggggtgggggtgatgtcttaactgccagcgctgcggaggttcttccatggcagtgggccctgcctcattc

SEQ ID NO: 20726 - DNA, 1216 bp, Mus musculus
ccctcacttcaaggtacacataactcgaaccagaagggagagcgagtgaagcaatcttatgcttagacgttgtgctttgcaccccgtttccagctttggcgagggggtgtttatagcctggaccgatggctccgaccggtgtccggctgcagggctgtgcagaacgggcagtgctggctgcagatcggacaacccacaaacgggcctcccctggttccctgcacttcgtgctgcatgccccggccggctgctggtgcccagtgttcagacacttaatcaaggatgtctgctgggttaaccaccactttcagaccaagtctgtgcctgttccaagtctgcatctgatagcagatcaaagagtagagaccataaacgacatacatctttcgagctataaaacacaggcgttgctatatgaccaatcatgggatgtgggggtcagaacacactcgtggagtagcgatggctttgttttcctgtctcaccgagcttctgaggagcagcctgtgatagctgctcccagcaagaatccacagagtgcgtgcttgcctctatgggcaccaagttcacctgccttttagggacattccagggagaccctccctgtccccgggttgttgctgtggagctccccctgccctctgtcttagcctctctggaaaccttctctaggctgaggtatagctggtgagttagcaagagggtgtgcaggcaaaagtgcgatgccttttaccctgccggcccctctcctcaccacagcccttcactcgactcccctgctgcaggcctttatctgcacccaaagatcttgtcctccgtttcacctaagcgagccagcctttctcccatgtagctgtcctctagggagatctagagtggtccacccacaatcctcttcccacagttttcccttccaggccactggcattggagaacggcccacagcgccaccatgtggtagtctggcttcaagactcactatgaggcaatgggggagaaaggcttcaaaaaggccagtgaggtgcgtctctgagttgcctcacctcgagaggcttaaatagaacttctctaaattggtgttgggctacatttactctctccataaagctaaagtctatctgtctattaatcttttctatctttatcttctatttatctccttctgtaggagttggtaaacattccctagatgttttgcaaaagtcgtgtttatctc

SEQ ID NO: 20727 - DNA, 1147 bp, Mus musculus
ggcagtgtgagtcagctcctccttaagaacggaacaggcaaagctcagtcgtcggcatggtgaggagttatctcgctttcaaataagcagacggacaggttggctctagcctcccacctcaccccgctcctctttctgcccccttggtccagggctggtaaagcagctcttggtacgacatgctctgtgccatggtgagggacagattaaaagagctggtggaagtcttttaagaattctgcctggcagttggggggtggtgcacacctttaatcctggcacttaggaggcagaggcaggtggatctttgtgagtttgaggccagcctggtctacagagttccaggacagccaaggctacacagagaaaccctgtcttgaaaatcaaccataaaaccaaataacaacaacaacaaagagaattcggcatggcaagacttgggatctatcagttggtagaatgcttgcaagttcaagtctgacccaaactgcacgagcccttctctctctctctctctctctctctctctctctctaatcatgctgagctctggcatctttctgttcactctgttcccattgttcccattgttcagcggagtgaatggcagacactggcactgtgcagaggaaaacacttggctcatgaatcaggttgtaaagatctagagggaaggttcactactgtctctctgccacaggcactcatggttgtttctcagttttacgaggctgctggcctagaccaaactgctgtgcccaaacagcaggatcaaacacaaatggggaaaaagtcaaggagatgattccttgtgatattctgctgtgctcatagactggtgtcttagccctaagtcaccagagaggcttcatccagcagctgatggaaacagacgcagagacccacagccacacattaggcggagcttggggaatcctgcacatgagagggaggaggagttataggggtcaaggacaccacaagaagccccacagaatcaactaaactggaccctcggggactcaatcctttgagtctggcccctttctgaagagaaatggaagaggaatggataggggaggggctgacagggaagggactgggaggagatgaaggaacgttccttttacctttgaccttacacaca

SEQ ID NO: 20728 - DNA, 1214 bp, Mus musculus
gttcttccaggccgctcgccccaccactcacggtggcctccccccatgtccttttctctcatttgttcatgcgaactcttgcccattggacaagcaagtcctaacagctttgttgcctttccaacttggtgagtggacaggggccactctgaattggatggggctgagtcaggttagaaaggatgcgctttggtcccgcccccttcatctcccatccctgatgagccccgaggagtaccctcttggttggtgtgactattgactttctgattcatctggggaaacagtgcatgcatatgtctctcgtgttgtttgtgtggagccggaagactttaaagacgacagtggcatcttttctgctgatttggggcctctacaaaggagtcagctaacacttgttaaatctcagaggggtccagtctgtgcttgcagccagagctcagtagtcttccttcagattctactctgaacacattaaccaggaaaagccttggcagtcttctctctggttgatcctctctgcctcccacaacttcccagctgaaatgtaagcaggaaatacaattcatctaataggaccttaagctagagagggtcagacatcacagctgccctctgccgcctgtaatgcatctcgttcgtactcagcctatgccagccaaggctttgcgtctgttctctcacaggactgtaggcaagggctatcttccatcaaacttgtcatttttttcatgccaagtcccgacagcacaggtatacgggtctctttggggattctcactagcaattctctttgctcaactcatgtgcggatgttacagccctaactcagagtgggtgtggggtgcaaaagttggcctggctctgctgccttgtcttttaagccaaaggagttgggggtttcaggggtggtttgtagcggtggctgtcaatcaaacaaggtaaaaactggcaaacatacacacacacacacacacacacacacacacaccccgggatatggatgtatgagctgtggaagccagaggacagcctttgctgtctgtctgtcattccttaggaacggtttacctctttacttacttgttttgagggtgatcctcttactgaaccggaacttgccaagtagactgggcaggctggccagagaaccctagaatctggcctctctctcagtctccccgaattgggattgcaagcacataccaccatgt

SEQ ID NO: 20729 - DNA, 1178 bp, Mus musculus
gtgcacttaagataggggcatcctcctattcctcatgggagctgggacagggctggcttgcccatagtctgcagctctctctccagtcaggtggctgatgcttcacagaacctgccttgctatatctcactgctcatcggatctcagattgattgggccaaggagtcagagtcgcagggagttggagggaaaaggcagtgtcagggaaaaaacagacagcgaggttttgggacagagatgaggtttggctagtttgtactggggggggaggacccagttaaagccagtgtgataagtcattctctctcacatgcagccttggggatgccttaggttggatagaggagaaacactggacctctgatcacagccagcatctcagagtcctctggaaattccctattcccaacacacaggtgaaaagagggagagttgccgctcccttgatgtgtatgggggtggggtgttgagaacttaatacacaaatcataaaatcataaggttggcaagagtcgtgtgggcctgtgggttcctgtttcttcctgttgaagggcatggggctgagcatgtgtgttttgttatatacacatgtgaccccttgtgaggtgagagaaggccctgagaccaagttaagctggttaccctctggcagcctccctgcccccgtctctgcagcagattcctttgctagtagccatccccatcctcccaggcttcctctctttacgactgggcagtgctccctgtatcccctggaccgggccagctttaaccaaagggctggacttgctgctcactctgaatgcgggaaaaggccctcgtgcatgcccacacctgtgccagcaacagggctgacatgctgggaggattccagttttctctgaacgtaaacctacaaggagaagcagcaggtcgaataccactggagaagctgtgaacagagcagcccagcatccggtggctaagataagcatcctttagagctgaagatctgcctccatagcacaagggctcgcctggtggtcgtgcactctgggtcgcttggctacaaggttttaatcagcggcttgttctctgctgatcatcagcaaagtgagatcaggcatgtgttcccataagtggttgtagacagtggaaatgtaggtgcatttccacacacattgacacttgcatatgtg

SEQ ID NO: 20730 - DNA, 1172 bp, Mus musculus
ctccctggttgctttccactttcccaaagtggtgttgcagttttcttgcttaacatcattttttttcttcatttgcttttcacttctgtcttagttagggttttactgctgtgaacagacaccatgaccaaggcaactcttataaggacaacatttaattggggctggcttacaggttcagaggttcagttcagtatcatcaaggcaggaacatggcagtatgtagtcagagatgagagttctacatcttcatctgaagactacttgtggaagactgacttccaggcagctagagtgagggtcttaaagcccacacccacagtgacacacctcctccaacagggccacacctcctaatagtgctactccctgagccaaccatatacaaaccatcacatctttgaacaaatttttccctcactgtcattttagagtagtgccatgctctgagtgcaaatggccctcttcagctcaagtgtttgaatgcttgtttctgaagttggtggaactgtttggcaaggattaggaggtgtgggcttgttggaggacgtgtgtcactgggggtggctttgacatttgaaaagcccactctaggcgcatctcttgctctctgcttgctgcctgtggatcagctgttgctccagtgccatgcctgtctgcctcccatcatgatgatcatggactatgtaaccctccaaaactgtaagtgagccctcaattgcatgctttcttttataagagttgccttgttcatagggtctcttaatagcagtagaatagtcactaagatgtggattacctgatgtattttatataatattttattttagtgtttatatgtgtggttaaggtcactgtgggtatgcagtacctgaggagaccagaagagggcgttggatcccctggaaatggaattacaggcagttgtgaagtgcctgatgtgggagctgggaacttgaactgaggtcttctggaagagcagcaagtgctgttagccattgaacaatctcttccggcccttcatcttctgtagttaaacagacatcttaacaggtagtctgcatttgggtgctgtttgattttgttaatttgtatgtggatatattttttaaagattggtttacttttcttttgtgtatgagtaccggcagcggtcagaagagggtatcgga

SEQ ID NO: 20731 - DNA, 1223 bp, Mus musculus
ggcccagagataccactcctgggcatgtactcaaaggactttgtgtcccaccacagagacacttacacatttgtgtctatcgttgttcttttcatagtagccaggaagtggagttctcttaggtgactgtcaagagatgagtggatatgaaagcgtggcacacacagtggagttttgttcagctattacaaagaagactcccactcgggcatctcattttaagccccagcaaagcctttctgcaggagactggctgataggaccctgtcttttcttttccttgcagtcttcaagcagcgacagtggtgggagcagcagcagcagcagcatcaacagcccagacagggccagtgggccagagagcagcctgagccacaccatccccggatcctgccccagcaccccccagccgatgcctgagcagtctgcactatgccaaggcccttacttccacatcaaccagaccctgaaggaggctcactttcatagcctacagcaccgaggccggccgccgacatgatgctcctccggcagtttcttgccttctgtgaagggacagcactgtgcagattggatatttcaacttaatgatttgtttttaaaagttgcacacagaaaaaaaaaaaaaatgcctgtcggctttccgtctgtatttgagtgtgagtgccgggtcagcaggtgctgcttactcggggttttgctgcactgttgcgatttcggaggggcttgggagcagttttttagaggattcttttagaggattcttttaagagagggcatcagatctacgtcgtggcagtgtatgaggaagtctcatctgaccgatttccacatctgtcaactagatgctgtactgtatgtaaagagcctcttaaaaatgcgggatcttaattttttttaattcaataaactagtaaagaatatctagtttccatggggaaaaacccctgtaagttttctccctaaatataggaagcttgactctgttgcactgaagctaactgccgtcctacctcttagtatgtagatgtctgtctatgggatgctctcccttggaacagaacagccgtccactcggaagaccagggacgttaagcacatttcctagttgtggtctttattttacatttgaatttccagggagaatatcacttccatatcttattttcttctagtctgtaccccagacgctatagagaacattgcgcagtgctcaagtcaag

SEQ ID NO: 20732 - DNA, 1184 bp, Mus musculus
ctagatgttaagtcttttggttttgtgttgctttgtttttttgtttgggttgttaatgctttttattttattaattttttttttgagatggtctcactatgtgtagctctggctgtactggaactcactatgtagataaaactgcatagtgaacttgaggccagcctgggcctatcttaagcagagcaaacaaaagttaaaaatccatgctgttgacggttactctgtgttgctcatcggctcccacctttaccttccaggaagagcatgggtgcagccgagccccggatggaagtgtgtccttattgtaagaagccgtttaagcgtttaaaatcccacttgccgcactgtaaaatgagaggaccgtccatatctgctgatcaaaatgtttctcagtccaagccagctgcacttgctcaaaaagagaagagtcctaccagagacttgaccagagctaaagagaaggagctagaggtagaccgtccgaaaagagctgtgaaagcagaaaccagcagggcatcgtggacagctgcagcctctccgcttccagaggggatcttgggaagcgtgcggataacaaaagcagaaggagaaaacaaagatcaaaatcagttctccttccaagcactcagccaggccaagccagaggtgactctgcagagagtcacaaccccttggtctcctgcgtcagatgccacctctcctaagagagaactcacccaagatgtgtctgagtccaagggaagtccgtgtccctcagagacagaagcgccttcactggtcagctcagtggaaccttttcttgctaatcaagatagaaaatattcatcaacccagcctcatgctaacccagccacttctgtcgggctcaagttaggcacagttgacccccaaagacagaagcttcgggtaaaattattagatgtgcctcttagtgatcgtcattctccaaagagtggcagccacggggttcagagagtaacaccctcagtgttgagcagggaggaaggttcccaagatggaggccacctcttgggagtctctgcccaccctggtaacaccaagacccagaagtcagaatcactcctcctgggccttcacactggcctgctgggtaaagcaccggtcagagagcatcaggaacttggccttggcatggagttgagccagagcaagggaaatac

SEQ ID NO: 20733 - DNA, 1146 bp, Mus musculus
ttgaaggttagactgggacaggctgctaatccagatagcagttgactgtctagactggagagaggcatagcaggaattcagtgggtaagtcacacgtgctggtgcgtgcctaggcaggtggatctttgagttcagggccagcctggtctacagagcaagtttcaggataaccaatgctacatagtcttgggagaaaggaagaaaggaaggaaagaaatccaacgggtagggctctaagggatgagtggcaggctgggaagcaaggcctgtgggtgcaaagagtatgtcctcagctcagattacctctgtgtaaggtcctctgaagttgtacctggaagtgagcccaccttggccaactagagagaagcaaagtcagggtgccgcagggactctggtccaaaggtggcagttttctggaggctacaccttgtgttttgaggtgagctatgggctttatggtttgtcttttaaaaacaaacaaaaaaaccaacttaatttcaagtatgtctattagggtataaacattggagacagacgtagactgtgccgtgcctgtggaggccggaagagggcatcaggtccttggtgccggcgttagaggtgtttgaaagctgatggatgtaggtgctggggactgaacccaggtcttctggaagagcggtcagtgtacagtcttccctactgcagctagctctccactatttgttttgaagagactttgaccttgcatgagtgtggactgtggaattcgttagaagccagtggggttttgggggtttttttggttggttggtttttaagatttttgttttattgtattttcaagatagggtttctcagtgcagccagccctggctgtcctcgacttgctttgaagaccaggctggccttgagctcacagagattgccctgcctcagcctcccaagtgctgggattaaaggtgtgtgctaccatgcctggctaggagggctgtcggtttgtttgtttaatgtaaatgggagttcttgtgcagtgtgcaccaaagcaggcagtagcccatggaaaccagaaaggggtccaatccccaggaaccacggttttaaaatagtcgtaagccaccacatgagttttgggaaccaaacctgaggccgctgcaagagtaccgc

SEQ ID NO: 20734 - DNA, 2194 bp, Mus musculus
taccgtgacaaggaaggccccagcagcattgtccaggcgccccctgtgctggaggtggttcctcctctagggagacaggaaagcaaggccagctgggaccaggcctctatgctgcccccccacgctgtggaggatgacggatgggcggtggtagcccccagccccagctcagcacgcagtgtgggcagccacaccactcgggacagcagctccctgtccagctacacctcaggcgtccttgaggagcgcagcccagctttcagaggcccagacagggtggcggctgctcccccaaggcagccagacaaggaattctgcttcatggatgaggaggaggaagatgagatccgagtttgaggctggaccgaaagttgaaagtcgcctccacatctctgggctgcatcttttccctgctgctgctgccgctgccaccttctctatgacctttgaccttactctgtaggtgcagctaagagcctcgttggagtagaccctggacctcagggattggggtgccagggaagtaaagtagcaggggcactggtgcctggtggcctgactctgacctaaccttccttaccacaccagcctgggacggatccgagccccagcgggaagccattctcttccaggccctttgctcccagcctggcctcagatggatgccagatgttagtttgagttgctgccgcaatggcagggaagccaggtgtgggcttctctccaaggtcatggacacttggctcccttctgttcaccttgtgtctggagcctacccaggagatatatgcagcaggaggcaggggtgctcacgtgtttgagctcctccttcttccacctctggctcctcactgaagcctggtattctttggggttcagctgaagccaggggacggcctcaactattacactaaatgcagcctgtcccagaggctgcatcccaggacaggatggggcacagaaggaacgaacaccccctgcttctagcttcttgggctctcaagacactaggaacaggaaaggggccagctctgcccatgggtgtgtttgttccttgttactatgttttaaacctgaatagagcactgccaaaatcccctgccaggagactagtgaccgtcttggtggctgagtgactgttatctcacctgaatctggtgtacagaccctgcccaggttggactgtggcggggcagccaccaccagtgtttgtcccggaacccccacctccatagctgttagtggctgaaggagggctgtgtaggaaaagttctggaatacgatgcttaaatgatacattattccccggggtgtgagctacgctttggctagttagtggcctctccttgggctctgggccaggcctcgcaaaaacacaaaacaagacgggactgtatttgattggaattccagggaaatgaaagtgggttttttgtttgtttgtttttggctttttgggatacggtctcactctagcccaagccggcctcaagctcatagcgagcctcccttaccctaggagcttcggttgcaagtgtgcaccactgctcctggctgttttgttcttctgaaagctgttttgctcagctcctgtaactctacccagaccgctagtagaggcaggggcctgagccctgggggtggtagctcattactttcctgtgctgggagcaggctgacctgctccctggtctagcacagccagtgggaatctggggagagagcaagctagattacaagcagagtctggccagatggtggccagccatgggctgctgtgcttccagaggccaccctcctagattcagaccctgaagtgctcactgggcccctgacaggtgctcctacgcaggtaggcagtgactgagctacagagctgtgcctctggccagcagtacacacacaacacacacacacccctctcctaaatctacctggttggttctaaactctaaactttatatttttttccatgacattgaaaaagcagtaagaaaacattaaaatttcctcctaacacttctagtgtctgactcttcttcctggggtcctatttcagggcagggtgtgtgtgtggtgagtgtcttaggattggagggggctggtgatcgtcttagttctggcaaacacaggagcttggagcagctggttgcatccaatccacagtcaagaagagcgaacagtggatgctggg

SEQ ID NO: 20735 - DNA, 1234 bp, Mus musculus
gccttgtcaccccccttccctgcctcggcatcccccaagggctcatggccctcgtacaacttcttcaccaagcatttggcttattttggaagaaaaaagaaaaatcaaatggtaagaatcaatccacttagcaacttccttgttcctacaaaacaatttttttttttttaattataagttcaaagaagagggcctaagggttgggagagaaagaatccctccacagccacataactgagcctcctgttgcttagattcacctcccagaatgctgataaggaaaggtaacatctggggagtggagacccaaggtgctggctccacgctaagggatgcttcagggagatgtcctgcaggaagtcagagacgcaagaataaagccttgactgttccttctgacccaccagcccaacactaagagaaaggaaacaaagggttgggggcggtgcctaggataggaaactcagcgcacccagcctcgcaggaggaaggttgtatgtatgttcagattatcactttcctatgaatgtacaccttcctgctagcccatgcagctgccccatgaactcggaggaaaaggggtccaggggctcctcttaagaggatatcctggaactcttcttgcccaacaactttctcactttaagacctgtgtagccccgccctctgtctctaccacaacatacaggggcccagaggggcggtccagtccctggtcctgaggctttataaagaatcaaaggtcataaggttgtgggtcccgtgtctgctctaccacagggcatgaccgcttggggaagcagaacgcagggagactgcactcatcccacgccatcatcgcagggcgggtgctgggatgcagggaagtcccgggacacccctagcggggagggggagaagaagtgcagtctgaggagtggggcagccggtctctggggcttctagccttagttcaaccgaggaccacgctacctttcacggtccacttccccacaaaaggtcacttcaactccccctaacagctcccaggcggggttcagtgaaggcagggctgggaaggaccaaagaagggccagctgggaagccttgtccaaactgcacacagcaattgagatgcgtggtcagcccagccaggagaggcgggtcagatagcatcaagggacaagaatagctgatggaaggaaagctgttcctcccaggaaagttctgtaaataaccatgggggacctgagct

SEQ ID NO: 20736 - DNA, 1212 bp, Mus musculus
gcataggctgacatctctcaagttgttttcacacggggagcccaaagttctgaaaatgagccctcacaggaaaatcagtggagtcctctgaagattctcaggggccccttagcatgtcagcaacctctccaaccctgaagaaggtagccacactgccccaaaagttagcttatccaagggacagagcactatgtccagagtgtgatcagacaggaccgatcccctgggaccccagatgagggggggtctcatagtctctgaagtcctcaaaataaaaacagagacatgcacactcaaacacacaaacacgggtacaatacacatcacatacacacacacacataaacacacacacattacctgcctggtcccatacctcaaacctgccccttacgccctgagctcgtcatccggaacctttaccagctagctgagtctggtacaagagacaagaaaacgagcaaagggctttttttccactttgagatttcagcttttgtctctacaattggccctccttctgggtccctcccccactcctgtccccaagcctggcgtctgccctccctcccgctccttcgaccgagtaattgctgattgagtggctttgaggagctgttaagaggccagggaactgaagcagtcgcttgccggcctggcaggatggtccctgaaagccccctttgtgcttgcccgctcccgggacaccgcattcagttactgagagagggttgaaagctacaatcggagcccctggctcccctcgcactctttcttctcaccccacccccaccctgaaaagaaacagatgttcggggaggtggaggcggtaactgccctgttagtctgggggaaagacacccccccccttcctccttgaccccagggagctggaggagggactagctaacagctcagaccccacctcagcacccccaacccccacttccagccttcccatctgtcagggctgtcttcccagagggccaggcatccagtgggcgctcaggagatagcagctgctggtctgaggtagtatagataaacaggctttgagatttgggcctggaagagccagagtggacccagcacaacccccaaatcagacgccacccactgttgcctagcaagggaggctgttccgttccagtgacgtcacggaggcactgtccaatccctggccccttgtgatctctcccactgaaactctgt

SEQ ID NO: 20737 - DNA, 1187 bp, Mus musculus
aaaaaaatcaaaagacttttgagagacaggacctcactaaactgctcagactgctcttgaacttgcttggtagcccagcttggcctcagccttgtgattttcctacagatcattgtgagtccttggtgggacaacagtggatgcaaaatccatggtactgacagagcaaggcagaagccacaaggactccaccatagtccacggcactgacatggcaaagcagaagccaagagaggattcttttataatccaagcaaggcggaagccggaaggtcagctcccagccaccatgatggagtggagctggttctggcttcagtgttgaaacatccaagttcattttctaactcgtatttcagagtgattcttgggtctaattccatctgggtagtgtctgcaactatctcctccctgtttcccttgtgtggttatgtgtaaagtccattcctccgtttgctgcataggaaggtgcttgtcttgagagaaatgcccaggtatgacttcttgttggtatttatctcccctcctccacccctgccactacttcagctggggcaggtattgtgagcagggttgtgatggtttgtatgtgcttggcccagagagtggcactactgggaggtgtagccttgttggagtaggtgtgtcactgtgggtgtgggcttaagaccttcatcctagctgcctggaagtgagtttcctcatagcagccttcagatgaagatggagaactctcagctcctcctgcactatgcctacctggatgctgccatgctcttgccttgatgataatggactgaatctctgaacctataatccagccccaattaaatgttctccttctaagagttgccttgggggctggtgagatggctcagcgagtaagagcactgactactcttccaaaggtcctgagttcaaatcccagcaaccacatggtggcttacaaccatccgtaatgagatctgatgccctcttctggaatgtctgaagacagctacagtgtacttacatataataaataaataaatcttaaaaaaaaaaaaagagttgccttggtcatggtgtctgttcacagcattaaaaccctaattaagacaaggaccaaagcccaaatatcacaacaatgttgagcaccagtgttcttatatgccgtgacaatatttgatgaattcacatgtgcctag

SEQ ID NO: 20738 - DNA, 1304 bp, Mus musculus
ttataaacatcagataatgagcggaagtagacctaggtgggcaggaagagcctttgcaaggtccttaggtgtactctgtcacgtcagacaggctgttgcctctgatgtggttgtctgtgggccggcggccaccggcctggcgaatgtctcctgctggtgggcacagtggggtttgctggtgttttccatccggcctgtaacatttggcactgccttctcaagtctcagctcggccacgggccacagttcttttctcctgtttaactttaagagtgtggaatcagaggtcatgcctccagattgctgaggtcaacctagcaggcctgtcagttccttaattagttaagaaaatgaatcaagcgtatgggttaggagaaatgcctttggacccaatttctggtgggtttggttttgttttgtttagaaataggctatatggatctggaataacattggcactcaccttgtagcccaagctggcctcagatctagagctcagggagtctctctccgcctcccaagtgttcgcggattgtagacctgggccgatatttctgacttgttttcccccttatgtttttgtttattgtatatgtgcacatgtggaggccagagaggatcttgagggtgttggttgtcctatggggcagatctcaggaaccagactggggtcattgggtttgacactggctgtctttacccacccaactattacactggcttctctctaaccttgaacttcctgggtctcctgggggctggtattacagatgtgtgggaagccctagtcagcgcttcttctgtgtgggggcaccacattgagttggtggacactgggctgcttgcacattttctgtcagcctgacgcagcatttatttttggatacttacccagaagtggagtcgctatatggcagttggacaatgcccaggggctgagactgtgagggcccctacctagcattcctcgagctctgggccgtttcccagcactgacctaactggacagggaagggcaccactttaacccctgtgcttttggttggaggcagaaggatcagagaagttcaaggtcctctgccacacagtgagttcaggacctgcccggatatgtggaaccctgtctcagacctcactcacctccagagaggagagttagtattcaggagtgcgataatggctggggcagcatagggtgctgccatccatgtctggacttggtaagatggaagccagagtgaccagtgccttgagcaccagtgcctggtgaaggctgttccagcagtagtcagaggtggagttga

SEQ ID NO: 20739 - DNA, 1241 bp, Mus musculus
caggattgccaagcttgtgcctatgcctttgacatgactcttttgggaacattctagacccacatgatggcagaaggcgacaagatctctatccttagccactcctctgggagtctcgtgagttcttgggtctgtgtcggtatggaccatcccttcaaacccagctggccaattaccacttcttcctcctgagactttccagggctatcccagggccaggctcctagcctcttccttacctccccaggtgtctgcaaacacccagaggatgaaggtagacctagaacagcacctggcccggctcagcgagatcattgctgcccggggtgactacatccagaccctgaagtttatgcaacagatggcaggcaatgtcgtcagccagctctcggggctgcccgtgtggagggaggtcaccacgcagctgaccaagctgtcccaccagactgcctatgtggaatactacaggtgaggaaccgggtgaggcgtgtggggctacagatgcagacccatccaaccccccactctccagcctcactgtgtaacctcctaggacagtgaggggctgaggggctccacctcacctgtaccccatctactgtgtactttcttcggtgctatgactaaatatctcggcacagatttaaggaaggaataggagtttattctggcttacggtttgagagcgtggtccatcctgatgtagcagcaggctcatgaggtccctggtcccatcgcatctatagtcagagagtgaatgaggaatgctagtgtccagcttcctccttcctatccggtagctcttcccgcctggcttagtgtcctagttagtgtttctgtttgcttccatgaaacaccatgaccaaatagcaacttggggatgaaagggtttctttggctcacacttccacaccactgttcatcgttgaaggaagtcaggacaggaactcaagaagggcaggaagctgatgcagaggccacggaggggtgctgcttactggcttgctccccgtgacttgtttagcttgctttcttacagaaccttggaccaccaacccaagcaagagtggtaccatccccaaagagctgggacctcccgtattgattgttaagaaaatgccctaaaataggggttcccaacacttcctaacactgcaaccttttttcttttttcttttttttttttgagacagggtttctctgtatagccctagctgtcctggagctcactttgtagacca

SEQ ID NO: 20740 - DNA, 2225 bp, Mus musculus
gagggtacacggggatgggccgaccagcctgctagaacccatctctgggggctgatgtggcctagacagatgcagccgccactggcctgacaacccttcctgtcttctcccagcacccctccttcttccggggccctttcctccagctatggctcttgggcagcctctcccctgggctccttctgggctgggtaaaggcttctagctgctgctggcttcttatctctgctgaggaatctctacactcctcactcatccccgttgactgtgtgcctcctgttcactgccaaggggctcgctcacagcagtttcagatccaagccccccaccaccaccccacccccctgccgccctcctgcttagctgtaggctattgctgctcgttttgaaatgcattagcagctcagaagaggccttaaggtctgagggcggttcatcaattctccctctgaaaaatccaatgacagaaaagggtcctggcagtgtattgtaagctagtgatcaaaccatccaaatatacagccagtgactcactgctattgatctgggcctgagtggggttcattccggggcagccgctggaggccctggtatcagacctgactagacatgactatacatatgtatgtatgactagacataccatggccatgggtgcaccaggaacaaatcacttaggttctctgcaatgtgccctgtctgtcagtctaaccatgtgagctagggatacagaagtaagggagccagcgggggtgcctgaagtaccaccagggctctgcagtccgtggtctaacagaccagccaaggggaccgcactgccggtgagcagtcacggctgttttcttaccacaaacgcagacttgcttggctctggttgtgttgttttctggaactcaattggtgggtggctggcctcaaactcgcagaaatccacttgcttccacctcagtggatctcagccttcctaatggttcatgcctgtactttgctatgcttatgagtcctaatgtgaatatcttctactcaggacatctgatatgtgaccgacccctgggaaagggtcgctcgacccccaaagggtcacaacccacgggttgggaatctttgctcttcctctccctccaaagtgctgggtttaaaggtttccctctgggccaggctagacgtttgtatgccatctaattttaatccttacaagttagattctttctactcatattataaatgggggaaaaagaagctgagattaaacctctcaacatcatgactgtgaagtccagcatagggatttgaactcagcaactccagaacccaggttggtgaccctcagagatgctgtttcggaatgggaagccctgtagacattttgggtgtttgcgtctgatttgctatctccttcttctacatgacaggatatctggtggttttattattaagattttttttccctgagacatggtttctctgtgtagccctggctgtcctggaactgcctgtgtggaccaggctggtctcaaacttagagatccacctgtttctatctctgcctcctgagtgttgggctacatgagaccttgtctaagagaagaaaaaaaaaaaaaaaaggaaaaggaaaaagaagttccttatgaccagccattggatgctaggtactgtgtgatgctctggggatgagtgaatgagatggcctctatatcccaccacattcatgaagcctgctgcccagtgcagggtgtcaaattttgtgaaaagggccagataaatatttcaggtgttgtgaacaatatgatgtctgtcacaacttctcaactgccatcaaagtgtcacagccagatgaacatgcccccaaggctcagggaccactgtggaagagggagcaggaagcctgccagagccagaggccagggtacagcaaagcagagcccagatttctggacatgacaggactcctgcactaataaactcacagcagccagtggctgcccacacaagatcaagccagtgatggttacagaatagaggggcgtctcagctagggtttctattgctgtgaagaaacactatggccactcttacaaaggaaaacatttaattggggctggcttacagttcagacatttagtccattaccatcagggtgggaagcatggtggtgtgcaggcagacatggtgcaggagaggagctgagagttctactggatcctcagagagtaggaagagtgaca

SEQ ID NO: 20741 - DNA, 1222 bp, Mus musculus
tcttgtgctctgtggggcagggctcccagatccaccagctcacgtcttccacctcaatccaacttggcctgatccttggccctctcctgcctctctgtcaggagtccgtcctgctttactatgatgcccagccaaatgggtgatttggggatgtggggggcttctttgttttctctggggcattgccttataatacccactaaagtcccacgaaggaagcccccagagagcccctagggccagggggtgtggcagcgcagactcagtaccttccctggcttggttcagagctgctggttaatcggaccgtaacaggcttgtagttgttgctctgtgcctgagtcctgctcagcaagcttccacgtttcccagcatccaagccaccagctcccgagtcccgacctgccactatccttccgcaagctccctcccctagaacttagttttctcagtcctctgctctacagcgtctagattccacccatcctccctccaggccgctctgaccagcttagcttgcaatacgatccagtttccctgacattctccctcctccaccccaagcagcgtccgtccgttctgtcttctttctgtcttctttcctctgtcgtccttggatcactaggtggccaagtcacattcgctgtttttgctaggtagtcttctatgtctttctgttcgtagtgtagtgaacccacacactggaatccccacctatgagcagtaggaactcacacgtctcagctcacctggaaggaagagccctgtgctgaaattgtccttggcttttcctctttcttctggttttgaattctggctgggctgcagggtcttgtcacaggccacctaggtataatggtgtatgcttacctcctagaccaccgaacagttctgagtgttgtgttttataaaaagatagggaagccacgggtatgtttggtgaaggcgcggtatgatgtcaggggaagggggtgcctctgcgggcccatgctgaggcatccctgggccggtgctgaggcatcccttccccctgagagaccagccacacgacagtgtagtatagaatagagtttattcagggcatagggagggaagttgagggggtggtagagacagagaaaggagagagagagtagaggagtacaggtcggccatgagaacctggagggggtgggaatggggagagaggaggaagagggtaagggagcaggagcaagagagc

SEQ ID NO: 20742 - DNA, 1140 bp, Mus musculus
aggtcctgagttcaaatcctagcaaccacatggtggctcacaaccatctgtaataagatctgtcaccctcttctggtgtctgaagacagctacagtgtacttacatacaataataaataaatctaaaaaaaattttttttaccctcattgtgggagctactctatgcttgttcctgataagttctaggtgcagtagctgatcaggatgctctgccctctacccatccagtagccctgctccataagggtccaagaaggcctcactgggctcgtctgctgcacagcagagagggtagccgaaacaaccacgtatctaaaacttgccggaggttgtggggaggagaggggggctgggtgaggggggaccagaaagcccatctgtctttgagggaaggcagacctatcattatgtgtaaaaataacaccatgtcttattggccccagaagagttgctcttacaaatcttggtccagatttacaccatcggcctagaatgacggctggggtaacaaactgcctcataacgttaaatgataataataaatccgagctttcctgctctgtgcggaatggaccgcgtggcatggcccactgtttgccccacgaatcctgtttctagcaaagagttctcaccaaaggtgtgatttgcactaagggtttaatacaatgaagttaattgtagtttggcttttatttttcagtcctaaacactgagcccagaccctcacacatgccggacaaccacactacggttcccgtcactgaactatgaccccagtcttcttttactgtttgctgttagtgactttatctttattattattattattatttatttgtttacgtattttatgtatataagtacaccattgctctcttcagacacaccagaagagggcatcggatccctttgcagataattgtgagctaccaattattatgtggttgctgggaattgaactcaggacctctggaagagcagtcagtgctcttaactgctgagccatctctccagccctgttagtgactttaaacgaagactataaaatgttgtgtatgaatgtgttgcctacatgtatgtatatgtaccatgtgagtgcctagtgccaacaaaagcaagaagagagcactggatcccct

SEQ ID NO: 20743 - DNA, 1945 bp, Mus musculus
acacttgaaaggggacctcagagccagccattgctggtgtctggagtctcccagaccactcactgcttcttgccagttatgactgtcattcccttcgcaccagctgtaccactcccagaggtctgagcaggccacagatagcccccaccttgcagagcaggaagtttagccaggctcgagtgtatcccctccagccctggcaaagggcttctgctcaccacagatctatagccagtctgaatagaggaagagagaaccccacaacagccatacacgggtagtgtccctttcctctcagagccaagttccattcctggagttatcctctaggcatgaagccttccaggggccgggatggtagggagtttcaccccttcctccctccccaagcctgcaaaccacctttgctttcattcctttctctgcgcctgcccccatctcagggaccatgatgtctcatccagtcctctcttcctcaggccacccagggacagttcacatctgcagccttcagaatgtcctgtaggagtgtcaccaacccaggtccaagtgttcatgcctgtccttcaccagggactgtaggacccttacttgttttgtttggttgggctttgatctgtttttttgttttgctttgttttgttttgtttttttgagacagggattctctgtgtagccctggctggcctggaactcactctgtggaccaggctggtctccaactcagatcctcctgcctctgcctcccaagtgctgggattaaaggtgtgatctaccactgccgggccctcatgttgcgttgtgttcttaagttgaggaagaactgtctcctcttccacctttctacagaatgcctcttctttacctcccgcctctatggggatgacttttgaggccccacctgggtcaagggttcagtattttagtctaaaacttcagaaagtcaagcatcacttaagacatgcccagggctccagcttgccctcagcagtccttcaggacttctggttccttccgccacccttctcaagattctagaaatcaaaggagccatacaatccggcaggaggcagtgactgtggtctcagtgctgggagcccaggaggaaccgtcatgccttacctccttctaatgggtaaaggggctttcttatcaagcatgtctgacatccctggagaggctacgctgttccaggtggcactgggatgccagttggcagctggatccttctgttcacacgacttggaaccttttgtcctttggggctgggcacctccagaccctctgtgtgtccctgtcatctggggatggggaggaattcaggcctgttcacttccccagttctgtagcagccgatcagcgtcacctttgaagtatacatgagagaaatatatttacaaatgctttattctcttctttaataaaaagtgcaccggtattctagaagtccaagtgaccctgggtctatcgtttcgcctccgagtctcacgggccccctgccccttgccatgcagcactgcggatgacgggtgtgtcctttgaggttgctttgtgccctgaaatctcagcgttctcatgactactcacctatgattagacagcctgcaatcagccctcaggaaagtctgtgtctatgaagagcctgctatgccaagcactctggtcaacaaagcacaaagggtctggatcgccctagagtttactttctggcttggggagagtccccccaaagcaactacaaataaaagcaagtgacctaacaatgggggcaggaaggtggagctctatcagacacagcattcatgatcaacagtgtggggggagtgcttgtcattttgagacaggatctcatggacgttaagttagactgaagcttgctatgcagtgagtgatgagggtggccttgaacttctgaccctcctgcctttacttcccaagtgctggg

SEQ ID NO: 20744 - DNA, 1906 bp, Mus musculus
ttcttttcactagtatcttgttcacttatcttgttgatgggctaaatagcaagttagtatatacagtgtttattttgatgtaccaaggccctgagtttgatcttcggtgttacaaaaaagtattcattcccctttagaattactagtttgagacatggtttctgtatgtagccttggctctcctggaactctgtatagatcaggtggcctacagagccacccctctctgcctcctgagtgttgggattaaagatgtgcatcatagagtgagttccaggacagctcaggctacacacatagtgagatcctgactcaaaaagaaaaacagcacagggtggcactgttaattccgcacagaggcagaagcaggccagtctctaagagtctggggcagagtgacttctgagacatccatggctacgcagtgaaaccctgcctcaaaaaaactaaaaccaaacaaaaacaggtgttatccgtctgatcctgttttttggataatggaatcttgggcttttgaaaaccacatacatacacaactgaggaggtaacacactgacaggttccatttctgggtacaattacctcagttggtgactgttgatattttttttccacttgtttgaactattttgaaactgttttcttagaaaatgtggacacagacttccaagccaacctggcgcagatggaggagaagccagtgcccgctgctcctgtgcccagcccagtggctccagccccagtgccatccaggagaaacccccctggcggcaagtccagcctggtcttgggttagcttcttgtgttggaactctgtccttctgtctgtctgtttgttgtcccatgcttgggaactgcacagcgtgagctgactgtacatctctcggattggtttcattaaaggagaagcactttatgtaccgctgtctttccctgcttcctctcttcctttccttctgtctgtctgactcctgggtctgtgcgccatggcatgagtgttttctagtagtagactggagtagtagactgtttctaagaacagatgatctggttcctgatgtgtagagactcttatgtaccagggtttttgacgatgtccttggcttcatgtgatgggaccgacagcagcctcaggcactaccctgctcccagctccacagggtgggcaccactcagcttgccttgcacttgccccaccatcggtgccctttgctaagtgcaccttcctgtgccatgtggagtgatcaaacagctgtacctcacatcctgctgcctgcagagcagacaagctgccttctgtaccctgaagatgccattggccactgtggctggccagctgcggggcagagccacccagcgcagaggatggcttcaggtacacaagcaagctccctggaattgcaaggtgaagcacacaggaaggccgtccgtcccagagtgggactgtgggcgcagctcccacagggacctccttgacggaagaagtgccatgtgcatgatgctgatgcctgaccatggagaaagtctcacccttgacacttgtactccttagtcctggactgttgcttaaagtaaacaatacccaccttttgaagcaccgtgttttgtctttctcttttttggggggtgcggggggagtgagagagtgaatgtgtgcgcgctgtgtagctgaagctgcccttggactccaccttcaagtgctgtgtagtagatatgcaccaccatgcccagtttatgtagaggtggaacccactgagggtttccgacagttccctgcacgccagtggagttgctggaaagatggctcagtggttaagagtcctgggattctcatccagcgactctgagttcaagtcccagcacctcgtcaggtggctcacttctgcttgcaatcagcaggaggccc

SEQ ID NO: 20745 - DNA, 1150 bp, Mus musculus
taaaaaagaaagaaagaaaatgctctttgggcatgtgtacagcctgagcttactgagattttgtaagttgaggttcctgtccctctgactgactataggctgtgatgagctgacatacccaaccagcatagggcatgtctgggagtcagcgctagaagggaggagtgcttgctgactccgggtcccggcggcctggagaagtcagcacttggagtgctgggccttgtgctgcagctcatggtcccacctctctctgcaggtgactgttctggtgcttcagggccggctcgatgaggcacggcagatgctagccaaagaagctgatgccaacccctcttgtgcaggcatgtgccgcgtccttggggacctgatgaggacaatgcccattctcagcgtatgtgggagctgccttgcctacctggtcttgggaggtagggatcagggagcgtgtgggtctgggcagctgagagtctcacagccaacctctccccagcctggcaatactcagacactgacagagttggagctgaagtggcagcactggcgtgaggagtgtgaaagacacttacaagacaacacatttgcagccaacccccgtctggagtctctctgcaaggtgtgggatgggtcaggtcagggctggggaccttccttgggaccctggcatcccaggcatcaaggagctggcttctccttggagagagctgttcagtcacttggctgtgaaagagggaacttcttgtcttattgaaacccatggccccagatgaaggggatcctccccgtgtggacggagctcagacgatgtctctcctcagatcatgctgggagatgaggccgccttgttggagcagaaggagcttctgagcaactggtaccatttcttagtgacgaggctgctgtactctaaccccacagtgaagcccattgacctgcacttctatgcccaggtgacatagtgacagtgtgtgtggcctccatgcatcaggaaggctcttttacttcagtcctttgggaaggaactcctttttagacaccccacccagcagtcttgccctcccctccccctcaagtctcggcttctgtcttggcactgacttggtatccccttttccacagtccagcctagacatgtttcttggaggtgaga

SEQ ID NO: 20746 - DNA, 1176 bp, Mus musculus
ttctaagtatcaggtaagtagagaggaattttgaggtgaactcacacccctcaacaggaaagtaccgggagttccacagactgtacggggagaagcgctttggtgacgctgcttctcttctgctgtccctcatgacctctcagattgcacctcgttctttctggatgactctgctcacagatgcccttcctcttttggaacagaaacaggtaatacttgatcacatctgacctatctgttctgtgcctttggtggtcttcctcagctggcttctgcagccatacagaagctcatttacgcctaagcagtaccgtgtacacgtgtccaaggctcgagcaccaatccactattcatttcagaacagctggaagatgcctcactagagggatggatgtaagacttaggagcataccagcagcccagggctctgtatgcaaatatttctccctgaagactttggagctgtgcctgtggagcagctgagtgacgcagcctctttcccctaggtgattttttcagcagagcagacatatgagctgatgcggtgcctggaagacttggcctcagggaggccagagtgtggtgaacctgatgcccagcgactgcaggtcattttaactcctgggaagatgattgtgttgaagtggggaaagatttctgtctcaggatttcctcccattatcctgccatcttgaaacattagcctttttatgaattcatgtgccttttagctattaacctgttctgtaacaccaacttttaggagcaagtcttcccactgcagagccaaacttagtatgctatactggtcatattctgaactgtaatcgtaggttcagatggctccatgctctcctggaatgctgcctgttgctcctcacactgtttttctgctctttaggatgacgacatagagaccaccaaggtggagatgctgagactggctcttgcccggaatcttgctcgggcaattataagggaaggctcactggagggttcctgagagaagatgaggacagttgcaatatagtaactttgtatggcaatgtaaatagattttaaagaataaattgttttgcaaatataagaccaattgttaatcctaccaaggaggttttaaaattgtctattctgaacctgacattgcaaaatgaacaatagttgcctttaagatgg

SEQ ID NO: 20747 - DNA, 2085 bp, Mus musculus
atgaaggtaagcgtgagagaatctatgaaacccacctgggatcacaggaagtaccctgtgaggctctgtcaggaagtcctggcttgacctgcagcagtaacccctctatcccacgttaagggactgagcatgggtggacatggtgatgcaagatggatccttcctggcagaatcatgggcgtggcagggagacaatgtcttggcagagggaattcctgtactgattctcatctgcagccctcttattacaggaaaaggtgcggcttcgatataaactgacctttgctttgggggagcagctgagcacagaactgggtgaagtggaccagtttcctcctgtggagcagtgggggaacctatgaccccagcatatgttgccatctctacttggaaggcaagcagccctgagacaggctctagctagtccagccactgtacaccctgaacagcgtttatagcttggtgtggatcggagccctggacacttctgtcaggaaccaagctgctgctttggtcacctcttcctgggcccctaaaaggacctgtcttatctacctgtgtgacttgaagtagccgtactgtgtgggtgatgagtcccctgtggcttcattggccactctgggatggtggactctgggcccagagtaggatttcctttttttactggcattccttgatatcagggagagggctctgaacggtgcctctccagcccctgtaagaactgcatctttacactcgaagaggcatggcttaggagactgtacctccccttggcggtccctggttctttgctgataggcactgctgctccctgaactaaagtgggcagcagtggcccagagtgagaactgtggagtactgtagtcttcactttctgcaagcagcagcatcctgcagtggctactgagtgagtgatgtgcttacagtggcaggttgtgtcctatggacatcctagcaggacggggagcttggccggatagcctcactagggacaggaaggaaaacggaagtgccaatgtttcccttcagaggcaggtactgtggctttctgggaaaggcgtacctcctgcagtgggaataggccgtcctactcactacctcttgcttggcatgaaataaactgctgtgctccccataagcctttcaggggaggacacctcctgccactctgcatcctgctttggtcactccttctccctgccacacagtatgtggtgtggcacctatggctggacccaggaagtctcagggtcacacacattgcactagacttttatgctgcacccaacaccctcttttccccagctaaagaggggcactgtcagcgacatgttgggtctggagatgagaggtctgtgattaaactgagtttccagaccctattgcttctacagtgctgtgcctcagccagcataacccagttgctccaggccagagacgtttaggctgatcgggaactcggctgccatactagtctactgggccctgctgtccgtatgctgtcgccactacatctttggagctctgtctagaggtcatctggcctacctcccagctattgtccttagctagcaggttttacagtttccttaggacaggtttaaaagagataatcattttcactgatgatggaataaatccaagagctttccagagactggttacttcggtgctggaacatctatgggatcactgtcaatacggtcattaaagatttaaattatgagtgttgctcactactactgaggtcactgcttcagtcagtacagctgtactggttgtaccacctcctgcccttgttttgctgcatgtgaaataaaaccatttcaccctgcttggcatctttcaatacagagcacagcggtgggacaccatgctatgaattccaactagtttctgaaacttgtgtttaaagaagctaaccaaagaaattagagggtgttccaaggtcactggctgagttgggtaaggcctcaacctcatctgggcaggattaatccccttgcaccagtcccgtgggtccctggcttctctaatgagacggagcagggctattctctatcaatgagctcttaagccagg

SEQ ID NO: 20748 - DNA, 1169 bp, Mus musculus
atgtgtctgtgtagcttgtgaactggaaggaggggagcacgattctgtgaagaaagcgattctcccttggcgtctcagatattagactcttgcttcgttttacttcctagtacttgggagacagggtgtctgaaaaggtgaagactaaggtcatcgagttgctttttagctggacactggccttgccggaagaagcaaagatcaaagatgcctaccatatgttgaagagacaaggtgtgtgtgtagctctccattgacctcagcacggcagtgaaggtggaaagttaaggcaaggaagggaatgttgggagtctgcagggtactgccgaggtcctttcctatagagaagttgtcatgagggctcgactgggcttctagtgggttgaggggagagtagcctgctttttcctactcatcacagggatttggcccttgttgtgtgaaggacaggcgaccattgcctgagcacatgctctgtcctttgtgtctcctctcaggcatagtgcagtcggacccccccatccccatggatagaacgctgatcccctctcccccacctcggcccaaaaaccccgtttttgatgatgaggagaaatccaaggtaaagtgcagcttggacctggatctttaggtggcagttgcgggcggactgggtgtgagctgtgagagcggagggtggctgcctttttgtctttcagttttgagcagtctccctctaacctaagctgactttgtatttgacatcttcctgcctcagtcgcctgagtggtggtattgtaggcatgagccaccctagcaagcatgaagtggggtcttgcttgtattgcagttccttctggtgcctgctggggctgggtacatgccatccccttcacttgccacaccttctcttccagcttttagccaggctgctgaagagcaagaacccagatgacctgcaagaggccaacagactcatcaagtccatggtgaaggaagtgagtggtcctgggcctctgggtggaggcacagacgttctcccccagagatctaggtgcctcttactcacccggcaccagacctgagctgcaggagtttaggaggagcctggtgtttcccatgggaggaagcatagaggagtgctgggtggctgtgttagtggaagtgggaggagtcactctaaaacagct

SEQ ID NO: 20749 - DNA, 1959 bp, Mus musculus
tttattacggaatctcgccgctacccctgttcccctcctgtgtcctttttctcgttctttctttcctgtccagtgcatgatgtttaaggccacatatagtccagctgatgccaataataaaagacaagaaaccaagtgggctggtattttctctatgcaaaatgtctgtggagatggatggactgaaagagccggattcctcacacacaggggcagccagtgcttctggggccctggttggggttcacccgagatgcccaggggtaccgcctccagcctcaggcctggagcattccatcaaagttggaattaggggaaggaggcccactgtcctccccggtctcctgagagtcagactgcaggccctcccctctcccactgcttcccttcaggtgttttgacgtttttttgtttgtttgtttgttttttttaaatagtgcctttgtcttatttcaagggtgttcataaatggtatttgtaccatttttttttttaataagttaaagacagtccagagcttttcagttgattcgtctcctatcctgtgtaaatattttcctctcagggcaggggaaagaggacagagaaaggagctggtagaagcagagagtgtatttcccatcttgaatgggccggaggtctcgaagcctcagcttttactttgtgagctgcaacactcgcttcagctcagactcagtggacatcagagtctctgtctccgtgtctcagttatggtctgctctctctatgcctggagctactgatccaaacacaagacggtcagaggagccctggcatccttcactcttataggcctacatgcagatgggcttgaagagaattggcctttcatttttcacgctcgtatttccccacctgtccaagggtgcagatagcaggattgtggggtcggccgcatctctcttggcagtgggttgtgctgcccctccccccaccccacccctccatcccacaaagcctttcgaggtaggagagaccaagaccagtgcacagctttttaactcttgtcttctgtgagttttccgtcctctgtagtcacgtgcctgcacaccgttctctccaccctgcctccttcccacagcagaagcagggctccacccaggccttcccttggagtcggtgcatccatgggctgctagactcttgcgggtagagtctcccctggacttagcattgtgagatggactcagctcagggcgcccctaaggctcggaggcggccttctgggtccccacctctcctggttccgctgctgctctccctgctgatgataaagtaatctctggagtcacacctgggccatgtgattgttttattttggaattggtgtatatcatgaagccttgctgaactaagttttgtgtgtatatatttaaagatcagtgtttaaataaaaaaaaaaaaaaaaccaactatgtacttactctgacttctgcggacagcaatttggtaggtagtgattaactgtgaataaacgtacaatgagttcttaactgtgtgtcttcatttctccctgatggtgttttcagtttatttttttatttatttatttttttcaaggcagggtttctctgtgtagccctggctgtcccagaactcactctgtagaccagggtaaccttgaactcagaaatccgcccatctcagcctcccaagtgctgggatcactgcccgtcctgattttattttatagatggggtctcactatgttgccctggctggcctcaaattcgcagagattctcctgcctctgctcccaaatgttgaaagtaaaggcttagagtatgttaactctggccggcatctccagaccctgtgaacctaggacgagtgatgtagctcattatgtggaaaatggtttagacaagaactcagaagaacccagagctgggctggaaagctcctcttcccttccgagctgagggtgtggaaaggcta

SEQ ID NO: 20750 - DNA, 1161 bp, Mus musculus
ggagcctagaggggcattttctcaaaaatccaactaggaattgcgcatgatattacatgcctttaatcccatcaattgagagacaaagacgggtggatctctgtgagttccaggccagccagagtcacacagtgagatgctgactaaaaaaaagaatggctttgccctgtctgaccgatcatcctttcctagttaatgggttactacagaagcccaccccaaaattcatctctttttataaaattttttttaaaatatttccttcatttacatttcaaatgctatctgctttcctagtttcctctccgaaagtcccctataccctcccgcttccctgctccccaatccacccactcccacttcctggccctgtcattcccctatcctgcagcatataatcatctcaagaccaagggcctctcctcccattgatagccaactaggccatcctctgctacatgcagacacaagacacaagctctggggggtactggttagttcatactgttgttcctcctatagagttgcagacccctttagctccttaggtactttctctagctcctccattgggggccctgtgatgactgtgagcctccacttctgtatttgccaggcactggcatagcctcacaagagacagctatatcagggtcctgtcaacaaagccatctgctttccttcctttgcctgaactactccaagtagcagtaaaacagctcagggagggagacaagtcagtaggtaggggctggacccttgggcaggactgggccgtgatgtagtgaagacagcaggaaggccagctattccttccatcaaagaaaaccatctaggaatggagacctagggcatcaggtagggttataagttctgggtcagcctgggctacatgagacccaggctaataacacagctcagtgggtaaaggtgcttgtcgtccagccaggtgacctatgtttgattcctaggacccacatagtggaaggagagaactgatttccacaggagttcccctgacccctgcccatcacacacacgcatatctagagaagtgtcctcttaaagttaaacatttaaagatgttaatacgtcatcactttaggaataaaatataagaggtagctggctcggttggtaactaccacgaaacaagaggat

SEQ ID NO: 20751 - DNA, 1214 bp, Mus musculus
tagaggcggtatgcttaatttgcaagggtctcttgactcttgaattagaaaaccacctttatgcctgcaaagtatccctgtcccctaagaaccagttttgtgtggagggtagagtatggattgtgctgtcctggacatgccccaccaggcttttgaaggggaggagtggctgtacttcctgctgggcacacagggcaatcactttttgataaagtcccctgctgtctttcattatctgtctcacacagctctggttttctctcctccattccctagacttactattttttccttcctcttccctccttgtggggagcagttggcatttaattgtggtacttcagccgtcagcagttgtcacattagtaactgggtgagcccaactggaggtggggggctgttctgcccttttgaagatcggcccccacaccactgtacttaggtacccacgctggagcagaggcaactggctgcttcctgagctcagacgtttgatgatgtgcgtagggctcccatagtttagaagatttaaattcaggacaaagcctgtgcacctgacaggctaaaacagaggcagacgcggtttttgttcctgttccgttggtcttcccacccagcaacttacttactcggcttgtaaaacgaaaagtgttcaatacttatatctatagcatcttggtcaaaccaacatgcttaaaaatatctccaggagtgcttcctgactcccgtgtgttctgagtaacgttggcagtgagtgagttggagctttgccttcttggcaagggttgatttctccactaaggggtgaaatctgcttctgagagtttggaggtgggaaaaatgactcataaataacatatccagcagtatataaatagatcggtagtatatctttgatagctgatttttataagagatggtgtacacatttaagcccagcagttagtaggtagaagcatgcagatctgagttcaaggccagacagagctacataatagtaccttgtcttgtggtggcggcacatgcgttgatcccatcacttgggaggcagagggcatggcgctctctttgagtccaaggccagcttggtgtacagagtgagttctaggacagccaggcagggctacacaggaaaaacccagtccagaaaaaccaaattaaatgaataaatggacaggaaagagagctcaggagaagacctgggttggatccca

SEQ ID NO: 20752 - DNA, 1378 bp, Mus musculus
tctgtctgtaccctgaacctgtcacctcaatgtcggcaccctgctcagtcctctgatttgaaggtctacaccagcctgtttgttttcctggtgctggattgagccagctcctgtaatacactccacccccggctatagccctggcaatctttacttagtaaccgagataggtcctgatcttataatcctcctgcctcagccttcaagtagctagaatcacaggcctgagccaccaggccaagttgtcaactgtatctcattctatttcaccagggtccgtgtccgctaccagaagcgccagaagctgcagtttgagaccaagctgggcatgaactcgcccttctgagccactggccatggtggccatagctgcccagcttcctggggacagagccagacctaccaggaagttggtatcacaaatgtttcagggtttgtctttgtgcctcatggcattggaggctcagccgtgggcactggagacaattgtcttcctggcttgggcttctttttcacgaaaagccacagggttgtagccacggcctgcctgcttcggctcttccccggccttgccaggggcactcttgaatgtatgacctcaggcccttggtaaagggatcctcagcccctcccccatgtgttccccatcttaggggccccctcactcggcaccctctgctcttgcatctacggcagcctcagtgtctgttggaaagcagaggctactgctgttcaagatgctgtatcctcctgcccatgtcccatcttccccggcaagggcctgcctgtggtccgaagaccttcccttcctctgggcttgaagatggaaaaggtccacctcaccctggggcccccatgtcagctgaccacaagtcatccacagaggaccctgcccaggcccatgtggcccttgcccttgttctgggagacattttttacttttttttttttttttttcttactggaaaatgagcctttgggggagtgaatgtcaactggtttatattaaaattgtaaattgcttaaaaaacatcctgtggtggatccatgaaacagccaggaaaggctccctcccagggctgcagctctcggcactctacactgatgagtggcccccaggacggggtgaagggatacccccggacttggaggtttgctgcacagatgcaaacacagcccagtcatgtggaatgactctttcattgatgttagttggggaaagaggttaatagttacagagcccaggctagaccaactgggtcctccagcaggaagtgggtagacggttcttctgtggcccgaaggccttcccctactgcatcctctcaggcagttaatagatagaataaattccatttaaaatatatgcatttctctc

SEQ ID NO: 20753 - DNA, 1201 bp, Mus musculus
catcatagccctgtccccaacctgcctcttccccaccgccctcctctgtagccaaggagatccagctgatgcatcgcgcgcctgtggtgggcatcctggtgctcgacggacacaacgtgcccctccccgagcccctggaagtcgcccatgacctgtcgaagagcccagacatgcaagggagccaccaattgcttgtggtgtcggaggagcaattcaaggtgccacgtgacagggtcccctggatgtccctaaggcaccagcagtgttcagcccctgggtggatacaaacaaggacagctggggttgcattggagtaagggccacaggatcacagaaaataaggaagggatcttgtatgtgtcagccttagacccaaaggtcagagctaggaataccaaggctggatgacagtggccttgcatcctcccgacccaagagctgggtgggaagaccatagtctggttatgtgcgactcatgtccaactaccatgtgtgcccaggtattcacactgcccaaggtgagcgccaaactgaagctgaagctgacggccctggagggctcacgggtgcggcgagtcggtgtcgcccactttggcagctgcagggctgaggactatggggagcaccacctggcagtgctcaccaacttgggtgacatccaggtggtctcaatgcccctgctcaagccccaggtgcggtacagctgcatccgccgggaggacgtcagcggcatagcttcctgtgtcttcaccaaatatggccaaggtgtggaggcacggcctgtggcctctgtgaggttgggggagtgggaggggggtctcaggcactgccagggatggagagccaagagtatctcagatgtggagctctgtcgggcaggctctgtccccatccccctgggagggaggccctgtctcagccacagggcccagaagccttggctggctttcctcagggctcttctgcctctccccaggtttctatctgatatcaccttcggagttcgagcgcttttctctctccaccaagtggctggttgaaccccggtgtttggtggattcaaccaaagccaagaagcacaaccggcccagcaatggcaatggcacaggcctcaaaatgacctcctcaggccacgtcaggtgaggacgaaggcccagaggctcctcctgaggcatctgctaactggccaaggtgaactcct

SEQ ID NO: 20754 - DNA, 1158 bp, Mus musculus
taggatcacaggcatacgtcaccacacctggtgagctgttctcttatacagagcccagtcagaagcttggggcccactcatctttggtggttggcggggtggcgcatgctttgctaaatcagcttttctaacaaaatgccagcctgcttatgtggaatccacttatctatttgtatacatttgtagcagtggggaaggagctatgggccagctatggagagagacggttagctgttcaatgataggctgtgttgggcatgtagtcgatagaaccctgtgtgaatgatacccaagaggagtcaatgtgggtggaataatacattccttcttctctgtggaaaaatccggagagctgaggaggcctttggcccaggcgggtcatggttacagatctcatgtcagaagctactgacttgggcttcttgattgtcacgctggatacgccatctcatacatgggttatcttgggttctgtaagaggagcgtctttgggcgaagaggggatgcctgctttcgtgctgttaaggattgaaccaggagctcgcacatagtatacaagccctctaccattgacttacactccaaccacagatattctcatcctgaagccgagtgccaatgaccaactacatagaactcgtgtccacaaggtctacttaggctctcctgtgaagggggaagaggttctgcttatctgtgaagggggaagaggtcctgctcatctggttctacactgggatgctcaacttcttcctattcattgactgaagtaattccttttggaaacggcatctctaatttggtctctgtggtcagatcacatgctaaaaagttgtgggttgctgtgccagctacccaccccccttggttaaaaccataccaccaaagccctctccggccactggtacatgaatgtactaaattcagcctcctccagaactctttatggtgaggaatgaaagaaccgcatgttccagctgtcagtctcctctgcaaaaaatcttagtaggttcttgtctgagaccagagtgctaaaacctaccatgccttagaacagatccaacttgaggcctctgcctttctttcttctgggtcttctcattgccttggtaggcagttgggggtgtgcttctgtggggccgagaagtccatgtgatg

SEQ ID NO: 20755 - DNA, 1236 bp, Mus musculus
ctggccccagctgcagcctctctgaggagggtgcagagcagacatgaggaggagacaggcgtcccatctggaggctgctgtgttggtagaagtgagctgggtttagaggcttcatctctttgtcattgttcgcagagccagtggttctagttccatacaggaatatgggaccagtaccgaacctgctcatggattcttctgttcccttttcagcatctacgagaaactgatccagttctgtgccattgatgagctgggcaccaactacccaaaggtatgtcctatactcagagcccggagagcggtggagcttgctgtagtgagtgtgactgcacgccatagaaggtccacggagcagcactgctggaagtctcagggtcctaaccagttagaagccaggagtgggcccactgcccctgccaccagctgagctcattctctgttcttaggagcttcctggttctgggcctggtggtcagggagccagctgaagccctgtgccttcaaaagggccggggccctgccctaggaagctccgtgtctgggccctgtgcactgatggtcgctctgactgcaacttaaccttctctttccaggatatgttcgatccccacggctggtctgaagactcctactatgaggcattaggtaacctgttagctctctgtatctactcatccacacacccatccgtctgtccatccagtcagtgacttaggtgaccataacttagggtctctatgccaggcagtgcccacagggctgaattaacctgagcaaagtgtggtacagccggaaacctttgacctggccaaaggactggggaggccctgttgaggagactgttagagctaagatttggagaggcccaggggctagaatgctcgaggcagaggacgtgtgtgttctaaggccagtgaccacagctcagagaactgggagtaatttcagagcctgagcctgtaagtccccgtcacaagccagaagcttgtgatccaagccctggctccttagtgcacgtatgtgtggcccttacaagttttgccttattttgagttagttaccagtatttttatttacaataaaagtctgcatctgagtttcttagtaggacggtagttcccactgttaaggtcaggagcagcctacccttccctaggattgcggcccctgtgacagagccttggtccaggcccatggtccatgctgaccagggcctagcacctgatcctgcca

SEQ ID NO: 20756 - DNA, 2158 bp, Mus musculus
aatggcccgaaccaagcagaccgctaggaagtccaccggtgggaaagccccccgcaaacagctggccaccaaggcggctcggaaaagcgcgccctctaccggcggggtgaagaagcctcaccgctacaggtaggcagagggctgggaacaatgacttggccgccggcttgcgggcgggcgctctctcccttctccctgaccgttgacgccttccttcttctggtgactgcaggccagggaccgtggctctgagagagatccgtcgttaccagaaatcgactgagctgctcatccggaagctgccattccagagattggtgagggagatcgcccaggatttcaaaaccgacttgaggtttcaaagtgcagccatcggtgcccttcaggtaaagggacaaaaggcttggtggcactcggggcggcggcttgattgctccagtaggagtgttaatgctgttgctcttgtcctcaacaggaggctagcgaagcatacctggtggggttgtttgaagataccaatctgtgtgccatccacgccaagagagtcaccatcatgcccaaagacatccagttggctcgccggatacggggggagagagcttaagttgaagcggtttttatggcattttgtagtaaattctgtaaaatactttggtttaatttgtgactttttttgtaagaaattgtttataatatgttgcatttgtacttaagtcattccatctttcactcaggatgaatgggaagagtgactgactgttcacagacctcagtgatgtgagcactgtggctcaggagtgacaagttgctaatacgcagaagggatgggtgatacttcttgcttttcatgatgcatgtttctgtatgttaatgacttgttgggtagctattaaggtactagaattgataaatgtgtacagggtccttttgcaataaaactggttatgacttgatccaagtgtttaaccatacatcactgtgatagaatgtgggctttttcaaaggttgaagatacaagttttagccacagtgtaacagtttcctttaaaaaaaaaaaagtaaacctggcagctatagaatacactatgtgcatttataatagctattttatatattgtagtgttcaacatttttaaattaaatgttttacattcacaagtggtggggagtcttgtcattaaggtgtgtgtaatttagtccagttggtatttcctgactagactgcatttgtttttaacagtagaaaaatgctatgcgtattaaaccttgcataagtcctcattctaccacatgttcactaacccctgaccctctggctggtaacacaacactaacggggattttatttataagggctctagagtaaaataacaagctattcacaccagcatcatctattactaatctagttagtgcagcttttcattgtgtttggtcttaggcctagattgagttcggtttcgtttctttttaatctttaagggggaaaactgtacaaggtttgtttttccttgtagagtttataaacatgggagtaagaacacagcttcaacttcttggacctctgccaatgaagatgggttaggttacacctggttactatactggcaaaatcccttttatagagatggccttcaagtggtttttaaaagtatcctattgaagtttttaggtcaattatgtatgttgactaaatttacaaataaacttgtttattcaactaagtgtcaaacctaaattgaatatacaaagcttttaatacatatggaatcgagattcctagattcagctatttgcttggtagaaaaggctaaagtacagaaagcatttgaacatccaatacactctaaaaatgcaagtatttgctgacacaattcatgagtctgacaaaatctgcttgtggttcatgggtgggcttaataactacaatacatgtttgttcccatggttttagaatatttgaaattttaagtttgctgttttggatctttctaataggccttacaaataaactagtaagtttggagtttttttcctggggaaacagtttctctgtagccttggccacaactcccactgtagagcagcaggttggcttcaaactcaagatccatctgcctctaaccagtacggatttttttctttacatatagttgaa

SEQ ID NO: 20757 - DNA, 1172 bp, Mus musculus
agctccgttcaccctgcctttccaggccagaggcgtcagcgtggactcaggtccccacttcccagctgtgagggcttcaggcaggtctgaaactctaaaccagactagctcctgggcttaccaaatatgtatttaactctggggacagccacagagcagggaggccaaagctacaggctagccccactcccacacctgggcccttgaagctcctcaaggcctagttctgtccctcagtgttttgaaacctgggcttctctttgatcacttccttctggaatccctagatagcctctttgaccccacagtcacttgtcaggttggcactgccctcacctgtccctgcctccttccctctggcacacggccgtagagccggccgctccctccctctggcagctagcagggcaattgttgggaggagtgcagtatgaggaccaaggggcacgagccctgcccttcttgctgggaggaggtagtatgcattccttggtgctctcagagtgcagctgacgtactgccgtgctgggcagacgcctgtgtgcatgtgtgtgcgtgcctgtctgatgtgtttagcttcaattttaaaaattgttctgtacagagatgcagtgaatcgggaaagcagagtgggcagagggaggcagccctgttcccagtactgggtgtccagagggctcaagagggctacaaagaatctgccccagtagaggcccctcccttgggctcagcacgaaagggctttcaatgaattacgtgaaaactttctccttttttacaaaaatgcaaaaatcaacaaacttattggaaataaactatgaacttgccgtggcttgtttatatgggatgggactaaggacgaggacatccagacttccaggggcacgagatggaaatggctgctgcccgttctccagggtgaagagacagctgaagcagcctagagtctctgaggtgcaaaggcagctcaggcacccccaagccagaccctcctagccttagacagtgacctcccagggcatgtgactcctgctcagtgctctgtggcgtgctgcgagtgcttcccttattgatgggttccagagagtaacagggtccttcaccatttctctaggcagtggacaagtgttccttcctgagtaatttacatggaaggaaggaggggcggtgcc

SEQ ID NO: 20758 - DNA, 1847 bp, Mus musculus
aagggctgggtgtggttcagtgtgcacttgcttgagtgggctgggcctgggctctatcccaggtgccacagaacacaaatccaaaggtacggtgagatgaggactctgtggcttcttggcttatggtgacctttttggagtcagaagatcacctctgtaactcagtgttctcgcctacaaatgggcctaggagcttggatgagggcggaggaggggctcaccgcttgctgctatctccccatgtgtttgctttaacagccgaggccaaggctgcagaagccgctgccagtgcctattacaacccaggcaacccacacaatgtctacatgcccacggtgagttggcaggggaccgccttcttagtcacgcagcctgggagctggcgttggaagccagcacagctagtcctgtgatgtctcatgtgaactttttttttttttctctagagccagcctccaccaccaccctactaccccccagaagacaagaagacccagtagaccctgcccacttcccgcctcttacccagagaccccttcctgggcctcccgtggggctgcatctgggattccaggaggccagggagggccctgttcttccccaggcctgagtataaagttagcaggagctagccctgatagaaaggtggaactcctggcctctgagaggcacgtcccagcttctcgccctagctcagctcacagcgctcttcttcccagcttccctttcaccatctctggagctcgcaggagcacggggtgaccctcgttcctcatgatactagcccccacccatacagagggactctctggccactcctcactgctgcccagccccttcagcctggtgaccattgttcttcatctcttgggctcctaagaccagccatgtgtctccccaacaggccctgccaaaccctgttcacattccttacccctggtgtgctcctggctctggaaggccgctgtcccagcagactgtcagtccagtcacacttacccggccaccttgttctttgtgagagcttccagggattttgctgggcgcttccagtggctggcatcagaggtgaagccactgtgttacagaggaagcccctctgcccctatgctactgtttctgggaattattcgcctcctctcctctcccctttacagggggctgctctgcaggagggatagagaatgcatgtctgtcccgccaggccctttgatctgggactgaggccttccaactatgtgacctctaacctgcagtctgcccctctgtaagcttcacgccccctggatgcactaagaattgctcttgttcgttcctggtccagacacaaaatgaggagatggttatttaaagagaattcctatttatttgacacaaaatgtccagttaatatattaatgtgaaataaaccctgtttgcaccttgatttgtttgctacaactgtgaaatagtaaaaacgaagtgactggaggttctctgactcttgtgtggtgaccagggtgaggtcttccggaggaggggctgcgggctgctgggggcggggctagaaggccggtttccgtctcagtgcgagtggttggttctcaaccttcccacagagcccccacgcccctgcacctgcctgggatggtgtctgtgccacccactgccagcgggggccaggacgaggcctgtgtcccatctgctcctcccgctcccctcctgagcacaggcgtgccaggacttctacgagggagggtcgctgggctggctaccacagtgtgtgccttcatgccaccttacccaggaaagaagacggtggaatatggcagtccttaagccggacctgcaccccactcacagtgagc

SEQ ID NO: 20759 - DNA, 1196 bp, Mus musculus
gttgggaggagcagacaatgggaaccccttcctgggtctccacagaggggaagatccctggagggtgggcgtaagagaccctcctgtttatgcctggtcagtcaggctttctgcccgagctgaacagcagagtgactagagctggggacccctcgtgctcttgggtcctgactgatatcagttcctgtgttctttttcactgcctttggacttaggcctccagcgtctcggatgcagacccacaggtcttcctgcagaacatgaaggtagcaaatagctttgcctctttaaggctgaggggtgccgggtgtgtgtgtgtcagtgtgtgtgtgagtgtgtatgtatgtgtgtgtgtgagtgtgtgtgtatgtatgtgtgtgtgtgagtgtgtgtgtatgtgtgtgtgtgtgtgtgtgtgtgtgtgtgtgtgagtgtgtgtgtgtgtgtgtgtgtgtccacaccatttgggacttttcctttatagtactttgtatatggaccctggaaagttcatgtcacaggtctctagtggggaccgagagactttcctaactgggtctctgacatctgctgctatctgaagagtagagtaggatgaagtcccctctaacgtctgtccctgcctctcctgtgttttgctccaaatcccttgccaagagggctcatgacggggctggaatgagtctttataccgcacataggctggcctgaccttcagccccctctggcctcactcctcagtcagccccactcttatcctgtgttgtcaaggcagggctcttggttccagccttgtgaagccgtgttcatgtccccccagagccagcagagcttggtgctgggcatgactgtcatatcctcgagttgctccttgtggtgacctcgaggctctcgtgtagtctcatgacccagttcccaaggcccactctgctccccactggcgccatgttctttcctctctcacaggtttcctctctctttttgacctttcacagttctgtgcctgggcccagcagcccctagcccagagccctgctccctctatgcaagtcagctttgtgtcgccacagcggagcactccattacaaaggacatttctttagctcagtctgggaggttctgtgtccgagatgaggtgggagcgggggtttagcttctggtgagggtggcatatggcggtaggggagaaagtgcat

SEQ ID NO: 20760 - DNA, 1106 bp, Mus musculus
attacatcagaacaattggtatatcaatctctgtagacatttatcttctgcgcgcgcgcatgtctgtgtgtgtgtgtgtgtgtgtgtgtgtgtgtgagagagagagagagagagagagagagagagagagatagagagagctcagaataatcaaaatatcctctctgctagatgctttgaaataattcaagtggttggcaacaagtaggcctggggttacacagtgactgtaatcttagctgcccaggaagttccaggcctaccagggatacagagtgagttcaagggcagcttgggtatcttggcaaggccatacctcagaaagtgaaaagaagaagggagctgggggaaggaagccaagctcagtggtggcaacacaaaggtaaaggaatttttctaggagagataggtatgaggcaggagagttacatgtttggtaatgcctgcataactgtcactgagcgtgaggccaggctagccaggacacagaagagtttctagacagacaaggaaagctgttcagtgagaggagactctgaagtccctgtgttacagtgagaatatgttttgtggtctgaggcttctctgtactcatcagagatgcgaccggggagggcagaggctggagatgcatcaggcaggcaggttggaaggcaaaggctgagtcctgcaataccaggaaaatggctgggaggtacttagggccggctgaagagacagagaaggtgagagagtccaggagacccaaggggtgaagaaggctgcagtagtaggagtgaaaggtcaggaagatactgagaacaaacagggtgtaagattctagaacaaaccagtccaaggtgcgaggtgggtgtgggagggagaactggagcagaggtaaactgctgtaaacagttatcagtgggaaggagccgggcgtgtaacaggaaacccgagcagcaggtgaactctggactcacctcctgcacagtaggacctgttgatatggataaagccaggtttcagccaagtcccagagaaaaggtgagactcttataaggacactggaagagggaaacacagtacaacagaggaaggacacaggacccaggagtgtgggcagggat

SEQ ID NO: 20761 - DNA, 1191 bp, Mus musculus
gaggcagggagggagggagggacatggggccagaacactgggtctttgtgctgaggcagttctttgtgggctaagcatgaagcttagtggtcaggcacctgcctagtatacacagaaatctgggttccttccatagcaccccaaaagcaacaaaacaaatgtgaaaagttccttgcttattggtctttgcattctctccaggcctacacggcttacctctcaggaatgttgcgctttgaacatcaagagtggaaatctgccattgaggctttcaacaaatgcaagtaagtcctccagtccagaaacgatggctgctcttagttacagccacagtccggctgcagaaccctgtgactggcttcttggaatctaggacattttctttctcagagcatgccactcctcctggtactcagcagatgccctcagagggctgggttttggttttaaccacatggttttcctgagttttcttttcttaaatacagcttccatattttaagaatgtctgacatctctttgctcccagaactatctatgagaagctagccagtgcattcacagaggagcaggctgtgttgtacaaccagcgtgtagaagagatctcgcccaacatccgctactgtgcatacaacattggtgagcaggctctggtgtggtgctccagtgcggtgctcctcgcctcacttggcttgctgggaggcttgcgtgactttccctgtgtttcagcatctagccatggcctgagagtgtttgtttgtttgtttgtttgtttgcttggttttgggttttaccatgtagaccaggctggcctctcactcatagagaccccttgcctctgcctcccaagtgctaggattaagggtgggcaccacacggtacagctgggttagccttagatgtaatgatagtaatagtagagctgtctgatgtatactgtgttacacacacacacacacacacacacacacacacacacacacacgacaatgatgaagagctgtctttgacagccccactccagtctacagaccttggctgtttggcttctgtttgaatccctttattttctccactccccaagaacagtttagaatttccaaccaatgttatcttacagttttggagaagtttcaggtatacagtatatctaagtgaaagattagagaattttcaaggtctccctgagtc

SEQ ID NO: 20762 - DNA, 1160 bp, Mus musculus
ttcaagatctgacacccgcacacagacatacattcaggcgaaacactaatgcacataaaataaaaataaataaaattttaaaaaattaaataaaaggaaaagttaatcattcgttccatttgtgttgtgggcacacatgtgcgctaaggacaacttacagggcttacccctctccttccctgtggcagtcattctctgagatcaaactcagtacctcaggcatggcagcagacaccgcacccacagaaccattgacctgctatttcatacgtgtccagccatttaccacatgttgatctcttgggttgtttctgcttcttgcccatcgtgagcactgctgtatgaatctttgtctgtgttctccaggcatgattcgtaaatattttctcagtcttttttttttttttttcactttcttgttgataacacttgacactaacttgcaataatccaacttagtcagggtttctattgctgtgatgaaacacggtgaccaaagcaagttagggagaaaagggtttatttgtgtacactttcacatcactatccatctttgaaggaggtcgagacaggaactcaaacagggcaggaacctggaggcaggaactgatgcagaggccctggagggatgctgcttactgacttgctcccatggcttgctcagcctgctctcttatagaacccaggacctccagcccaggggatgggatggctctacccacagtggactgggacctctgccatcaatgaatcactagttaagaaaataccctacagctggatcttaaggaggcattttttcaatggaagttccttcctctcagatgactttagcttgtgtcaagttgacataaaactagccagtacatcaacttacctacttttttctttttcagatttgtttctgacaagcacacaaattaacagtgacaatgaaagaaaaaaaatcaataatgcttgttaagccaagtctggcctgcgagcatcacgtgtttttttgtttgtttgtttgttttgggggcagggcctcactgtgttgtcatggcaggtctcaaactcagagacccacctgcctctgcttcttgagttgtaggagtcagggtgcgcactaccacacttagaatgaccatcagtcgtgagaagcagaagggaaagaagtg

SEQ ID NO: 20763 - DNA, 1168 bp, Mus musculus
tacagtctccccatctgtccatgggttacaggcagcgactacctagctagggaggggcagccgtggcacctgccagcacctgctcctcactcttcctctcaggagtggctcatgcagccagatgtctcacgtcacacacatcctgctagattctgtgttgactcctgtgctgctgtactgggacaccatgtatgcttggcctaaggaatggctcccagaacctctgttgttccttctccaggtacctggcagcatgaggataacactgtcaactgtcgccatacccagcgccggcgcttatcctccagcagcctggaggaccctgaggagaacaggccttgtgtatgggatcctatggctgtctgagggcatctgcacctccacctgggcgtcccctcctgtccttgccttccatctgccctcactggaccacgagccttctggtcatcttcaacaagactcgtggacttcctactcacatgaagggaggacgatgcgcaaccctccacccacctgcctcatcgcctgtaaccgcgattcttaccctctcagaaagaaccagaagccttccctctgtgggctaatacgtgccagccaaacctgtgggccagctgagctgagggtcagggctggttgtttctgtaggctttctcttctgagtggagaccaagaagactgaagagtttggcagccttgttagacgcccatggacaggttttggtctctggcactcataaacaattagaaacctaacttgaactggttgggaacttgctccatgaggaaggccatccactccggcctcccagaacaccaggagctccttgcccacgcctaagggagagggtagccaccgaactattggttggaagccagatctaacagagttggtctcctgcacctccggtgtccacagttaggaagataccccttgcaaggcctgtcctcctccagtgcagtcaggaaggcctactgggccacttccctgcagtgcttgggcaggctcttcccatatcgtcactacagccactgagggggtcttgaacccagctaaccacttctctgccctctttgtaatagctgaagaactaggctaagagctgaggcccagtggttctcaaactggtgcacaggaacaccaaaggaatggtggaggctctggggccag

SEQ ID NO: 20764 - DNA, 1173 bp, Mus musculus
atgtggctgacttgaagcacggccccctgcagggctggctggggtggggggcagcaccacaggctgtggtttgctcttcagttagatttgtctccagtgagcctggaaacgcagcatgccctgcaggccttgggaggaggaagaggggtggttagggaagtcactctgcccatcccagaagccagactccctgtcctctctgctcccaggcagatgtgtgccgcggcctgcgtacagtagccctggatacggttgctccagcagaggtcatcctagatgctcctgctttagcacgggccattgccattgcttgaggggtgtcaggggtgcatgccggcttgactgctcccagggagcacatctgcccagggctaggagcttccctgcctctcaagagatttcagaacccaacatggcttccccaaggaaccttttcttctaagatgcacatggtggccagcttgttggcactcacctcttcatagtctccatggagggtttgcctcctttcttttcactgagaaagaaaggaggagtttaaaaaacaataatgcctacaactctcccttgtcctttcatatgacctcagctctctgggcagtctctgagaacctccagtaacaaacagcctcagcctcctgagagtgaaaatcaccattctgtgaacagtcattccgatgtgctgtgcagaactgcgcaacccagagccatgagtagtgcactgtgtctgcttctgcaggcccttcggtcataagcacacctcactcatgcctgggagtcacaggcctgaacaggggaccatctcacctcagggcctcaggccacagtgtcatcacctcagggcctcaggcctcagtgtcatcaggctagcccgggtgcagctgcccttctgacctatgtctggcagccttccataggaaccagacttattaaggaacaactagaaaggggcacctaaagaaatgagccagggtgtccgcgagaacccgacatgcccacacaactcagttcacaaaccagggtgcccgcgagaacccgacatgcccacacaactcggttcttctgtccactctttacttgattttatcgtctttttttttttgacacatgattttattttatttttttactttttgtctccatcttaaaacttttatttttttttttaaggac

SEQ ID NO: 20765 - DNA, 1192 bp, Mus musculus
tgatgggaaaagaaagtgtgtgaatgatggagccagcactgtatgtgtgtaaatgaggctgacccccaggtgcctgtaggatcagggttaacaaactgctctatgtgatcagctaagggggtttgttctttggtgtttgcaagcctctgccctgcacacttggttgtctcccctgaaggatagatagggcttgcagctcctccctgtcacctgcagtaaaatgcagaagctttttgccgttaacttggccacagtgagtcctttggtgtttagaacttcaataagagttgttagggtttgtttgtttgtttgtttgtttgtttgttttttaaattagttttccaagtattgaacactaacccatatacgcttcatatgaagggagaaaaacagataaatcctgcttttttgacaccatcttgaatcctggttttcccgcacagcaagcttacctacttactgtgttggaggctgcctcctctgtcaggagtgtgcctcctcctcctgcctcactgtttttcattcacccaagagcatcttccagttggggacagccatgtctttataaatacactcctgctcccactttgtctctgacagttcccttacgctgccccgcctccccaagaacctgtgaagactctgagaagcctgatcaacatccggaaggacacgctgagacttgtcaagtaagtccccaagggcgcaggccaggtcccaggtgcccttctgcttgtggggcaacaggtactccacaggagtcagagcagctcctgacagccacggcctcctgcccgcgctcagatgacagctgctgctgctgctgctgaagcacggctcctaagatgaggcctcctcaggctggggtgacttggaacatgaccgtgggcagtgctctctacaggatgaaccttctcctgcctgcaccggcattttaagtactctctctattctgtggatctaaaatcaaagaactctagttagaagaaagggaacgtttgcagacaccccaacaagcctgtgtactgatgagctgcttgagttaggagtgtaaaagccaattttagttggttatggtgctgtgcacttctggtctcagcagtcaggaggcgaaggcaggacaacagggtttgaggccagcctgggcttcagcacaaaacacggaagagagacagagacacggagagaagac

SEQ ID NO: 20766 - DNA, 1267 bp, Mus musculus
gtcacagctgcaggacaggttgcctgtggcaggggctgtactttatgtctttctatcactagagcctaacattagcctagagtcccagggaggttcaaaaggatattaagagaatgagggagcggatgaggccagcagatcagtgtttgtctggcagacagggacaagggactgatgacagttggctggctgtgatgactatgaaaggaaattaattattgtctcaaactgtgaaaaactaagagaagaactgggaattaagagtgcttagtgcactccttttctccggcggccgggaagatggcggactttcagatggagcctgcttaccaaaagcagcctacgatctttcaaaacaagaagcgggttctgctgggagaaaccggcaaggaaaaactcccttggtagtacaaaaatatcggtctaggcttcaggatgcccaaagaggccattgagggcaccacatagacaagaaatgccccttcactggtaatgtctccatccgaggtcggatcctgtctggtgtcatcacgaagatgaagatgcaggggaccattgtcatccgccgggactatctctattacatccgaaagtacaatcgctttgagaagcgtcacaagaacatgtctgtgcacctgtccccctgtttcagggatgtacagattggagatattgtcacagttggagagtgcagacccctgagcaagactgcgattcaatgtgctcaaggtcaccaaggctgctggcaccaagaagcagtttcagaagttctaaggagactctggccaatgccctagaacaaataaagttattttccaatgtaaaaaaaaaaaaaaaaaaaaaaaaaaaaaagagtgcttagtgcagccaggcagtggtggcgcacgcctttaatcacagcactctggaggcagagcaggcggatttctgagttcgaggccagcctgctctacagagtgagttccaggacagccaggactgcacagagaaaccctgtctcaaaaaaccaaaccaaaccaaacaaacaaacaaacaaacaaacaaacaaagagtgcgtagtgctcttctagaggacctgagtttgcttcgagcacacacatgaagcagctcacagctgcctgttaactctagctgtgaggaacctgatgtcctcttcaggtctccaaggccacctgcactatatgcatacactcatacagacatacagatattcgtaattaaaaatagtaaaaatgaagccgggtatggtggcgcttgcctttaattc

SEQ ID NO: 20767 - DNA, 1240 bp, Mus musculus
atggatggccagagatgagactggacgccactgggctggagcagggggcagtccagggttgtggggacacagatgagggctgggagggggggaacgcaagagggcggggggtttcttcacgatcgcactggaagattttataagagttttggggggggggggacagtaaacgtcctgagccacttgggttcttcaggagtttctcttagggaaagtttttttttcctctttttaatatataactataatatatatgaatataaatttagctaatgtttgtgagagtggggcctgcacacgtgttcctgtcagaggcaaggctcacattccttgccagcacctctttctctgcccaattgaggggaacaaaagggtgttcacagatggagcgagcttgcagccgcgtggctgtgctgctctgtgagaaggcgtgccagccattaggaagccccaccgccaaaggaggtgcacccaggagggtcctcagaatcatggacttctaccccattgctggtagacaattttcatctctgctggtggtggcctcttgttgactctgaaacttgtcaccttgtcaccagctagatgtcaagacttggctgccctctgatgtgggtgcttctgccccttccctgttctaactgtccgacaggctcccagtctctgtgtgtccaggccagaggaccagcactcaggagagtctgcctttggattgagttcccaaattagagtcatcgcaccagggtgcaattttaatttaaaaacttaaaagacttttctaacttccctagtttgtgtttttgtttttgctttggtggggaaggtcagtggggtccctggctgggggcagggcattgtcatttggcttttcctaatgaggatgcattgcccaccatgtttggtggtggtagtttctgagccagcagctcttagcctcctgcaggatgtcaagcgggcgacccatccgcagtgagttgctcctggaggctcctgtggagctaaatctctgctgcccctcaactctgaggagccaaacagcagaatgggaaagaccagaaccaaaatgaaatgaaacttacaggccccagccaggaggccaacacgcgcgcatgcgcgcacacacacccctacctctcaggtggagcagagcaatgggcccagctaccttctactgtatgtgacacatggctggacttgggagctgggtctgtcctttcggttttgtttcctagttacaacc

SEQ ID NO: 20768 - DNA, 1240 bp, Mus musculus; identical to SEQ ID NO: 20767

SEQ ID NO: 20769 - DNA, 2002 bp, Mus musculus
gcacctcccagcgttagaccaaagaggaggaggaagagctaccgcagcttcctgcctgagaagagcggttaccctgacatcggcttccccctcttcccactctccaagggtttcatcaagagcatccggggggtcctgacacagttccgtgctgccctgctggaggcgggcatgcccgaaagcacagaggacaagtagctgcccatgcttgaaagggagtgtcatggtgggagaggtcagccgctgcctgctccctcccttcctgaggtcctgcccctcttcctgccccttcctgtacctaattggagccttctgctgccctctcctccctgcggcaagtttgatgctgaagtgcaagaagtgtcccaagatgctgcgttctatccctcagttatgtttcaaaggcaggcacctgaggcactgggaactcactcaggttccccgtcgccccaggcagagagtcctggcacttgttctctagctgtcccttctcaggtcagaggtggggtgttgaggaacctgcagatggcaggagggtgggcgtgccttgcatgaagtgtggctgctcctgcagtgttcccggtccctctcctctccagcttgacagtagcctccccacgtcccagcccctcctgcgccacacaccaggtccctcatcccctgtacctccatctcggagctgtggctgctgtggctggctctggcctgccagtgcgttatagcccttaggcctattgaacttactctctaagagaggataggacaccaggagaggctgcagccctcacgtgaacggagttgagaatgtgctgcctggacagaaatggctacaggtgccttgctcttccagtccaagatggcagtgataatggcagtcctgcccagacctgcctgttatctgctccatccagcctcattttatccccactgaggtgacaggagcatctgcacaaaccaggccagcgacaagggcctctcccatccggtggctcagcctctccagtcagccttggcttatagactctctgcaagggcagtctgaggggggaggctggccggcagcgggagctcccccccaccccacaggcccagaggtttacaagtttctaagcttttgataatgtgaagctccaggtagagaggatgcctgccggtgagcacattacagctcttgtcgtttctggtgtatgtaatatttaaggttgaaaaaataaatctcaaaagcaaagatactaataactcttactagaaaaaaaaaaagacagacaaaatacaaaacacaaaaaaagccaaagcatgatgcgtcttgtcagccttaagtgggctccacacctgtgctgtgccaggaccaccggggcagcagagccttgggaacactcaccggggacatgggcctggtgggccatgcttcccgggccattgttcacgtggagatgtgaatgcctactgcttacaatacctgtataaagtgctgtgtgattaaactttttttttaacttgcatttttttggggggagttggctcattaacaaaacaagatggcacattaaacctgcctctgccattcattcaggctgatgttgctgtctgtgtgccaggacccaccctcctatacagcttccccaagggagactgtggtggtgggtctggctccactgcctgatggccttcatctctcgtcacgtggagtctgttggggtgagtgtgattatccagacaacagccacttctcaacgctgggtagtggaagccagtatcctacagctgcctcttcaggattcccgggaaattgacaccacagcatctagcaatggtcaagtgtcagtattgtgggctccagactggaacggttgcccaggttaggggattggcatctaccctgtcccacggcttccttttcatttctgcctagaattcctgttaagtgcaagcagggaagggctgaggtgtcctgggtggacccagagatagctcatgggtgtagcccagtttattttttaag

SEQ ID NO: 20770 - DNA, 1200 bp, Mus musculus
agacagcacatgcctgggagacatcagaagggagtggggctcagtggggttcagtggctcgagcagggaaaggtggccttctctttacaggactgtctgtccagatccaccgaaatggcccaccgccttgctcttcccagcctcccacttctagatctttgtcttaacacgcctcacagcatgatcaacagtagacaagacagcctgtgtgcccatccatcaggaatggagtcttggtgtgttccatttagtgaggcctttcctgtcaaaggcaaagacgccagtctgtgtgtcctcaagggaaagacgcccagaccagaccagagaacctcagctgttttaaaaaacctgtgctgtttccaggagagagcggccgccctgagggatgctcaatgtctgctttgccacactcagtctttttgtttagtgactgggatatggctgatttgggggagcgcttaccttgcaggcatgaagccctatgcttgatttccagcaccacattcacagctgtaatcccagaggcaggagaatgaggaattcaaggtcccccttagatacagcaggttcaaggccagcctgagacggaaggagaaaatgagaaatcccaggctagtggtagtttctgttatctttctcgttccttcgcttctttctaacagatgtagcccaggctggtccagactgtcctcaaactcacaatcttctgtccttggtcttccaagtactgggatcagaggcttgtacacagaggcctgttatgttgctaggctagccttgaaccccaccccacctccggaaccaaacagccctccctccctcagcctcctgagcagctgggatcacaggtgcacaccactagaagtggcttccgcttaactccaaggagggtctaggcacacttatgggacagaggacctgcatggtgggtttctcttccctctgggaattagactgagctaccacttcctgtgcataactctaggcctgcttccccaggaaatgcacctgccctgcagggttgatcgctggtcacagcagctgatgcctgcccagcaacaccaagagcactttattggcagtagtgtgtctggttgtcccttgagcctctcccccagcaccaaggaagggccctttgtctgtgcccaacaccctggccactgacttgctccgaccacacccacttctttctgctccttt

SEQ ID NO: 20771 - DNA, 1206 bp, Mus musculus
tgtgaggctcccctcagagcaagagccaaatccctctgaggatgggctggaaagaaaaaaggagtccttgagactgctggtcaacttctggagagagtcagccctgagaccctcggctttcatctctcgttggtttaaagataccctttcatgtgtactatttcggtatgtgggatacgccttaaacgtttcagtgaaataccgaatgtgagatgtaaggaagaagtcttattgtttaagtttcaagctgcgggttctgttgagagttctagttctagttagcctaaatgatacccacactccccatttcctcacgaagaattccctggaatccaggtgtggtggcgctacctttaattccagcactatgaggccagcctggtctggtctacagagtgaccaggacagccagggctacacaaagaaagaaaccctgtctcgccgggcggtggtggcgcatgcctttaatcccagcactcgggaggcagaggcaggcggatttctgagttcgaggccagcctggtctccaaagtgagttccaggacagctagggctatacagagaaaccctgtctcaaaaaaccaaaaaaaaagaaaaaagaaaccctgtctgggggggggggggagggaagggagggagggagggagggagggagggagggagggagggagggaggattccctggaagaagccaggcatggtagcataaacctttaatctcagcactcacaaggcagaggcaggtggatctctgtgagtttaaggtcagcctggagtgagttctaggctagccagaacttcacaataagtttctgtctccaacacacactcactcacacacacacacacacacacacaggaagaaaagctatgccttcagccaccttatctgcaaatccatttcctctaataaaattgccacttaaaacggagttttagggctggtgagatggctcagtgggtaagagcacccgactgctcttccgaaggtcaggagttcaaatcccagcaaccacatggtggctcacaaccatccgtaacgagatctgactccctcttctggagtgtctgaggacagctacagtgtacttacatataataaataaataaataaataaataaatctttaaaaaaaaaaaaaaaaaacggagttttaaaaataaacaagtttgaagactatgcagtattgtctggacctcatctgtt

SEQ ID NO: 20772 - DNA, 1203 bp, Mus musculus
ccggtgtaatttggggctatagagtgtcgttctgcaactcaacgtggttgccagaaccggatttccaaaaatgagttgggttggcactggggggtttggggggcctcttgctggttgagctgaggatgatttaagttatccctgtctgaaatgacacttttgtgaagagtcatggtttactgaggctcgacgttttgaggtctgttttgagaatgaccacagtaaggttgcttctgttagaatgaagtgggatctctttattactccttcagacggaggtgttgtctccaggaagcatcatggaaaggcgtggtggtgcacaagggccttcaggatgcctgcgcctggtaagagcttcatagagtcgcaggggttgtggtagctgggaagggttggttgttaggtttggggtgggggtggggttagaggttgttggggattgattgtccagaggagggcgtggtcctccttactcagcactctcacaagctgcatttaacattggtgaatacaaaattgttcctcactcaactgctaagtaaactgacgttcagtgagtgggttctgtttcttttgtatatgcgtgtgccactgcatctatgtgtctggttgacttgagtgagtttggtttcccctttagccaccaagctgttttttggcctagaaattgggttaagtaaagatttgggcctgctacctgggagtagcacagagccttgtcttctgtaacacagaatcactggcttccaaacctggatatctctcagaacacgtaaaaagtgttaaaatacacacatttccacccaggtcagtggatgagacgggtatggagtggaattaagagtcctcgaggtttgagcaggcatggagaaacggtttgatgaccattctcacagcaagaccagagcactggctatgtttaagcacctcctgagataggtttttttaatcctcagtcttaacagacagccatatgcttttgtacatgtgggtggggaaaggagacactcctttgtatagtgtcacctcttagtggcaggtgtggtaatggctgcccttcagtagggtcgctgtagtgggtgacctgtaccattttagggatttcactgatagtctacaaagacttgccaaagactctggctcagctgtaaggcagatgctgctggaagtgacctttttccagagtcttcccttgtaacctgg

SEQ ID NO: 20773 - DNA, 1203 bp, Mus musculus; identical to SEQ ID NO: 20772

SEQ ID NO: 20774 - DNA, 1625 bp, Mus musculus
ccttcgggatgcctctatctggtaagagcttcacagaattgcaggggttgtggttgctgggaagggttagtctgttagatcaggtgctgcagaatcgagtgtaacccttcctccctttagtcttactgtgtagcccgtgctggcctgcaacttgctatgtagacctggttgacctcaaactcagtttgtggcctttcaggtgctgggattttcatgttctcattttgtgttcccgaaaagcccataagcctatgatggattggttatccctgtctgaagatttcagctgagggaaaatactctattctgaggcttaggggtgtggctccatgcttgaagaaatttgagctttataagggatcaagttaaatagactccatagagagctgtgtgccaacctcccaaaacctaaggtctagttgcctgttaatcctcctccttgggtgctctgagggcaaagtccctgagttagcagaaatgggcgggctgccagcacctgtcctgtgctcactggagtgagacatgctggtcacatagttctagaaaatgaatgtcttcctttagaggaggcagggatgtaaggcgtgccatgagaatgcttgacgactctgtcgttgcctctagcggtgctgacatttagaaaagaagttgtggccctggcagcctcctaagtatcgtctccttgatggcacagaaacaagtggcgggcttgggggggggggggctttgctcagcccagccttagtaatgcagtgtacactgtgtcctttttctctatggaatctggggggtggatatgggcttacactaaagtagctgtacttgtggaattctctgcagggtggctctgcttgccttcacttctgagtggactcaggttcaggtcctcagggatttggttgaatataaatactctgatgtttcatgagaaacctttttttggccacttaccaggaacttcttaaaactttcttttaaaaaaaaagttagcagcctgcttctgaacttggctggtgcctgcctgtgtgtagcgcacacagtgccttgtgatggcggctggaatcccaggactatctgataatgcttgttcctaaagtttgtagttttgatcacttagctgcctgtctccttcaggttctttccttgtttctaggttattgccctgtagtgccagagagaaccacatagcctgctgctgctcctgcctttaatttcccaaagagtcatcagacgaccttggagtttgttctgcaagaggagccagtaaggcctcgtgactgtggtcaccctcggaagcctttgacagctagctggtgagggcgctcagtcggaggccctggggaggcccctgctaagccgagaaaagcatttctcacagtggatttcctggaagtcagggttggcctttgtattttgaagcacaaataaactttataaaatttaacttggtagcattgtgggtatatgagtgagccttagaaatacttaaggaccacttgcactgaactgtagagaatcagaccttttctattgacttgctaaaatttacttgtcacttaaagcataggttaacattgcataacacctcaaccatccggtggtaatgtgctggagggcacaggcta

SEQ ID NO: 20775 - DNA, 1625 bp, Mus musculus; identical to SEQ ID NO: 20774

SEQ ID NO: 20776 - DNA, 1129 bp, Mus musculus
tcattggtgttagggaaggcgaatgtccacccggggactctgaagcagctccccaagagcgtattcccagtacatcacagaacccattctcagtccttatgacctatagcagcgccaggaaacaattgttaggtaatcacagggtgggggtggggcaccccgcaggggctagcctgggctctgtcacagcacccattaaggacacgtccaaagctgttctttgggagaatggatcattatgtcctaagaaccatgagagggggtttggtcttctggccacagcagtcacctaagtttctaagcacaagacactaagaggaactcaggccaggtctcagttgtcatctgacatccaggaagtgaggaagaggacatggcaccctctgttttcaactctctggaccgagcctggggaggcaatattcctggctcctgggcagagtgcctatctaccagggtcagtggcatgaatactggatccagctcttagtttacagagccgtgtgttcagtgggccagctgccctgttgcttgtctgtccaccagcaggacagctgggacagtggcctacagctgaggtctgttcacccttcaaggaaagactacctctcatccagtagggctgcatgggccccgagccacctcaaagactagggaaccctgacaaatctgcctttagctttaacggtgacacttgaggtggccaagcattacctcttcattcgcgggacagagtcccatgagccccccacagttcacccaggagttcccagaagacacgcccactgtcagccaggttacagtccccactgctaaattatgctgaatatctagggattattaaattctgaagagagttttctcttcccttcacataacttctcgtgccgtagccagggctagagagccatcagccagctgctccacctagccatgggtcctcagaacaagaggggaagcagctcatgtgcccccacccccactcccttgtcagcagctcacctgtcccctttatcaggaccttctggaacaggcacacccaggatggcggatctcagcatcaggtagtcacggatgctggaggggatgaagatgtagcgcaggttctgtaggggcattggaaaaggcc

SEQ ID NO: 20777 - DNA, 1150 bp, Mus musculus
tctctgggtgtcatccagacacacctgcccgtgaattcaactctgagatcctcacaatctctgcctggaatgctctcctcttttgatgttgccagacagcgctttgttggccatggagtctgcctgtctctatctatgtcccatcagctgcacatctgcttagcttcaaaggggcgctctgaagacctgctgctgctgctgcaatggtttctgagacaaggtctctctgtgtggccctggctgtcctggaactcactctgtggaccatgctggcttcaaactcaagagatctaccagcctttgcctcctggtactgggattaaaggtgtgcgccccactgcacctcttaattatctttttattttatgtgtatggatatttccttgcctctatgttatctgtggaccaaatgcatgcctggagcctgcagaggtcagaaaagagtgtcggatcccctgagactggagttacgactggtgtgggctgcagtgtgctttcagaaagtcaaactctggtcctctgggaaggcagccagtgcttttagccactgagccatctctccggccccacctgagctgctttaggactgacccggctttcccacaagcccttctgcctgccttttatctcaatggctggcactctgtccccagtcactagcctcgaggcataatgcaagcttctctttccttcacaacaaagttgaagcattggagtggagagttgaggctgatttatctccctgtaagcaaagaaatgataggcaggcaggtgttacggtttaggttttccgtgtttctctttgtctgtctgtctgtctctctctttctttttttttttttttttttagatttttatttattttctgtataggagtacactgtagctgtgaagatggttgtgagccatcatgtgattgatgggaattgaattcaggacttctgctctctccggtcagccccacttgctccagcccaaagatttattattattattattattattattattattattaagtgtagctgtcttcagacacaccagaagagggcatcagatctcattacaggtagttgtgagccaccatgtggttgctgggatttgaactcaggaccttcggaagaacagtcagtgctcttaattactaagc

SEQ ID NO: 20778 - DNA, 1208 bp, Mus musculus
ttttggtttgcagtatctctataaagaacattgttcctctgtagacaaacttgacagtgaattttgttgtttagaagagaggaagtgctcttggctaccgtgctctctctccagatgtttctggatgttccgttgacttattacgtgtgtgcctgtacatctgagtatttactgtagcacacgcggaggcagaaagtgacttgagggagttggttctctcctaccaagtgagccccagggattgagcggaggtcctgaagtttagtgtcaagtccttgtcccggccctgaattgtttttcctccctgtgtccagtgtgaatctgggtcagaaggtgatgggacgacacaccgcaggaagaagaggagaacctgcagcatggtgggaaatggggacactacctcccaggatgactgtgtgagcaaagagcgcagctcctccaggtgaccacatgtggccgctgtctgtgccaggatatgctcgcagccaggcttggggggctgacacccagagaacaaggacactcagatgggagttggtagtacgtggtacagtggcttttctctgtggtcatgtcttaggggcaaaggcgtgtggatggtgccaatgaaaccctttacctatttaataaaaacggatacattttatactgtggacagctttctttggggcataccatagtctccctaagctcctttcctggggtgtgtgtacgagggggtgcctgctgctgtgtattctgttgggcgtgactagggcagtcgggaattactggagcagttgtcctctctgagagccatttccaggtgccgtaagcaatggaggccttctctctgagtccgtgtcaccgtgagcgggtgctgccagcagctgtcacagccctgagaacattgcctcatttttccccttggtttttcgagacagggtctgtatagccctggctgtcctggaactcactgtagaccaggctggcctcgaactcagaaatccgcctgcttctgcctcttgagtgctgggattaaaggcatgcgccaccacgcctgaccctgtataacatcttaatcattcctctagacttgtttctgtttctctttttaaacaagattagttctaagtaagccaggtgtgggcgctgggtgtgtttaatcgaagcatgctgaaggcagaggacagccagatctacacagaagaaacctgttccaaaaaaga

SEQ ID NO: 20779 - DNA, 2133 bp, Mus musculus
atgaacttttggaaccccaaaagaaagttacaggtattgatccgcaccgggtggggaaaggatagtgtgtctttaactctaaattgtttggtcctatttttctttttaaaggaaagggccctaagtagctgattaagaacatcctcaactgccaaacgtttcattttcaaacatcttacaaagtgtagactaatttctgatagcaagtttttgtttggaaacagccccaccctgcccccctaccttttttttcttttaaccctcccttgcctccttttttttcccccttttttctttctttcttttttttttttttttttttttttttttggtcttggttatttggccaagaatcacatatatccgaacatgctggtggtaccctttggaaaaactcccatttgggcctttaaaaaaactgataatggccaggtggaaccttctgtaacctacttgtttcaccagagccttagtaagtacatgcctgataatgaaaccatgtgcactttggaacctttttagtagtggaaagtaagctgaacctctttcttttcaaacctagatgaatcggcaagcggcttaacagaggacattgggggaaaggaccacaaactcagtccatcggtccatggaagagtccttggaacaagcaactggctattaaaaaggttattttgtaacatttgtctaactttttacttgttttaatctgcctcaggtggcaaacttcattttatgtgccattttgttgctgttattcaaatttcttgtaatttagtgaggtgagcgacttcagatttcattattggattggatatttgaggtaaaatttcatttttgtttatagtgctgacttttttgtttgaaattaaacagattggtaacctaatttgtggcctcctgacttaataaggaaacatgtacagccattacatacagcctaaagctgtcagcagaatgactcaacattgccttcacttcttaataattaaaaacctatgaaagttggtgtaatttgttcatatatgttatttaccttcaggtctatatgataatctgaacccaaatttgtataaagacttttcaggtgaaaagacttaattttttttttaaaggattgtttacccaacacaattctaatctcttctcttatgtatttttgtgcactaggcgcagttgtgtagcagttgagtaatgctggttagctgttaaggtggcgtgttgcagtgcagagtgcttggctgtttcctgttttctcctgattgctcctgtgtaaagatgccttgtcgtgcagaaacaaatggctgtccagtttattaaaatgcctgacaactgcacttccagtcacccgggccttgcatataaataatggagcatacagtgagcacatctagctgatgataaatataccccccttccctcaaaaaatgcaaaatggtaaatctgatcatccttgtgttgtgaacttttaaaaaaaaaatcaaaatgttaaggaagcaaatggtttgtaactttgtaagtacttaaaacatggtgtatcttttgcttatggatattctgtactataaccattgtttctgtagtttgattaaagtgttttcttggtgttagcttttttgagaatgtgtcctggtcttttgtttccctcattttaatccaagacctatacaattatttactttgaatgttaacagccttaaggtataaaatgtgggttggactgctttttactggtaggtacttcagtgtcagtgtggtcctactttaatgattgggagtagtctaagcctttttgaatgtttaattttgttaaagttatgttgaatgctatcctaggcatgacagcacagccacaaggcttacagaattgatcatcttcatacccattgagtttcctcagataattcagctttatgccaggttattccattttgacactgtcccagaacatattgaggtacaattcattcagaaactgtcctttgcaaaggagatgatcagcatttcaacagtatgtcttcctggaagggtagactctgctatgtcttccttgtcggcatcaaaagactccagaggaatatgcacacatttcatatcccacttgtagagcaagccttcaagtgaccagtcagc

SEQ ID NO: 20780 - DNA, 1112 bp, Mus musculus
gctatgtccctagctcaagaatatccgtttctaatcgttcttgggagccagcgccgatccacacaccaaagttggggacttgctactccagattaactgtcctctatctgacagtccatcaagggctgacccttgctcagatttctacttatatgtgaattcttattattttttttcatgtggtcagtttctttgtcccattgagctgaaacctcctgggccgggagctcgccccacccccgcccctggttcttctgtgcacccccacgctcccttctctcgcttgctggctctttgttggcttgagatctcacttagcccaggctgggctggaacttgctatgtcgttgaggatggtcttgaactcctgagcctcctgaacctcacccagcttctttgctcaagcttagaacatttctgtgcctctcctagttggaaataagacactagatggctgtgcgctctgctgacccaccctgctcctctctccctgcaggctgtttgtcctgggcatcggcttcttcactctctgcttcctgatgacatctttgggaggccagttctctgcccggcgcctgggggactcgcccttcaccatccgcacagaaggtaccttgaaagcaaggagaggaatgtgaatgtcctcgaagcagaggggcgatgcctctgagctcagcccctttagcaggttttttgggaccttggccctctgaacatgcagatgtgtaagagaaggggtcctgagtgtcaactgggatgtcctgctgcttgggatctggtcctatgagtgccaccaggattttcaggccaagaaggaggatctcgaagggtcagaaaggctcctatgtcgttttcctgtgtctgggttgatgtcctttaatacagcatccatctctttgagacccatgttgtgtgtttctcaccaggccaggctgtagtaagggacaggcttgcaaaggcctcacatggttcctgtctgggatgttggtctcgcctggtccttctctgtccctggcccaaatgacacttgctaggtgtggaatggagatgcagagtgtgggcttttgggaccagacaggctggaacctgcacctctagtttctagctgtgga

SEQ ID NO: 20781 - DNA, 1205 bp, Mus musculus
cctacgagctgcttgctgctctcctctgaccccccgccccctctgtcctgctcacccagatccttgtccacattggcttcctgacagaggagtctggggacgtgttcagcccaagggtactgaagggcgggcctctgggagagatggtacagtgggcagacatcctggctgctctctacgtgctgggccatagcctgcggatcacagtctccctgaaggagctgcagaggtgagtgccagagagccttcacatcctggtggggtagggaggggatgaagggcagcctggccaccgggctgatgctctgcctttggggcccacagcctggaggtggccctctgtcagatgccggtactccccgttccctcctccacttgcttatgtgcttcccgcttcctcttccatgcagacacacgtttgtatttagaatccacagaggaagcgtgtttgcatagcagcagtctgcaggctcttggcctttgccaagagactagggtttgggtctgtgctcataggctaatgcataatgttttgagagaggagtcaccatgtccacatgaggtccctgccccgagggtcttcctggtaggatgggcatagtcttcagggggtgtttttaggagctggactccttgggcattctacaagggcattagggttgacagtgatgctgactgccagtgctgggcttgtccaggtccttctggaactgtggaacatagacacacccccaccctgtgtgtggtggtgaagagggtctaaaagattgtttgtgtgtgagaatgggggtaggggttgtctggagagtaagaacatgtggaatgcaaaggaactggagtgagtgagtgtgtgtgtgtgtgtgtgtgtgtgtgtgctcgcgtacgtgtgtgagagagggagacagacagatagaatcagagacagacagcgacagagagacaaagtcagataggtagacagacagaggagtactggcagataggagtgtgtgtgtgtgtgtgtgtgtgtgtgtgtatgtgtgtgtgtgtgtgtgtgtgtgtgtgtgtatgtgtggttttgtgtgtgtgctgtttgtgtgtgggtgttgtttgtgtgtttgtgggtgttgtttgtgtgtgtgtgtgtcttgtctaatgtctaattggggtaatgtttttatcgctcatctgttagatgcagacatagctaagctctctcttacttt

SEQ ID NO: 20782 - DNA, 1126 bp, Mus musculus
aatgggtcacccttagggatgatgaccactgagggctgctgagccagtctgtcctggttctggcaatatggtgtgggtgagagaggctgaggtccagcctagcatcagcacagccgggttatataaactcctagattcttcacagcagtggtttggtagctggaggggtgaggtatggcttcctgggctctcccgggggagccacggtcctattcttagccttgagcttgcttactagcaaagagcattgggaaagatggtgttagccttagacaacccacctgctctgtctgcccagcactgagagaacttgcttcctcagtttcctttttttgtcccttggtctgtggccaccgtggatatctctgaatctatctctgtgatttatttcacctgagccactcctgtggggacctgatagttctccctggcttcaggtcaggaccctttaagagcccctgtacactctggggtgtgggtatctgaggacacctacctttccaggaggtgggaaccgagggtgagctctctaggatggcatcaaaagcccgacattggacaaaggatgggcagccatgctggtaggagactgtaattccctgttagcaatacccctgcttcctaaacagttccacagatgctcagtgaggtctctgggttcctccattgtgccacctgatgttctggggtggggacaatgacctgaggggtcatgggagaggaaagggcaatgccagcgatgctaaggagatgggtagagaccaggagagacagaacattcaagcctgcctggtcacatgttcccagcagtgtgacacatctggggaagtccaggacccctgggtgccctttagctctggagccaaaggtatttgtttgagcactttgtaggagatctttttaattaagtccctgctacacacacacaaacacagagagagagagagaaagagagagagagagagagagagagagaggcagacagacacagagacaaacaaacatatgcacacgcacacacacaaagagagacagagacacacagagacagagacaaacaacagacaaacagacacaaacacacatacagagagagagagagacagacagacagacagacagacag

SEQ ID NO: 20783 - DNA, 1190 bp, Mus musculus
tgggtagggattctggagccatggtctctgagtgacctggccctaggttagctgatcctataggagctctggggtttagactacaagctttggaggggggcagtaaaagtggaggagtctcccatgctcaggtccccgggagaccacccatgaaccccgttcttcccaacaaagcatagcttacaaatgactctggacaatgaaggaaccccaaccccttcagacaccacctctcttcctagcctcactccagtggaggtgatggcttggcttctggataccaaccaggggccctgcaggcatccagagtggcctctgctgttccgttggggaagctggcacagagagcgtgatgtaccgctgtggtcacacggtgaggcagtgcctaggtggagcccttgtcaagtactgtacttccctgacctagccacagcacggtcacaggggcactccgagtccagggacaggcaggaaggtttgacctcagtcctggttcactcttggggaggacaggtgcagaatccgagtcatcgacacctttgggacggagccagcgtacaaccacgaggagtatgccacgctgcacggctaccggaccaactggggttactggaacctcaaccccaagcagttcatgaccatgttccgtgagtgttactggcagagaaaggggtacccctcgtatgtgcaggagcgggtctccccatgcgtgcaggggtggggtctcccaatgtgtgcaggagcagggtctcccaacatgtgcaggggcgggtctccccgtatatgcaggggcgggcctccttcctcctgggccaatgggatggccttaacaagtagagagaagcagacatcacagagactctagaagctgtgtccagagctgggactgattcaaggctgggagctctcagaagcacgtggctcagagcgggggtggggggtgggggtggggcccagtggacttctagaagtttccaggacgaatcagagaaactggaagtgggtggggcaaagaaatgcgggcctttctacacaaagggacgataactaagcagatggacgagcctgaaggttctggaaacatgggagcttagttaggttccaacactggggcgagcctgaagaaaggggaccaactcctcgggagcacagtgcctcaggagcacagcgcctcgggagcactgtgcctc

SEQ ID NO: 20784 - DNA, 1148 bp, Mus musculus
actgtgtgtgtgtgtgtgtgtgtgtgtgtgtgtgtgtgtgtgtgtgtgtatctgtgaatttgtgtatatgtgtgtgagcttgagtgtatgtttgtgtgtgtatcatgtgtgtggtgtgaataagaatgtgtgagctggacagtggtggtgcatgcctttaatcccagcacttgggaggccagccaggtctacagagtgagttctaggacatcccctgtctcagcctccggagtgttgggataacaggtacgcaccacgcctggctaagccttgactttaataaaaattgaaagctgtcttttgcagaccgtgcctctggtgccgtagccaagaactcgtgtttatcccaaagccacagcttctctctggcacctctgctggttctgtggttttagtttttacctttgagcctatgattaattttgagttaacactgcaatataatgggacatgcagatttacattcttacaatcccgtgctgccccacgggacccagactcgaatgctctctcccttgctttgcatgtagatgataaatgccctggactgtttgttgaagaggccatcctttctgctccgaaacacgcccccttttcagcaatgaggactgtgggtgtctgtgggatctgtctggactcagatgcgccaccccaatgatctgtgtcatcctgatgtcaccaccctgctgtccctgcccctcctgctgcacacagacccgggggtcaggtgctctgtctgcctatgttgtttcatttattctaggttcaaagcatttccaatgggttttatcctcaccctgtcaatttctgtagcaaagccttctggattttcaggatttttgtttttgtttttgtttgtttgtttttgttttgttttttgtttttcgatacagggtttctctgcatagccctggctgtcctggaactcactttgtagaccaggctggcctcgaactcagaaatccgcctgcctctgcctcccgagttctgggattaaaggtgtgcgccaccactcccagcatcttgatttctttttttttaatgtgttctagaaaatgaatatgaaaagaaaatcgcagaaataatttgaagtcagacctgatgacattttcttccagagagggttagatctgagtcctggcttgtag

SEQ ID NO: 20785 - DNA, 1332 bp, Mus musculus
ttcagctgtgctggtgccagcaccaagtaccagaggctctgcccctgccgtgacttccgcaagggtcaggtggccttgtgccagggctgcctgtgaggccggagccaccctgcccagaacctgcccacccgcacgtggttggcaagcaccagcactttctgagctccggtcacgctcactacgtgtcccctggctgcagcctcccctggccagggatgggaagaggaagctgaggagacagcagctccaggcctgcagctccctcctaggggcttccttgcctcgccataggacctgaggccaagcatgtgggctgacctccctgtcgggtgtacccaggagcacgtggatggagatccctggctttctgaggtctggaccagctggagatgtggccttgaccatgcttggacccagcataggccttttgatccacaaggctgggagcatggccatgccgccccctattcaccagaggtctcaagggatagggaacaggtcacagccacacttgctgtgagggccacaccctcacatgaggcaacagttcacgcagggccagtccagcctcctcagttgcttgggggggggggggaacgacaaagggacagagagctcagggaggctagtgcccctccctgttgctcaaccctgcttcctccagcagacttccctctgggcctctcctgacacccagttctggcatggcctgtgactggtccacagccttggtctctgcccctctggtggccacctccaccctagcttctgacaacaggtcccaggccccaccaaggcctcctctgcagactctgacaacatttccaaccttcgagcatctcatgccggccaggctgggatgaagtttcacccacaatacactaggctggttctgatacgcaggtccatcagacctcccctggctcccacccttctgggccccatacttgcccctcccttctctttcctccagcctcaggccacttcagtacactcagacttcagtacccatctctgtggcatgccctcctccagtcctgggtcacccttccctctcccaccccagggccagccaggttccaggaacactgccattgctcatatatggcccgctcccaggccccctgggaccagacagttgtaggaaggaactttcctgcgtgggacttgccagtgtcccctgtcctggttggcccctgtctgtggcagcagaatccagagcaacaagagaccagtggttccgaggatctgcctgtcggaggaaagcaatagagacacttatctctctcttctctctctcttttttttaaagatttatttcttgaaataaat

SEQ ID NO: 20786 - DNA, 1198 bp, Mus musculus
gctccgtgcagaggggatgcatcctgcgcagcgtggctcgggggcgccgtggagcctcccgaaggcgatcgtgggattcagaaacctctcccgggactcccatgggaggaggctgaccccgggccggcacgcgatcgcgggatgggctggagttgtaggaaggccctaggcccgggccgccatcggcggggcactggctgcttctgtgttgcaggcgccgcacgggttcgtccgcttacacagaattgtattaaattgtctttttatttccccacccaggaaatgaaccacatcccccaacgactagacggaagcacgcacaagctccttcctcccgaggagcgtttccagtgacttgagcttggttggcccaggtatgtcaatccttgggggtgggacggtgacctgaggccgacggtctgggaaaaggctcctgtgtggctgtacccgcccgaggtgggtgcagccccgtaccagacagcccgaccttgacctaaagtaaaatcccagaggaggaggaacctcttccctggggttagaatttgcagtaacaggtgtggacatcctagcagcagtttggtggtcatgtatgatactgcaaacaggagccctgctgaagctgtggggactgagcacagtcctccaaaagcaaatatttgaccattactcaagcccctcactttagataaaaaagagaaaaaagacgtattcattattttattttattttagagtgtggatgtttgcctggtgcccccaaggggtcacaagagggtaccagatttcccagaagtggcattatagagtattgtcagccccggtgtggatgctgggaactgaacccaggtcctttaagagggcaacaagtgttcagcttcaatgctgagccatctctccagcaactgcaccaccccgctctgagatagggtctcacttagcccaggctggcctttactcattaagtagctgagggcagcctttgaacttctaatcctccttcctctgcctctggtagccgcctggatgaccggcatcctcgagcacacgtggtttatgggatgtacggataaagctcaaggctatatgcatgctaggaagtcttctactcctgggtgtctgtcccacccacgtggagcttaaacaaagatgcatacagttgtgactccagacgtcactggacaagacaccagtacaaccca

SEQ ID NO: 20787 - DNA, 1163 bp, Mus musculus
tcttgagaaggtcctgcttgttacacgggactctgcatctgttcaggtagacatcaacaagtcatggaaggcaattggaaagagacagcacacagggactatggcggtcctgtgagggaggtacagatggggtcaggaacacaggcatgctggagtcagacatggctggaggggagggaggtcaaataggaatggatttcaagttgtgctgagctgcagaggcctcgtttctgcatctgtcaaccagcaggtttccaaggaaagcctgcagttaaatctgggcagagaaggttctggaagtcactgggtgggtggccagccccgggtgtcagcagtttttatccatttggaaggacaggaaattaaaaagactgagcaccttgtacccccaccctggggcgtggtttgcgttctggtggttttaactaaacgttgagattccaggtttaatgacgactggtggtgaattttcttttttttaggtcatttgactagaagctttgtctgcgtgcactgagtgaggatccggccctactgtgtgtatccctactgcgtgctcctggacctgttgggtttgactcttgatttgctgtttttgggtattcactggctgaggacagtggctgtgttcagtggctgtaaataaatggagcttgaactcactctgtttccattgttcaatgatatctcactgcgcagccctgactggcctggaacccagatccacctgcctcccacgtactgtggtgaaaggtgtttatcaccacacccagcttcttcacgctcttggtggtttctgtgctcgccactgtagcaagtgtgggtttgtatggccagtgtgtgttaaatggccccttttccagattttttgggcacaaagcacagggctatccaaatatttcattatggaatgtaggggctgcggagcacagtgttctcaaggaaattgagtagcaagggttgtctggacaggagatgtccaaggtctctgggatcccatggccttctgggctggcctagccctcttcagtaggattacctgacagacattggctattctaggatctgctcacctgtgtgcactgaggatactgaagctggtactgtctctgcactcgggagatggttgtgaggggccatgtggctgctgggaatagaacctt

SEQ ID NO: 20788 - DNA, 2206 bp, Mus musculus
gcccaggaggggctgccagggctcctcgtgaatcctgacaacaccgccatcattaaacattgctttctctttcctcctcttcaaatcttttgatatttttcagagcaaaatttttctgtccgtgaacttggtggaggggatggggaggattctttccctctgctgagtgctgcctttccttctgcaggaggcggctctgtgcccgtagcacccagggtcctcagtcctctcagaacccagggtcctcagtcctcccaaaacccagggttctcagcccttagcacccagggtactcagtcctcccaaaacccagggttctcagcccttagcacccagggtactcagtcctcccagcagcacccagagtcctcagtcttcctagcacccaggatcctcagtcctagcacccagggtcctcagctctcagcagggtgtttggaagcagtaggtcacacttgcctttagaagtgtggcagtgcaaactctagcaatgctctccaggggggtgcatggcttgcagtggccttcggcatgtgggtggatgctgggtatgtgtgtaggtgttgtgtgtgtgcatgagggagtggggtgtagctggggaggggctgcagatctgcacttgttcttctgcgtttcatagaagcaggtcagaggctggggctagtttgccttttttcttctttcttttttttcccctgatcttgactccccagagcctgctgttggagcagatccttgctttacggcttttatggggaaagcatgcttcttagcgaactgtctagaagttgcaggtggctgatctccagaggaggggggcccaggatctacttgtgtgtgtgtggtaacagtgtctaaagatgtgtgccaaatccgagtggccatgagagtgtatggcgggagtggatgcctgtgtagacgctgctctgaggctctgggtggctggctgtgcggtgagagctatggagaggctgtggcatgtcagcaagcatgaggagagccgacacagcagcctggcttggccgatgagccccctggctcctggcaccctgagccgtgcttgagcctctgtttggtggcctttctggcccactgccatgcctttcctgtctgtgggagcgcttgtacacagcacagcagggctgtagctaccgcgtccatgctgcttccagtcagggcttcccagctccgagtgaaaggacctgaagatgcccctgctctttctctcttctctctcccttcccctctccctttctccatgtcccagatggcgattttgctgacatcctccaagaaagcgcttcactcgacagcccacatgtgcccagagatgtttgtagacctatctgagtcgcagccatgtcccaggctgaagagctgttccccttaagtccatgccgaagaggcactgttgaaccccccagagctgagagcatctttaagagctcaaagcacacaactgcacactcacaggccctcagcttccccgagccacagggcactggctgccctgtaaggggaggctggctacgaggtgaccgtgtggctcgcacacggggctgctcctcccagtgcccagcacctcctaaaatgctgctccctccactctgggctctccctgtttctagtgtcttaacccattctccttcctgaatccattctttgcatatcagattctgtaaatgttttgtaaacatattacctcactcttggtaatacaatactgatagtctttaaaagatttttttattgttacaataataaatgtgaactgtttaagaagagtgtccttttcttcttgggaggccccaaggaagaatagagattgagaggagaagctgcccgtgcctaaaggcaaggggaggccaagcggctgagtggatggccagcagtcaccctgtgcctctcgaaggcctgctgtgcagatcagcacatcagacatgtgctgcagagtgagttctaggatagcctgggctacatgccaaaaccccgcctcacagcctggctctcggtatcattgtattacttaatagtaaaatagatttctccaagcaggtgactctggaattcaagacagtaagcaggtgtggacctggggaggctagagtgacctcatcttggctctcttgtttctggggtctgcaaggcaacagagcccgggacagccgggcacaggtctgggaggaggaaggtcatcacggtcttg

SEQ ID NO: 20789 - DNA, 2448 bp, Mus musculus
accagagagcgagtgaacgccacctggttttgctgggtatgcacagagagcctgcaggatggctctaagagccaggaggggcaggcggttgtcatcccaggcaggctaagtggtcaccccctcccccccaatgctggccatgttccctgcaggacgcacatgcaaaacatcaaagacatcaccagcaacatccacttcgaagcctaccgagtgaaacgcctcaacgagggcaacagcgccatggccaacgggatcgagaaggagccggaagcccaggagatgtagatgcgtcccgcccctggaccccacccccagatcttttcatcatccctggcccacccacctaccctgtcttattttatataattatctccttgtcacctgcctccatccatctcttcccacactttgccaggtaacaagagagggtttacctcccaagtgtgctcttattggctgcagcagcagggtgggcggggctaagcctgggcttgcctctgtgctctatttccacccgggctcagcccctgaggggttagaagagctatgtgtccgtcccccgctctgagttctaagctgaagcctgtgggggccaagtcctagggggtgcagaggagcccgttagaccacaagaccccatggccgcagcctcaagcaggttagagactgccccaaaggaggatggagctggccgggtattcctgaaacctcacctgcccctccgggggcgtttcttacagcgccctcagctgcctgcccctcaagggaactagaggcgtcacagccaaagttgccaatcacttagacaaagtgacaaccgtgcccctcgagcttgtcccagagcagaaagtgccttgatctacaagagccagtcacctcttcccagatgtccctttgggtgaaaagcagggacgtgctggagagagggaggtatcttttctccctcgcccttgggttctctctcccctgtgctgtagatatcgctactacactgggctttaattataaaagacgaagcgtgaaagatgctccccgatgttaggaagccccgcccccaatgtaaggaaggtcaaagcaagaagatgagtcgaagccatgagggaggaagccgtggaagggaggcataagagtgtgtgggagctctcctgcccaggtgccgcggaaggcatatccgcgtggtcctcagtttgggccaagatattctggttacattgatgctccgctgcctcaccctgtcccaccccacacaccccaggctcaagccttgatgattcagtgactgtactgggtgggagccagaaacctgaccattttgttgtctacatgagcctagactagccctgtgccccagaacccatcaaaaatacccctaaagagggaaagatgagggggtcagagatggatagccaggctcactcatcttctctcagagggaacattagggaccatccatgcacagctgaccaaagccgtgtccttcctgcctgcctcccattctcatttgcccctgaggagaaagtttggtgaggtgcgttaggttggacccgcttggggaaggtgcctctacagacccagggctagctttctgcagcccagaagtgcagtgggaggggtggggtgcagacagatggagacgaacattgtttcctgctttgggcgtctactccctcatccaagcatggaagggcccctcgtcatgccctgtggccgaacagttcgcttgccagcttgccaagttcttttgccaaaatcaggactttgaaggaaatctccagcacgctggacccagggcactccggccttcaccagcccaagtgaccctggggatttagcagcaacccggtcatcaggatgactttgtgcctctgtaaccaggtattgaaactgttcgtctcaccaggccggtccacgtggccctctgctgggggcttcctggtgggggggcagaaaagtctctctctctctctctctctctttttttttttttgtataaataacaaagtgttgaaatgtatttcctgaaataaatgtttcaaatacaaactttttttctggagttctctttggcaagacctgtctggtccattaaaggtggtgaggggagcacgggagtagaggctcccagtggaaggaagctataggactgtgtgagatccagaattaggaatcagcagcccagtggtgaaaagttagccacacccactgcctgtaatccagcttgtgggacatctgacgccctcttctggcctctggtggtacctgcacacatgtggcagacacatatacacataaatacaaatctaaattttattatgtgagaccctggtaactggccatttataataatgttattccaagagaactaaaccatgtgtggtcccaggaggctggctgagccaaccagttttgtgtacaggaatcaggaaaggggagggtccctctctgtgt

SEQ ID NO: 20790 - DNA, 1108 bp, Mus musculus
gccctcctgctgctgggcacagtggaggtaaagccacagagaaccttgacaaatgagggaaagctcatagctccacacccagagaagcctagcactgcttacctcctctttcctgcgggaggtgacctctggaagtcatttcaccccccaaggtcacttcactggaatgcggatggggctgtcaacccctgctgttatatagaggtgaaataagcccctgaggtgtgtgggcctgacaccacgttttggcgggctatgacttctgatttagctttctgagaggaggttgtgagggatgccgtctctgaccctttatccagacctatcacccccaactcaggtagggctgcaggaaggaagacaaaaaaatctattcatcacaacacttagggattctgtgtgacacagaaacagagacctataggtatgctggtcacatgaccccgacaggcggcataatgttgttgccacaatggctacctcctgcaatgaactgatatgctaagacttgcaacccagctccggaagatttagaatgcctttgctgttcccgaacggccccagagcctcactagagaagggggttgggagggtgtatgggcacatggaagctctcgcttcggggattgctggaacagaaacaagtcaggattcttcagccagccctgggcaggaaggaactcagatctccagatctcgagctggtcagagcttcggacctcagcatctgaacccaggttcttatgtttgcatggcgagtatctggctggtcagctctttactcatgggcacaggtctgtggggactgggctctaggcgcttgcaggtcacagagctgccccagcctgcgtggacaggagaactttgtacctggatttggggataggagactgccaagccatctggcaaaaatgtgaatttctccaccaggagggatgagggtgggaggcaggattggaaataagataagaatctgtcacgacctacggaagagaaactgaaaggaaaatgcccgtctcagggtggaacgacgcgtaaagcattcaaagtgtgctctacccaaccacctctgagctgcaagcacaaggtgaccctgaaccacgtctct

SEQ ID NO: 20791 - DNA, 1182 bp, Mus musculus
catttttaaagtgtgctaattcgcagcttacacatacattaggcctctacaaggacacaacatgtttcagtgtgtaaacaactggtgtcaatcagacgtgtttggtatttaggtgtgtggtgtttaatagagagccgtggcttcccatgtgttttattattttcaaagttgctctgggtactgggtgttcccattgctggcatgtggtgtggacagctcccatgcctgtccctgtaccacactggtttctcgatgtccaggaagaaggaagggcgttctcttggctcagaagctaagctttcctctggcccttggttgccaggggcccagggggaacatccaggggacagtggtaggtctctggtggccacaatgagagaatgtgtgggcaccgggccagaggaagaggtaattccatgaaaaggcccaagcccttcccgagaagaaagcattagggacccttcctctgccctacacagggcaacctgcaaggggtcgagcaatgggaaagatcagctgatctcccagcggcagatggacccctgtgcagccccttcttcccggagcacccagcctgctgagcctagccttcctgatatccttgcacaggttaccagttcttagatctgccccccacaggcctcccctctaaaggaacaggcctcaacccagggctcctgtcatgggaaacatgcctctgactgatcctgcaaattggagcatctgatgtctccaggcatgtgcccggcctgtggaaagatgaagtcaccaggaagcagaaacagtagacagcaggctgctctgcccggcatcagcacctggctcttccctctgcagaatgcacatcgtgtcatgatccctcccctcactactcctccccccacaacccctcccccagccccagggctccagactgcaggtgctacctcccagggtaagaaacagggaggtgcagtgccagtgggcttcctgagctgggagcctgcagggctacctgatgcgtgggcaaggcttgccagcaagcagcatgcacgctgtgcctgcccaggaaagccagttatgatactaagtcttcagcttccatacactccctctaagacaaaggcttcttgatacaatcaaatggatggcttcccaccgtgtcgttatcctgaaccccttccccaagccccatcccacccc

SEQ ID NO: 20792 - DNA, 1099 bp, Mus musculus
tttacagatttgctcttaaatacttgtgctgttttgaggagagtgtttcttacaaaataatataccttttagaaatagactttaacatataaatgtattcccgttgatacattttcaggctatatgcaatttttcagaaatataatcacaaatagtgaagattacttgctagaaatgattgtgtaacccttacagagaatgcatgtgagtgatgtgaaacagataaatgatagcctctgtccagagcttgtttggtttatttccatcctccacttctatataacaaggttttgcatgttcagagtgctctgcaactccctacactttgggccatttttggagttgcactaaaagtgacttcttggcggcctcacatactttcaaaggatgaagaggctttgcggggatggagagctgtttgttaatttaagaatgcattcctcctgtgtagccctcaaaacactatagagttgtgtgcagagctagacagtctgggcacccagccatgaagcatccctgaggcagtgcagacagtgtacacactctcctgagcccgccttccacagctgcacaccactgcaggatcattcctgtgaaagcagccttcctactcctgtgaattctgtggctatgatatagttgggattaagcgaggataagaatgtagcttctgcagtatgtgtctcttacaggccaatgaatttaaatgctttttctaggaatttgaatatggagttgtcaccatcacacacacccctcccttggcctatttgttgcaacacatctttgctgttataaacacatgagctcacctggccatgtatagtcacaaggccgaggagccctttgggagatgcttccctagagagcaggctgagttggtctttccattttgcttcttcataatccacctttctgccacaacagttttttaaattgtcagttctctgtcattgaagctggtagccgtctttttttttttttttttgtataataaatgatcccccgggagccttcagtcttccgtctttagacctctggcagacaatattctttttttttttttttttttcctcctctctccggccccactcgctct

SEQ ID NO: 20793 - DNA, 1139 bp, Mus musculus
catatagaaatagtgtagcttttaaagtagactcttaatctcacttccattgtgtggtgttccacccatcctgctgctagtattgacagcatgttttccaaatctttctttgtattagctagtaagtgtggatcttctggtcatgtatacatatgaggaaccttggctggtatagattgatttgtcagctattagtcatctgtgcctcaggccctccaatgctaggccttttggttccctgctgctgttttctgtgtacacagccacagtgaaagaagggacttatagacttcctagagttgacctgctgatgttacctgctgtgtaaacagacagtaatcaagaaaggtttagaggaagccacatattcgtacagggatttgacaaaaatctatgatgttgtatactatgtactcgtgtatttaacctatcctctttgtaagggtaggtttcaaaacatgcttcccagtcttccatgaccaccaagaagtttccctccagactaacttgtagttcagaagaactaactgcctttgggaaatgctgaggatatgcccatctctcagaagagaaaatggtttgatgggatatggtgtggaaatacacgattggtccagaaaagtcttgatcctaaaagatggaacttccttggaagaaagtgctaactttgcaaggagacaatgagcaaaccaagtgtggtggaacacctcagcggagacagagggggactcattgtacctaataacctatatgagcaccgagacctagcttttgcattattagtgggttttgtgttagttttgtgttggtagtgaggcttagtagggacaatattgggtagaaccataattgtttacctgcttggacactgttgatgcttgttgatgtgcttgacatgagcagtgatggatgaggaccatttcttgaccagatgtagtgttcaaattgtgggcagtgtgactggctgtgtgagacaggtggcctgggtggcaggaaaatgcggtggaactgagagaagttaagattttgaaggacagaatgcacagggatggtgtgggttgtcagaaggaaggaattctaagagataaggctcttggctagctactttgtgtagggtgtgcccaggggacttaaaatta

SEQ ID NO: 20794 - DNA, 1180 bp, Mus musculus
agagggcccttcttgggctggtgagatggctcatcgattaagagcactgactgctcttctgaaggtcttgagttcgaattccagcaaccacatggtggctcacaaccatccgtaatgagatctgactccctcttctggagtgtctgaagacagctacagtgtacttacatataataaataaataaatcttaaaaaaaaaaagaaattgttaaaaaaagaaaaaaagagggcccttcttcctgcagtacctctaccaaggggaaagctccctgtggtgctgactgaaggagaggagagcgtggagcgatcaggagatagtgcccaccccactgacataaaccacctgggctattgcctcccaacacccagctgttggctatcttgactttttaaagcagaattctcccgtgttgcatatcttgtaatagctctccagctgaacagggttctatataaaaaggtaatccttttgtcaaacaaacatgaaattagagcacacataggaatcatctccaaagaacctgacttgttgggtaaggtagatagaagtcacaaatgtgcatttctaataggtaacacccagtgatggcagtctctgagacaaggctttgataatcccttactctgtagaccccatacaaagccctgcacttgtctatttctccacagttgtgggcagaacaaatgagacagttaagctacttcacaaaaaggcagggcagctgctatagtactggaggtgaacctccatttctgacatcctctcaaagtggctctatcctgtttatgacattgtctagctcaagactttctgcacaaataatatcccgatcctgtatcttgagtgttgagtttcaaacccagggcctttcacgtacaaggcaaactagcactctactactgagctacgggagcagcaccctcctacatacagattggtcttcagtttaccctgtaggcctctcaggccttaaacttgtgattcacttgccacagcctcccagacaggagtacagtcctgtgccaccagtcctggttactcttttacttcttcattggctttaaagtagacatcatactaacactgctccttaaatattcaatagggtaaaagaacaggaaacacaagaagaggaacgtttgatggaagaaaagaaaaagaaaaagcaggaagacaaga

SEQ ID NO: 20795 - DNA, 1148 bp, Mus musculus
atgtttgtctgtgtaccaagtgtgtacaaaggccagaatagagccttggatctcctagacctggaattgagatagctgtgagccaccatgtgtgtgctattaaatacttctttttgtcttcccttggacacaattgcacatgtagatacttgcattgtaaggacttttgcaaaggttctgccagctgcagtctgtattaatactctgtgtctacttggtatcttgtagttttgctttgttttttaagattgttttaaaaattcattttatttatataagtacactgtagctatcttgagacacaccagaaaatggcataggatcccattacagatggttatgagccaccatgtagttgctgggatttgaactcaggacctctggaagagcagtcagtgctcttagcctctgagccatctttccagcccagcatcgtttgtgtagttttaaagtcaaaattatgtgtagaatttgaaattgagcaggacttggaataagttcttggttttatttttagtaaatgcagaattggtggaactacggcttttgaccctgtgtatcagtccttggtccttgttaccagagtcacttcaacagatgagtttactgttaaatgggtattgaagcagcagggtaccaggtcatctcctctgctctgttagaatcttttcagaaggctccagaaggactggccatggctgtatttgaatttatgatttcaaataaaacagtgtttttttacaaatatggaactcttcctgcattgcttatatgccccccctctttgtgtgtgtgtgtcccattttcataatctgcttcattgtcattggtgactcttgacttctcaggctgtgactgctcacagctgtgtggtgactgaagtacactgtcctgcctcctcttgtggaaccctggtttctgtaagtgtgctggtgtttgcactgtggatgactgactctgctgggttcttgtatctcctctccgttgatgggttttggggaacagtttgttggtaactgtaatcggcctttggatttgtcctagacacagttgttgtatacttctagaattataaaggatctaaagtcttctacataattttcttttttagttaattatttctgtgttaaatgtatgagtatgttgcc

SEQ ID NO: 20796 - DNA, 1243 bp, Mus musculus
agcttaggctcatactgtggtcagcaccaacctttgaacatagagagcttcgtttcctgcctatcccccagctatgttagtttttacgtcaagcaacaaagcttgtgtaactattttcaaaggttgatattgaacacaatatgttccttctgatgactgtgatagttcttcaagtggtcttgactttccctgagctccatccaaattaggagagtgggaagctggagaggtggcttagaggttaagagcggctgctcttccagaggacccaggttcaattcctagcacccacatggcagctcacaactgtttataactccagttccagaggatctgacaccctcacacaggcatatatgaaggtctaataccaaatgtagatataaaaattaaaatgttagagtatatcagttagggtcctccagaggagcagacttagagcgggaattatgtggggtttgttatacgctaatccagcagtggctgtctaccaatggaaggtctgagattccagcagtgattcagcccacgaggctggatgtcttagctggccttcagtgtacaggagaattccaaagacgtaggctccactgccagtgaaggcacgggctttacagctggaatgagcaggctgttagcaagcttgcttctttgtccttatagaggctgcctgccagggtgtagcccaaagcaaaggtggatcctcccatctcaaaagatccaggttaaaaatgtgtcttcccacttcacatgatttaattcagaaaaaatatccctcccagatgtaaacgagttgacaatgaggaatatccctcccaggtacacacttgtcaactgaacacacagttatatctcagcagatggtattgtaacaggaatagaacctgtaggcatttgggctagtggcttcaggaccttcttgggtccgatcatatatattctgtgtccatttgattggattgctgctgtatacatcctagtttataagttggagggtttggtaatactcagctcatgatagaaagttcaagttgcatgataacttggtggcccattgattgtcaaatgatcaattttcactagcaagccaagagctgtctttcaaagagagaatagttgtctgcagccaagggttggtccttgctcctaaatcccaaaggtctctgtgagtcatctgtaggcctgctaaacaccctaacaacatccctgtctaccactgagacctcaggcaccattggctctg

SEQ ID NO: 20797 - DNA, 1212 bp, Mus musculus
tgaagaagacaaacggcagtcatggcaccaatggcgcactcgtccaaagcccttctaaccagagtgcccttggggcaggaggaaccaatgggaacgggggcgtggccagagtgtggggtgtagccacaagctccagctctggcctggctcactgctctgttggtggtggagatgggaaaatggacaacatgatcggagatgggagaagtcagaattgttggggtgcttctaactccaatgcgggcattaatctcaaccttaatccaaatgccaacccagctgcctggcctgtactcgggcatgaaggaactgtggcaacaggcaacccttccagtatttgcagtccagtcagtgccataggtcagaatatgggcagccagaatgggaacccagtgggcgccctaggtgcctggggaaacttgctgccccaagagagcgcagaaccacagacatccacttctcagaatgtgtctttcagcgtacaacctcagaaccttaacactgatggaccaaataacactaaccccatgaactcttcaccaaaccctatcaatgcaatgcagacaaacggactgccaaactggggcatggctgttggtatgggggccatcatcccaccccacctgcaaggccttcctggtgctaacggatcatcagtctctcaaggcagtgggagtggtggggaaggaatgggcagttctgtgtggggactgtcccctggtaaccctgccacaggaagtaccaattgtgggttcagtcaagggaatggagacactgtgaactcagcattaagtgctaagcagaacggatccagcagtgctgtgcagaaggaagggaatggagggaacgcctgggactcagggcctcctgcagggcctggcatccttgcctggggaaggggcagtggcaccaatggcattggtaatatccattcaggagcttggggccatcccagccgaagttcttctaatggtgtgaatggggagtgggggaagcccccaaaccagcattccagtagtgacatcagtgggaaaggatcaacagggtgggacagtgccagtgctgccagccagacccctgccctgcagcctggcagtgaacacatgaactcgtgggccaaagccacatcttctggaactacagcaagtgaaggaagcagtgatgggtccggcaatcacaatgaaggaagcactgggagggaagggacaggag

SEQ ID NO: 20798 - DNA, 1619 bp, Mus musculus
ttttgttttgaccttaagttttactgtgctgtacggaacctttgggcaattgtccttcttttataggagcaactctgaagcctttctgccatgtggctatagtttttgtctgcttagatcacttgttgatggttctgtgcatctccttggccttggcccagttgatgaagttttacttgatcgtagacaccacccagtcaagtacaagcaagctcattcttctgccctgtgctgtgcatacagtctggggctgcccatgccatagtgcatgcagcctttgcatggcgcccagcactggtgaggaaagaagcctgggacacctcctgttattgtgtgttcttttgcaagatgtcttcattgctagataaaacaagtagttttccatcctggcttttctttaattgccttggcacttgatgagataggctaccagtcccagagaatctgatgaatctacagcagagctgttccactcatagttttaaagttccgccctgaaaatggagcagtctataaaacatgagagtcattatacaagttgtatttttatttcagttgcaagtcaaatgcaaaatcggactgacttatgtttggattctgtgctctgtaaaagtagaaaagaagatgctgggatgatccagctggaagcttaaatagctgtgagagaccaggcctgagttaaaacacgggtgacacgggtggaatgcaggtacaaagtgctgtgctccaagcacagagtaagcctgactcttgacaattgtactcaccaaatggcagcacttgtgtgtccaatttacaacataactctattctgataccagataaaagcaaggaactagaggaagcttcaagagacctgactcacagactgacttcctggcctcctgctcttccttagccaggccccaaaccagccttgtctgtatagtagcatttagaactctgtccttgaagcagtattgcagaacttgagcagtgactgaggtcactgttgtctgtgtgcccattggcaggagctctcctcacgaggcagcagcttcctgcagttgcacttcctggtgggcttagtggtcgtcctggaagcactaagcttagagatgatgtgaaggagctgaaggccctgctgtaactacgtgccatgctgtgcgctgagcagaaactgcagccccttatcccacttagctgcactctgagccctgtcccatgtgcctctaggatcaggcttaaagtcaggttgcttcttggtaaagctactctgtcctgaagactgctcttccttgtgtgtcacagagtctcagatgtagagccctgcttgtggttttagcttttccttcctgttttgtgtgctgaggggcttgagggggtagttctttataaaagtttggggggtgtagtgtgcttatgtgtgtatgtatgttcacgtgtgtgtggacatgagaggaagcagctgtacatgtacattattacttgtagaggtcagaggttgatattaggcatctacggtcacattccgccttgtatactgagactcaagtagtccacctagataacttgctccatggatctcttctccaactcctgagcactgggattgcaggagcctagagtgtagtcctctt

SEQ ID NO: 20799 - DNA, 1382 bp, Mus musculus
agagcagagatgtgaagtctgattgcccaaaaggctacctggcagtgacataccaaatactaagtaaaatcgtccctggcctgtaggtcccatataggtcctataggccagggagggaggatgacaagagcccagggaggccgtgcatggttaagggtcaagcctgggcactgaacagctcctgggttctgattggaagattcagcagctggggtgggaggagtgtcctttgtgtgtgcatttgcacgtcactatcccacacgtgctcccctggtgcctcagtgcaccctctagtatcacttgccacctagaaattcaggatggatctatctgaggctctttgtcctggataaaagttctaagttacagattgtaccaagactcacagatgttgccagttggtacataaattttgtgaatcagcctttttagtgaaaaaacaatgttctgctagaagcctgaaagtaggacacagtggcatcgtgtggcagcatcccaccagagtgaatgaagggctgtgctcccagtcacacacttgcaccagcccagagggccccggcactggaactagccaaaaggtctgggccaacttccttctactgaactcaattatattaactgtctgctgcctcagcatctgaacatctagttcctggtttgattatgtgtaggtttatgtctacgtgtgggtgtgtgctcatgtgaatacaagtgcgctcaaaggccaaagacattggattggatcccttggagaagttacagaccagttgtaaggtacatggtatgggtgctgggagctgagctcaggtcctctggaagaacttcaagagctcttaactgctgaaccatctttgtaactgataaatgactgttgctaagcactccaatctgaaggacttgaaagaatgaagaaaatgaggaggaaaggtaactgattggggtggggtgggggatagaaagaaaaagctaggcatagtggtgcatacctttaatcccagcactcaagaggcagagacgggtagatttctgtgagttcaaggccaacctgatttatatagtgaggtctaggaaagccagaggaagcagaatttgaatattaaaactcagcgtatagagtgtatggtataatgcacatcattgcaatctcagccctcaggaggcaaaggcagaaagaccagagtttgaagctaccctagactatgcagtaagttctaggccagccagaactagatgtgagaaactggttgaaaacaatagtgggggctggagagagggctcagtggttaagagcaccaactgctcttccaaaggtcctgagttcaaatcccagcaaccacatggtgaatcacaaccatctataaagagatctgatgccctcttct

SEQ ID NO: 20800 - DNA, 1224 bp, Mus musculus
agagttaagtcagaagttatttgttttaaaacagattctgaaaaatgccaggcagcctgattatctagtgtacttggagatgggtattccatagcacttaattagcttgcaggcacacaagaagcagtaaatattaataaaacagaacagcagtactgttcagggtactgtcctcagtgatagctgggtctcaaaagtgctactgtaggatttggattaggttttgttctgttgctgttgggtaggtttctgatttctacacaggctggcctcagacctgcagctgttgtctttcctggctgtttaattcagccctgagcatcgtcgtttcacccaaatgctctggtcacttttagagggattggtgttggggaaagatgcttgcagagggcagcatagagatagatgatccagacaagatcagggacctcccccacctcctgttggctattgtccaacagtgagtgaagtcgcagtttgtcatgttctggaacctgtagacgatgtaccaaagtagaatagtagctccctgtgagggtcttgaagtctgagcaagggaagagtgctctggagaagctgattgaagagacctctgcaccctacctgaggcggctgagacaggtttgaggctgctcaccaggttggcagttggcgatggtctggaaaggctgactttgcacttgggtccactgctccttgttccaaagctttcttttcagacacaaatatgagaaggttttatagactgagcttaggtgagttaactacggaaaagccatgtctcattcactatactgaacctcgggagagcttgacttcggcctaggtgggggattggtgccttcttagagcgtcaaaagctagagaacagtgtccttgctcaagcttcaagacctccctccagggaacagtgaatcagaggggctgtgacgcctctgctgttttgacaccaggactctaaaattagcctccagtcaccagccagagggagtccattttcagcaacattgcaatagttttttaacagaagagaggacttttgtcctttttgtagctatggacagggaggagaattctgctttcctgtattttataggactgtgggattagtgtatctgtacagaattgggaaaggtgcctaaatatgaaagcccgtgaacctcatacacaggcttccaccgcaggacatttatttaaaaataaataaatgggtggcagttggaa

SEQ ID NO: 20801 - DNA, 1696 bp, Mus musculus
agctgaggcgtgtggccagtgctctgtccccccgatcgcctgcgcacattaccctcgtttcgttaccttttcatgtcatttttttttatcccaaaaaaatattttttaaaagttaaaaaaaaaaagacatatcaaacatgcaaatacttgaacccagcaggccaataccgaaatgtgaacacttccacgttgacatccgtgcacagaaacaggctctaggaaatgtctacgttcatagcctacatgtgcgtgtatgcgtgagtgcgtgtgcttgtgtgcttgtgtggtgcggtgtgcagaagagtgtgtgtgagtgtgttcttgcacaggcagggcttcctgtgcgtgcgtgcgcacttgagtgtgtgagggacttaactgtgggtttcccttctagtcagtatatgcttttggttttggtttttttgggggtttttgtttttgtttgttttgttttttgtttttggcattggtcaaatgttctcattgttgttatttgcttctaactttgcactgaggtgtctctgcccttcctttagctaatcctaaacagtaaagagaattctcgggacagggctggtgacaattcatgtgtaaatgtttactcaaggactctgttgttgcatttaaagtcgcagtgtatatctctggagaaatgatgtgtctgtctacttcagcagcttgtcattgtggactcatgcagaagattattaccagagtattgcaccacttcccatctgcaatataaagttaaagagaaaaacaaactcttgttgaactgtggccatagatacttgtagagactggtgccgcgcacgaggcgcgggcgggcgggcggccggccgagcacttggacgtggtggtgactgcttttggaggagctgtgtttgggctcccacctgtttacagactttttttttttttttttcctccttcagactttaaaataaaattttaaaaaaattttaaaaatgttaaaaggaataaaaaaaaaagacttccatcatttaaaacaaacaagcaaacaaacagcaacctattttcagatacagatgtgttgctccagagctctgggatgggacatgctgttcccctccagccgtcgcgcgtgcgcggactctgtggactgtcttcacccctcctcaaggtgacagggcctcgtggtctctgtcttgcacacgccagctcgctctcaggaacgccagggctcccgagggcggtgccacaccacttcatgtatttttaaacccaactcctagcactgaagatgttatttaaaaaaaaaaaaaaaaaaaaagagagagaaaaaaaaagaaagaaaagaaaaaaacacacacacacacacaaagaagaaaaatacctaatctctaatgtgtagcagttacatatttaccaaataatggactcaaaagaaatagatgtttgaagagtgctttatatattaaaaattgctttatgttttaaagatgatcaatgttttgattgttttacaaggaagaaagacaatgaaatcacacaccctcaagtatgttttagaaaagtatatgaacattgtactccctgcctacgtggtcgggaaacttgtgcattacattttttaattagctttttaatggttttatcaaaacagaaagcaagcaagcaagtcctgcacggttgcagcaacgcagtgctttcttagaggatcaggaactat

SEQ ID NO: 20802 - DNA, 1222 bp, Mus musculus
tggcactgctctcaggcctgtatgctgccaggccgtggcgctatgctctgaagcagatcggtggccagtttggctccagcgtcctctcctacttcctcttcctcaagaccctgttggccttcaacgcgctgatgttgctgcctttgctggccttcctcgtgggtgttcaggctgcctttccacctgacccagcaggccccgtgcctacgttttctggtctggaactcctcacaggcggggtgaggccttcagctcctgccttggccaagaactggtgccaggcttgtcctgactctcctggtgggctcttgcctgttcctagatatctctatgggtagctttcccttcttctggaggcccaagaatgggctagggcagtggttctcaacttgtgggtcccaacaacccatttggggtctgaatacagtatcctgtgtatcaggtatttacattacaattcataatggtagcaaaattacagttttgaagttacaataaaataatcttatggttgggggtctccacaacatgaggagctgtattaaagggtcgcagcattacaaaggtcgagaacccctgggctaggggaagggagagaggatgtctgactgtgcttggcctcctgacagggccggttcacacacacagttatgtactacggctactacagtaacagcacgctgagcccgtcatgtgacgcccctcgggaaggtggccagtgcagtcccaggctgggcagcctgccctataacatgccgctggcctacctcttcacaatgggggccaccttcttccttacctgcatcattctggtatacaggtataccttaaccacggagccctcactctgagcaccttcctctcacctgtggctcctacattgtctatccagctcttttccactcatccccttatccgttctcccatgtctgcctacccatgttcctattgagacatccacttacccacccatctctctatcctgattacgtcttctgtgcatacagctattgatttttccattcacacccatccacccatccgtccatctgtccatctacctgcctgtctacctgtctacccacttgcccatctaaccattcctgtatcccctacttgtgctttcttctgtcagtccctcgatccatttgtgcatccacccatctgcccacctactttcctgccaaaccatatttcccatctatccacatagccatctatc

SEQ ID NO: 20803 - DNA, 1118 bp, Mus musculus
gctgcgcaggggtggggtgggggtggggggcctccggaggatgcatctgtcagatggattactcaagggcgcccccctgtcaccacggtcctgcagggaactgcgggagcccgagggagtgaagaccaccttctggcagcggtggcatcgcccgaggcgggtggcgcgacaacacctgagggaggcagagcaacggctggcccgcggcttcggtctctgggagggagctctctacgagattgggggtaggatcccatgccgacccatatttcccaccttcctcatcagcccctccatccttgtacacccctcggattcctcctgtgcacacctagctgggttacatacagatctctggagggctgtgggggcgcgcggagccctaattttgccctgggctggtccatattgccacacatcacacagccctgggattctcaacgtggctgactctccctgttttctctcgtaggcctcttcggaaccgggatccagtcctacttcactttccttcgcttcctgctgctgctcaacctgctgaccatgctgctgactgcctgctttgtgctgctgcccctggtctggctccgcccccctgagctaggccctgccctgaaactgagtgagtgctggccctgcctgggcaagctgcatgggctagctttggactctcctccataggaccttctgcccggatgccacccagcacaaactcagacatcctcggtatagggtcgagacagtggagttgggagatagagtgtcacatatttgggggaccctgtcctgatgccattctcttcccacttagcaggactccagtgctccagcagccccctgcctcagagtgacattccaaggtttcacaacccactttggaatattttaacgggcagagtaagtggggtatcttctggcaatgttctgggacatctgggagactccagcctgaaaggacccctgctccctcaagagagatttttggcttttaagggagacttttccctaagccagccaggccagatatagggacatgtccccatgacccacagaatccagcttggagcaagagacaaatggaggaagatgtccaggcctgttagataagcacctcccac

SEQ ID NO: 20804 - DNA, 2009 bp, Mus musculus
ctctcagaggctagcaacaggtctgctttcccaccaaatgcactcccttcccagaagcggggcgagcccccttgtaccaggcgtgcgggggcagctttccataccttgggatgaaaacactgaaaactgagactttagctgccagattgagggtggccccactgcgcccagggggtctgggcctggagccttggaggtgccctggctccccggaatctcccagcctagcggtggaatctagtgactccgtcctgggttgtaccctgtcagtcaggatggcagtgccaggagccctgacccatactccgcgcccagtcctggagttccggcttcatccacagctgggggcggggcttgtgactgccagttccacaatcctattgagagcgtccccgcaggatcgctctggtcctgcaagtctggaggcagccaggtgcccacagactcagttgcatctgccgccttgacgtgggcttggcggtggccttagggtgtggggaggaagcgaaatgactaggacgattccaaaggagctgctttccaaactttggccagtctctgctggtgactttcccacctctgtcctggctcctgcgggatctgagtctggctgtggatctgaccaccccaagaaccttgctctgaggggaaccgttgtgggggtggagactagtagttctctggaggggaggggccgacgtgccaaagaagccggaagtccttgtagggagaaggctggctgactggggagtctcttgctttagggggagtcttggagggaaatagggcagctgttgaagggtgttctggaagatattggttgatgctgtagagttgacttggggcagggtgttggggtgagggttagatgaaacactgagtttcacctccgtgattttgtgtcccatcctatttaaaactcattcaaatgggaggtggttatcagcattgaggcagctgaggcaggattgtcatgaatttcaggccagcctgaacttgagtgagatcctgtcttttttatttctctttacttatttttattttgtatgtatgtttgcctgcatgtatgaaggtacaccaaccacgtgcatgcctggtattcagaaggtggttggttatcttgtcctctggaattggagtcacaggtggtgatgagctaacatgagggtctccaggtcctctgcaagagcagtcagtgctcttaactgatgagccatctctccagcctgagattctatcttaaaacagccaataaggacaggtgtggtggtacaggccttgaatcccagcattctattctggaggcagaggcaggttctctgaattccaggacagctagctaatggcatcctgtctcagagaaagaaaggaaaaccctgaaacttacagatgcacacacgacctcgcgggctggagacgtacgtaggtcagtggggtgagcttaccaacaagtgtgaagccctaggttccagttgccagcgagcaggatggggtagggttgggaggagtccaagcaggcatgccaacacatgattatcccagcattgggaggtggaggcaggaggcaggatcattttgaattacaactaaatgaaactccttcacccaaaacaaacagaaaaccaaaccaacaccccctccaaaagaaacccaaatcttattcaaaatggagatggacggattctttttttaaagactttatgtctgtgagtccactgttgctgtcttcagacaccagaagagggcatcagatctcattacagatggttgtgagccaccatgtgggtgctgggaattgaactcagaacctcaggaagagcagtcagtgctcttaaccgctgagccatctctccagcccaggtggattcttctttgttcttagtcacaaccctaagtaaggtcactctgtagtcaggcagctaggggggtcacctcgtctcgtaataaatagcccattctgtccccagccccttgtggtcaggaactgctttgatgataccctggccaca

SEQ ID NO: 20805 - DNA, 2430 bp, Mus musculus
gactcatcaaccccaccaagtagctgacccccttagccctcacatccctctgtgtctataggttacacagcctacggccctggggagagtcattctctgtccctcctggaccctggggatccaggctgtccctagggccaactctctcccttatttccctagctctctggaccttcctgtggtttgttggtttctgcttcctgaccaaccagtgggcagccaccaaacctcaagatgtccgggtgggtgcggactcagctcgggcagccatcaccttcagcttcttctccatcttttcctgggtaggtggacggggagggcagtttggaggtttgggtgtggactgaggtcccctgctgtgcccataccttgggtctcctccacctgcccacagggtgtgctggcttccctggcctaccagcgctacaaggctggagtggatgccttcattcagaactacgtggatcccaccccggatcccaacacagcctatgcctcctaccctagtgcctccgtggaaaactaccagcagccgcccttcacccagaatgtggagactactgagggctaccagcctccccctgtgtactgagcagccagggacaagaaggcagggaaggggtggttgggagagggccgcccctctaccctggacttctctcaagggttgctactcacaatgtagtcccttgcctgttacagttgacagccaaagagtccacgcctttctgcctcccagctgcagacagagcacacctgaagtgcccatgcccagctgggcttcgccgccgcccacccaatcctcaagggcatttttgagatggttttgactagatctttttatcccccaccatagtactgtagataggacccagggcttggatttgcttaaccagcgcagccatccagctgtgtgcccagctccttgttgcttttagtaaccccgatccccttctcagagagccagaagcaggtgcctgttagtgctaccatgtttttgacccatgctagtttctccactgggagccccaactctttccccaaagccaagcttggggatcctcgtgcctgtctccccacgtcctcactcaggttcaggagccagctctctgctgtgtcttctggggtcaccactgtgccaattgtccccaggctgcctgccaaccgtgggacaggcagagggacaagatgccacttccttctttctcccgctcctggcaggagggacaggatttgcctggagataacacccagctttatgtaaatactaccaagcagcggttagatactagtggggagggcaggaacccctgcactgaatgtattggagactggtggggatggccctgccctcagattctatagactagtttggagatggaataaacggtttttctcagcgtgttgtgctgggtggcgcctcaggctaggggtggagatacactttggaaggtattgctttgagacaaggcctcaaacttacagagccaaggatgacccaccctctgacttcccccaagtgcttggtttcaaaccctggacttcatgccaggcaactaagtcagcttccagcctttcaaaggtaacataacccaggcttcaacttgagacaaacctcctgcctcaccctggttctagttctacaccatgactcactttgtagaccaggctggcctcaaactcagaaatccacctgcctctgcctcccaagtgctgagatcaaaggtgtgcaccaccactgcccggcttacaccatgttttttgttgttttgttttagacagggtcttactgtgtagctctggctgtcctggaactcagagacccacttggctctgccccttgagtgctgggtaaagcttagaccatcatgcccagctagatgttttttgaacttggggtggcagcttccccagtggggtctcattcttcatgctgccttccactgcatcctaaaatagctaccacgtcagcttgtaaaatggattgttctggatagcttgccagggttctgctgcctgccagggcccctgggtgctgcccctctgaggttgactctggcccctcttgacaccttccagggacctggcaggcagtggacccatctctcaggaagcagcataaccctgaggtaactcttgtgcaatgacaaggctgtcgatggtggccggcggtgtctttcaaaatctgaagcataagctaacagcccggctctgaactgtgggcctcctctgcagaacatgcattaagcagttaatgagttagatggcaggcaagctgggcacagcaccagcggcacactggcaccttagacccaggtctctagtcctcaagggtgtcaccccacccactttccaaggcctatctgagtatctgagctgttttctcaactcaagctatcaaatgtctgtctcataaaacctgaccacccc

SEQ ID NO: 20806 - DNA, 1194 bp, Mus musculus
gtggcgcaggtctttaatcccagcacttgggaggcagaaacaggcggatttctgagttcaaggccagcctggtctacagagtgagttccaggacagccagggctacacagagaaaccctgtctcgaaaaaacagaaaaaaaagagaaaagaatggggaagacgggggctggtgagatggctcagtgggtgggagtgctgactgctcttccgaaggtcctgagttcgggtcccagaggccacatggtggcacacagccatctgtgatgaggtctgacccctcttatggagggtctgaagacagctacagtgtacttacatataattaataaatgggtgaatctttaaaaaaaaagaaaagaaaaagaatggggaagacataacagagagaagatatgctgtgtgggatgttcctaggacatgtttgagcctcaaatcttgtccttgacacagatcagggtgcaccaagagacagccgtggagatgggagatagactgtgggtggtgagtagccctggcacttttgacatgtacgtctattttttttttttttattagagaggagcatagaaagcactcccctggctgcgccttcctcactgtcaagaagcagatggaagaactaaccgtcagtgaattcttgaaactggacagacagagagccaagaacaaaattgtatgtatgattgagaataaggactgagcaaattctgcccccagaagccctagggatctgctcaggaagggtgcttcaaaggtggttcctgagcaggtcaccttcccacctgagtggcaagcattgtcagaagcccttgtcacaggctgagcccccagtggtagcactggtataggtagaggcttggggacatggcagagagtattggctgaaggggacactgagcagacaggtcagctgagctttgcctcctgtcacgtgaagttgattgggaagcaggaggcacaggtgagtccacagggaggtggctcccatgcagccaggcatgaagagtcagggtggccagagtccagagctcagagtaaacctgggtccattttgactgagaacaccccacattttgcattggttattcactgcaattgttcgtttatctgaagttcaactctaagcaggcagcctgggtgctcatctgttaccctcgaactgttttagtgggaggagtcggggaggggttcac

SEQ ID NO: 20807 - DNA, 1556 bp, Mus musculus
gagccaccacgcccggcttgaaaaaacatgtttatatatatatatgtatatatataaaaaatcaaggaaggaaaattccagtttgtagctcagtaagtatttgcttattactattgaggccctaggttcaattcccagcaatacaaaaataataactttccttttaatgatttatcttgccacgatggtgatgaaactagcatctcaccctggacaggcaagcctggccctctgggccacaccccagccccttcgtgtctgttcatcattccaggcaaaggagaccaacaacaagcaaaaagagtttgaagagactgcaaagactacccgtcagtcaattgagcagctggctgcctaatgctgagcctttgctgagataacttggacctgagtgacatgccacatctaagccacgcatcccagcttttccagccagggcctcctagcaggatcttagagaaggagacagtggtattttgaaactggatatcaaatatttttggttttgctttaaagtggctacctctctttggttttgtggctttgctctattgtgacgtggacttaagcaataaggaagtgatgaagggacagtgttctctgacaggacctgtgggggtcggggtgcctgtgcaaggtcttggttctgattgtgatatttccatacagggctgctaatgcagcccatgggtaagtgtggttatatgtgtttgtgctgataattttgtcctgatgagttttcctaccacggggtaacggaataaaatcacttgaaaaagtggactgtaagctctgtctgtcttggagaaatggtttgtttggttttttgagacgggtcttgtgtggtccaggctgacctggaactctatatagccaaacctggccttgaactcgatcctgctgccccaacctcccaggtgttggcctgtgccatgctctcagtactgtttgttttgtgttataaggtcgtagactcagtggtatcttaagcttcaatcccagcatgagctgcagagctgagcagtagtgagaaggcactgggattacagtgtgactacatgaacaggacttcctctgcaaggcaggtgtgaaggacagtgctgtcagcttaatcacccgtgagatggggggtattttgattgcattgaggaggaccctgcactaaatgatgcagagctgagcatcagggtgcactcaccattctgtttgctgactcagcagctgcttcatgttccctggcttcccaggaccttgaactgctcctccctccaagtgcttttgtcagagtgttttatcacatcaagagaagctaagacaccagatgggatgccacatactggtaatcctaggactttggaaacaggctgaaggatcaggggttcaaagttatcctaagctatgggtatgaaggttgaggtcagcctgggctatttgacatcctgctcaaacaaaccatgtaactattctctgagcttgtggggaaaagcacagcccactgtgactgacattggagaattaagtcaggcaggggtacagatcccatgcacaccatgctg

SEQ ID NO: 20808 - DNA, 2904 bp, Mus musculus
cacgcgcgagttttctctgggcgtcctcctagggcgggcaggggaagagactgtctggggttggccggcagtgaccgaggacagtcgagttccgcgaggtggctgggcctgagacacggtctaaagcggggcaaaggggtgccccgggcgctaggcggaggctggagggccgggcacgctggagggttccgggcactcacgcgcctcacgctttgctctctgcagctccccgggatgcggtagcggccgctgtgcggaggccgcgaagcagctgcagccaccgccgcgcagatccacgctggctccgtgcgccatggtcacccacagcaagtttcccgccgccgggatgagccgccccctggacaccagcctgcgcctcaagaccttcagctccaaaagcgagtaccagctggtggtgaacgccgtgcgcaagctgcaggagagcggattctactggagcgccgtgaccggcggcgaggcgaacctgctgctcagcgccgagcccgcgggcacctttcttatccgcgacagctcggaccagcgccacttcttcacgttgagcgtcaagacccagtcggggaccaagaacctacgcatccagtgtgaggggggcagcttttcgctgcagagtgacccccgaagcacgcagccagttccccgcttcgactgtgtactcaagctggtgcaccactacatgccgcctccagggaccccctccttttctttgccacccacggaaccctcgtccgaagttccggagcagccacctgcccaggcactccccgggagtacccccaagagagcttactacatctattctgggggcgagaagattccgctggtactgagccgacctctctcctccaacgtggccaccctccagcatctttgtcggaagactgtcaacggccacctggactcctatgagaaagtgacccagctgcctggacccattcgggagttcctggatcagtatgatgctccactttaaggagcaaaagggtcagaggggggcctgggtcggtcggtcgcctctcctccgaggcacatggcacaagcacaaaaatccagccccaacggtcggtagctcccagtgagccaggggcagattggcttcttcctcaggccctccactcccgcagagtagagctggcaggacctggaattcgtctgaggggagggggagctgccacctgctttcccccctcccccagctccagcttctttcaagtggagccagccggcctggcctggtgggacaatacctttgacaagcggactctcccctccccttcctccacaccccctctgcttcccaagggaggtggggacacctccaagtgttgaacttagaactgcaaggggaatcttcaaactttcccgctggaacttgtttgcgctttgatttggtttgatcaagagcaggcacctgggggaaggatggaagagaaaagggtgtgtgaagggtttttatgctggccaaagaaataaccactcccactgcccaacctaggtgaggagtggtggctcctggctctggggagagtggcaaggggtgacctgaagagagctatactggtgccaggctcctctccatggggcagctaatgaaacctcgcagatcccttgcaccccagaaccctccccgttgtgaagaggcagtagcatttagaagggagacagatgaggctggtgagctggccgccttttccaacaccgaagggaggcagatcaacagatgagccatcttggagcccaggtttccctggagcagatggagggttctgctttgtctctcctatgtggggctaggagactcgccttaaatgccctctgtcccagggatggggattggcacacaaggagccaaacacagccaataggcagagagttgagggattcacccaggtggctacaggccaggggaagtggctgcaggggagagacccagtcactcaggagactcctgagttaacactgggaagacattggccagtcctagtcatctctcggtcagtaggtccgagagcctccaggccctgcacagccctcccttctcacctggggggaggcaggaggtgatggagaagccttcccatgccgctcacaggggcctcacgggaatgcagcagccatgcaattacctggaactggtcctgtgttggggagaaacaagttttctgaagtcaggtatggggctgggtggggcagctgtgtgttggggtggcttttttctctctgttttgaataatgtttacaatttgcctcaatcacttttataaaaatccacctccagcccgcccctctccccactcaggccttcgaggctgtctgaagatgcttgaaaaactcaaccaaatcccagttcaactcagactttgcacatatatttatatttatactcagaaaagaaacatttcagtaatttataataaaagagcactattttttaatgaaaaaaaaaagtgacttgagcctttctttccctggttttctcttctgctcactctcaatgaggggagggggatggctgagcctcttgggtccctgctcacagctctgaggtagaatccgatgaatcctttgtcaccgacaagctgtgacagccacctagattgttacatgggtaattcctgccgtctgattcagttctgaccagaatatgcaaagcaagtttgcgaaggaaatgctggcttcaaagggcttgcagggagcaggctgagctgtggtcagaagctgttagaggctccaagctattagcgcacactctggctgggctgcttggcagggaggtgttccgagaaagtctagactcggggtcctgagagtggctggtgatgtcagcaaagcatcacagacgtcatggcatgaagggggaggggtgatcgccacacagggctggaa

SEQ ID NO: 20809 - DNA, 1186 bp, Mus musculus
cacaatgtgtcctgggctctttctccccaactctgagttgtaaagagaaatcaacacaagatactttcatttttctacgtcctctaagagaagccctgtcggtgagtcatgagtttcttccatgctaaccttgttaaccagtaatattggaaggattttaaagaagtatatcttttctttgtcctttggcagttccttccctttattcaaggtgtcttgatcctgtcttttccctggaagaatcttcttatccttcccttatttttatcctccccctccccccagccccagcctgcatgtgaggttcccactggagctacctgtgcacaagcctgcagtggacagaagagggtgtgggtccactggaagtggagttgtggtttgtgagctgccccatgtgctgggaaccaggctctgctctctgctacagcagcagaggcctcagctctacctcctctcctcccctttcttcctttgtaatgcaacccactgagtccccagtgctgcatgctggaatgttgcctgatcttattggcttgatcctggcgctggtaaccatagctgctgtgagtttatgggtgcagccgcctgccatgcccagaagtcagcattttcagcgctccttttcacccaccagctcttaaatcctttctgtgctcttcctggatgctctaccagccttgctgggctggatacagatgtccaggttagggccgagcactcggcagtcactctcagctctccggtcagctataagtctctgcattaatgctggccactacagaatggtttggtttctctggccaaggcggagagcaaaccatggatgtaaccgtcgatatttagaagacagtttaacaacatgtctatgcagcaaacaaaacaccaacaacaaacctggtaataggttcccttagggcctatgacttcccaggcctttgaattccttcctccctccctccctccctccctccctccctccctccctccctcccttcctgtggaacaggcctcgcatctgaacagaaggttacccccaaaaccttcatgccacagttgcactgtggacacattttgcctgacaggccattatagtaacctgcaggggtcactgctaggtaaaatcattgatgggttttctctccatgagataacctaccacctcttagcattgccaccggggagg

SEQ ID NO: 20810 - DNA, 2287 bp, Mus musculus
tgggggatgtatccttgcagttgcagggcgacgacacagtggaggttgtggatgggatggtgcacccttacaaaggtaggaccccatgaagtctctgctgcctgctgtgcactgaaggccagaggaacaaacactcctttggtccctgtccctgtcccagtcccagttgtaggagcatattgaagcgttcatttatctctaaggccagatagatgtgacttactggctcttacatgctctgtaattaagagccagcctgggaaggtgggagtttggttttgggtcctgcacattgggtggatgggctgggagactgccctgttcttacaggaagcagcctgcctagtgaccaccttcccaacttggcctctttccaaaatctcctatcacagcggccccattgaggtcagtggccgcctgcctggacagtgaaatgggagatgttagctctgttgcaggcaagcccttgtgcagcagttctggcacttgcattcctgtgattcctgtggctgtggcttctggcctcacaggatgctgctgagtgtgcaacagtccacagcttagggacaacttggggaaggggtagaacctggcccttaatagaaaactcctcgtatcccgtggtctttctgatggcgactctgctgagtgccagggagctatgactgcccagataggctgtggtctgccccagggaatgtttagttgtcaccactgggcagtgaagtgtctcagtttcacattttgtggaaaatttctttccctgtgggtatccttagatttgttttttggtctccaagattaaagtataggctatctgagccttgaagaatgcataagtcctggtgaactgtgtcaggccaggcgtgactagtagggaagggctgtatttagggacagctgagacatgtcatgcttagggcagggacagggacatttgcacagttggatttttttctgtttgtagcccagccctaagtggaagccaagagtccatccctgacctcagtgcagactgtgtgggggtgggggtgaccaagcgtggcctctgctttgcgctgctcgtctttctgaccactcttgccaaagacttgctgtctcctgcatctctgtgttgacctgcgtctggactgtcaccttcattatgcttagcaatgcttcagaagctgtccgttctcagctttttttttttttttttttgtctagtgatacctgaagttgttgtgtctttccccatgtgtctgtgtctgcagcatgtgacttccatatgtgttcctgcagagcccagcgcccgccccgccctcaggctttctgcgcgtggtggccgcttcgctgcctcgtgcatcctgtgctgtatgccttttctttgttctctgtgtatgatcatgtctttttccttaattcatctttattttctttcttttttaatctcctttgggacagggtctcctacagctcaggttggccttgaccgtagaatcaggtgccaccacacctgtccctggcactgtcttttattcaagcaaataagctttcttactgaagtacacagagtgcaaccagacagccaccatcgattgccctgctgtttgccaccccaccatcctctccctgatttcaggttttttgtatctggaattaactgtgtcaccccctgccatgcttccatgcacgggtcctgtgggcaggccttacagtctgctgcctcttttgctccctgagcgtcgtctgtgttctgcccgtgagaacttgtggcacttgcacttattagatggtgcatgccgtgagccaacagaggcttgatggtttttttagatgggctagtgtagcccaggctgagtctgacctggccctcctgcctccacctcctcctcccgaggactgggattgcagtgcaccaccactcctcctcgtgtctcctgcaggtgaccgggctgcgtactgcagagcagcgaacaagcgggtcatggacgtcatccactcggccagggcccggcagcagatgctgcacgcacagacctttcacagtgattctctgctgagccaggaagaggctgcagctgccggggaccggaggccagcgcccgacacctggatttacccactgatccagatgaagccctttgagattcagattgatgagatagtcacggagacgctgctgacggaggctgagcgcggagctaaggtcttcctcaccactggctacttcaacctgacccaggcctacatggacctggtgctaggcactcgagctgagtatcagatccttctagcctcaccggag

SEQ ID NO: 20811 - DNA, 1490 bp, Mus musculus
gaagctgggtgtagctttgtgaccctctcagtgtgggcagaggtaaggatcagggacagcctgagtggatggtgagaccctgggttgcttgttgctgccgtgttagggaagctcatcacatggcagttggtggctgaagcagcctgctgtggaactcatgtcatctacaggccgatgtcttagcacgctttacttgcagagaaccacagggagcacgcagtgtgtacagtgcatgctttgggcacttctgcaatgtggcttgtctgctgagttctcatttggaatttttagaagtggctcctagagcttagttcacagaacttcgacagtagctccggtagaatggggtgatgatgtagtgctgcctggtgagagcggcagcccacaaccagggagcgctccctgggaggaggctctgagagagagtggatgactgactgggttcaccagggtccccccactccctggtcttggtggagtgttaggcatgagtagtgtggcccttgctgggtgggtggtctctgtagattgctgagcattcctcttaccgtctcagtgctgtgagctgccgccgtcaccagcatggaggagtccatgctcacaagtggaaactgagaggcttggggtagagcttggtgccgggcatttgcctacattcagatgtgtaggctccgtcctcagctctgcagagcctcccaccctccccagctactcagtgtatcctgctttcccaccaccaggaaggccaagcactggtgaactcctaggtgggtcgttttaagctgtgtgtctgtagcttggttgctgtgtctggctgtgaaggagagtcctcgggagcaggcagcagcgggagcaggcaggggggcacagctgggtcactgcagctgtgctgctcactgatggcttgctagtctctggcctggctgtagggagagtaggacaggaacagtctaggggctggggtagtctgctgactgcatctcagacggtcagcctctttgagtaggtgctgtgggttcactagggtcccatctggtcctggtggagtgcgaagcctgcgtgttaaggcacggtgttagcccagaggagtctgttaagctccagcatgcttaacttggtgcctgaggggcagctttagcagaacctaagagtgtgaagtcagctgtgtctcagccctgcccagtggggaagccagcggctttaatcaggccatcatcactttgacttcttgccctgagcaagacttgtccctgctgtgtcctgggagcctgcagccctgttaggcagggaccacacccatgctcactgtacagtaagctgctttgtccatctgccaggccacaggctcagtgcaaccccccccacccccccacccccgttttgggggatcacaaaggactgagcatattgacttggtttcttctggatgaagagttctggattaacaaagccctctgtgtggtcagggatctttggattagagacttctg

SEQ ID NO: 20812 - DNA, 1151 bp, Mus musculus
tagagtctcagggtttggtgttagaggaaaatcttgcttttcatatgtgggaagcagcctgacccatggagggtgtccccctcctttctttgagcaagatcagaaggtggttggcaagttgtaccaagcagacccagtctgggtgcagtgggaaggaaggattcctgtcccgaggattctttgccctggttccatgctatgggaaatctgaggtggggacagggaaacttaaacacatgaaaaacttgaggtgtgcaagagtagacatggcctggatccctggatagggagagctgcctggagcagagctgctggccagggggtgggagggacaccatcctctggcctcttgtcttattgctgaagccggcaggtggctttgctgaggccttcaagggcaggacaccagccacagaagtgagcagcagccctgtcagctgttgcccaagcagttcttgaaactctgctctgcatggacattaggaagcagttttctgctgtagcagcatgtgtgttacatacaggccatgtgtctgtgatgtctcagcatgtgtgtgggctctctgtggatttcgttgatggaggatctgtgatgggagggccacagggagctggcctggtgcagaccaggggagctggctggctttcttggataaacttcctcaggctagtaaggggaagaagggtagaggctgctaggctagcctggggaggacagatgctcaggactagctctgtggggcttggctctgaagccttggagcttgagatcatagaagagagtgcagaatgggacctgccataggcatctagtagtacttaagatcctgctagaacagcagtgtccccatgtgtactgtgacagagcagcttctgtgggacccactggcagcacacttctttatgtggtgcaggtggtaactagagacacgagcaaactcctaggtgtcctgaggtagaaaaggtgggcagctgtatgtaggcaggcctggtcctaccaaatgcctcaaacaccatgtgacagccacctctgctgttaggtagggtagagcctacttgcctgtttgttctgggctcccagaagggatggaggctctggtgagctccgtcttgagctgcactttgccaacaggtgcttcaggcagttgaaa

SEQ ID NO: 20813 - DNA, 1157 bp, Mus musculus
agtcagattcagggtttgtttcccaggatgctggctccttagctgctgggaatcaggcttcactgctgtgtgtggcattgggaactgagtgcatcagacgggcacaatgattgcaagcattttaatctgtacacatacaccccgcccctgacacccccacgcctgctccatagcccaggagcactgggtttgtaagaagtcaaaagtggtaaaatgtgtctgttttctggttagaaccaggcaggatcggtaccggcctagtcacactgtaggtagggctacacctgcaggagcagcgccacagctgccaggatccacttggctgccttctctttggtcttcaggttaaaagtccagacataggtgggtcctcggatacgcgtcttgtatacggggcattcatagatgttcttggtctccattcggtccacaggaatggccttgatgaagatgacgggcatgactggggtcagatccttcaaccgggcttcagcaatgactccggtctgggtgtcccagcgagctcctgtggggacaatggagctgagggtctgggtgccctaggggaggcagaacccactgtttggatgctgaccgtgaaaaagggaggcacggtagggagagaggcctggcctccaacctccccactcttttcagagacaggccagtgactgggagccatgaagcgttcaggccaggtgccagggtctgagagtgccaaacatggaggagtgtgaaccaaggactccgaggtgactctgcatgccgtaatggctctgaggctgcatcttctcagagcttcatctcagccttctcaatgtcagtggcagagaaaactgaccgcagctcagatcccagcaatgttccttcctgatccctcctgtgtaatgtctactctctgtgtacatagggaataagttatatatagatgcacatataaacactatctgcccttagccagactgctgttgtctcttatcctagccaatggtgtttgtgtcctgcgtggcattggaatcacaataaacatggagaatggctgttgtgttgctcaagtgatgtgggtgcgtgacccttgggtggcctggtcctgacacagcattgatggaactgtgattccaagaaaacagccttctggctgcagagtagattctaat

SEQ ID NO: 20814 - DNA, 1183 bp, Mus musculus
ttttcttttttggtttttcgagacagggtttctctgtgtagccctggctgtcctggaactcactttgtagaccaggctggcctcgaactcagaaatccgcctgcctctgcctcccaagtgctgggattaaaggtgtgtgcttccttactgctcggcttacatctattttctcaaaaccttctattcttccagattggaccacttatatagtactttatacttaatattttatccacttttaaatttcatgctatgtattttgatcatattctctgcctacttcttctcctagttcttcctagatccactcttcctcccttccaatttccaatttctttgttttaaaacaacccagagtccaggctgcgttgcccacatcccctgaggcagggctgtccactcccagaacacgatgtggttgacctaccccagccacttccttaaagaaaatggactctccctcctctggagggttaaactgttttaggagctcatagccctcgaatggaattggtgtggtttttcatacgtgcttgcttctctaaaccaatcagaagattctgagcatgctgggcactttgactggggactctcacctgtgcgtgtcccctccccccaaccccgagttcttactgttttctgctactataacggaataccacaggttggctaaattataaagaacagaggtttgggccagtaaaatgtctcagcaggtaaaaacacctgcctcacaagcccgaccccctgagtttgagcccttgactcacataaggatagaagcaacaacacaaggctgtctgctgagcacacttgctgtgacacataagccacacacacacacacacacacacacacacccagcatgtatacacatagtaacagtaacattcttaattcttaaaaagtagagaggtgtatttcatctcgctgacctggaggctggactctcagtctggcatctgaatctgcccggggccttcttactgctctgtaatgctgtggtactgggccattccaacacatgaaattaaggccaattccaacacattaaattgtatttaattaaaatttaattttaatcaaattaaaattttaatttaaccaaattaaaatttaatcagtttttatcaaatccatagcagttgcattgtattgtcttaatgccatggccaggtagctt

SEQ ID NO: 20815 - DNA, 1167 bp, Mus musculus
cctcctgcgtcagggtgctgacccctcctttctcctttcttagcctgtctttgtcacaggctgtggctggcttctccagcctcaggtacatctctgtcacaggctgtggctggcttctccagccttgggtacatttgctttgcaccattgtcaccctgggcctcctccccagcccgtgctctcatcttgctgtccaggacatctcacggtgtcacccagacacgcttgctctgctcataccatagactttcactttgtgaaagatgcttctgtcttggctgtgtcttgtcactgatgtaaattttgccatggtctaaatgttctcctgataccctgccccacccgacaccctccctgggaagaaagctttgtgtgtgtagcatgcacctacttaggtgtcttttgtcaggagtgtctcctttttgctctcaggtggcagggtaaagacctggaagaggcgctggttcattctgactgacaactgcctttactactttgaatacaccacggtgagcatctactggggcagaatgggccaatcctccacttccaaaccattctccccaaacacagccagagggggccctagggagacggtcagatctgtcctacttccgtgggggttagggaggaactaaatctcagagtggaacatcccaacaggatgtagaggctgtccaggaggctgtagaccagagccagcacctagttctagacacacaggaggcacaagtcccaaaactgagagagagccatggacaccatgcttgttcagagctggaaacatggaactggagtcagttgccaaaaacctagtgaaggggataattgttgtgatttggtgaactcagattttctgtggtctcagaaatgctgaagggtttgattcagaacacacagtctcagtgtgagagatgcaacagaggaagaggagcaagacgaaacggagggagcggctcatgtgaggaaatcagagggctgggggtgacacttcctaataccatggaagttcactaggataagatcttccggcaggagcctgtcacttgcaggcgccctttgtagctgtaggaataaaaagtacacagtaaaatgcctccaggcttcctatggaagatcactcaaagccacaggttgttggtctcgggccatgcctccacactggtg

SEQ ID NO: 20816 - DNA, 1898 bp, Mus musculus
tgtcatgctgacagtaaccttggagacctctggaaaggttgagcatcttcctcatagacctgtggtccagtaggaacaccgttcctggcctggggctgtcagataaggaacagaggccagggtggcatttggtggtgccttttctggtgagctgtcctttgctctctgaagctggagctgtctcgtggctctcctctcagaggggcctctgtatgactgactatcagctgcaacaagaacaagccctgctgactgcactgcccccatccccacccccaaagtgcatctccttgaaagaccaccacttcttccagaaagctgcagctgctgggcagggagagcctctgcttccgtggctgccagccctgcggggagactggcaagctcccgcatctgccacaacctgtggatctctgtcaaggtggtggtctttagagacgaattctccgttattttactacttacgataaagcctttatttttgaccaggcctgtggctaccagtagcaatatgtttctctaatatgcagacactggctttgtttgctcaattttgtgagtgctttgacattgacatgatctccttccctgtcttgctcaagctgcccctatggacttagggttaacaaacaagactcctcacccaggagacagaaggtgccagaaggttcctcctcatggggtgcatctcttcgttccccaagccccagcctgctctgggctgggctcctagtctgggcctcttgggagcgctggagctgcctctcatttccatgtgtagcgttctgttcagctgcaggctcagggtcttacttgctgcagatgtgggaagaaagggttgtgttctccgtgggccggagttgaggtcctgtttctgtgtgggtgtttccttcctgtctgtttctttccctttagagaaaaggcgagaacagtgcccctcgatgggtctgctggtgagtgagtcttccagctgtatgcgatggtccttgtgtggctgctgtctggatattgtgtctgggagtgctgtgggctccgtgttctctcagaggggggcagggaccgtccttctgaggtactgccatccttcctgtagcagctgcttcctgggtacattggttttctttacagccttctctagtagaaaggtgtaaagctgccagcacagaactgatctgtcttccgtgtctcctcagattggttccttcctttgtgctctagattacgcagtgtaaagtctcctccaggggcacgtagtccactgcctcttaggcagtcatgatcccccatctactgtcctgacttctggcagcgtgtgttgctgtcagtgatggcaagtccttttcttccttagaagccattaggaacaggtcatgggtggaatgagttcttggtggcgtactgacataaataattgaagctttcctaaaagtagtcattttgttgggtcaaatcaaatcagtttgaactttgtgcttggcagtagacatgttttaggcccatttgcagagggccacctccctggtgtttctgttcttgctcacctgcctgttaggggctgtttccatccaacatcctgtgtggctgcgtctgtatgtgtgcaggaatccccgtactcttccacttcctcttcaggggtccccagatattgccaagatcttggtgcaataaagtaatgcattttttttttgtgatacctttctgtgtctgccttgtctcttcgtttttaagaaggcgcgtggccaggccgcagccccaggtcaggcggatgcttccatgctgctcttgggtgaccgtccacagctgagacgggagcgccaccgctcgagcccaggcaggaagggccatcttggacaaagagatctatttaagtttatcccaaagctgtatttgtgtagatt

SEQ ID NO: 20817 - DNA, 1221 bp, Mus musculus
tcaggtagtagtgcagaacctgcatgctcactggaaggcgtagaaaaaaagggtcagtgtcattggccacaggggctagacctgcctccccagtcaaggctcgagtccttgggtgcttgctcctggatagagatgctggggcgttctgtggtgtgtcagtgtagttgcctgagatgttgtaggggtggggcccaggcaggtagaggttctgtaaggagctcaggagcactgctgggggcttaggtggagaaggttgtcccattgtcagctcataggtggtgactgggggtgggatgctgggtgtgagtagctatcctgtgctgggccatcctcttcacggccgtggcttccttttaggttggatcggcagacacaggctactaccctggtgcatcagatctttggaggctatctcaggtcccgaggtaagcaggaggtgtgctctccacttaagcagatctgcacacattcccagactgtgagaacttaaccacatggtggtggctgaagctcccaggctttgtctttctgcctggctgcccttgtccactataggagtatcccctgagggagccggagaagcatggtgtatgatgatggggcccatccttagagctcctggtcctcgggatgaggcctgtgtgacgctgtaagggcttgcccactggcctgtggcagtggccagtcaggcagaccaggcctgatgacagaacctggcctcacctgtatctctgtctccagttggtgggtcagtcaccttttgggtgagccgagttaaatgctctagacctgtggttctaggttctggacctgggtggtacccccgtgggtcacagctccctgtgcctctgttctgttgcagtgaagtgctctgtgtgcaagagtgtctcagacacatacgatccctacttggacatagcactggagatccgggtacgcttgggcagtgatctgtgttcctgggggcgtgaggagggggctcagcagtgggaaaggtgtgagtcagaatagacatggaagagcagcttggctctcctgcagcctccgcatgctgcacaaggcggacaggccaacatttgcatctgtctgcagttctcctatgcaaatttctgtcagctaaatagagtaaagctaagtttccgggtctgaggcacagaaagtgacagtgcctcactggggcttggggacagcgtttggaacaggcacccattagtctccttt

SEQ ID NO: 20818 - DNA, 1234 bp, Mus musculus
caaaggatctattgccacttgtgtagggtgggtcaggtcagaggagagagttgccatcccagccttcagagtgccgtgaagtcagtgacaggaacctcagaccggtctgaacatttgtgcacaaagagagaggatgtcactgtggcctctgaccctcacgtggctcatagccacagggaagcagaaataaggtgaccgaggaaccgttgtcacctaactgggggtagatacttggggagagaggttaccacaggaacccagcaggggagccatgcccagatctctgctgaccaaggctcacagtgacagcagggagaccaggagatggtggaacccctcaggtgagggtgttcacacacgaggaagaaagtggctgtgggtgtctttgtcaacagttatttgcttgacatccctaggtttttgccagttggtgtgagactgagatgatcaatgcccagggtggcagtaggccaggcacacccgctgtgtggcagggctgactccagacacctggcttccctccctccctccctcaggtacttttactcccgaagaatcgaggtcagcatgtcttctgttaagtgcttgcacaagctagcctctgcctatggggccacagagcttcaggactactgtggacggctttttgccaccctcctcccccaagaccccactttccatactcccttggacctttatgcgtacgcacgggccaccggggactctatgctggaagatctgtgtgtacagtttctggcctggaacttcgagcctctgacacagtctgagtcctggtcggctgttcccaccaccttgatccaggctctcctccccaagagtgagctggctgtgtctagtgagctggatctgctgaaggcagtggaccagtggagcacagaaaccattgcctcacacgaggatatagagcgcctggtggaacaggtccgcttccccatgatgctgccccaggagctgttcgagctgcagttcaacctgtccttgtaccaagatcaccaggcactgttccagaggaagaccatgcaggccttggagttccacacagtgcctgtcgaagtgctggccaagtacaaaggcctgaacctcacggaggacacctacaagccccgcctttacacctcttccacctggagtagcttggtgatggcctccacctggagggcacaaagatatgaatacaatcgatacaatcagctctatacatatggctatggct

SEQ ID NO: 20819 - DNA, 1422 bp, Mus musculus
tggcagggtgagggccaccccttgggaggcacctgcccacactctggagcctctctagcacaggattgcttgcgagctgttgataacttcatttctcccctcaggaggatttttgtgctgtacagccttttaaagtccaaattattaacttatttttactagagcagtttcttttcctgaataacagagtcaccagacttcatcacacagtgacagtggagttcccacatgcacttccaggagcgagggacttgtccccacacccacagtggcgacgtgagcttttacagaaagagtctcagcatccctggcctctgcaacttccaagggctgccatgctttcacccctcagcagtggttgagggaggggctgcacctgactggagacctgccctcattggctcctggtgggtgtttagcagccttctctctagggaggcctcactgttttctgctgtcctgttctgtccatgttcaaaagagccaaggcagcagagtcaggctcagaggtcattctgcaggcagcagcacctcacctgcctccggcacccttagaacaggacaccggtactgctgtaggcacagggccctgatgaccgtcacaaaccccttccacaggaagccactgccactggggcctgactaccctcagtacagcaggctgctgctgacttgtggtgctgaggtcttcgtgtactgttgtgctgggagctcagccaaacctccttgatgtgtgtcaactgtgttcggttgtgtgattctgagctgaaagatgaaatgagagaggttgagagagacctgggcccctcgctgaggagccttccacataccttcctttccctgagcaatgattgtgtctttccattgttttataaacaataaagtgtcaggggaatgtggttctcttgtctatgttggctgttgccaagggctctgccccaggaagtctaaagaggtgggatgcaagccttggggtcatgaaatggcccctcacctctccaaatgaggcccaggaagtgaagccccgtctaggcttcccaggcttgggtctgatgggaagagctgtacggagagactggctccagcccttcaggctctgtcctactccattttcccactctggcaattactagagtcaggacagagcccgaagtgctggatcctgaactacagcagacacaataggccaggcttggaatcccaacctccacaggccacgacaaggaatagtgatgagtagagaaagatttgtggccacatcaggcagtgggacaaggaaaaggtccagactgggctaacaaggaggctcagtgtgaacagtgcctgccacacaagcctgacagacagagtgatcctcagaacccatggtgaaggagggaactgatgacccagaagctggtctcttaaccttcacatgatccc

SEQ ID NO: 20820 - DNA, 1166 bp, Mus musculus
ttgctagccctaacaggtgacccctcatccacaaaaagcctgcctagcttggggccctcataaacacaagataagtaggcctgagctgccatcccctgggctctgaggagtgtgacctttgaatgaagctgaggtgtgagacaaagggcagcagggagccagacccagagagctctcccatgctgcaatggtgagctggtgcttccctcggcctcaaacactgctggtgaaggctgcgggccctgcagggacatagggcagccagtgagggatgctctgcagactcagtgtagctttctggctgggctgtagtggctgcatggttgtcccaggtcgtggagagtaggtgcagagcttgaggttagagggaagatggagtgaagcccccaaagtgtagcctcgggtggcaaggcccttgagaggaaggctgtgccggtcagcagggcgtgtgctgactgcgggtctgtactgctacctcaggctacctcattcacgagtccgcctgctggagcgacacactgcagcgctggttcttcctgcctcgtcgggctagccacgaacgctacagcgagaaggacgatgaacgcaagggcagcaacctcctgctgagcgcagcccaggacttcagggacatctctgtgaggcaagtggggactctgatccccacccacggcttctcatccttcaaattcatccccaacacggatgaccagatcatcgtggctctcaagtcggaagaggacaatggcagaatcgccacctatgtcatggccttcacgctggacggccgcttcctgcttccagagaccaagatcggcactgtgaagtacgaaggaatagagttcatctagatgagtaagctcgcacgcccagaggggcgagggccagcggctgtgttacaccaggactcataaaaaccgggagcgcctccactcgtttgctttttttctttttttaactaagagctgtgttcctggctagagaatttcattatagggagctgagccccggcccatatgggtgtactgctcggagactgggagcaaggggtcctatacaaggaaccccaggtgctccgcccacccgcgctcactctgcactgccacttggtggtagggattgatcactgctgcagctatcttctgagcctctggccttcagaatcc

SEQ ID NO: 20821 - DNA, 1214 bp, Mus musculus
tccaagtgagacagaaacatggctgggggaatgggaccaagctgaactgatgcctaggtaaggggaaagaagagtgcagatgcccctaggttggtcctcggggctgggcagcccttagtgtagagagttctgccaagaagctgatttgataccaattggcctgcctaggggaggtgcctaggctacagagatacctagaataaagaacgtgggacttgctagcccctgggccagcagagacatctccctgtctctaggacagtgtttggagaggcacagatagcccaggtatgcagacctgggcatagggctgtaagaaggaggaggaaagggcgggaatgtgatattcttgaggtggtcggcagggcgctggagcggggcaggagactgctcctgcatggactcccagatcttctgttcacaaaacaagctgagtgctcagtgtccctgagagggcagtccaggagcacacatgagccagccaggtgaacaggatgcctgcaaaccaagggaggggctgggacaccagtgtcagcccattggggtagcccatagagctcttcctgaacaaagatgtggggatataggctgtggctcacaggaatgcagagttattgatcagggacaagtttgagggttctagagactaaggacaatggcgtgtcatggtgtttaccactctacacaacagtcatgtgttttgggcctgtggctcatgttgggcagctgagtggctagttcctcagggccttgatctagagctgtgccctttcagatgactaaaggaacctcaccatggtgttgatcagtcagcccctcagctggtgcatgctgattgtctcttggctcctagctctgagctgcgtgccagagctggagcaggaagccctgacttggtgaggctcccaacagaaggagagcagatgggggagtctcccaggactccttgggtgtgagtgaagcagccatgcagagaggggcaggtgtctgggccagtggaatggtgtgaggcttgctctggaagtgaagactaagagggaggaccattgagccgtggatggttacatagcaagtagtgcaggctggggtggcggcaaagggctctcggaagaatagctgtagaggaactggggactgctggcatgtttgggtgagcggcgctcctgcagatgagggaccactacaggaaggaaaggattgaggccacttcttgg

SEQ ID NO: 20822 - DNA, 1150 bp, Mus musculus
attttctctctgctccatcctggcttccttggccttggcttccaaagttttggcttttgacaagatgcccttggccactgggaatcccaaaggacggtgcgatcccagatctggctgctactctaagcagagagctgccggcagatgaaatcattgggcggggagcctgtgaggatattggggggcctccagctccttctgtgtacacagccttagacgaccctgtgctgtgttgtcccgtggccacagggtgttccagagcacagcccctgtgtgttcccattcctggacacaagtaagcaaatatcatgggtttcttaggaacgaagtcaagcagaaaagagaaagaaaggtggtgttagttttggctttccagccagctggagggagggatggggagagagagagagcgagagctatttgtattggggaaactgaggcataggaaaaacatgaatggcaacagagtagctgcagtttgtgggtttggaaaccacatctgacttaactctagatcacatatgagctttcctggggacagcaggactgacctccgagctctgttgacatgctatagccttgcccaggggctggtcaatctttctgagccacactagtaaaagggttgggggagaacagcaagtgccccctgtggttggctctgggctggtggcagcatcctgcttgccccaactcacaggatcctgacagcagctgggaacctcagggactcctgcagctttctctgtaagaaataaagctcctactatgtcccagtacctctctgctctgctccacttccccagtcactctggaccccagggtgggagggctctcttgcctgttgggacatcagttccccttcctccttcttggtgaattaaccatggaaggaccagggctcggatttgggttcccaaactgcccttcaccatccctagtgccctgcttccttcccagttcagcatcctgtctgggaacttgatactttaacctgctagagcggatgagtctgatagacctgcccagccctgacacagccctagtcagcttatggacacgtgagagggacttcctttgagacccagagctggggtagagctataaaaatctacctattcccgggtcaaccccaagtggtagaagagga

SEQ ID NO: 20823 - DNA, 1182 bp, Mus musculus
aactactatcttagagaacagcgtagaagttcctcaaaatgttaaatatagatttgacgtgactcagaaatcccacttgtgagcacatgctcaaaagaaacaaacaaaatgctcccacatagagccttgctcacatgttcagggaggcgccaccctggagccaaacagaagccgcatgcgcgcatgcaagcatgcacgtggggtaagcatgggagagggtgaatacttagcaacagagggcgtgagttgccagtgtgtgctacagcactggatgagcctcaaatatgctgagtggacaaagccattgcagagggtcacaatagcgtgccacgtgtcgggagtgcacagaagagggagtccacagtggggattatgggctacctgggcctgtgtataccagagagcagtggccagagaacactagtgggaatctgcagtgaactgttctaaagtaaatcgtggtcacagctgcacatgctatcaatatactaaacgccactgaattgggtgctttcctggttgtttgagacagagttaaactggccttgaacttgcaatgtagccaaagctgatgctgaattctcatcctcctgcctctacctctcaagggctgggattacaggtgtgtgctcccacgcccagctgaattgttcatatgttcattaacatatgtttcgatgatgtcagaacgaggcctctggggctggagagacaggtgagtctgtaaaacatctgcagagcaagcgtgaggacccgagatcaagccaagaacccacacgcaaaagctgggtgccgcagcgtgggtttgtgataacagtgccaggaggcagacaagaggctccctgcacttgctggtcagctgcaaaacctacagcagagacagacaagcagtaggaagtacagtaagttagagtcagtgaagctttggaaacaccaacaaaaagagcaagcatcaggcaaggtgctctaaggacaagagggaggatttggcttctgatgccagctgtggggggatgccatcacctcccagtgtgaggcagaacaactgagtctgaggaggtggctcagtggatgagcgttcttgctgcctgtgaatgcccacgggaggaccgtgtcaggattcccagcacctgtgcatacagctgggcgtgcccatgtactcctgtgatgcaagtgctggga

SEQ ID NO: 20824 - DNA, 1466 bp, Mus musculus
ctctttcagctgctatgaggtaaaccttcgtgggtgcctgctccaggacctcttggtgagcttctcacggccgccaggcagccgggaggaggagagcttcatttgtcgccttggagagatccaggtatgtatgtgggagaaaggatggatgggagggtgtctgggcccctagggaggactgggtggaagagggatagatggagcactgaggagtaggtgtgaggggatgtcctttatccctgggcacccagccaggtgaaccttctctctcttaccaggtggttgatgccagcagccttctggcccctctgccccgggtgcagaatgtcaccatttctcagatacgatggcttcctctgatcaccgggtctgagggcctccctacccggctcctcctcagctgcaccctgcactggtcctacctgctgctccgagcccgctgcttccgcattcactgctggaaacggacaggaagcagcagctctgtggcagagtccccagagacagagaagcccacgttcctgggcctggctttcgccaaccagtaccgtgtggtggacttggctgtggaggctgctggatttgggcaggatggtcgtgtggagttcctggtggagcctgtccccagggagggtttcctggtgccccaggctgagtggggaaaggcggtcctgctcttctcggtccctcagtgagcccgctccagagcacagcgtctcctcgcccacctcaagactcgaggtttcctcttggccagccgcccaaggctgcgtggactgccgaggacagccggatccccaggagatgaggtctccaggttctggctgtgactcaggaagctgtgccccacgggtgctaggcgagttccccttccacagtgctctccgtgggatgtggttctcaaggaaggaggagaaagtttgaggtttcttccggaaaattccataaaggctgtttctccgaggctgaaaaggtgcttcttttgagaatggcggccatttatcctgtagctttgacaatcagaggcaaacggcacgggtggcaggcagtaaggatccctgaagactgagaggatagtcaggggaggagtgggagtcagggttgctcacggagtagctggagtggtgctccccaggaccaggagcaccatcaggtggctcctggcaccacacccccacctgtataaggtgggccagtcacatgtcacacttcagactaactgtatggatggtggctctggcagctgaatgtcccagagaagcccaaattcctcacctgtgtgatatgagggtgctaaccaccatctcatgtccctcaagaggcaggtgagccccgcctgcttccaggtacagtggcatccttagctgtaccgaagccctgttgacactaggctgcgtgggaacttcctgctgtgtgactgcaacctgggtgatgaccccaccactttccccccgcctctcccagtg

SEQ ID NO: 20825 - DNA, 1217 bp, Mus musculus
gagccccactgaggatacactctcagaaccgagaacagaaacgggggggggggcggttcagcaccaggaacagcgccattagcgtcccggcacgttctgctttagggatctgcgggtcttgagccgtttcagtaccatggacagcgggcaactcctgtctcgggctgcgggttcagcaccagggacagtaacaacaacctgacattcaaataggtgtttttccacctggatctctctgcactgagatcatctgtgtgtcgcgtgttaaatgcacacacagcacttgtgtttttggtaggaatcttggtactatttctcattttcccattccacccccactacctccctcacatcccttgttaaaggtgaccagaatcccatctaaagccaagaagggctcatcttgtctctcttggcagacagttccaagtactctagggagcaagggtagcctctacacctccacatggctcagtttgcaatttaattgaatagaccaatcttacacatcacttttgcttttgtaaggggcgggggccatgcttgaaaggtaaatacgtcaggagctgatgaagggagtgtacatcgagtgtgttgaggccaatgaagagtcaggataggatgacctcatcctgagcgaaatgatatggtcagccccactaacctggcaaactccaggatgcaggaggtagaagacagggtttttcctcacaccctggtctacccacatgacccagtagtgtgggctgcagactggaggggtcagagatgtcagatccacccaccaggtcattctttccactaggttttttctccttccccagcaaggatttgcccagtgtgcaatgttcccttttgtttttatgattgagttcagacatgggcttctgccagcccagcaaagctctcttggcttcagtgactccccatggacatggtctgagaaaccttgagatctagcctgccaaggtccacccccccccacagccctgccctggcttacaagaagctagctggtatggagcacccagcttctcctggtcaagtgccatctctcttttgaacccctgcccttcgctctgttctgaggtggctcctaacttgtctctgtctgtgtgtgggtcttgtgtcttttcttcttttgcttttaggttatatgtggcagccacacagcatggctatgccagtccagatcagggtctttgggagttcccaga

SEQ ID NO: 20826 - DNA, 2222 bp, Mus musculus
gtgctgcgcagaacctatctgtagctatccagaccagccaggactggaaacctacccgcagtctcatcgaacacgtctttgtcacggatgtcacagccaacctcatcactgtcaccgtgaaggagtcgcccaccagcgtgggcttcttcaacttgaggcattattgagaccattgcccgagccagacctgccttccagtctctggttttgctttgatgcctgacctgggggccaactctgccctgtcctgagactcagggctgggaaatggcttcctgctgattctacctctctgggcctccacttcagtctgtcctgtcatctcaggaaagccgggtggccactgacttaaaagctacctgcttggacatagcatcctttctacacatccctccttaacctagtgagaccctcccctccctggccaactactgtgaggtggattggggaggggggggcactgatacagctccctccccaggccgttgaggagaggggtggggctggtagggccttctcccacatccagccacggcagggtctttctggtgagggagacactctatgctttgcaagtaaggctataacttcagttttaaaaggctaattagttgtgtggttgggctcagggaccctgcggaaatcttcagtctctatccgtggtgtggtgtcccctctagttgcaattgtagtcccaaagcccagtcagggtttggagtcctggcactaaggtgtacctgggtgcttctggacttgggaatagagagagccatgtccttattgcctccttcaagcaggctcaagccccagtgagaagtgaccctgttcctctctgggtctggacccatacccctgctttggcccactaaattgcaccctagttctgaggtctgacactcctgggcttggggaaggagcaggctagacacccagagcaagctgatgtaggcacttggagtcctgggcaagcaatcttccttcatgttggacttttattactaggaccccataagtcaccatggtggcaccagtgtgggaatgcaggtgttttgtgggggcctgtcaccctgctgcctgtctagacatctctaaactactgtggaagcattttctatagtcagtcttggtgcagagctccgcctggtgagtgggccactcttgggtcccatattccctgacaatcctctcccacatttgggagcttgtgtttcctccctcgctgagaagcaatagccctatgccatttgtgtggtggggtcgtttaggagcccacctggcagggggcccctaatttctttcccatcctaggagataagtctagtgctgagcccctttctaaatgccttctcccctgtcccccatcccgggtaactgtcttgaaactaccttgtcagattgctggccgatgacaggattttctgtcctgggatatcacggtgggccgtgacaatctggtcagtgagtctgtgatgccaaaaagtaggggtgctatgaaaccctggttctgcttctgccattgactgatcagccagcaggtgtgggctcttcactccagttgccttgaagggaaatgtttccccttctaaaaccagtcagacagtgggctgaggtgtctgggacctgccacactttcaaagtgcaccccacccccaccccagtagctcaccctgcacaccaaataagatggtctttgtgtaaccaaaccaacctcaatgctgtgccttttggggcagacccatatccacagctcctgagagatgcctgtgatgtgccaggggaccatgttactggcagcaggagctacgtactgggaagaattcagggccaggaagtgggtaacaaaggggaaagggttgcctactgcattatcaatgtccctccctgccctcagccagggtctgcaacctttgtaccagacactgcctttacaaacacctccccgtctctttggggtcccatgagctgttggagaagtgaccctgtttggggatctgggttgactggcctttgtcccctgctgccagtctccaaatcccaatttggtgccttttattttactggttacgtcagtcccaaagttgaaatctacaaatcctttcctctcagccactttgccttcttgtgtgtttttcctggtgctgtgaccccagtggtctatgtcacaaagcacatgtgtgtagtgcgccagcgcgagccccactggagcagcgccattcgctctg

SEQ ID NO: 20827 - DNA, 3112 bp, Mus musculus
gcacctggctggcacagactgcagtccaggttgggtggttctggtcttgtgtagtttgcctcatcacttctggggttgtcgccatctctgaaatccccgtgggtaggtatatgggtgagacagcactggcctctgggtcttaggtcaccccatgacggtagaggcagaaatgggtggtgtttttttagtaagtggatacccccacttgctaaccatgtcaaagcaagttgaacggctgaagccagcatccagccctgggaaggtgaacccttgtcttggggtcttctcttggtagtcatgtgacagaagcctggtaattcagagggggtcccataagcctacctccccaggatcacacttctgtcctgcaccccagtatctacactccaatgttttgattggggacagctggagcagatccaaagacttactggccatggagagtctcagcatttattctaagtctctagctcccacagtcctcccccctccagtgctccccaagacctgacccaacctgttcagtgacagccttgtgccaggtatgtcccctctagtcctatggactactggaccttggtgttacctcaggccagctggggcctctgcagccagacatggtgtgtgggctctcggagccctgctctgctctgaggacgagagaggccccgcgcagagcagcaaccttaatctggatgcaattagaggaaaccagccaaatgccctgtggcagctgttaccccaggattattcccagtcagcaaaaggcattagagtgataattcagtcattagacttctagctgtctcacagccaggacgtacaaatcacgggtaatcagcaagtacaccgtcccctggccacgaggcttatttaacccatttttttaaaaaaatgatgcttaatgctattggccgggcgcatctgtgtgcgcatgccccaccgataatgtctgtgctgacgacattgcttaatgtcaccaaggccttgtcatctagggctctgggagagaaggacgcctttgatgtgcgtgtgtgctgtcactgctgagacatgatgcctaccttggaaagggcgccctcacttctgactcaccctccaaggagaagggagagggcaagggagggggcagcagcagaatgtgtcctcctctctctgggttagaggatgtcttcactgggcacaggaaagacattgcctgcctagaaagttgcacctggagtgccagccaagaggcctagctgtttctgcagaggagggccgaagtccccagagaggctctgttagtaaccttgagctgggcgatctgttgcagagctatgtggttgctgatcaaaccgacccgggttagggaggggcacatgctacattcagaaggggatgactgggggcctggctttgagtgcaggacaccagcccaagagaggctctggagctggtgccttcgatggccagggcaggatggcagtaaataagtgggaagaggaatgcttgctgtcagggtcagctcctgaaaggctcctttgacctctggcctgtatttgtgttttccttactgctttgctggggttttgctgtgctggggaggggggagtagggggtgcagtacgtggaacttgctaggccataagcgatgcagtcgtctttgacaacattaatttagatggcgatcaaccccagggttcctggaatccacctgtgacctccctccgctctgtcagttcccttctactgcagtcaggccaggagtgtcaggcatacccggggctggccagacagagggaaggaacctggcagagatccctggaggccaccctgcctagaacggagacgatgatgacaggttcccccagaaaacttatgcagggctatgctatggcctgggttataggggagccaggactgccacccagctgggccaccagagacgacatagggaaactggctagcctgaggctggacctggcagatccctggagtctctgaagagacaagtggcctctgggtgttagtgttgtgtttctacagaagctgtgatgtgttttgtcatgggctagcctggtctagccggattgtgacaccccaaatctaagaagccagtttctcccagagcttctgcagcagggagcaaggggttcccccagcccacttccttgcctataaaaggagaacaaggccctcccacagactccttcaaaagacttctctgaggctgccatgagggtggctaactatggcccagggacttcacccgccactcagggacgagcccactggccttagccttccgcagcattgaccgagaggggttgtccactcccagtcgaatgccctcccaggtctgaagtcagcaaaccaatgcctctcctgcacttctaccttgctgagtgtcctccgcagagggcaaatctctctgtaacgttcactctgtgccacccacgcctaccctgaagaaaaatgagccacaaagccgcctcagcggtctcggtctgcgcctagctatgcacataggtgtttgcagagctcttccatggacggccctcggagggggagaccctttctgaggactctgcactttctgagcagctgcgtgcagatgcctgctgccaccaggcctttaaatacattgtgttcaattccaggtgggaagatagcatttcaggtttgcagaaatcaagtcacatgactgtcttccttccacactttgaggataaggaggacagcttttttgtgtgtttcgttttgtttttaaagtaaggaaatacccccattgctgatgtctatagcaagtgattcgtttctctgttgcattttgtttttttaagcagtccccttccggtcaaggtcaggactggtcaccatgacccctgtgaataatgattctcatggattcctcacaaaacaaataaaatagtatcaccacacacatggtcctgtgccttgagagaaaaccctagtgagagtggccaggtcaggagccccagggctgggcagagaggctctgtggaagagccatgggggtctttagccacagccagcctgcccagctccttggctgctctgagagtattgggaaggggagtcggtgaggcctgagatgcagaaccagagg

SEQ ID NO: 20828 - DNA, 1237 bp, Mus musculus
gtgtttcagggctccacagatcatttgcacagctgacatccagcacctcctcgatggaggtggcttttccttcataaaccccagtcgcagccacatcagcccaagtcagcacccgcaaaaagtacctataggaaccccagacccatattccagccttcccctgagggtgctgaggtaaccggttggggtgacagccttgaaggagattttgggaaaccctctcctgtgtcctcttatgatccagccgtgagattagaggaagcttgagaaaccccttgcggggttgagagctccatccagcaagccggccctaacacactgctccaggtcctcagggcagctcaggaatggtgtgccaggggtcctctggatccagctgcttggcttcctaggtagagggggtactgagttttgttgactctgctccccacacaagcagccagactcccttgggactcactgtttcctgcctgaggtggctgacagcgggctctgattaaactcggaaatcaaaacctgtgttaatgcgttcacccctccccccaccccgtggcccttcagtgacgaggcttgcacgagtggccagctggtggtggccagccgagagagccaatacaagatttttcactttcaccacggcggcctggacaagctctccgaggtgttccagcaatggaaattctgcacggagacacacctcagggaccaggtagcccagccgacggtggggtgggatgtggttggttacggcgaggggatggaagctcctctctcaggatgccaaccctgtgggtctggggctgtcccagcacatcttcttggggggggggggtcaggggggtctggctctggggattcccctctgaggagaatggcatttggctgtctgtggttgaggtggttgaccgtcagtgtgcctgacggctgaagtctgtgcctaggcctttctggaagtcactttgagcatttgaaggttcatgttttcataaggctttctgccatatttcgctcaatctgcatacagaggtaataggagcctcttaatcacctgtttaagatgctgtatgtgcttattagaacggggaggggggctgactttacagccctaccctcccgtagagcctcccgccggctcctcttattacgatagtggcaaatgccccccctcacccccccgcgctgagcaacctttgatttttgaattaaatgtcagctgcagtttcgccctggactcatg

SEQ ID NO: 20829 - DNA, 1208 bp, Mus musculus
acctctcccagccctgcagcatgaggcagaagaatcctgtgagcaagttcccaaagactcaaaaccagggtggggctggggagatgcatcagtcagtcacaatcatggcagcctgagctcagctccagtgccccataaagagccatgtgagggccatcccaacactcctgagtcagagaggaggatgagggggggggtcactggccagccaaagagaccccgtctaaggccagaatcaatcaaccaaaaccaacaaggcaggctggggctggagcagaggctcgttgggtaaagagcacgggctaggtgcttttcagaggactgggggaggctcggcagccacgtggaaattcacaccatctgtaactccagtcccagggatccaatgaggtcttttggcctccagtggtgcacagacagacgtgcaggcagaacagccattcaattgacactgagggtgacccctgggttctacatatgtgtgcaaacagacacatatacatgcatgcactccaggaagcacacagggtgaccgacgccgtggctgagctatggggagggctgagacctaatgtggctgttcggtgaggctgcaggactctgggcgtggaggagaacactccagatctgagctgtccaacatcgtagcccctcatgccacaacccttgtgaactcctgaaacaggacacatgcaaccaagaattcttgcttatttatatttaggtcagggtctcatgtagcctaggctagccttgaactcattcgtcaagggtaaccttgaagcccccagtgttctgctgcagcctcctgacattacaggtgtgtggtgctactcctaatgtatttggtgttggggatggaacctgcatgccagacacacactgcactaactgagccccagccccagctgcatctaagcacgttaattgtgtgtattgagtattactgatttaaacagcacccatggccagtgttggccagctgggtcaggataaagacaccggagagggtaaacacaggccagttatgaagcagtttttagtgttgcacatattattttgtgattaatattaatcttagaaggtcaattaaaaaatagccctaagctgggtgggatgtcacttagagacagaaacatgtagatctctgtgagttcagaggccagcctggtctacatagggttccaggacaaccagagatacatagt

SEQ ID NO: 20830 - DNA, 1241 bp, Mus musculus
caaaacaaaacaaaacaaaacaaaacaaaataagagagtagacttcagaggcatggcaaacctgaatgaatcccagtgtctgagtctgcatgtaattcagaagttgccccactgggcaactccagagtgggtgggttagggaccagagtcctcctgacttccgaggacagacatagggtctttttcccacacagaaccttctggagatcgtgaccctgcagacccgtggcaagcacctgcaggccgccattgaggggaaatatgtgttcctgcaccgcaacagcaggtcccagctgatggagcgtaagcgcctgagcgtccggctgtcccagctcaacaaggtcctctccagcgtgcaggaagactacccccagtaccaggaggtgctgcagagcattcaacagaagatcgccaccaagctggagaccccagagccctcctagacagcaccgggcctgcacctttcagggctgacttgcgggcagacccagggagtcaccacatgttctgaaaaagccacgtgtctcctagagcgacacccagtctaagaaacaccggcaggccagacacgtgattcaaagcctctctgctgttcacaccaggtgtaaagcagccaccggatccgacgctctgagcacgcccacattacctgggtgtgaaaaaaacccactctcctgttggacttaaaaccatcctgttggcagtcctacggtcacatcagtgcctctcactgtcctgggacagaccctcaattttgcggagcaagtaatgcagagaagaagccaggagtaaggtggacttatttgagccctgggaatgcctgttccagccctctgaagcccagaagataccctcattctccactccacagaaagctcggccttctcctgcccccatttcccaggaagccttaaattagacagaaacccaaagaccgaagccgtgggacccagaagtccaaggatagcaaatgcctatggagcagaaactacttcagaaaagggacacctgtctctcatccaccgacctctgacctctcttcttcacctctgcctcccctaccctggggtttctgggcaccagttacctttttccttgtgtagatgagaaacggattatttcagttttaaacttgaacagcagaaaaaataaagtttacaaaagctgtttctggtcagaagagttaagacacatttaccttaaaatttatatctatcagggcgtggtggcgcacgccttta

SEQ ID NO: 20831 - DNA, 1146 bp, Mus musculus
acagaggcaggcagatttctgagttccagcctggtctacagagtgagttccaggacagccagggatacacagagaaaccctgtctcgaaaaaacaaacaaacaaacaaaaagattgatatctttttcttttttttttttcttttttgtttttttgtttttttgagacagggtttctctgtgtagccctggctgtcctggaactcactttgtagtccaggctggcctcgaactcagaaatctgcctgcctttgcctccccagtgctgggattaaaggtgtgtgccaccactgcccagcaaaaggttgatatctaaaaacagccaagcagctggggagaccccagccccacccaccctattcatccctccacaaacacacacacacacacacacacacacacacaccctgctccaacacaagagctccactcacccgcctaccccgccctggacacacccaccgaaacgtggccttctccagtacttgctgtttagaaatgaaagctagcctggagagatggctcagtggttaagggcactgattgctcttccaggttccctgagttcaattcccagcaatcacatggtggctcacaaccatctgtaatggaatctggtgccctcttctgacgtgcaggaagaacactgttcatagtaaataaatttttttaaaaaaagaaaggagcgacggagggagggagggggggagggaggatggaaggaaggaaggaaggaaggaaggaaggaaggaaggaaggaaggaagaaaggaaggaaggaaggaaggtgaaagcagcagctgtttcagtagtgcacctgtaagctctggctgggcttgttttagagttttctgatcgtctgacagccctagggaactaggctcagccgcctgtctccagtaccaattaaagagacaacagtgaacagcagagaaagggggtttagttggtgtggccactttgggaggtaaaacagatgggaatggaacaaattgggggcgggggtgtgtcctggtgtgagctctaactctgaatagggcagaagagctgtgtagccaagcatgcttggtcacgggacgctcctgtctgttaggagacctctgcagagcaggggtttccctgtcggaccccagaataggcacaagccac

SEQ ID NO: 20832 - DNA, 1154 bp, Mus musculus
ctccacccacaggttgagtcccccatctgtggggcacttgttcctgagcccaaacacttctttccagatgtcatcctgcaacccagcccagccctaacctggaggtcaacgggcgggatcctggatgtgtatgtgttcctaggcccagagcccaagagcgttgtgcaacaatacctggatgttgtgggtaggcctggcccctgcccactgagctcagacccctgccccttgctccttgccccatgtccccagtccctgctcactcgcagtactggtcctcaggataccccttcatgcctccatactggggcctcggcttccacctctgccgctggggctactcctcgaccgccattgtccgccaggtagtggagaacatgaccaggacacacttcccgctggtgagtggcagtcagggtgagggcggccccagcttccgtgctcttggctcccgacctcagcatcagctcgcgtcctctgcttcaggacgtgcaatggaatgacctggactacatggacgcccgaagagacttcaccttcaaccaggacagctttgccgacttcccagacatggtgcgggagctgcaccaggatggccggcgctacatgatgatcgtggtaagcaggtttgggcacagccattgctgctgcttccgtgtggcctcttcctcctacctgagcagtttcccaggacactctctgatgtgtctgctgcccaggctcctggacacacccatgagctcggggctctttggttaacaggcgggatccgcagaactgctctgccttaaagcctgcggcaggggccgtaacgagctggtactgagctgaggacctagatgtggtttgtgcgtcctcctggccctgctcctctctcaggccagctatgtccatgtgggaaggaaacatacttgccctgtgcctgtccccgcagcaggaaggtccaagaagaccaaacagtcacagccatgggatgtccttgaggggagggagctaagccctggaagatacggctttgtaaggaagggctacgactgcctcgccgccaccaccaccaccaccaccaccacggggcagtgaatagtggtacaggcagtgagggccacccagacattaggcaagccctccaccactgagctgcactgccaactctc

SEQ ID NO: 20833 - DNA, 1200 bp, Mus musculus
ctccctggaactgtcaggatacacccctggcagtcagggtgacaccaaaaagaacaaacttgggtctacgcggcactaggtcaaggtagtcctcgtgtcatgcaagtgtccagggtctgaggtatgacatgtgccccatcctcttcccagggtcccagcctcacaaccacggagtcccgaaagcagcccatggctctggctgtggcattaacagcaagcggcgaggccgatggggagctgttctgggacgacggggagagcctcgcggttctggagcgtggggcctacacactggtcaccttctcagccaagaacgtgagtcccaaggcctgtccaggctggtgggtggaaacatgggggatgggattgtcttgacctgggggagggaaggactgggccagagtacccagtggccagcatgtctcttgtgtctgcacagaggaggctgcctgtgacgcttgctttatagtctctatcctggtgggctcacggtcatggtccagtgacactcctttttcttttctcttgacattaccagaataccattgtgaacaagttagtgcgtgtgaccaaggagggagctgagctacaactgagggaggtgaccgtcttgggagtggccacagctcctacccaggtcctttccaacggcatccctgtctccaatttcacctacagccctgacaacaaggtatgagggcaggctggggattggggatcaggcaggagcgaagagggtgctaaggactcccttggtgcagccaactcagacacgctcctgggagggagacagggcatttggacctcacagagtagaatgggccgagtggatcctcacccctcaccatatctaccctgagatacagctccaatggtggaggctataccctgagatacagctccaatggtggaggctatgagctggtaaacagagccttgctcccgatggaatccaatgctgattccaaggcactggactctctaccttggggagggatggccaggtgtgtgctcatcacctgcctgtctccagaccatctggagcctggctgggggagggaaccacttgccattgaagcttctttctgacctccagagcctggccatccctgtctcactgctgatgggagagctgtttcaaatcagctggtcctaggagagtccgtcgtttacagaggcctccagggaggcagagggagc

SEQ ID NO: 20834 - DNA, 1200 bp, Mus musculus
ctaggcacaaacagcacaggccggggccgggcaggcctgtgggggtgcaccagggtgtacggtgccagggtgaagcagctctctgaccagaagcacacgctaggaccacctgcagaggacagaggttgtgaccatctcccacctgtgtccctgccccctctctcccaggagacactgattgtggggggcattctcaatttcagtgctgctaactgcatgctggcacagctgctatgctaactgtgcatgctggcacagctgctatgctaactgtgcatgctggcacagctgctacagagctcacagctcttcagaatgaacctctgaggataggaggagcttggttcctcctgaagggtgtgagggtcctgcccttcaccccaactcttccccctcctcatccatgccgttcatccctgcccctcaggccacagcgtcctcagcctcctccctcctggaccctgggttatttaggtagctcctgttttcaatatcaaccttatttttgaaaaggtttatttttacttttacatgttttggtggtgtgtgtgtgtgtgtgtgtgtgtgtgcgcgcataccattgcttgcagaggctagaagacagcattggatcctgtaggatggagttacaagtggttgtaagctgtctaatttgggtgttgtaaccaaacccgggccctctccaagggcagtaagtgttcttaacagcagagccatctcctaggccccagtacccagcttagattaggcatccaaactgtcttaaagaaaacgaattatttccctactaccagactcacttctgatcagcttcactctgtagttgttacccgtgggcttacaccagtcagacctctagcatgaccacgtgcatacactggtcacctagtgaccttccttacagaacactgggcgattggtaggttttactgttcctgcacacacttgtgggctagtagcttttgtatagtttcactgggtcgggcctcagagtggggcacggccatttagaagacatcaaatgtgatgctcagttgctgttcagaaggtgggtagatatttattatgatccgtaaaaaacagcctggggtggggggatgttggagagatggttttgctgttaagagcactggctgctcttcaacagactttaattccaattacccacatagtgactcacaaccacctgtaactcaatca

SEQ ID NO: 20835 - DNA, 1148 bp, Mus musculus
gaattgaactcaggacctctggaagagcagtcaatgttcttaaccgctgagccatctctccaacccttgaaaatcattttttatattataatgaatgttttatccaaatcttaggaaaatggcttacattttaaaatatacctgtttttacaagcactggtgctggcaggttttttctttgtgcagagtgggacaaagggctctacaagttttgggtttttgaaatggcctcactctattccaggctggcttcaagctcccagcaattcctcttgctgtgccctctcaggtgctgggacagcaggccagagccaccatgtggcgctacagacactcttttccttggatagcttgtgaacttgcacagtatgtgtgctcacagagacagtgaagacccagggtgttcccctggggtgtagaagtgaggtaccccgcagccctcattcctccctccttgtctgcaggagcctccccgtttgcagatctccttcttctgcagcagtcagtgtcgtgacggaggactccatgacagtgtttcgaggagctttgagaagtgtgtcatcgaggctgtgagctctgcctgccaggtcactagcctttcctgcatgggtttacagggggtttctgatgtggcctgtcaaggtctgcttaagcctgcttgttctgaggccctactgcattggctcaccctcctttgtgcctagagacaaacatatgctaagatccagtattcgcttccaactgctcgagaaatagcatggtttcctcttctctgggctgttaggtgtcacttagaaccacagctgctaggctaggtgtggtggcatgtgcctttaatcctagtatttgggagacagaagcaggtgggtccctgagatcaagaccagccttgtctatgtagccagggtcaggccagtcagggctacatggtgagactttgaatctcaaaagaaaaacaaaaaaagcttcgcggccacctgcacaggccctgccccagccatctccccagctgagcatcagttacccctgcccagccatctccccagctgagcatcagttacccctgcccagccatctccccagctgagcatcagttgcaccccctgagcagcactgccggtttgtgtaaccctgtgagcagcactgcc

SEQ ID NO: 20836 - DNA, 1153 bp, Mus musculus
gtttctctctcatcactaataaacccagatgctctaacgccctgcacctgccatctagggcttctggagcagtgggggaagcctgactggtgaagatgctgcacgacagagccccaagggacacgcccaagcacagacactgcatgtgtgctgggggtggggcatagacagacacttcatgtgtgatgccaacagggtgggggtggggggcagctgagtgccagtgaggacatgtctactcactccagcctgttctctgcttctgtcccaatagaaagattctgccagaaatttggagtggctgaagacagtgaaggaaagccatggatctgtggagctctcatctctgtccctcgccacagcaatcaacagcaggggcgtctacgttattgaggcacccaaagatggccagaaggtgagcctcccaaagtcctggtgcagttttgtatggccctgtggtcttgctataaagttatgggactctgtgcaggaactaacttataaatgtgtgctgccccccagatttccccagacactgttctccgcctcctcctccctgatggccatggttaccccgaggcattgcgcacctactccacagaggaactgaaggaacttttaaataagctgatgctcatgtctggaaagaaagaccacaacagcaatacagaagtggagaagttttcagaggtgagcagataggtttgtgctgctgcccacaggggccactttggcgtcaagctaggccagtcacttttgttactgagctatggaaagggtctgtgtaggcttttggtcaacacagctctgccatgggtctgcaggatgtagtaccccgattcacaacgccagagacatatctgaagtagggtagaccctatgagcagcaggtcctcctcaggagcctcaggaggaactgtgaccagctgtggagaagagatggccaacagatattcttagaaacaatcacctcactgcctccatactcctgttgaggtaggagggtcttgaatttgaggccagtctggaaatacgagaccatgcctttacatacaaacacacacatacccatacagtctttacattgacatcctttgtctttccctggacatggtggcacacatctttagtctcagcatttgagaggcagagg

SEQ ID NO: 20837 - DNA, 1197 bp, Mus musculus
ttcccccaggtcttcagcaacatgcagcggcttgtacatgtcttcataaaactgcactgcgcgggcaacatgctgttcaggacttggactgctaaggtctactgttgccctgacgggggcatcttcatgaactttggcttggagctgctgagccagctgacagagaagggagatgtcatacagctcctgggagccctctgcaggcagatggaggacttcctagataactggaaaacagtggtcgcccagaagagagctgaacacttttacctcaacttctacacagctgagcagctggtctacctaagcagtgagctcaggaaacccagacctagtgaagctgccctcatgatgctatccttcattaaaggcaaatgcactgtccaggacctcgtacaagctaccagtgcctgtgaaagcaaggctgacagatactgcctgcgggaggttatgaaaaagttgccccagcagctgctttctgagcccagcctaatgggcaagcttcaggttattatgatgcaatccctcgtgtacatgagtgccttcctgccacactgtctggacctggatgccctgggtagatgccttgctcatctggccacgatgggtggcactcctgtggagcggccactccccaaaggcctgcaggctggccagcctaacctgatcttgtgtggccactcggaggtgttgccagctgcactggccatctacatgcaggcccccaggcagcccctgcccacctttgatgaggtgttgctctgcaccccagcgaccacaattgaggaagtggaactactcctgcggcgctgcctcacttcgggctcccaggggcacaaggtctacagcttgctgtttgcagaccagctgagctatgaagtgggctgccaggcagaggagttcttccagagcctgtgcacacgagcgcaccgtgaagactaccagttggtgatactctgtgatgctgcccgggagcactgctatatcccctccaccttcagccagtacaaagtgcccctggtgccccaggccccgctcccgaacatccaagcttacctgcagagccattatcaggtcccgaagcggctcctgtcagcagcaactgtattcagagacgggctgtgtgttggcatcgtgacctctgaaagagctggcgttggtaatgaaagaggtcccctctcccagatactgcccact

SEQ ID NO: 20838 - DNA, 1220 bp, Mus musculus
atatgttttcttcaatggtgaccacatgaccatgacattcataggttttcacttggagaccaataacaatggctatgttgatgccatcaatccctcaaatggtaaggtcatcaaaaaagacgtcatgaccaaagaactgtttgatgggctgaggcttcagagagtgcccttcaacattgactttgataacttgcccagatatgagaagcttgaaagactctgcctggcactaggtattgagtggcctattgatcctgatgaaacatatgaacttaccacagacaatatgcttaagatcctggccattgaaatgcggttccgatgtgggatccctgttatcatcatgggagagacaggctgtgggaaaaccaggctcatcaaatttcttagtgacctcaagcgtggtagtgtggaggcagaaacgatgaagttagtgaaggtccatggagggacaacaccatccatgatctactccaaggtcaaggaggctgagagaacagccttctccaataaggcccagcacaagctggataccatcttgttctttgatgaagccaacacaacagaagctgtaagctgtatcaaagagatcttgtgtgatcggacagtggatggtgagcacctacatgaggactctggcctgcatatcattgctgcctgcaacccatatcggaagcactcccaggagatgatcctccgcctggagtcagcaggtttgggatacagagtgagtgcagaggagactgcagacaggctgggctccatccctctgcggcagctggtctaccgtgttcatgctctgcctccaagcctcattcctttggtatgggactttgggcagctgaatgactctgcagaaaagctctacatccagcagatcgtacagagactggtggactccgtctctgtgaatcccagtgagacttgtgtgattgcagatgtgctctctgcctcgcagatgttcatgaggaagagggagaatgaatgtggtttcgtcagcctccgggacgtggagcgctgtgtcaaagttttccggtggtttcatgaccatagtgatatgctcttaaaggagctcgacaagtttctccatgaatccagtgacagcacacatacttttgagagagatcctgttctctggtccctggtgatggccattggggtatgctaccatgcctctttagaagagaaagcatcctaccgcactgccatcgccaggtgct

SEQ ID NO: 20839 - DNA, 1145 bp, Mus musculus
ctggaagacgggtgcattgaagatgaccctgccccatacaaaaaagttggctttgttggcatttccaactgggctctagatcctgccaagatgaaccgaggcatctttgtgtcccgcggcagtcccaacgagaaagagctcatagagagtgctgaggggatctgctcttcagacaggctggtgcaggataaaatccgtgggtattttgcaccctttgccaaggcctatgaaacagtgtgtcagaagcaggataaggagttctttgggcttcgtgactattacagcctcatcaagatggtctttgccaaggccaaagcttctaaaagggggctttccccacaagacatcacgcatgctgtcctcaggaacttcagtggtaaagacaacatccaggccctgagcatctttacagccagtctcccggaggccaggtacaaggaggaagtcagcaccgtggagctgatcaagcagaacatttaccctggcccgcaggcgtccagcaggggcctggacggcgctgagtcccgttacttgctcgtgctgaccaggaactatgtggcgctgcaaatcctacagcagacgttctttgagggtcagcaaccagagatcatttttggctccagctttccccaggaccaggaatacacccagatctgcaggaacattaaccgggtaaagatttgcatggagactgggaagatggtggtgctgctgaacctgcagaatctctatgagagcctgtatgatgctctcaaccagtactatgtctaccttgggggtcagaagtacgtggaccttggactaggcacccaccgagtcaagtgccgagtgcacactgccttccgcctcatcgtcatcgaggagaaggatgtggtgtacaagcagttccctgtgcccctcatcaaccgtctggagaagcactacctggacatgaacactgtgctgcagccgtggcagaagagcatcgtgcaggagctacagcagtgggcacacgagttcgcagatgtaaaagcagaccagttcattgccagacacaagtacagtcctgcagatgtcttcattggctaccattcagatgcctgtgcctctgtggtgctgcaggctgtagagaggcagggctgtagggatctgacggaggagctgta

SEQ ID NO: 20840 - DNA, 1154 bp, Mus musculus
tgagcacaatcatctcatggagctccaggaggaaggcgtctaggcctgcctcattcaggaatgtgcccaggagtctttggtgctgtgtgctgagctcctctttgtattgcacatcaatttcccgaaatagctcctgaaatgaaggatggacaagggtgggtagagagataaggcccgggaagagtgccgccacagcctcacagtggaagcagaggtgagactcactttgttcagtcgcagccgctgttctgacttatgtgcagataggaactgccagagagcaatgatgtgtctcagctgacatctactgaaggcctgaaagaaacagcgtcatccatgtgcatcacggaatccaaatgccacaccataggcacattcccccatttctgtcttgagctcattctagttcccttgtcatgacctatgcctgtctcttcatgacatcacacattgtacagttgcagtgctcacagatggtgggccctgcctagagatgacatcatagagcatatgtcagtctactgatccaagtatatggtgtacagggcagactgattgtgtgagcaatgttcttgattcttcctgctttggggagttcctacattaatgcatggtggaattaggaagtaagcaggagcttttgacaagggtcatgctgattcccatgcaacactttccaacaggactcccctccctcttttgagacatggtcttactcagaagcctagtatggcatggaacttactgtatagcccaggctggcctgggagttgcaatctccctgcctcttcctcctgagtaccggcaatactggtataccaccaggcttggcactagtgcttacctttaagacctgagctgtctgatcacacatccgtaggacttcttcgatgtacacattcaagtccatgccaggatccccaccagctgtgctcaggaaacccagagtgatttctatgatagacagggcttcacaggcatcactataggactgtagctgtccgctgatggtactgattgctaagttagggagtgagctctggagaataaaatggaaggctcgggttagggttgggcttgtttctcaccaactgagaagagattagctttgtcactgctgaagctagagctgggacaggctctccagaaggcac

SEQ ID NO: 20841 - DNA, 2031 bp, Mus musculus
tggctgacctaagattctcagcatgtctggtcttggcaagcatcttggcccctcttgaaccacaaagcatgaccactggcctggctatgatgttacaaaaactttctcttgttccttgatttcacagcctcaaggatactctagtaagttacatggagactaaagacagtgacatcctttcagaagtggagtcccagttccctgaagaaatactcatgtccagctgcatctcagtgtggaaaatagctgctacacgaaaatgggaccgacaatcaaggtagagcagctcagccttcaaacccagctggaaaggaaggtcttcctcacctccctccacagctcccagtatgggctgtggcttttgtgtgaaggaaagtgtgggcacagactggattcaaggcctacactcaccctacaatgtgatagctttttcaaagccaagctgtttctggatcatgtgcctattccaaaatttccttaagtctgatgaatgattgtcagtcaactgcctcatgaacattccagaaggaacaagagaactgcactaaggtcacacccaataccgatccttcttaagactgactgcctcttacctcaaataccatggccaccactttactgcatagagagaaaaaactcagggtagtcaattttttaaatttttttacttatgtatagaaggacctcaatttattctttctcccagtcccttaatttctaagtagtatactcatatctcttggtttgcaagatgcatgaaaattgccacactaacccaaggaaatccaaggtgctgataaaagctgtaaagcctcatgaacaacccaccatgtaaacccaccatgagccactgccaaccactcactgagatcaccggacagagagtggagaaggatgagcgcactggtgagctggaactagagtgcgctgtggagtacttgcctaccatagcaaagccctgggttctctccccagcactgcaagtgggaatagggacagacaaacaaagcactttccagttctcatgtcttgagatttcaagtaaagatgtgttagtgtaagctcagatccgaggtatttgggtgctgggaacatggcagagcccttgcctagcatctgtggtgccctaaagtccaattcctagcactgttagaaagaaaggtattaggatcacagtggtgagcttttattctaaactatgagagtacctgtcctccgatgtctgcatcccaggtttttgggggtacagggcttaatgaacttgccaacttggccttggagctcctgtgatccatcagagggcagctcagccccacacgtcttgctgtaaggccccttctggctttgaactaggcattattttttttttctgtcatgaagaatttttaattatgatgctttattttgtatgctctgcttttaaagtcataactgtctgtgtagtattacccactgtgatgtacaaaatgcatggatctaacattggcaaagtagactgcatcatgtttaccatacctattttaataaacttgaatttcacagctaagagtcctgtttgggctgggcagatggctcggtgactaagggcacttgctgctgagcctgacaccttgagttcagtccttgggacccacacggtagaaggaaagaactggttttccaagttctccaagcatttgcatgtccatgcacaagtacacgtgcgcacacagtttctttggaaatggtttagttttctgtgacagtgtttctgctgtagtatccagtagggttcagaacaaagcctactctctagattagcacatggggtgatgcggactcttgtttatgatagagacaacactgcttagagtcttctgccagaaggagcctccctgaaaatatctaccagcaaatgaagatgagctgagttcagtgaactgggctgtgggtaaggaaggccccttaggaataggaaacaaaggcagggaagtgaagcctaaaccattgtgagacttgctatttgttagctgaaatagccatgagcttctt

SEQ ID NO: 20842 - DNA, 1130 bp, Mus musculus
tctttaaccctcgaggcccttgccgtgatctttggtcagtagagtccatgcttgttcctgtgacttagaggcctcttggactctgtcgtcacctcctccactgccttcagcacttcctacacgctatttgtcagaactttaaatccttcagtggttctgctggcctgtgttggcaggcacacctctcctagagtggtcgtcacctgtctggcttctactttctgtagcgcccaggttagacattacttgctctactgagcctcctttatcccacaagaccagcgctgtctctcagcgtcctttccagtctctgtggtggggcagagcaaacggcctccagctgggtcacttgtacgtgagtgtttctcacagctgtgaaaactggaaggtccacgatcagatactaggacgagattgtgaggttctgagactttcggatacagacaagcccttctctgggttctactggttctactgttgtggggtagtcaccagagacgactgctcagacctgggcttaagccagtagggaatattagctgggtggccgtttgagatcccattgtagcactgagcctttctcagcgtgagctttcaagcacaaagccattttctgggttgatatacttcatttaacaagagcagtcagaagtggagctacagaagttaaaaggcgaggttagttcatcttgaaactttgctaaaacgctatggacgttgttgatggattaggccattgtcttagtgctgtttatatgctgagttgtgcagccgaaatggtgttgtcttcatggattcagctgtgctaaggtctgggggccagttacacttcctgtgtcctcacaaatgctacccacttcttagtacaatcatcttgtatgttaaaatgtcagtatatgggggctggtgagatggctcagcgggtaagagcacctgactgctcttcctgaaggtcctgagttcaaatcccagcaaccacatggtgactcacaaccatctgtaatgagatctgactccttctgaagtgtctgaagacagctacagtgtatttacatacaataaataaataaatctttttttaaaatgtcagtatatgaattggaagaccgtagcaaccctgaccctctcct

SEQ ID NO: 20843 - DNA, 1512 bp, Mus musculus
gacatctagctcttgccctgccccttactggagtctgtgccaagccctcctctccgtcactgtgttcacacttggcactttgctggccctgagaaaggtaacgacagccgcaaatctaatccgcatatttcccatcgactccgtaatctgattgatgttccctcttgcactgaataatacatgcctctctcaggtaagccattttataaaataagagataaaacgcactgtcgagacagtgtttgcttctgccgatggtgtccgacagcaccctgggcattagggtggtagagctgccacggaggctcccaggccctaggggctgagagctcacttgaattgtaagccttcttgcttttgataacacagtattatttctcttactgtagaagaaaaagtttattaccaaacaagagtatttttatgaaagaataggacaaacctataaattatctcaacctatatctcccttgaaaatactttcaggctccgccaaaacctaggactgaaagcaagtattttggaagaaagagatacatttttgtatgctttcttttccttttgtagacgcccgacttattttctaagactgcaaagatcactttgtcaccagccctgggacctgaggccaaggggttgtcttgtgggcagtgagggggaaggacaggctggcctgaggttcacagtcattccagtgagctctgatgaggggccaccagatcttgagggtgtgtaagggaccaggaggttaaaaagaaaggcccctgatggtgggctctttgtgttggagctgaaaggttatatggaaggagataagaatttggataccagttctgagcttgatagaaggaattagggtcactctggctaacataggggtacagcatccttagtaacccgagcgtggctcgaagtggtcatgatttcatccaaaacacaatgtgtaaacttactcagctaacaatgggaaatgtattgcttctgtgcgcagtggacttacgtgcaatttgttcaaaagggaacaagtcattgaggagaaacaaaagcccaatacttagagtcccaattttgtcttatttgccaaaaaaaaagcaaccccccaagagttgatattgttacaatgtacatactgtaaaatatgaaagaatcgatgtatcttactttttcattatttgctaaccaaagctgtacatttttcatacaatccgcagccttttgagtatcaaaggggtaaaccacacccatcagccattctggaagtgcactatttatactggtatccttgctttttttttcccattttcttgctgagatgacatgaattgttaagtttatttttacacagtaaagagtgaagaaagactgtggtctcattggattctttctcatgtgtgtgtgtgtgtgtgtgtgtgtgtgtgtgtgtgtgtgtgtgtgtttgcaagaacatattcaggcaaatgtgtatgcatttgaaggccagcgttcaacactggtatctccttcagtttctct

SEQ ID NO: 20844 - DNA, 2316 bp, Mus musculus
ctgagcccccagccccagcgcctgcccaccctgcttgtgcggtgacccatcgtctctcttctcccctccccccaggaatgactcaaggccatggcccctgcacacgcacacgcacacagcctggttgtcctccttgtgcacttgaagcagtcccggctcttctctggcccccaaggacacccccttctctctaggggccccactatatcctgggcatacctagctaaagcaggcagcatcagctttgacaatgcagaatttcgtgagaaagagagagagagagagacagagagagagagacagagagagagagcgcgagtgtgtgtgtagggaggctttcttctagaatgagttagtttgttcccttctttctgtgtgattgttgtaagtttcctgatgggtcggctgcctgtgtgcctcagggctggtgcggcttcctggaccacccatttgtccttgtttgcagacctctttgggagtgatgtaggtctctgttgacataagtcaacaatggtttgtcaaggttgggggggtgctttccacaggaatatttgggggggatgataagtggagtctctgaaattcaaaggctggttgtccagggatggcaccacctaccaatcagccccttcccacgtccccatcaggctgtctgctgtctacatctgagggtggcatgggctgagcccctcagcagctctaccccaggactgctcctcacctcacccttggccttcctgcctccttgtatcttatcaagggacctgttattccctttcagcttccaaagctacttcagcccagtggttctgagaggagagtgcccttccagagtcccaggacacagggccttggcacccacccttcttcctccctctggcaatgagagaccagaggcttcaagtgggggtctcacgtgctcggtctcagcgctagagaataccgagacctgatccacagtccgtgggaatggtctcccacggcatttttcacagccatactccctccccccagcgcacccaggcccgggtgagctagctcagacccctcaggggccaggggctcagaaacctctcatgtggagcctgctggccggggtgggtcctgccatccactcctgcatttcatggggcacaagcccagcagcagccccaacctgccaccggcctgagacactgagcccgtggcttttccttattgaaagtaggcatgagtacccccttctgggccttctgaggagggggacgaaatgcgtgtgtgcacatgtgtctgttgaatgctgaggaggctgtgtccaggcagggtggacccctgcattgttcccccccgtgttgtgggcacacacccagtgacacctggactatgtctccagtagcctgactagcaggaggctggcaagtctttctagaaacctacgcactgcctggctcgtctgcagctgcagacacttaattcctcaacaggagcaggttttccacctgctgttccttccaggggcacctgtctccttccacacaggtccatgttgtgtctgaaactagtgcatccgtgtctgtctgtgtgctgtctgtgtcactgttcttgtgggtgtctgcacagttccctggtcactgctctgtggtgcatcctctctgagggtgcggatcaggctgtgctccacccgttgtccagcagtggctttttcttagataattgtgcttcctcagcgcccgccgggttgtggcatccttggatctgcggggatcttctgtgtttgcatgttcctcagggtggtgtgtcccttgctcccttggtctgacgcgtgttcccttgcctgcatggacttctctggttctgtgtttgtgtgctgaatgccacccagtgttctgtgatcacccatgtagctactgaaaaatggctgggtaagcaagccaggggtgttggggaggtcaggagagagatcaacatgcctctcccctccccctccccagacatagcaagaagcatttctaacatctaggttgagaacaagcctgaatggtacccatggttgggagagagaacttgaacttcaaatcgactttccagaccagatcgagccccacccttacttttagccttctgggagccaccaccaggcgaggcccagagccggctatgcccggtgtactcctgccaacccctgccaccagccccagcccctgccaatgcggaccccagaccacttgcacccagacgggtggggtgggagctgtccgttcaggaccacaagccatcctctgccctggcttagagggcagagcacaccccaatgcttctgcctctgtcacttcatct

SEQ ID NO: 20845 - DNA, 1144 bp, Mus musculus
cccaccccccaccccaagtcaggctcagaccctctcacttcatgtcctgctacatgtcactcactgggagctgccattctttccaagggagtgtccttttaaaacatgggaaggagttaagatatttcaaagaggttggtgattatgtagctgagaaatgttcaaccttttttacaaccatgttcttcctcaggctgttggtagtgaagtgaattcagtcaggaaggttgcaatgacgttctacctgagcttcttagattagcctttactctgttaataattttagtgccaaagattaggactgtgggagtatgcccaacagtgttgtgtggagtcaccggacacatctgtgattgactgctctgtctgtattttagagctggaacttgaaaatcatctcttgacagccatttggaaaagcagggctggtcaccatgtgtgagcatggcctccttactcctggctctttcctgattgatcttagctccatcatctgggggatttccttggaatcatacatttttaactacaggggtaactgtcatgtatgaaactcatttctactgttaggcaggctgtttctggatttttcaataatttaaataattttatgtggctgtcatatagttcactgagagcatttgcctagcttgccaaagccctgggcactgaaaaagaaaaaaaaaatcagcaacttggggctggagagagagctccacagttaacggcactggctgcttttccagagaacctggatttggtttctatccaccacatggccacttagaatcatctgtatgtaaccagttccaggggatccagtgtccttgtcagtccgttgtcatttctgtgggcaagaatttggaagtgtgctgatcaagttcattgatgacaagaaatgggaaagtacaggaacggagtgggcgtgcacaccatgattagcatgattcagagtgtgaagtggcaggaagtagtgaagtgtaatgtgtgctctagtcgaagtcctgcctgtagagcactagttctcaccctgcctaatgccggggccctgtaatacagcgtctcttgtggtgacccctaaccacagagtgatttttgttgctacttcataattgtaatttgctactgttatgaacgtagtgtt

SEQ ID NO: 20846 - DNA, 1095 bp, Mus musculus
cgcgggttcctctcaggctcaccccatctgattagaaggcatttttccctctgaggcccatttccagctcccattccttcttgctgccattcatcaccccctgcccttctgcagtatttatggccaccgtggggagcagagaagccttccctcagctcttccctggctaattaggggcttgaggagagagctaacgaggctccctccctgccaaaatgtgcttcgcctttcttttcaggaaagggagagattgctgggaagattaattggcactgagcaccaggcatccccacagttgccttccaggctgtgcccaggcccaggctcacaggctctgctccacctgcctggtaggccaggctcagggcagactctcacgcagatcgcagatcagggcatgattgacgccctgtgaaccctgcactacccttggcccagttcctctggcctgtgagagccttgcaggtggagaccagtttctcagcctgagagagaagaggatatctccacagaacaccctgcagccagctcgaggctcctcactgctctctctttgggcttaggacatccccacgggtgctgacagctgtgtgacaagtctgtcttgtgattcgcaccgttcgctcattgtggctggcctgggtgatggctcgatccgtgtctacgacaggaggatggcactcagtgaatggtaactgtcacatctcccctctccttagcactattcaagctccttccagatggcagaggccaccccactgccagtaataagtccagattgctcagtgagcatgaagtgtcttcggcagtgcacagtggacctctgataccagacaagaagatggcacccagggctagagagaaggctcagtggggtcaaccttcacctttcactgtctggctgcttcaagttgaccccacagacagaaacagtgacctcactaaactgctgactaaggcaggaccaggtcttcctcatctcaaaatggcacccaggcttcaagaccctaactgggtaaacagaggagagagaaatgagggggtggcctaggacagcctcgctagcccctcctccttctgggtgtcctcttgagg

SEQ ID NO: 20847 - DNA, 2939 bp, Mus musculus
tgtctataactgtagtcactctacagagtgttgtgtcggttagggttttgcagagtgggctccagaggcgcctgtgtgtatcactgttgaagtgcacagcatcagattcccagaaccatcccaggggagcaatcctaaaacgaagctgcagggaattgtgggtagtatgcaaatcacctgtaatggaatttgaatgatacattattcctgctagactctggcagttaacgaccctcattgctgtgcctgtgcagtcagaggtgttactgtggtatgtcctcacccccactagagctcagcacagagtacaagcagcctgcacccttcctctaccccagcggtgccgcctgccgcatcacaggccctgctcacgtgctctctgtctctccacacagcctcatctggccgtaggaagcaatgactactacatttccgtgtattcggtggagaagcgtgtcagatagcggcacctaggaccactgccaggccgcagccacctctgctgtacatagtgagccagcctgcactgctcggatgcagtgcccacctacccacccacctgcaaaccccggctcctgacttggccgtggccagctgaggaggggcttgcacatccttccttctgtcttcactataacagcgtacaggtccagagcaggggaggggttggcctggcttcccatcaagaaccagcacccaggcaccaaggacctcctcagtgcagcatggtcctttcctgccctgttttcttctgaggttttacaaagggacacatttgatttttccatgtgatcaaagcattagttacagagcagacagcgccctgtagaatagccgtgctggggctcctaagggccatggcccagccccactgtcctctcagagtgtgctgccagtcctgggaaatggataagagcaattgggggaagagagagggtagaagagagggaaggcctctcctgctacaaggtatggaagtctgagcctggccctcctggagcaccgaggcagtccagcacattgtgtatgtcatggtgctatgaggaaagctagacctctgaggtccagcctggcgggcgccctcaagtgagctagctgcaggagagggtctggttcagggcagatgaggcagatctgtagttagcggctgcctccatctatcaggcatattctgaagtgcttctctcccatagggcagtaacagtggccacaggcctgtctcctgcttgtgccacacacaggtacacacgcatgcaggcacgcagcctccccatccataattacatggatgccctggtcttcctgcccatgtacacttaggtgtgcattcatgcaggcccatagtttcccctcctgcacatatatgggcactgtggccggccacatgcacgcacatgctggcctcaccatgcatagggctcagacacttcactgaactcagaggctggagggcagcatcagctctgttgatggtggaactgaggttacatgatgcagtatgtgctgagcacgagttccacagtgtcctggtgtgcctgacacgtgtctgcgtgcacaggcaagagaggaccatggacactgtagccctagatgtcagcactgtccccgtgtgtccgacatgtgtctgtgtgcacaggcaagtgaggaccttaggcactgcagccctggatggacccagcattgcagagcagttgcacacaaacaggacacaacacaatgatgttttgaaaagcattttccgttttccctgggaatcaggatctttcagaggacaagtgccaacaggagcccagggacacgggttgggacatctgtggcagaggctgggtccctgtgctgtgttcagtggacctgttttagccaagagcatcttccctgtgagaggatcctacaggctgagctgtcctgggcaagcagaacaggagaccctggcacggcccctggaaatgcattctcccaaccgggtggggctcaaggaagccagccccttggttgggccatagagcagtgtggcgacaggaaggccctagagccacctgacttacccctgctcagttctgcagagagcttcaggggctgagtgtgcgtcagctcagtccttgtccaactggtgactcagttttggccgcacagggccgcctgatgggctgggctgcttccctgccctggtggaaccagtgtttgcatcttgcccacaggctgggcctcacaagtctgatgcggaaattcaatcatgaagctaagcaaagctcgagagagcgctgacctagagcgcatttctctatttattttaccaaaatgagagttgaaaggactgacaggacacggaactgcagtggcgtccagagcagtgacagcaacagagtgttaataaagaataaagccgtgagatgtcgctgcccttgccagatgagaatggtggggtggggtggcccaaagggctgtgcccttgtggcttctgcagtccccgggtccctggggtgagacagtcttggccagagacaaggctactctatctacccctccaggcctgggtggaagtgaagacatgctggttgccatggagatcttgaggcatcgtgactgggattcctgtgctgaccctgggcttgtcattagtaaggtttccccacatctacacagaccagcttcacgcggctgtccgtttccctgttagtattgttgcttctcagcaaaaccaagtgctcctgcaagggatgggcggaggtgtgcagccagtcctggagagacaggtcccagctttgtggtcctgtgaggggcagacagcaaactatctctgggtgtgtgtcagggctccctcagccagtctcatactggtcactgtaccaggctgggcctccactacccactgcgaatgtctccatccccatcccgggtctcctcagcagaccttacttggccagaggaattgggcctct

SEQ ID NO: 20848 - DNA, 1149 bp, Mus musculus
tgcagctgcagggcccaggaaatgggagcgagtttgcgccagatcagggccgagtctagctggatctggatcgggggatgttccagtacctggctgtgaccagtgggatgggaggaaggtgtggcacagcgtgacctttgagcagggttcactggtgccgagtgccagggagtgcctgcctgcccacagagctcaggaagcagcactgggtggtgagtgggccggcctttagctgccttctgggtatctgagtagggtctggggtgcattgtatcaggccggcatctgtattgtactgactatagacagaggaagtctagacaccacgcaggaaggatttccagttttgacctggtttactctcaattgtcggggttgttcagggcctgggaaggtctgggcagtggaagactggtctggctcaacgccaagggcaggcccacttccctggctttgctgaaggagagacaggatgagggtgtggccttgctgtgggctgtcctctcccttgctgagcagctctgaaccttcatcaggtgatgtccatagaggaggtggagaggatcctggacgagacccaggaggcagtggagtaccagcgggtatgtgttgctgggcacaggctcacccatttgtgatcaccaagttggcatttgtgtggcgatccactgcttcccgggggaacccagaggcccagttggaaatacccttcacagtccattcatgttcccgggggcacccagagcccccccagacacgcccctcgatacctctccttccacagcaaattgatgagctgctggccggaaacttcacccaggaggatgaggacgccatcctggaagagctgaatgcaatcactcaggtacagtccccagggctgtcttgtcccctgggggatgggaccctatgggcctctgcttggtggtgtgtcccactgttgtgtctgagcccagagtcctggtttcccgattcccttcctacggtgattcctttgtacggaagccaagcagcttccacactccgtgcggcgctgagggatctgtgcaggagtggtttggagtctgacccggcagtttgctgctggccggcactcgtgacccatgtgtggactgagaggaaatgctgagcctggcctgcccagtcagc

SEQ ID NO: 20849 - DNA, 1194 bp, Mus musculus
tgggagaaggcttgtccgtcattaaggccctgaagggcttagatcccctggaactcacagccttggagagcgctgcccctacaccatcacagtcatggctcagaagcctccacacaccctagtcagtggattaagtggacactcaaactcagggtagctccacagttccctctgttccttggtggcttctgggagctccaggctgtgcccctggcctgtaggtccatctcacttcctgcctctatataactcacattccctgctgtgcatgccctaccccagcccctggcctcgtcctctgaaagctctgtgctcaccatgacccattgtttttttccgcagaagcccctgccaaggccagatccaggcaggcagagctggtggcggcttcataacctggtctctccaggcactcatagggattctctgaggactggcccacagagcctttggctgcgagtcaaccctgagggctcccgggaggcctggagggctggactggccagtgcaggtgctgatggctggagcagcagcttacatggaagctgacatcagggcgccttgaagtttagtctggatgcacctttgtctctttctccttctggactaagtggatccccggccagccaggcccagctttaggcagctgtggaccccatgctggccgcagcccactactcctggtgctgttctcatgctgccccagcccatgtgagctgcgctcagacctcggggtccctgtgctcccctctcgtgtctctgctgctcacatgagctggtgggggcttcagctgagcagttctcgccttgcctggcatcctgacacccctcagttaccctgcaggctagtggcagaaaccctagtgttctccaaatctgttggagcatctttgcacctcagatcaccttgagcctcttctgttgggggaggtgggccaggggccatcccacagaatggacaaatctaggagcccggcttggggtctgttcgcagaagaaaaacatgttgaaggtggtaacaagaccctgttttaatgggcatgtaccccatggagtcctggacacactaagccaccaacgcccaggaggcacggaactctgaactgacctccagagccctatgcttgtttcatcacggacaatctctggtcctcgggtctttgaggaacaaagggtcttatgtacccttagggc

SEQ ID NO: 20850 - DNA, 1167 bp, Mus musculus
tcctgcccaggcagcgacaaggttggtgactgactgggaatgaatggggaccaccggcaccctacagcatcctggagaagcaggtggacaagaggcctgtatctagccctagacgcattgggctgtgtaccttctctgtgctgccctgatgacagaatgtgtcccgagtggatgctggggtttgctgctagcccctggagatacctgtagcctgggggggtctatgggtgtctgtaagcatatgtgtacacactcaagaagggccccctgactcttaggtgactctccactcctgggaagagcctccctccccaatatgtctgttggtggtaaactggcctcaggccaggccaggaccaggcagtccaagggcctgtatgcccttgttggctaggtcctgccatgtgttcaaagggcacttggccaggtttcaggatggctttaagcctgcaggtcccttttgggttcccccacctttcttacctgggtctaggtttgctcagagcaaggttggacctctgggctctaagcccttatctcagagtccgtagctatttccccttcactgcctctgtggacgcccttccccacagggtcggtctggattgttctggcccaggtcctgcccagtagtaggggcttccaggctgcggctggctgcctcagagatgccctctgcagggtagtgtgggcagctctctgttgcagggcagtgcctgccccacaccctggtggctagaggagagtagggggtaccctacagccactgggggctcctgcctgcaggcagggctgggagaaaacagggctggggtgggcagtacagggaatatttttgtaacttgctggagtgaatgaaaatggggcgattctaagttattgttgccaaagacatgtaaagtatattgttgctttgggggtgggggcaatgttttctgttttgtttttgtttctgtttttagtttgaggcttaggatggacgctggtgcaatgattttcttgttccttgttttttaagagaaaccaagctaagaaaaaaacagcctgtgtgctcagtgttttcttttggggtctgtagctaacaccctgcggtatggtagatggggaactcagctcttttgcccccatatgccaggtgaggtccctccaaccctctcctgtccctta

SEQ ID NO: 20851 - DNA, 1311 bp, Mus musculus
tttctgggcccagctgtacagcgtcccctctggtcctcatataaaaggccccaggaccttatggtctcctgtcctcgtgttcaccaaggagccatcctttggtgtcctctggctgtcccttcgccctctggccccttcctttcaactaggaaactggtacagcggcctttgagccaggtgagccctggatgggcctcccagtgctcagaacagtcactgaagaagggatctgggcccttagtgctgaccagccaacatggaggtgtggaaaatacagtcaactggtgcctcagaagatgtccgcacacccattgcttcttgggaattgactctgagactggcttctctcttcctcccagcaagacccacacagaccttcttagcggtctgtccatagctggagaccaccttgtacatctgcagggcaggacgtccccagggctgtcgaccacagcccctccgccccatgctgctctgtccctaggaggctgaacactgactacaactcccacccccaactcccaggctacctcagtcccagttggacctgtcccattgctaggtgctggcaatgattgtatggacttgaattcctatggtgacagctggccagtagcaaggctgccgggctgaccttgggtaccctgggcaagccctgtgggcctgaccctcagaaatgagcacttgagagggttggaaacaccaacttggctcacagttaggttctgatctctggtccttcctctgggaggtcaaagtagctgggagccacagccttgaggataggggggctgggcgggtacctttggttctcagagtttcctcagacaagtgccctgtggccgtttccagtgtcagtcactgtagggcccagcgctggatgccagcttgccacagttttctgtaggacacgggagagagtcgtcccatctcagaagaacctgtggagatgcaatgtgcactttctcaataaacacatgtttacactgcttgtgccacttgggctggttgattttgtgctaagattttatttatatgatacattgtctccgtcttcagccacaccagaggagagcatcagatcccattacagatggttgtgagccaccacgtggtcgctgggacctgaactcaggagagcagtcagtgctcttaaccatttagccatctctccagcccctattattattattattattactattattatcatcatcaataccttaagggcttgttttcccgagtagagcaggtgcttcccctcgagtgtttggtggaccctctcagcggtgctgccttgccctccccgtc

SEQ ID NO: 20852 - DNA, 2255 bp, Mus musculus
aggctcagagcctggagtgtgaaggaggaggtttcagtcttgatcatcctttttctatttacttttactacatgtgtgcttatgtgtgtctgtattgtggcggctagaagaggatgtcaagtcccctagatctctagttacagactgttgtgagctgcctggataggtgctgggaaagtagctctggtcttctccaagaacagcaggcattcacacatgttgagtcatctcccagctcttagtgagtcttaactgcttgaaagtttctttttagtcagtgcattagcaacttgtgtccatttctttggctaaaccaatgctcaccttccttcacagcagacgtgcagccagagcctggggtggctgtactccgaggacaggaggaggaggctgagcacgctggggagacactgggagatgacccttcacagcctttgcaacccgtgcttggagctcctaggggtcgccccgctccatcccaagacatgggccagcacctcccaggggaagtcaaggtgctgccaggcagagaccttgctgaccttcctgctggtggctctgaaacagagccccagggggccccgattgatctgagagaagacccgaaagctgccatcaaggcggctggagctgggaaggagctggtcccaggggacttggaagcagtgcacaaggcagcccctcctgaggtacccaagagtccagagaagcaggttgccaaggcagttgccgggcagcgccaagatgtctttggtgaaggctccgaagaaaggaaagaaactggaaaggaagcaatggcccctggtgctgatactcagaaagaggctgtccagcccttggtaggagcagaagctaaggacacaaaatccaggcagtcgggacccaccaaggccccagttcagacccaagccaagtttcacccagaaccccaggccatctttgacacaggtcagggttctcacccagaggtgagaagtgaggccccccgagcggttcacatacctcctgaggagcagcacaaaggaaaagggggtgccgccatccaggaggcaaagcagagaccagatcctaactctgggcccaaactagctgtgcctgcgggtcagaagccagagaatgccaaacccaaccgagacctaaaagtgcaggctggctctgacctgcggaggagacggcgggatctggcctctcatccagagcaggagctggctccaaaggatggcgtcatcattagctttaactccctccctaatgttcaggtgaacgacctccgcagtgctctggacacccagctccgccaggctgcaggggctgcgttgcaagtggtacacagccgacagattaaacagttgtctggagatctggaggaagcctgagggcctggtcagggaaaggctgccactagacattggacggcagctggtgttctctggtgccaccctgattggaggccacgttcttatgttcccagggactggtatctaagtccctcatgatgagttgtgaaagtctaacctgccaccccaccccagacatcacttgctccaaggctacaccaaagcactcactagcccgattatggtttgggttttgaggcagcccaggaaagacagtgctaaggttcagctccgacgcttgtctgttcagactcacggtctggccagaagcagtgctgacagcatggcaggcaactttgaagttgccagtcttcctctaacttgcaacctgtgacagccagatttcactgactccataaggtgggaaacctacaacaggcatgtctgtctgccctggggtggccggggggtggggggtatgacttgacttgggctggggaaagaggcacacagctcccctggtttttatcacccacattcttctgaaggctgattatgaaacaaaaaaataaaacgccactgacaagtctcgagtcgagttggtttacctgcaggaaaacacattcagggtcctggacgacaccagacaggctggaggtcacggggacacgtgccccggccgagtgcagctgggagaccaacaggctcccatgctgatccctgttgtagggaggaggttgcacggtgagtacaggcttgccaccagcaagccctgggatgtctcatttgctgttctgtatctgtgtggcctcagacccagtcgagctgccctttgtcagccagtactgctgccagggcatgcccctgttgtctttgagcagagaacaaggttatgttttgtcactcttttgtccagta

SEQ ID NO: 20853 - DNA, 1197 bp, Mus musculus
actgctgtgattgcactgcactctcacgtggtacacgtgactgctgtgactgcactgcactctcacgtggtacacgtgactgctgtgactgcactgcactctcacgtggcacacgtgactgctgtgactgcactgcactctcacgtggcacacgtgactgtgctgtgactgcactgcactctcacgtggtacacgtgactgtgctatgactgcactgcactctcacgtggtacatgtgactgtgctgtgactgcactgtactctcacgtggtacatgtgactatcgagtgcagccaaagccccatgcttggcctcgtgagcctttggtaagcctggccgagtccctgtgaatgctcaagaagacagttatccatttaaaaagcctagttaggctctttatctctgtgcctgatggtgccctagatggtcttggggacagtttggactttgtagagttctggctcctcctcggaacacttttgtgctgttgcttccttttctcctcttgcccacccaccttgtgcaccctgggacaggacagctcaagccattccccaggcctcctgcttctgcagcatgtgggacagcaccggttagttagtgggaagtagaagttagggggctatgccacgtggccatggggtgccgtgggtgccaggtacaggtgaccttgggtccctgtcaggcacatgactgtatcccagagtcttcgaatagacctttcctctgtcttcttgtcatcgctcttctctgggaccttccatggtttctgctgccacctgccttggccacttgtggaggttgcagaggtcccagagccttagatagtgtcaagattcatccaggatagaccctgctgctatatgttcctccctccttggctgacctcctgtcacctctcttctgtgcctcatgaggttttaaaagcactttacatcatgtgctcctttgtcctactattttcacgttcagtttttctgccaaactatctaggagatgcagtgggctcgtttcacagccttccctggggtggtggtcttcatgggacctgctggatcagaagggttccccttgggtagctgctgacctatgtcagacctgtgtgtgctgtggctgaggtgctgctcaaggggcgaggtgctagctttcccttgcacctgcttcatgtgtaggaagaaccaagagtgaagggctcag

SEQ ID NO: 20854 - DNA, 1231 bp, Mus musculus
tggaccgtcttgtatttttttctggttttgtagaaagagtcttactttgtattcctaattggcctggaacttcctatatagatgaggctggtctcaaacttggagtgctcctcctgctcccccgccccccgcccccaagtgtgaggcatacaggtgagcaccaccacacccagctgtgttgacactgtccagtctgaagagcttaggcaccttggccaggactggtccccgatgctttaactctctccacgccattgttaattctctacagaaagtattcccactaaaaagaatggtgctgaggtagctgcagccagctacacttgtgtgtggtgcatggggtacccatgtgagaagacacctagtccacaaacattatgaccatttttcatagttccctcccgctccctctgagaaagggtttctctgtgtagccctggctgtcctggaacttgccttgcagaacactctggcctcaattcagagatctgcctgcctctgcatctcaagtgctgggatcaaagatgtgtgccatcaccacctggctcttattaatatatttaagtgctgtagttatttattatctctgtctatctgtctgtctgtctgtctgtcatgtctatctgagacaggatctcactgagtcactaaagctggcctgaagctcacatgtagtttaggccttgaactcctcctgatcctcctgctttctcctcccaagagcagggattattacaccacacccgcttctctgtgttgtctttaagtaaaattatagagatcagtaagctgcctagttggtagagagcttgccttgcatccatgacccagaggtctgatccctagaaccatggaggggagaaatcctgtctgaaatgagaatggaagcatgctaaggttgtgccttagctcccaccctttgctatggtaacagtcttctgagtggtcattggagcatcgtctagtcctggtcttcttctgtcctcttaaccccacagttatttgactatttgggtttttttttttttttccccagttttgttttttcgaggcagggtcttactgtgtagcccaggtttgcctggaactgtctccatcctcctgtttatgcctcctgaaagctgagatcacagtcctgagcccctacaccagctcctgattgagcttgaaaccagattaagagtggctcctctgagctgggtggggtggcgcataccttaaatcccagcac

SEQ ID NO: 20855 - DNA, 1141 bp, Mus musculus
agaagggaggctctaaattgaaatgccactttttttttttttttggagagtaaaattttaatgagttggaaaaatttgtcagaaaattacacttttaggcttcttaatcaagggattgtgaacacagaagaaaacagtttttagaagcagttgattattcttttaacttatctaatatttctgtacctgaaagagtttcggaagctcctgaggaagggaactaggatagcacatagagactagttaagtgtgatttggtatttacccaagagagactagttgagtatggttcagcatttaccccaagagcagtggaggtcccccagacacccacggtcacagttgcctccagcccagccagtttatggcagttccatgtcagcaaagcccaggaactggatgtggtcctgggtgtcagactcggggtacctgagtcttgagtctgcaaaggtgctcagctttgatcacaaagcagcaccttcttaaatctgacttcagagccctgggtgtctttcttcacagcatgattgggctgatgctgggatcctgcattaccttctatgtcgtgatcggtgacttggggtccaacttctttgctccgctgcttggattacaggtaagacactgttagatatctggtctgttttaatccttgtggttgctgcctgatgcctcctttccttaagccacctgggacctgtgcctgccagccactcaagttccctggcttggatttcagaactttgctcgagtagtgtctgagaggcaccaggagagggagagagagagagagagcaggctgtgatacagcctgatggtgtacaaggtggaggcagggaggaggaggggtaggacacagcaaatcattgtgcaggtcagatgcctcagccttccagcggtgctcatcaaaaggcaaaagaggccaggccctcgtgcagcttctgtgctgggctgttgatcggtacattgaggctgggagttggggcccaccctgctgaggaagactcgagggcactgctcccagggcctgtgacatagctctgtgcatcctccaagcttgccactccctgactgtgaaggtcccacctgtgaactggaccccacacaaccttcctcccctactggggagcagagctgtaac

SEQ ID NO: 20856 - DNA, 1335 bp, Mus musculus
ccaccatgtacccaggcattgctgacaggatgcagaaggagatcacagccctagcacctagcacgatgaagattaaggtgagtggctaccacccggcctgagctggccttaggacctgtggctgggaagtgggacccacaggaagggcatgagtgctcattcagtgtttttcctccacagatcattgctccccctgagcgcaagtactcagtctggatcggtggctccattctggcctcactgtccaccttccagcagatgtggatcagcaagcaggagtatgatgagtcaggcccctccatcgtccaccgcaaatgcttctagatggactgagcaggtgccaggcatctgctgcatgagctgatattgaagtatcaatttgccctggcaaatgtacacacctcatgctagcctcatgaaactggaataagcctttgaaaagaaatttgtccttgaagcttgtatctgatatcagcactggatcgtagaacttgttgctgatttttgaccttgtattcaagttaactgctcccttggtatatgtttaataccctgtgcatatcttgatttagtccttagttcatgtggctcggtcacttgggggctggggagagcacgctgtagatgagaaagccccagcctggtggatctctgtgagcaccactgagtgatctgtgcagggtattaaccaacagcagacttccaggatttcctgaggctggcaagggttcctgaaccagttaccactccttcttgccagtctaacagggtgggaaagtccgagccttaggacccagtttcagttctggtttcttccctcctgaccaccatcggttgttagttgccttgagttgggaacgtttgcatcgacacctgtaaatgtattcattctttaatttatgtaaggttttttgtactcaattctttaagaaatgacaaattttggttttctactgttcaatgagaacattaggccccagcaacacgtcattgtgtaaagaaataaaagtgctgcagtaactgaccattgtttttctggtttggcacagggctgtggggtagggtggagttgggaaatggaaaggtgtgtctggttgcctagcagcagaaagccttcccattggtaagaaagcctgtaccccagcttaaagccagccatgcttggagcagattgttcactccctgccacattctcaaagggtaaggaattaggccagacaggcagccacaatgaagggcctcacacagaagcattggtgaggagagcaggcagctctggtgttatcaagtcatgaacaagtaaggaatgtagccatggtcaaaagagaagtaacc

SEQ ID NO: 20857 - DNA, 1099 bp, Mus musculus
gctcctctttggactgcccactacctcccaagtataagctgttcccaggtggggacaaaggcctgagcttgctgcccacccgcaggaactgctccgtgaggtgcaagcactgcgcgaccagctgtgcacagaggatgagctgagctcctgctccacggcccagaagctcctgcacatttacaagcagctgcgcaaccctagcctcgtcctgttgtgaccaggtaggccctggcccactcgctctccacactttctccagtatgctaaccctggtgctttacctagagtagacaaggctaccctttggttccctggctcaggcagctacacctcttggatagtcaggaaggcagaaaaaaaagggtgtgtgtgtgggggtggtggtgacataggttcaggcatgtctgaacctaacagactttagtgcctcatgccttcctccttcccaacagctgctggccggctccacgtcactgcaggacacacttggggcttgcctggcagcattcctcaactggaacctctgcaccctgatgggaaataccgtcacccaagaactcaggccatggagacacagggtttctggggctcagacttccaagtttgctgaccccagcacaccccaggagtgctggctgcctctctggggccaccagggggcagagtgctcactgcaaccaaagcacaaagaccatgggagagctcccggcgacacctgccaggcatgggctgcccccagcactgtgctgctctctggtccctgtcccagcctcctccttcagctgggccctgccctgctgctggtgctgtcgttgccgtgggaggggagcgtgtccacagagctctgtgcctgctcctgttgtctgtctgtgaggtgctgtgctgacaagctgccttttgtgaagttccaggtgtccactgaagtccactcagttctaccctctgcctctgtgttgtgctctgtgttctgttgagctctatgcagttgggtgggcaacccttcccagcttctccttgccctttggccaaaggacactcctcagggcccacgtacactccaccaaggctcctgtggccatttggggccaaagatctgccc

SEQ ID NO: 20858 - DNA, 1227 bp, Mus musculus
tgacctgaccggccctgcgtgtgtccgtcatcaggtagcaccgagctcctcgccctgtcttctaaaggacgcctgatcacctgcagtctggacttgaactctgaggcgcctgtgcctgccaaaatggccatggcaaatgcaggccagaaaattaaggagctgctcttggacatcggtgatgtctctgaaaggtgagctgcagtgtctggcacaagtacagcttgtgccctgtccttaaaggttagcattctgtgtggagctgacccaggctagggaggttttggttaacaaccatctatgcggctgcctctgcctctgtctccatcagggacaaaaaaagaaatctacacacaaatcctcaaaagacaagagacccctctcccctctgacaggactccggaatcttctaacaccaatcccttgcctgcttctgtggactctcagaggccagtgggaccctgctctcagcagagcttccagcaccagacccagggagcacatctttccctagcctgtccccccagccaccttcagtgctagtccctcgtgttcttcctgactttgggttttatggccttgtgacttgaggatattcccacaaagcctaacacctactgtcactgtggagcggagcgttgcaaaaggaaaagaggcccgattgggacatgtgaggtgacctatggggctagcccatccctaggcgtcaagggccggttcagcacctccatccttccctgccttgtagagccaagagtgaggatcaggtcaaaggatttcacagtcagggcaggcagagaaagatgtcctccttcggcctgggagctgcttgcatcctcagagagagagctgatacttgaaccatgatctggttccttcctccccagggagtctgcagccatggctcctaccctcggctgtgagctccttctcctgggtgccatgactgtcctttgcagggtgtcctttctgaagaaagctgttgaccaacgcaacaaggccatcacaagtctcaacgaggccatgaacgtgagctgtgccctgctgtcccatccagagggcgatcggcccatcgcgtgcaccatcaccacctcctggagccgcctggagctgcgagacatgctgatggccacctgcacactagagaacagcagcagcttcagcctggaccagggctggaccttgtgtattcaggtgctgactagttcctctgccttagacctggatggg

SEQ ID NO: 20859 - DNA, 2344 bp, Mus musculus
gagtttgtgtgagagtgaatctatgcagatgctcactacggggtgtgaggttcccgcagaaatacctagcaacagggagcagacttcaagtgcaagtaggaaggtgtttgctgactggagccagaacacttgatgtgctgacagtttgggcttacgcagtaggggctttgagccaccctgccctgccatctggctctaaggagatgtctttttctgtgcaggcatgacgtgttctcactttaccctacaggcaccgttggtgtgcagctcccaggcctccacgagtttggtgcagtcgggggctctgcacgcgctgctacctctgccatgtgggcctgtcagcactgcaccttcatgaaccaacctggcacaggccactgcgagatgtgcagcctcccccggacctagggctctgggcctctgctgcatgggactgggccagcccagccctctgaagtctggagcgccacatgttccctataaggcctgaagcccacagccctgaaacagtggggccagctgccctggtattccagataccctgaagcgtctccgtgcagatcttgaagagaaagaacctcggctgctgtgctggggttgaacagagcctcccacctgggaaggcagagcagacctgcccaagagctccccacacgcctcacgtgttggagggactgaacacgtccagccaatcacctgaaattggggtgtacagagagggtgctgctgtcacccagctatctctccttcctctatgatctttgttttctgccttcccaccttctcccccagtgttcggatgaatgttcctggctgtctctgttcccttgctgtggggctgtgtccctcctttgggagcatgtgtggctagggtgtggcagcctttgtctgacatgcagtatagtaggtccctgacctttacttgcctgaaatcagcagttatcaataattcccacccaggaaacttttatttattgttttttaaagataaaactgcacagatgggagtgagagatttacctctgctccttcctccttcagtgcagcccctcttgggtggtttattgggcaggaggccaccatcatttctcctcagaagcaaacctcagtgcctgagactttcctgccacgctgcagacagtggcagttggtagcatgggtggttcatcagagcagtggtggctcttgcctggcagtcagccccttcaagtctggacagccctggagttctggtcccctctcctagcactgtacctttacccagcgagtccccacactgtggtcttcttgcacagtgtgtggcagttgagaaagcctagaaaaggtgcccatttgaccactgtgaggcaaatagaaacagtccctaagggtcctatgtggctgtgttgtgacagcccttacccaggtaagagatggatgtcgtgatgcctcgttgccttaatgagagctgagtcagctgtccttcaccctgggaaagtccatgccagctgtggactgctgggagccatgtttgtcaccttagtagaatgcaccaatgttcccttctgcatctctggccctgtggacagaacacttattgctaggttatctatcgtgtggcagggctggccagcaccgttgggtctcacctggcatgagatctgaagctaaagccctgggactgtggagccattgggcttggtttggtattgacagggtcatcctgaggggttagcagtggtagagagcaaggcaagtgatctctccagctacctgccagcagtagagagagagagagagagtgctgagggctggtagtgtctctggctagggcttcacctttcggttttttgttttttgttttttctggtccctgagtctggcatttctgtctgtgacttagctatgtttctgatgccaatcacactagcaccattacatgctgggcaggtgctgggcagcacagacgctggagacctgtttgccactgcttgtcccccattcatctttgtctacaaagttaattacgttctcatgttctggcatccacataattcttgttttctctgacttatagctaaagaaatttttgtggtttctctgcttatggttttgagttactctttgttcagtaatgcactttattttattgtccaaagagagtcaagctaaagctaccaccttggggtgagccctacagaaggttcagacccgggcagctcagctacctccttctacatggaggtggccctggtcccacctctaatccctactgtcatcaggcactacagcccaaaaagaggtgcttgtgagcacacccacccaagtgaacccagtggctgccatggtcctcttcaggctcaga

SEQ ID NO: 20860 - DNA, 1227 bp, Mus musculus
ggtctccatagtgagatccaggacagccagagctacataatgagaccctgtgtcaaaacataacaacaacaatttatttcatttcatttgtgagtgtgttcatgtgcacacatgtgtgcatgctcttgagtgaagaggtcaggacaactttgggaatttaattctctcctttaggccccagggatgaaattcaggttgtagggcttgtcactaggccagtgagctgtcatctcaccagctcgccgagtcaagtcatttctcaggagttttgagtttatgttcccattctttccctccctgggccttgtcatccctgtaactgccttttccacatggatggagggagcctgtgtgctaagatacagtggacagtgaaagagtggctgtggcttgttggctacatttttttaaatttgtgtgagtgtgtgtgtgtgtgcccacgtgcgtgtcataggtggttgtgggctgtctgatgtaagatgctgccaagctaaagtctagtttgtttggttttgagtcagggttttcctgccttgagctgactgttctgcccccttcctctcagtgctggggtcatgggtgtgtgtaaaaactgttctcatgagtagataaagacgagaaatggagtataactgggtgtactcagaacttactgttggaggcaggatgattgcaaatttgaggccatcctgggctatagagcaaggccttgtcttaaaagaagaaaaagaaagcaggcaccaagagagcagttttcaggtgaaccacgtgggccgctcttttgctgctgcaggtgagccatgtggcccgctctgttgcaataacagtaagagaacagaaggtatttgaaacacctctctcagggctatcctaggcatttctgttgttactgtgaaggcagggtcttaccatgtgttatccttcttgccctggaattctgtatcatccaggctggcctgaaatttgcaccctgcctccttcctgctgggattagaaacctgtgctactctgactgggtctagattgtatgttgtaatgttttacctagacattagttgtttatttccttactgtcttagagggtcaagatccaaggccaaaaggtataaagtatttctcattggcctgtgaaaagctgctttcttactgtgctcgtatggctgctgtgtctagagaatacaccataataccgttgaaattgaaagtaactacaactttattttactt

SEQ ID NO: 20861 - DNA, 2161 bp, Mus musculus
tggtggcgggtccccggctccagccacctcactggcccgccagcggatcctgggggaagagcgggaacgggctgtgcaggcttacagagccctgaagaagctgcatagacaggaaatgacacctgcacagccaccaggcagctctttccagaggcagggccacgcttgtctgtgatgcagagacccaggggcctgatcccctggaaactggtctgggagctgctagacctgggtaagggagaggcagcggatgctctccttgcatagggtcctgagagtaagctttcaggtttggaagagtgcttttccttcctctgaaggttgtccttataagagtgaccaccatggtatcccatctcatacagggcaaacccccgcatcccagcacttgcctgagacacagctggaagggctggtattttccttgagcctaagttcattctgaaacaagtctcggctgagacaagccaggaccactgtagaatggactcaatcccttaatccagccaattactgaagctgctggtgtaggtcagcctacaccaatgttttaagaagctcccatgggcttactgcaacctttggaaggcagggacagacagcaaagcaggttagtgggctggtggaagggcaagtgggggcggcaatcagcactttttttttatttgcctgcagggttctgtacaaatgaccagaactcccagcccactcttggtttggatagagagggggtttcagtactgactgagtgccttgaggtatacacatgaaaaccaggtttcaatggttgacagagtagagtatttataccaagagggtagaggcgaaagaattgggtgttcaaagccagtcttgacttgaagcaaatgtatggcctgcctgaacaggttgagagagtctcaaaaaccttacttagacatcaaaagagcgaagcttggaccctgctggggaagcccacagtcctctagcagacctaggagcctccgtccagcaaagctggtcctggagcctagtggagtgctccaaatgtgcattttccagagtgaagtttattaaagttttgctctttgaagtctgggccgttgctctccaacatgcttatccacggccctagtcaatgcgtgtcaatgtgacaagatgagtgagtgtgcagacacacacccaacagtagcaagggccagaatagagcagggtgcatcggccacttgactttccactgcacatcaggactagggccagggcccaggagccaccattatcagagtatgtaggcttctgagttctttagaagcaatgtggccacacatccaaagctcaactgtgcgctacatcaaatgactctgggtaattatccctcagagcccatgcctatatgtgcctgtgcctatatgtgcttgactcctcccactttctgtaatgtttattaaagatgcccacacccatgcattcagggattgttttctgagtgctgctttttcacaaaatatcccagctaaatggatgttttcctgctgtgcttaagccatctcagattgaccttggccagaacgatgtgtggagccacctgtctggcttccccattcctcacttctggtatggaagatgtggctgctcttgttccctgcccactccaaggtcaggtctggtctctgctgccatcttggagtcctgaccctcagaacactaaatattggcaggtaagctggagcctgtccaccattatatcattactgaataattggtgattcatatagacacataggtacatatatgtcttcatgtgtgtaaaggtcttcatggtgtaaggggcaggagacataagggcttccccagccctctccactttgtcctggttgaaaatcaggcaccctgatgtactgctctgctgcaggtttttcctcagcagatgagcctagaagattatcatgctgatgcacctgacaagctatcccagtagaatgttaccacctcctgtgtgccttctcttgtccacttgtgggacctcatatacccctgtacatgagaaataaaagtttattgaataaatccatcaatgagaacattcttgtttctggtgaggtcacaaccacactccccctcccccagagttttggctttttgttttttgggttttttttttttttttttttgagacagtttc

SEQ ID NO: 20862 - DNA, 1186 bp, Mus musculus
ttgcactgggtgcatcaggggctttgctcagcagacagaatcatgacatgccattaagtgcacgtatgtacacatgcgtccatattgcacaggagacaagtttacaagagatcacacgtgccattgccatattggtaacaacctgatctactatgtgctaaggtgaagcttgttctaagccgaaggttttgtttgtgaaggggggtgatgagcctatctgctctttctctccagatggcccccagcaccggccctccccagcagcaaccccctgtggcccagccagcgcctacacagggaccgccagcacagggcagtgaggcccagctcatctcctttgactgaccttgagtctggcgctcaccatgcagagtaacactacagttcaccagaaaccacttatatgtctaactagccattcctcccctattactgccctgtagtgtcccttctgtgagcaaggggtgggccttcccccttggccctcttccctgtcctcggtggtctggctcctatcactggttccctgcttcagtcctgatgccgtctgacctccccgggactggggctctgcagggcaagtagaaccttctctggagagtgcccggctgtgttgggtgccacaggtgaatgctgtggggatgcttagcctggcccggagtctgatgtgaactaactgtgtggtgtccaggcctggccctggtacccagaagaaccatgtggctcctgcacagcaagggtagaagctttaggtatctctgtctccccttctccttggatgtcatctctcagtgcagagcagtgaaaataaaatgtatttcaaaactctcatgattgattgttcgggcagcaggctgggttggaccaacaatttaatagtctgcatctgttgtggagtgtgctgggtactggctgagaaaccgtggacttgccaacagtctccttcctggtggggattctgcagactcatctggtgcaggatacatcaccaggcgggtgaggaagggtgcaaacgcgggcttttgcagcccaactgccctcaggattacccactgcttaaggttttagctctcaatagctcaccctgaaatatacggttcaacctgacttctgtgaggtctcaagttttgctctttccctccccgctaagcgcccgccttagtgtgcactcaaaggaggcggttcc

SEQ ID NO: 20863 - DNA, 1623 bp, Mus musculus
gagctgccatgtctcctgtgcctatgagtgagaggcctcctgcatcctttactgtttcttgcagggtgttttccactgtgccatggagacagcaaagcttggaccccaggcctttttcaaggtgtgttggggcagtggggatgctgggcagtgggagagcaactgggctgggtctccctgggcctgacgtctctccctctggtgtctccacccagggtctctttcccgcgggcatccgtctcatcccccacactgtgctcactttcatgttcctggagcagcttcggaagcactttggcatcaaagtgccaaccacctgacatggccagggacacctgggccaggctcggtcgctgtgctgagctccttggaagagtgggaagggaacgggctctcttccttggcctgggcccatgctggtccccagcaggctcctgctcttccctgccttgggctgctggctatgccttccgaccctgccttggccccactcaagtggcacctctgccctacttactcccaggctctccccactgggtcaccccgtcttcctatccgatgattcactcagaagaggtctggcctggctggtgtcactgtccccacctccctggctgctaccgtgccctgcctggcaagcccagcgaagccgagttcgtttcctgctcccgctggccctctgtgcagggagcagtttccgcccagaacttgggtagtgtggcagggtacggcccgtggcagcttctgcttaccaaatgactagagcacacacacaagcactttgtcacaagagggaccaccgtgctgtgttctggaaggtagtgccttcaggagaggggacaggcaggcagcgcagattaccagcagaagccatgaccgtggagtccagagaaagtgcctggggttcccgagcgcacctcctgtatgcagccttggctgctctaatggtcagttttgctgaaccctcctgctcagcggctactgccgtcaccaggaactgtctgtgtccctcacacgcctgtgccctcccttgcctggcttccccagggccaggtgggcatgctggcagagctggggcagtgatggattcatcgtttgtgccctcccaggacctggcttcctgtatggcaggcatcacccttcaccatccctcaggcttcgaagcagcctgttttccctcaaatggggttgtgtgtatcaaaacgaggttcggccctgtgcctcccacaggtcctcccccaggaagtggcagcagcccaggggcactgcctacacctctcttcaggatctaataaaccaagtggcctgggaggcctttctgtcttccctgcacacttgggggctggcagatctttgagctccttcaccgctaaggacaatgctgtcacctttgtatccactaagtcaggactaccttacaggatagagcctatgggaagaattcttagacgtctgtgagcaggaggaaatggaaataacaacagaagcaggcctctctagagccagtcccatgcagctgctcactggccagatggccggcaagcatgggagaactaaggatgccctggggtgcagacagactgagatgcccaggctatgacagttgtactggcttaggctggg

SEQ ID NO: 20864 - DNA, 1179 bp, Mus musculus
gcttctgctgaatgcctgcactgtgtcctttccaaggcacctgggtttgggagcctctagtagtgggaagcggatgggggggggggtcctcttcccagcaccaaccagactgtccaccaacagccttcaagcccatcgacctgagtgacctgaagcgccggaacacgcaggatgccaagaagtcctagagctcctggcgccctcccctggcctccagaagctcaggtgcacttgatggtggtttcctgtgttcctgtggcgctgctcctggggggaagagtgtgctctagcaggccgtgatcccagagccagcaggattgatgaccagggcccttcctttcctctccagggtctcaagttgcccctgtcactgggggaacaggggcctggctgtaaccgcccctgtccttttcccctggccagctgcatcttgggtagcacctggcccgacctatctagccctctctgctgttacctgccatgccttgcccctctccttcctggctacttaaggtcaggaaggaaaaaggggacctctgtttcttcggctgttggaaccttgaaatgaccagaaagtaggacatgtgcagtcccacctgcatccagtgtggctctctccatggagacttgctcttcttctgccctggacatgtggggagctcccgcttccacccccactgtccatcctgacctttccttgccccactttcagagtcgaatcagctctgagcctaggacagtgctggctctctgagggcaaccaggccttgtgtcctggtacctgtgacactgttgtggtcacagcagtgcccttggacagggcattaaggctgaccctgaaggagtggtgctgccaggcctgtcctggctttctggggtgtgctgggaggattaccaaggccccctttttttgtgccctcttgaatccaagtgtctgtagctttggagactgagggtctgtgaataaaggcggtggcactggaagtggctccatggcagtctgtcaggtcctaccctgaagcccgcagagctgccttgcaggtctgtaagcccctggccgccagagtagtctggtgggtagtaaagttacattgcccacgtggagctctggaaggcattagcactcttcagccatgctatggactctgaggagcactgttggctccttggctgcccagg

SEQ ID NO: 20865 - DNA, 2056 bp, Mus musculus
tgttgtttgctctgtggataccacacactagttactagactagagagtagacataggctgcctcccactcagtagatctatacctaggaagctcggcttgcttatgactgttaaccttgatgttgctgatatggaggaagcagaaggcagatcaggatttgatagggtggagcttgaggtccacctagaaatcctgttgaagtgagaggtatactggccccaagggacctattggggagtagagtaagtgctgccttctgtccatatgcagtactctgcactccacacacagcctggcaaagtaaccaacggctgctgtgctgcagcttgtgctgggcctgttgtccctgcctgggctggggctctgcaggttcctagcaccattcctggttggctggggttcctgactggaagacatgccgtgtcttgccttatacacaaccaggccactgctggtgatggtggccaggtccttggtgatcagcgagtgctggtttcactgaggacagccagagtgtagctttgttcctttaactgccccttccttcatccaggacctcgacctagaagaagctttagagccagacatggaggaagacgacgatcagaaagctgtgaaggatgaactgtagtgcagaagccagatctgggcgcctgaacccaaaacctcggtgggccacgctcccagcagcccacatctccggagcctgagcctcaccccaggagggagcgccatcagaacccagggaatctttctgaagccacactcatctgacacacgtacacttagacctgtctcttcttttgcttttcaattttggaaagggatctctgtccaggtcagcccctcttgaagggctaccttttgttttaattggtggtgtacttttttgtatgtggaatttgtcccatgtgcttgctaaaatgtttggggatctcctcacactggtaatgtctttcctgttagagaggtttatgctaccacttcgcatttcatctgtgaggcatttcatcttttagacatgtcttcatgtccagctacttgtttcaccatggcagacctccctgagccttcttcctgccctgggtaggaagtgtggctctgggtctgtggtcactctccaccttgtcctagtgttgccatggtagcatggctttgtagtttgcatttaacctggggatctatgcatcctgtcaagagggtgggtccccatccccgtgtgtggaaaagagacagtgtggcttgctgccaggctcaggccaggtctggacagctctcactctcctcaagccaggactaccgaccagccggctatgggcacattactctgtggctgctggattcttttccagcatggcctgtggcctgtgtgaggcagaactgggacccttgattcccagattgggagtcagccaaggacactggggctgaatgaaatgcccattcttcaggcatttctaccataatattggaattgaacacattggctaaataaagttgaaattttactacccattgtcactgctgctttattttgagctaagggagctgagctgaaattctgccaccaaaagggatagcgggcatctgtcatgcatgctgtcatacaataaccttacattcacaataactttaaattcaggattgagcctcaagaaggtgtatccttgccaggtggtggtgacacctttaatcccaccacttggggggcagaggccagcctgatctacagagtgagttccaggatagccagggctacacagtgtctcgggaaaaaaaaaaaggtaccctccagagatcaggaatgcaactccccaagaaaaaaaaaaaaaaggtgttaaaagtaagatatttctgccaggcggtggtagcgaacgcctttaatcagcacttgggaggcagagacaggcagatttctgagttcaaggccagcctggtctacagagtgagttccaggatagccagggatacacagagaaaccctgtctcaaaaaaacaaacaaaaaaaagtaagacatttctgaagctgtggatgaagatggttggtagagtgtt

SEQ ID NO: 20866 - DNA, 1159 bp, Mus musculus
atgcaacacgaggggcttcggaggcgcaagcgtagccccgcccaggggtccgggactccgcccactgccacgttcgacggagaatcgggctgggtacgcgcatctctccaccaatcaggagccacgaggccgggcagcggaaagccgcagccattccagacgtgtggaaggcgtgggaaaagtcgccagtcagaagtccagaaagagaaagttggctttcgccagcgaatcagacgctgggggacattgggtttgtgcgcgcgcgcgcgcgccgtggccaatcccaggcaagaaccgaaaggcctccgggtctttgtcgacttggtggcccagccttgagtgggtgtccagtccccgcacggcgagggcgggtctctcagctccttggccaatcggagggcgcggcggggcgcatgcgcacggcggctgacgcgcgcagcgagggggaggcgtgggcgcgtccccggcccaggatttataaaggcgaggtctggaccgacgcgcgctctcgtcgccttggctgtcccggcggcgccaacccaactgccccgcccgctgcagacgtccgacatgctgagccgtgctttgctgtgcctagccctggcctgggcggctagggtgggcgccgacgccctggaggaggaggacaacgtcctggtgttgaagaagagcaacttcgaggaggcgctggcggcgcacaagtacctgctggtggagttctgtgagtgcgccgtgggcctgggcggggggggaagggccccttgtccacggactcctccgggccgccctctgcggcacccagcactgtcctgcgcggccggcccctcttgagtacggtggcccgtagccctcagcttgccccacggaacacggactggccggtccagagctgcacctcgcgggtagcacctactgtaagcttctctgcttccagttgtcccaagagcatccttcctacccaaagtagaagtcgttgtagtcagagctcattgagggggactgcgggattgagaatcaagaaggtatctttgtgcacgacgtccacatggccagaaccttctgttagctgggaaaaacagagtgggctgtgtgagcagttagcagttccgatagagtagatcaaacgctctttactatgcccaccctacctgtaacttgc

SEQ ID NO: 20867 - DNA, 2196 bp, Mus musculus
aggggctggggagagtgaatgtagcagggtggagagcccttcaagcaagcagtcagcggagactcctcctcaatacaggtgatctggagagcttcaagaaacagtcgtttgtcttgaaggaaggtgtggagtaccggataaaaatctctttccgggtaaggtgggggctttgagaggcctggaaacaaggggcagaggggcaagcctgggaaggcagctgaccctggctctgtgtccccacaggtgaacagagagatcgtgtccggcatgaagtacatccaacacacatacaggaaaggggtcaaaagtgagtgggcgggccatagagtggggagccattgggcctgggaggggcgtgcagcaccagtaatcctgcctctcctgtccctcagttgacaagactgactacatggtcgggagctatgggccgagggccgaggagtatgagttcctgacacccatggaggaggctcccaaaggcatgcttgctcggggcagttacaacatcaagtcgcgcttcacagatgacgacaagactgaccacctgtcctgggagtggaatctcaccatcaaaaaggagtggaaggactgagctccagctgggagacgggcagggcgacggacagacagaaggaccgacatgccccaccctaaccccctacctaccccaaaccaaagtgctgacaggacctccctcacccgtcattcctccctagtccactcaggcagtcagctctcctgtctgcccctcctccacctcctgcccgcaggcccctgtggtctccagtgtcacattgctgcttctgcctgtgcagtgggggaggggttccagcccaggcctccaatctgctgtgtccctccaggttccctctgtcttcccttcctcaggccctggcttctagaatggaacagaacactgtcagggttgtccagcccaccttgtctctgtcgcagcatggggaagggctgggctatctgtcctctagtcccaccactccctggccaggtcatccatcactgtcagtcactgtctaaccatgatgccttaacatgtggaacgtgtgctgggggccgtcgctaactcttaactccctgtctgcatgagcatgtgctctccctgtcctcgcctcgtctgccatccccatcccagtgacccacccaagggaggcctggggtgcgctgctgttgcttcctgcgagcctggccagctcttcccctccccgtggccagggttgggggtggctccagtagctaggggagggtcaattgccaaaactcgatgcctccagccccatctaggaggcagggtagggtgcctcattcctctgccttctctgtcccttgtaggcagtactcggagcccctgtccccacagagagcccctgagggacaaagccagccgagccttacttgtctcacctgggccacgtggcctgaacctcgtgcctggcctgtcagtatttattgcctccatttgggccagctggcctgatgcctctgccctggttcttggtgccaccatccctgggccgaccctccctggacccagccaggacaaatgtgggaccaagttcacacagttgggagctgtctcctgtgcctcccctccctatccccagtccctgtgtggtgtctgccaggcccagcctcaacaggcagaggagcctgtccctgcttctcttctgactgggaaataaacacccctgaaggagtctgggattgtgtggtctgtgcagcttgtgttggggttttgtagggaatggtaagaatccagtggagggtggatgtccctcagatcagatgtcctggctacaaggttgtctgctgctaacagccctgttttgtctttgctcctggcttcctgtggagatgtgaatatagaacaaaccccaggcccatgggtcacagtgctggccctgggcatagagggattgcctgagtcagcatatctaaatttcccctggctgggacttgccctcagtatggagccctgctggaagatcaaactgatctggctctgaacaacttgcatgtgtaggtcgacctggtgagagagttccctatgcctgttagtgaggctagttggaacaggaaaccgagcctctgcacatctccagtactgtgctctctagagcacccacgaacctagggagaaagggcaggaccactgaaccatgaagcttgtagcagaaccct

SEQ ID NO: 20868 - DNA, 1868 bp, Mus musculus
ttcaacgtagggtaacttttctttcctttggttaagaatgggaaagtcactagactgatctgggagtggcagtcctcttgccacagcctcccaaatgctgggattaccggcaagtatcaccataatcaacttttgagaaagtgaaaactcttccaaatagttgtaacatgttaggtttgagattcttgagcatagggctggctctgtagccctgcctgactgacctagtacttgctatgtggagtccaggctagccttgacctcaatggcttacagttcttcacttagaagcattgaacttggtgtctagtggatttataagaagttgattttgttgctgggctcagtggtgcatgcatacttcctgtgaccctagctactcaggagcctggtgtgggaggatcatttgaaccctgtagttcaaaactaggatgggcagtattacaagtccttcttttttaaaatttggatatgatgaataaatgtttgtattgaagtgtacaaaatcagagttgatcacacctcgtctctttatgttgcttaatgttatggctgtaggatttagatctggggtgtctgctgaaagcctgtctgctgaaagcctggtcactagccatggtgctaatcagagtacgtagagccccagcctttatcccagtactcagaaggcacagggagggggaatctctgaacgtgttcaaggccagcctgttctacagagcgagttccaggacagtgaaggctacctacacagggagaccctgtctcaaaacactcccaccctccaacccacacaacctctactacataaagtggatagaacttttaggagattgggccttatggagagtatataggtcattggaatgatagccctgaaggagacattagcactctttctattcattttctttcgtatttatttattgggtatgtatgtgtacatatatttgcaaatgttgtatagcatatgtgtggaggtcgtccatctgtgggttttagcaatcaaacttgatgtttgtaccaattgtctacccaatgagccatcttgctaataattcctcttccattcctggcaactgtgaaattagcttcctctgtcatggctttcacctttaccctgctgttgccaggaccaaagaaagattcagaacagccaaaaataatctgttcttagaggaatgattctttttgtgagatagtaactcatgctataatttaatttagactgtctttgaacttgacaacaatccccctgcctcagcctctttagtgtagaactttagacatgagatgttttatcctgtaaagttgattatctcagatatatttgtcatggtaatgaaaaactgattatcacaatgatatcatttacatgaatgtgtgttgatgtgcatgtatgtgaatatgtgagtgcctatgcacctgtgtgcatgcatgtgtctgagccccagtgagtttatgtatgtctatcatacatgtgcaggaggccaaaaaagatatcaagtttcttggaattggagttacagccgtgggtgctgaagtccaaagctaggtgattccagtgatttcttcctcgggaggaagagggggtgcggctgcatgatttgaagccagcctgtattacatagggagttcctggtcagccaagctacatagaaagacttgtctccaaaaataaaaaaagtgaccatgcctatctttttttgtctaagaatttatttttaattacataaagatgaaagtaggatgcatatacatacatgtggcacccgtggatgtcagaaaaaaaattctctggaactagaattatggatggttgtgagctgccatgatgtgggtgctgtgacctgaacctgggtcttttt

SEQ ID NO: 20869 - DNA, 1652 bp, Mus musculus
cttgcatggagatcagggtgtggtgccctctgagtcagcttcagagcctctggagtgagacttcttgtgttctttaccataggccgccctatgaacatccagcttgtcacatcacagattgatacacagcgaagacctgcacagaggtgagttctgtggtcctcggatggggaaagagacctgtggtttatgatagtgccaccctcaaggccttgccagacagctcacagttctgttttttgttagcataaacagaggcggcatgacaagaaaccgtggctctggaggttttggtggtggtggcaccaggagagggacacgtggaggcagccggggaagaggtagaggcaccggcaggaactcaaagcagcagctttctgcagaggagttggacgcacagctggatgcttacaatgcaagggtgagttgagtccttgggctcagaggactgggtggaactgagtgactactgtagtagtctaaaagccagtagagtcaggggcctccttagtgaccttccccctctcttgcagatggacaccagctaaacaactgagcaaatccacacaagtaacaggacccagaagcctcgcctgtgatgcctagagggagggttggcaactgaactgtgcagacaatggtggatttgttttgtttctttttatttcttttctttttttttttcttcctgttttaaaataggatctaaaaactcatgtaaagtttttttttttttcttttttggtttttgttttgttttttgtttttttttttaattctgaaacagacctgttttgtactgagttatttttgggataaatattactggttgctgttgtggagaaggtggcattttcacctttgccataataaaatagaaatgtgtgtagaactggagctgtctggtccatcctgctattagagtctctgtggctgtagctagtacctggtgtgagattagagttggtgcctgggaggctgtgggtgaggcctgtctccttcccactgtcctcatgccttactccaactggataggtgggagcctatagagcgcagtggtctttgggcaggcactgcctggatgttttgcgtgcaccatgaggtgatgagggggcatggggaggtctgctgagtgatatctagagagatgtggcccataaattcctggactactcctttgccttatgcttcattagagaaacctggtttcagctttgaacctgtggtgtttcctttgtgtttttctgtcttcttactatattgacaaggaaaaaaggtgcttccttcctgatttgtgtacagtcagtccttgtgtgatgctcactggcagtatcaaaatctgaggatccccaaattttcaggtaaagtgacatagtgtttgcttagagtctatgcacattttcaggctttttcaaagtatattgtgttgtttggggaaggtaaatgtctagcatgtgtaatcttcaattgggatatttttgttcctggttggctctggagacagagttagttgtataatagctaatgcaagctgaggcagaaaccaatttccaagagggttgggtttaaagataaggtattttggctcctttagggggttagaggcaggattttgagtagtgtggctgagcaatggaagcttgaaacttgcc

SEQ ID NO: 20870 - DNA, 1228 bp, Mus musculus
acctccgcatccacgcaaaacattggttttcactaaccagggcctcgcttttaaagatatggaaagagtgactgtcactaatccgcgaagttaaagcaggggtgaggacgccagctcgtcaggagaccgagccttcgagcaaaaacaaccaagtcggacccacggaccggccgggacccccacgatcgcacggtgaggagggacgcgggacgcgcacactgcgctgcacccaggcgacgcccgaggatcttccggcctcccagggaggcgcccgcaggccccgccccctgctcgccctcgcacctccgcggcctaatcacgaggcgccccgcccttccgttgcctccgcgcgggaatgtataaaaacgaccgcgccgcgtcgggctcctccgaagtagcgccagccaccgcggcgagccgtacgcaggcgctctgcggaatcgcgcgcgcccagaccaatcgccgctcgcttcgggcccgcgacgccggaaggcagggggaggcgccggaagtgacgccgcggcgtgctgacgcgcgggctcgatccgaggcccgaatccgcgcccgccatggccgacaaaatggacatgtctttggacgacatcattaagctgaaccggagccagcgaggaggccgcggcgggggccggggtcgcggcagggccggctcccagggcggccgcggcggcgcagtgcaggccgccgcgcgggtgaatcgaggcggcgggcctatgaggaaccggcccgccatcgcccgcggcgccgcaggcggcggcaggaaccggccggcgccgtacagcagagtgagtgcggggacctgcggcgcgggccggggagggtgcgcccgggccggccgggaccgggtgagcgtcccgcgcgggaccgcggccgaggggtgggcgggggcgaggccgtcccgaggccaggatcttccgggacgctttgtccggtcgtggtccagcctcgtggcggcgggggccgctgcgagagaacttgggtgtccgtagcggagcggcggggctgggggactctcggggctcctcgaccttggccgcggggccgacgggagagcgtcgccgaggtgtcgcgggctcccgggacgagtctcacgagtgtctctgtgcttacggtttctctccagccgaaacaacttcccgacaaatggcagcacgacctcttcgacagcggcttcgggggtggagccggcgtggagaccggcgggaagctg

SEQ ID NO: 20871 - DNA, 1180 bp, Mus musculus
gacgagctggcgtcctcacccctgctttaacttcgcggattagtgacagtcactctttccatatctttaaaagcgaggccctggttagtgaaaaccaatgttttgcgtggatgcggaggttttgtttttgtttttttgtttgttttcgtttcctgtttggctgatctgcttctgccccgggattagaggcgtgtgccaccgtgccagactacatgagtgcagatctttaaaggcatccttaaaggtggcaaaataaactcgtgccattaatcccacaggctctccttgccgtctttaaagacaaacacgtgcctttttctttctttttggtcgggacgcacggaattttggaagatgccgttcttgacgagtgcagcacttgccgcagctccatgactttgagcttaggtgctttcgtattccgtactaactccaggtcatcctcttccctcaggtcacaggctctgttgtcatgaaggtgaaaattaaatgttggaatggtgtggccacttggctctgggtagccaatgatgagaactgcggcatctgcaggatggcgtttaatggctgctgtccagactgtaagtgtcttcctatgcgctctcagaactttagcctactccaccagcctaaaaatccctaggtttcccagcactgggtaggcagagactggaggatctctgagtttgagtttagcctggtcaacaggacaagttacctaaccctaaccgaaaccccaccggacagtggtgttgcacgcctttaatcccagcactctggaggcagaggcaagtgaatctctgagttcaaggccagcctgatctacagagggagttccaggacagccagggctacacagagaaaccctgttttgaaaaaaaaacaaaaaacaaaacaaaacaaaaacaaaaagccaaacagtgcaagttccaggataaccagggctacaaagaaaagccctgacttgataaaagaccaggtaaaacaaaaacaaaaaattgtgggttttagtttctattatctgaggggaaagtcgacagaaaaaagaagcagaatacttcaagcccaggtttgtctaaagaccccatccagcatgatggcaaacacctgtaatactagcatttgagaggcagaggcagagactagtggatctctgagttggtggccagtctgggctcca

SEQ ID NO: 20872 - DNA, 2985 bp, Mus musculus
cccccacgctgcttccacatccaccacctctggccctgggtggtgacattgcagggaccaaggtgtcactgtgggtgcccacagggctgtggcctacctgtccttggccgtcttccttctggcctcagcttagttcctataggcttcgttggggtctccgccccagggccctcccttgtgggttgggagacctgtcactcacgtgtttctgaagccccgttctgtggggtgttgtttcccaggcagattggtcgggggccccactgagggcaaccattcttccctgtgtcactgtgagagcctggaggcctccaccatcgccagacaagggctttggccctagggccaggtctgttcttccccagtgtccgcagcttttggctctgggccctcactctgcctccttcaggatctgcgtcttccagggatccgctgttcgacttggaggtgcttctctgcaggttccaagcctgcctcctcaccccacctttccagtggaggctgcccaccttccaggcttggctcaggaagctcctcataagcggatacccacctgcaagaggctacatccctgtgtgggcggtcacatggcctcctgctgacatagctggtgtcttctctggggcccctggatccctgaaaagcacagaaatgtggtctggtgaaaggaaagactggcctgacaggcctttacctcgtaggcagcaggatttttactcagtttgacgcagcgtgcagggctctgaaagcaggacctgtgccaccctggcgttttggtgggctactatggctcaaggtgctcagacagtcccattgatgcctgagttggatatgagtgggaatctggactgttgattctgagttaccagatgacctcatcccctccctttggttctgtgactggtatacagaagtgctgcctggcagcagagctggtgtggaccgtgcccatgcctggaggacgagaggctttctgagtgttttggtactggctgggctgctgtgtaaagctgagaatggcccagtgcctcagtccagcctcctgggaggatgaggaagaggaggctgcggctgggtatgtgttaaacaggagtagtaggtctttgcttctgaacaggatagagctatgctcaaggctttcaggtttgcagcacctgcttcttgagtctggggaactttccctgttgagccagccctgcagctccactccctgtcccttgcccttgatttcctgacagtaaatcctgtgtccatttgtgactgttggctgtttctctgatcattgttaattccgttttcctactgtgagggtgttgtgtttgactttctgacacagcgaatggagagcttgggctgaggccaggtctcccaaacttctccgctaagtaaaccataatgtgtgacttccctcctaccttgactctgcctgacttcttccttggacatagacactcagatttcaaagaaagtccacagtttcctctgtagagtatggtcccagagagtcccccctgtgttgtgtgcagctgggtgtggtgcctgctgtgcagggagccagtggcaacactgtgttaacagggatcaccaccatcacccggcttccagcaggctggtctcagctcatctttcagttctatgtgtgctctgttagccttggtgatcagggccagggtttgcagctttgataaactacttggagatggtgaggccacttccctgctacctccctctctggtgtggccacttggctaaagctcccatccgcagctgggatgtctgagccacagcctgctacactgtttcccctctgggatcttctgagttacttttttaggctgtggtttagtgaaaggaaccaacacattaacaatctccccagaagccactgaataattcttggcatattttctcagtgccattggccgcctggtttgggagcagttgtggaacagaggacagatcggtaccatacagaggcatgggttcgctgtagctgctcacagtttgcctgttcctggcgtgtgtcctaggtgtgtgctatacctgctgggccagctacacacatacgtaccctgcccctggagcaacggcattaatatagcacgggtgtctctggaagtgtgaggtagagtgttctaggaagtgttcctgataagatttccttgttctctagggcccccgttgggcttttggcccctccagcaactttatgccccaaccccacttttcctcccattctctgtctgctagtctctgaagcctttaaccaaatgggaatgggtacagaaagccttctcctggcaacttagggcaacaggacaagggctattgtgtgtccagctctgttggtctcctggtgctgagaggtgtgtccaagcagagttgatcagcccctgcctgccctgcagggctgaagccagggggaaggttagtagagagtaccctaaatggggtgagggtccttcaacatccaagtgaggaggggctgtggtgtggctgcaaggtgagaccctgtctcctgcacctgggtagggccataggggatctggctgcaaggtgaggcctggacttggagagcaatcagtctcctggcctcagcaggcagcagccttggtgcccacccgtgccctgcgcagtatttattgctaaattattgtccaggaggggcggcactgggcctggccccccgggtatttattgctgtacatagtgtatgtttgtgatatataaggttttctttattttgtatatgatcaataaacgccttttaaagagatctggtggtatttctttgaaatcccgaaggagcaagggtgggaagggcgagccggaagaggtggaaagggccgggcccgcgcatgcgtctctgtagctgccggatgaggcggaagcggaagccggaagcgcagtcaaaggagcgatggcagccggtggcggtctgagccgctcggagcgcaaagctgctgagcgggtccggaggctgcg

SEQ ID NO: 20873 - DNA, 1212 bp, Mus musculus
gggttccctgggaattcctgaaaggccactcagcaaaaagttccttgtttgcgagattcatgcaataagcctagaaagcctctgagatccagctcctttctcctgcacgcgttcccagggacaagtatcccgagcctgtctggagatccagggctgagactcgtctgcccttcagcagtggcccacacatgcttgggggcttgttccagtatgggctccactttcctttagcacacaaacacattagtctcctctacaggtggaggacctcagctatccctgggaagactccagagcctgagccacctcctggaatgacaccagcttcaggattaaccccagagcccagggctctgtacagcatggaagcagctccacaccagcccccccatctccaggacagtccatcttttgattatttcttctagccccttgtggccctgggtgtgtgcagtctaaaactttgctccaagactaggttcctatgactgctgaacaaggaatagggagcggacccccgacccaccaaagtggaaaaccttagtaaagatgactcacaaattatctctcagtgctgtgaggaccaggatgtaaggcgggtgtagctgtgctttgctgctttatgggctctgctttcttccacccttctccacccctttcaaccccttaacaccaagagagaaaaacagagaggaaagagattcctgaataaaggggacgacatcatgattagactacttcctgctgattaagggtgtcaagttcctcagggcaactttgatcttcaccatcaggatatctaatttcttcttgtctcttctttgtgcacaactacttaaccaactgagaccaacaaccaaccaaccaaccaacaaccaactaaccaaccaacaacccacctctcgggggccctagcatttacataccctttgaaaagtccccagaattccaaacatcacacgatcacagaaactatctgtagctggcaaaatcacacccctgtagagcatgagggaaaacacagtcagcttctgcggacattccacacatgggattaaaacgaaaacgcgttcccgtaatatttctgtggttttcaaaggagccaaaactccaaaactgtcactacaggagggtgggtggggttgatcagtgagaattagcctggcaatggctatcctgtagtagctgcccccgggacccacggctggtgct

SEQ ID NO: 20874 - DNA, 1636 bp, Mus musculus
cagggtgaccctgactacacctgagtggtgtgagaagtggccttgcagctgtataggtggggaaggggcaggatggggcggggctggcagaagggattgtgggtgccagcatagcactccccaccaaagctgctgctggaactgtgggttctgggaggcggaggggctcagagtcagggtctcattgcttttctagggagctgcagaccatggctgaccaggagaccatctctcctgctgccataaagaagactgtactggataaggtgaagctggactcctctgctggggcctctctgtcttctgaccatgtcaagccactgccctgaaacctggtcccagcaggcaaggaatgatttgtctgccagccttcctcctgttccctactttcctttcctttcctctcctctcctctcctctcctctcctctcctctcctctccagcagggttttgcagtgtactccaggttagctctgaactagtcatcccccactcttgtgtcccaagtgctgggatcatggataagtgttaacatgccaggatcctcttctatctttaagtctaagatagtgacttgatgttgcccagacaagacttgaacttacaggctcagggcatactctgatttcaattcccgttaggtacacaacacctgagagactcagttcttctctttcttcttttcttgcttgaagcttctgtcccaacgctctcaaacaacaccgaatatccccatagcaggcccttgcccacagccaggtcagcaaggaaggggatatcacttacaactggggacctccattgatactcaagtgccagctagacactaggtggcttctcagacctccccctcttcagcatcctctggagctcaggcctgtggggtctttactctccctagtttcagggtcagctagctagttagccatggcctctccctttctgtgatgaccagctggcccaagacatcgtgtacctccttctagggacttaacgctttagcaatgattccctaggcactggggaaaagaacttctcgggtagctgacacgactcctgcatcttccccaactcaccaaactgctactgctcttcctatcctttcagttgaataaaaaaagaaaaaaaaatcccccagagctccagtcaacctatttgtcagctatggagagaggcctgcctgtacagggggagtatgacaccgaaggagaagccaggaacacgggtcctataaagccggctgcagccaggctgaggtgctccagagaacagagggctacagatcctccgtgcctgtgccatagctgacctgcctgaagactggcactgtacacaggccctggcacacatatgtagtgaggggcaccaacctctttagtacctgtccatatagcttgcccagggagatgtttagctggctgactcaggctgtgcaggccaagttcctggtgaggaggaaacctttagaggaactgttggagtttcctagatgggcagattcaagagccatgacacaggggaaatcctgtctggaaaaagaaagaaagaaagaaagaaacaaagaaaagaaaaaagaaagaaagaaggaaagaaagaaagaaaagaaaaaagaaagagagaaagggaaaaagaaag

SEQ ID NO: 20875 - DNA, 1108 bp, Mus musculus
gggcagagagcaggttgcacagggtcagttgggttgttcagccttctgtgccaagtcattcactacaaagcaggtccagagagcagagactccagactttgccctgctgtatagaactttccagagctgaggactaagtgatcctgactgagagacttgtttagttccagacagtaggcagaagccctgtatcaagggatgttgtgaaatacacagtctgggaacagaaatgctgctgctgctgctttcacagcggagggcagagctggaccccatgaggacagagtggcgccttcaaggtctacttgtgctagaattctctcttcccaggttgtcacggaagagtgaggacagaacagacaaacttggatgtgaacggtcccaagtttactctgcatatccatatccttaggaaaacctgttggtctcctgggaaggagcacacagacttgatgttagggtgccgggcagcttccctcaaggatcaccaggggtggtacagagaaaagtacgtatctgtggggaaatgtcaggaaagatggaaggctcagagaaaagacctcagagccatggtgctcactgcaggatcaagacaccaaagccccagctgcttctccttcggtgtgtctgtgtcacaggagaatgaagatgaaacggcccagagtgtcttgtagtgtctcctggggaggagctgaaggactggaggaggtggggaagccctggggtctgtatccctcagcatgcactgactcttacctgaagtgcaggtggagacagtaatagcatgatccagaggactatgcagccctgaggccagtgcctctgggcccaggacagctgtcaggtctgtccatggatgttacagacacttttaaacatgggaatattggatacagggtgatttatacccgcctttttttcattgtactggggacagaacctagggcatgtgcatgttgccgtctattgagtggatagcctccatttgtaccagtgctgacaggccctgctcctcactgtgtggcctgtgtcagcagagctggagtagactgctcagctacccacagtcctacttcttccctcaggataaatttagagatagactcag

SEQ ID NO: 20876 - DNA, 1105 bp, Mus musculus
ttaaccaccacctggtggtgcatttctccatctggagcttgaggtcctgtggctcaggcttgcctgggggaaaggagtaggctctgagaggtctgtgtgggtgtgatggtgacccactggtacatgaggtcttgagtcccattgctaggactggcagttctgcttgctaggcaggggtggcagatctggaagctattttggctgccccttcctgggcctgtggccacacggcatgtttatacactgttctcagatgctgcatgggggaatgtgatctgcctgcttgctctggagaagccacacatcaaagctggccactgtctaataatttgatgtcgggtgggctctgtccctattgtaatttgttatcctataatgccccaagcaagggcttgtagtcagggcactgcattggcctttcccttgcgctgggtcaggtagcctggcagcatggccttcttgtagaagtgtgttccatgtctgctatctgggaggcaaagcctcttgtgttctcgtcttccttccctgactgtccccttattccctggcctatcttcttgggcagtaagggcagttccaatacacagttgcacaatgacatgtgtggatggtgctgtgtggttctgcctggcctttcatggagagtaaaccagctgagaatcccgtggagccagaagcctgtcttacaggttgggctttgtggtttccttaagatctgttttgctgtcctgacaaggccctctgggagcaggtgaagctggagtgctgggctctcaggaatgtgttctagagtggggaacattcaagggcagaagtgcagaataccaaaggcaagtgtgctctgcacacaggccagaggtctgattgtggcttcggacataagtgctcagtgttcctgagctggaccatgggcctgtgggctgatgctcagtccttctgtaatagacttactccatgccaccagtgccaggctcactcctgtggacccctactcattggagctgtgtttgccacatgtgtgtcccacaggtcctttgagtacgtggggttgatcatggtgcgtgtctcgtgtctagatgatccttggatactggcttctaactct

SEQ ID NO: 20877 - DNA, 1156 bp, Mus musculus
tatcagtctgggagacccagacacccctgcccacaacagccttatgtctcctcagtcataaactgacattgacagtttgctggtgctatagctgggcagtgggactgaaggacacagttctcacatgagaagtggggttcccaactggtgctctgctgtggtccatgatgggtggagtgctagaggaaagggtagacttgcctctgggagaccggaacctgctgaacactgcctgcctgtctggccctctgagcctccctgcttcctgccctccttgtaggcaaacctcttccctgctgcgcttgtgcactttggagctgaagaaccaacaggtgagtgaggccagcaggaccctccctgaatcctgctttctctgatgcccgaagcaagaaccttagaaggtgttcactctgaggtacctaagtgggttggggggctgcagcccaggacccacctccctggtgcggagcacctgcctagcacaccactggcagcatgtgggtgcaagtgcaggtctcatctgtggctgagggtaggctctggcttctgaaggtctctatctggaacctgggctgctagaacacaccgtctccccatctacagctgatgtgctggtggccaggtaagttcatgaggggttgggagcccctccaaggctgtgcccaccacctggccttggcctctcacctctaggtgtatgtcccgggcttccgggtccccacctctgctgccagcccctgaccctgtatccctggagtctgagccaatcgctgaggatggggcactggggcccccagagcccatccaagggacagcccagcctgtgaagagaagcctgggcaaagtacccaagtggctgaagctgccaggtgcctgcctgcctgcctgccatggactagctgggtggggcagggtggctgggcaggaactcaggggtttgtgattattcttgtgtttgcatcacagccagcaagaggtgagagctaccagcctggagatgcctatcaccagccacaggaccctacccccacccaccccgagcaggaataaagagtcgcgcttctctcaaagctgagtttcttttctgcagaaaaggccctcaggcctccctcgagctctctcatccactgcttcccaaagaaccctgggagtttgg

SEQ ID NO: 20878 - DNA, 1182 bp, Mus musculus
gcctacaagtggcagttgctgtggcctgtggcagatcctgccacatgtgtgaaggctccagttttactgcagcatgtgcacacatgctgtttgttatcctgtcctttctgagagctctgcattcgtcccactgagatggatggaagggagcacggggctcaggctttgaagcaactagactttgggtgattaatggcaaagagaaagcaggcctcagagagatggtgttgatttattgatgttgctttgtaagaacaaatttacagctcagggaggcatcctgggggtgggggtcaggtggttaaaaggctacacagcagctttgatgtagggtggcaagaaggaggcactgccagcagctggtttatttataatgcaaggctgctgggggcgggaggagggctgtgtctggaggcaggctggttcacctttccctgcacctgtcttgcaaggactcttggaggtaacagctgctgggatcttcccatcctcctgaagctggagagctcaggagttgatgctggtgtggattcactagaccttgcaggccacaggagggaactctagaagtccaggagctatggaggagaaacgggctcaaagtgaccacacaggcaccattctggagagctgcagactgccccacctgcatcccacataccagctgagggagcactttctccagctgatccacttccacaacatccaggtcttctgcctgggcctgccagaccccacggacagcagcctctggtggaatgtcatgaagtgagctggggaaagcggggcagctctaaccctgcccttgttaggtcccctgcacccattgtcagccctcagagggggcctaggtggctcttgagtgtttcagggacaggacttaggcttgattgtagctgagaaaaaccttagtttactgacaaaccaaacaagaaattgtcatctttctggtgttgtgggaacccttggctcacctagtacgaagatcctcaggaactccgccatgagctgcagtgcatccccgctgactggagggaagggggagggtggtggtgtcataggacagcctccctccctgtgccccacatattccccaccccactggtgccccaaacctttggtcttgcaatccctgaagtgcaaatggagtagtctgctcaccagttcctagaaggagggcag

SEQ ID NO: 20879 - DNA, 1250 bp, Mus musculus
tgggactgagaagcgaggccggggcaggccacgcaagcagcctccggtgagtcctgggacggcgctggtcgggagtcagaaagagcccagtgaagtgccaactccgaagagacctcggggccgaccaaagggaagcaagaataagggcgccgccaagacccggaaagtcaccacagctccagggaggaaaccaaggggcagacccaagaaactggagaaggaggaagaggagggcatctcccaggagtcctctgaggaggagcagtgatcaccactcgcagtgccgcctgctccatagccactgaggagcagctgtcccctgggactggaagccctgctcccaggcccctccccgcccccactgcacactaccgcaccaggcaccagctgcaggctctgctccgcagcacccaagggagcaggattcggctcagtccctgtgccctcctcccgaacacacctgccccatcctgacaaggctaacttcccatttagccgcagcccggcctgctgcgcacctccctcagagccgtggctctctgggcgctttgttttgcgggtcccttctgccctgctgttcctggcttccccgtagagggtcctgggagcattccctggccttaaggggccccggccccatctcactctgacaaggcccagtggctgacctagcagcagcagtgtggtcagggcaggggatgcttagatcccagcatgtccccaccaaagtatcaccgggtgggtttctcagcccctcctgccccaccctacagagatcatgcactgggttggctgagccccttgacaacaggaagtaggatgatgttggctccacccactttaatgttctcacctgagactagacagatggggttaccgcccatctccagagtaagggcctgttctcgcctccaccaaaggcaaacgggcaccaacacgcctcccccagtccactctaggctgttccttcctcccgcagggcactaaggagctagccttgccgccccctccttttcgctcctccctgccccccatggttctggttccatcttctcctctgttcacaaactacctctggacggttgtgttgttttttttttgttccatgttcattcttagatacccactattgctgctgctaccagcgtcagatgttcatcctcctgaatttgcctgtattctctcccccacacaatacactcgaggggaaggggggctggggcgcagcagactggttacctaccccacac

SEQ ID NO: 20880 - DNA, 1306 bp, Mus musculus
gccacaggtccttccctggacaaagtctaccaccccaactaccccagagacagtggttcccagcccagccacaggtccttccctggacaaagtctaccaccccagctaccccagagacagtggtttccagcccagccacaggtccttccctggataaagtctaccaccccagctacccccagactgtggttcccagcccagccacaggtccttccctggacaaagtctaccaccccagctaccccagagacagtggtttccagcccagccacaggtccttccctggataaagtctaccaccccagctacccccagactgtggttcccagcccagccacaggtccttccctggataaagtctaccaccccagctacccccgatggtgcttcccagcctccaactgctgcggcttgtcctcacctgcagaagatggggccaggtgggctagtcgttaaggggtgggcttcaggcctggccaccggctcatagagccaccactaagtaagaatgtacagactgtgtgaccagaggagacttgggaccagccttgggaccagccttgggactgtttttgtgtaggggctgctgttctcccattacctccatctgagccctcccagagacactgctgggagacttccttcctctaacgtggtgttcaggatgcttccctctgagcttcccatcgctagagccttccctttgggctccttggagtgagatgcaggctcatccatcagcttttacggggaggccgaggggagcggttgcaatgttgagtaaaggcttccttgtcattcctagtgtggctcctcttgtcatacatgacccagacccctggctgctcagctttgtaggcatccacacagcagctcaatcttcaggaaggcctgttcctgctgcactgcccgcctccttagccttccacgctgtgcagccaagcgggcctagtgtgatctttctctacacgtatgatggaagcactgatacacatgtgtaagcatgactccatgtgcgtgactgtgtgtgtgtactaaggccgatgtgggcacagatgttatgtgcatgggcacgtgggttatatgaaagagtggagacatggcagccatgtgcattggtgtacttgggtacacgggcacatgcataacatagtgtttgtgcgaacatgctgaggaagggtgtgtaccctgtactctggcatgtgtgcttgtgtaggtgtggaaaggtgtgtatcagtggccccaggcttagaatggttcaactaagaacttttgtgtttttaaagacagggtctcacttagtagc

SEQ ID NO: 20881 - DNA, 1177 bp, Mus musculus
atctgggtgtacagtgtcctgacgtgaggggccaggtacatgtccaggagcaggttatcctgcagaggagagctggtcagagacccccgaggtgtgcacacctagctcagttccagtgtgccttacccttgcgccttaccttcatctcgtccagcatcttcaagcatgaggcatacttggattcatagaatttgaagatgatgtctctgacctgtggctccagctccaggaacagcttgaaggaactgaggataccacaatgctcaactaagaagggacggaagggcctggctggacaagagaaggtgggagcccactacccaacttacctgctggagatgacatttcgttgcagctcctgccggtcaaaggtggctaaggcacacaggccaccatagacagccacattgctgggggacagcagctgggaggcagaaggggaagtgggtccagaaacctggggtcctgggccattgacgggcacacagaccaaggaggaagcccaaagttggggcctactctacctttcccactacccataaagacgatgcttagaccctcattgacgagaggttaaagcccaatcaatccacgagcgcgcgttcacttccccttacggacttggacaacctgaacagtgcctgcccctcctcacctctgggaagtcacagtgatcaaaggaagccagaaggaagcacttggctgcttgcttatacttccgtgcggccagctcagccaagcctacaggcagggaggaaactggtgaagctaggggtctggagaaggcgtgggagccccaggacaccatggccatcagtgggtcgcctctgggctcctaccccagtatgccccagtttagggacagaaatctaactgaaaacattccaagttaggcctacagggaattctcaaaatgtacacacacacactcacacactcaggctcagggaaaccagctcacctacttccccagaccccactagctctctctatgaacttgagcaagtgccacacagggagaaggagcgggagcagtggctggaagccttacctgcagcacacttgagcttggtgaggatggcttgcgtctggctgtcccgctctccccgctgctgtaggagaagacagcagatgtgagcccccaccctgcgctccttattcaagaagctctgttccc

SEQ ID NO: 20882 - DNA, 1198 bp, Mus musculus
gctggtttccctgagcctgagtgtgtgagtgtgtgtgtgtacattttgagaattccctgtaggcctaacttggaatgttttcagttagatttctgtccctaaactggggcatactggggtaggagcccagaggcgacccactgatggccatggtgtcctggggctcccacgccttctccagacccctagcttcaccagtttcctccctgcctgtaggcttggctgagctggccgcacggaagtataagcaagcagccaagtgcttccttctggcttcctttgatcactgtgacttcccagaggtgaggaggggcaggcactgttcaggttgtccaagtccgtaaggggaagtgaacgcgcgctcgtggattgattgggctttaacctctcgtcaatgagggtctaagcatcgtctttatgggtagtgggaaaggtagagtaggccccaactttgggcttcctccttggtctgtgtgcccgtcaatggcccaggaccccaggtttctggacccacttccccttctgcctcccagctgctgtcccccagcaatgtggctgtctatggtggcctgtgtgccttagccacctttgaccggcaggagctgcaacgaaatgtcatctccagcaggtaagttgggtagtgggctcccaccttctcttgtccagccaggcccttccgtcccttcttagttgagcattgtggtatcctcagttccttcaagctgttcctggagctggagccacaggtcagagacatcatcttcaaattctatgaatccaagtatgcctcatgcttgaagatgctggacgagatgaaggtaaggcgcaagggtaaggcacactggaactgagctaggtgtgcacacctcgggggtctctgaccagctctcctctgcaggataacctgctcctggacatgtacctggcccctcacgtcaggacactgtacacccagattcgtaaccgggctcttatccaagtaagcgtcggtgttggggcaagggggcttggatggttagggctgtgtggaatgcagaccttctgaggagcagtggacagcttgtggcttctgtcctgtagtacttcagcccctatgtgtcagctgatatgcacaagatggctgcagccttcaacacaacagttgcagctctggaagatgagctgacacagctcattctggagggccttattaatgccc

SEQ ID NO: 20883 - DNA, 3557 bp, Mus musculus
ctcactccccaaagcacctcacctgctgcctcccttgctcacaggccttgccgtgcagtggggtgccattggtgacgtgggcattgtcctggaagcgatgggcaccaatgacacagtcatcggaggtacgctgcctcagcgcatctcctcctgcatggaggtactggacctcttcctgaatcagccccacgcagtcctgagcagctttgtgctggcagagaagaaagctgtggcccatggggacggggacacccagagggatctggtgaaagctgtagcacacatcctaggtaagccagctttggggtcctgcccagcccagttgactaagtatcagctgtcccatctgtagaagcagaggacagagttctgtggtctgaatgcttggctgggtgattgtcagtaatgctggagagccacagcatgtacctggtccccatgtccccttctacataatggccacttatctccttcggcaggcatccgagacctcgcaggtattaacctggacagcacgctggcagacctcggcctggactcgctcatgggtgtggaagttcgtcagatcctggaacgagaacacgatctggtgctgcccatgcgtgaggtgcggcagctcacgctgcggaaacttcaggaaatgtcctccaagactgactcggctactggtgcgtaccaggcagcaggctgagaaagtcctgctatgtcccatcaggggcagccagtagtggaggcaacagctctgcccttttacaaagagcactggggcctgtgcttagtctgtgtgcatgtcctcacgagcccacaagccaaggctaccctgtctcctccgtctttacagacacgacagcccccaagtccaggagtgacacgtctctgaagcagaaccaactgaacctgagcacactgctggtgaaccctgagggtcctaccctaacccagctcaactcggtgcagagctctgagcggcctctgttccttgtgcaccccattgagggttccaccaccgtgttccacagtctggctgccaagctcagtgtgcccacctacggcctgcagtgcacccaaggtactgtgcacattgcggagcagtactcactgcctcgggccttggtaccccgctaactgctaagctattctgcttgttgttctagctgcccccctggatagcattccgaacctggctgcctactacatagattgcatcaagcaagtgcagcctgagggaccctaccgcatagctgggtactcatttggagcctgtgtagccttcgagatgtgctcccagctgcaggcccagcagggcccagccccgacccacaacaacctcttcctgtttgacggctcacacacctacgtgttggcctacacccaggtgagagctgggccaactggtcctaagtgttgctacctgtgtcttggctttgaattcacttctgggagggtcctggttccttcagcacttgccacagcaatctctccttccctgacagagctaccgggcaaagatgaccccaggctgtgaagccgaggccgaggctgaggccttatgcttcttcataaagcagtttcttgatgtggaacacagcaaggtgtgcctggagacaccctagagagggcagggaaggcaaggctgggcggagtggggtctgtgtgcctttaaagtggaccagggagatctgagtgcctcttcagaaacccatctgctcatgaaggcagggcagactgtgtggccccgccccacatgctcagaactgtcacccctaggtgctggaggccctgctgccactgaagagcctggaagatcgggtggctgcctccgtggaccttatcactaagagtcaccacagcctggaccgccgagagctgagctttgctgccgtgtccttctaccacaagctccgggcagctgatcagtataagcccaaggccaagtaccatggcaacgtgacactgctgcgtgccaagacaggcggcacctatggcgaggacttgggtgctgactacaacctctcccaggtgagtggcacaggtgaggcaggtgtactcgcacaggtgggctgcttggtggtggtcacagaatgacacctgagtattttcaggtgtgtgacgggaaggtgtctgtgcacatcattgagggtgaccaccgcacactgctggagggcagtggcctggaatccatcatcaacatcatccatagctccctggctgagccacgagtgagtgtacgggagggctagacctgccgaccaccatgaagccacgctccacacctgccaccagagatgctccgatccccaccacaccctgagtgcaggaactggggagggtcctgctggtgggacccctccccccagtggcccagcaccacccgctcccctggtggctgctacaaacagaccatcacgcgtgtgtttcccagccgcgtagtggggttcccagagccactgacttggagacaccctggtctgtgaagagtcagtggaggcaggagccaaactgagccttttctaccgtgtggcatttgccacgctggtcgtttctccattaaattctcatatttattgcattgctgggaaagacccccaggggtgactcattccagaaccccctaaaatgggagaagccatgtggggaagatttctgggaaagtttctagactcaatacacaggctgctggctggagcccctttttgtcttgtcctgtccctgctcactgcagggcaggatatggagagggctggttcccagggaacaaggaccccagcagacactgtagcccgtggcccttggtccccagcatccccggctgccccatgatgcagggccatcctgactctgcggaccgcaccgggcactgactgtctgttttccaagacgaaaatgatgcttgggttttgacttttctgcagctgtcagtgtgaagaagtgtctggactgtgtcatttttacaccaacctggtaaaaatgctgctcttgatgctctcctgatcccacaattaaactgcacgtgagcgagcactgccttcggttcagtctctttccagtccaggcccggcttcaggctctgatacttatgggtattccccacaagtggcctccacagctcttccagtgagactccttggagggtgtgccattctgtcagtataaggggagtatgctaaaatgtgtttcagcatggagggctggctggaggccttgccactgtagtacaagcagaatttgtccacctttaagttgccctgagggcatcagcttagtcacagccccgccccagcggtagagaatagcatcatcctctacttgtagtcaactgagtgttggtgcaagccctctagagaaaaacgtaagcagtatgtgaccactgtgagaagcatgtccctggaaacaggtgacatgacgagagcagagggcctgagtcacacagaactgaccatgtgtgtaagcagaggagtggaggttgcttggaagaggaggatcaagagaaaagtaggctcagtttagtggacccacagtagcagccaatgtaattacattggcttggagctaaggca

SEQ ID NO: 20884 - DNA, 1173 bp, Mus musculus
gatcctgctggacgccctttttgaggaggccaatgacagctggcgggaggtggcggcactcctgaaggctggcattcgtgatggagtcgtgaagcccctcaagtgcacagtgtttcccaaggcccaggtggaagatgccttccgctacatggctcaggggaaacacattggcaaagtccttgtccaggtgaggtgaggcgaggtcctcgggcgcccagcccgccttggcctttcttagtttgttactgtgtgtggcgggcgtgtgtgggagggaggacagcgtggtgtaggagttggttctctacacacgcacgggtcagcaggcttggtaccagcaccttcagccactgctacttatctgcaggtacgggaggaggagcctgaggctgtgctgccaggggctcagcccaccctgatttctgccatctccaagaccttctgcccagcccataagagttacatcatcactggtggcctaggtggctttggcctggagctggcccggtggctcgtgcttcgcggagcccagaggcttgtgctgacttcccgatctggaatccgcaccggtaagcaagtaggggcggctggtaattaatgtaggcttccctttgatgggaggtgttctaggatgggctgcaggccacgcttatcctctggtgcagctccatagccctgtgtcccataggctaccaagccaagcacattcgggagtggagacgccagggcatccaagtgctcgtgtcaacaagcaacgtgagctcactggagggggcccgtgctctcatcgccgaagccacaaagctggggcccgttgggggtgtcttcaacctggccatggtaagaaaggcaggcaggactctgcgtacctctagagcctgagacccagggtagctgctaagtggggttagaacctcagagccgcagcaagcactaaaacctctgcttccaggttttgagggatgccatgctggagaaccagaccccagagctcttccaggatgtcaacaagcccaaatacaatggcaccctgaaccttgacaggtaggctgtcagtccctctgttgagttttacgcatgctcgcaatgtgtattggttcctgctgtgccacctgtggccttcgcactgccctggggaggttatgggcttagggacatgagagctgtctgagctgt

SEQ ID NO: 20885 - DNA, 1785 bp, Mus musculus
gcaggtaatggctgggtatggttcggccagctcagtacttaatgagacttcatacacgtaggaggagtgggagagcctgttctcgaggaaggcactacacctggtgggccttaaaaggtccttctacggtactgcgctgttcctgtgccggcgagccatcccacaggagaaacctatcttcctgtctgtggaggataccagcttccagtgggtggactctctgaaggtcagactctggggctgggtaccttgccttgcctggcatatgaacagccctgaggctgaccctcctttatcctgcagagcactctggccacgtcctcctcccagcctgtgtggctaacggccatggactgccccacctcgggtgtggtgggtttggtgaattgtctccgaaaagagccgggtggacaccggattcggtaggaaagactctgagaggtgcctacccttcctcctcccctccctccctccagtcttggtatccttactcactttgccccacaggtgtatcctgctgtccaacctcagcaacacatctcacgcccccaagttggaccctggctctccagagctacagcaggtgctaaagcatgacctcgtgatgaacgtgtaccgggacggggcctggggtgccttccgtcacttccagttagagcagggtgagcccactgatgccctatacctgacaggccaaggaggaggtgggggacaaagagctggccaggtaggcactgtgacacacatatccttgctttcttttccctcagacaagcccaaggagcagacagcgcatgcctttgtaaacgtcctcacccgaggggacctcgcctccatccgctgggtctcctcccccctgaagcacacgcagccctcgagctcaggagcacagctctgcactgtctactacgcctcactgaacttccgagacatcatgctggccacgggcaagctgtcccctgatgccattccaggtgccaaccaggatggggtcttgtgactgggtcgctgtggaagtagggaatgtgcctgtgccatagcagcccagcgagaaggaagttgtcctgcacagctcctggggcagagagggtccccagcaccagggctgtacttgcaccctgtgcccctgacaacctgtcctagagtggggtctaacgcgagcctccctcctgtctgctcaggtaaatgggccagccgagactgcatgctcggcatggagttctcaggccgggataggtgtggccggcgtgtgatggggctggttcctgcagaaggcctggccacctcagtcctgctatcatctgacttcctctgggatgtaccctccagctggtgagtgggtggctgcagttgggagatgatgtgatcttggttggtggccaggctgagtcgatcttgtgctgtgtaccctcaggaccctggaggaggcggcctctgtgcccgtcgtctataccactgcttactactcgttagtggttcgcgggcgcatccagcgtggggagaccgtgctcatccactcaggttcaggtggtgtgggccaagcggccatttccattgccctcagtctgggctgccgcgtcttcaccactgtgggtaaggccccttacctctcccaaacccttggagcttcttgagccccgtgccccaaactcactggggtctctcccctgacaggctctgcagagaagcgagcatacctccaggccaggttccctcagcttgatgacaccagctttgccaactcgagggacacatcatttgagcagcacgtgttactgcacacag

SEQ ID NO: 20886 - DNA, 1146 bp, Mus musculus
tgccacccaccgtcagaaggtgtacaggctgaaggaggacactcaaggtagctctggccctagctctatgcccttgcatcctgggctgggcattgcctacactaaccagcgtgtctccatagtggctgatgtgacaacgagccgctgtctgggcataacggtctctggtggtatccacatctcaagactacagacgacagcaacctcacggcggcagcaagaacagctggtccccaccttggaaaagttcgttttcacaccgcacatggaggctgagtgcctgtctgagagcactgccctgcagaaggagctgcaactgtgcaagggtgagggtcccaagccttctcccctcctccttcactctctgcctctgaaactcgccagacaaggcctggacagtggggagcttggggttgatgagagcagcctaccttccatgggcctccagcacaaaactactgcatccttcctttttccttcccgtggctgtttctgctgtggacaagctaggaagtgggccctggaagttggcgggaggccttagagagagaacataggcctttctccatcccaggtctggcacgggctctgcagaccaaggccacccagcaagggctgaaggcggcaatgcttgggcaagaggaccctccacagcacgggctgcctcgactcctggcagctgcttgccagttgcagctcaacgggaacctgcagctggagctgggagaagcgctggctcaagagaggctcctgctgccagaagaccctctgatcagtggcctcctcaactcccaggccctcaaggcctgcgtagacacagccctggagaacttgtctactctcaagatgaaggtggcagaggtgagtgctggaaagaaggtggacaggccatgtgcatgcatctggggcagtctcgggcccgaacccgaaacaggcagtcgtgatgtagcagcttactgtgcctttgtgctttggtttgttccaccctaaaagactggaaatattttcactgctaccagcccaggggatgagatatcagaagtaaggcttatgggaaagaatcctgggatgctttgggctctcagctggggtgtcataggcagagtctacaggagagtagagtagagcactggtagagcctcctgg

SEQ ID NO: 20887 - DNA, 1186 bp, Mus musculus
gctctctttcttcttcgacttcaaaggtgggtgggcagcccagccttgggcacgggcccagctgcatgagtgcattcacctagacaaccctttaggacttccttattcctgggggaacgctgagtggggtactcaaggccccagcggggtgcggggggtgcggtgtgggacagcatctgcccttgtccacaggaccaagcattgccctggacacagcctgctcctccagcttgctggcactacagaatgcctaccaggccatccgtagtggggaatgccccgcggcccttgtgggtgggatcaacctgctcctgaagccgaacacctctgtgcagttcatgaagctgggcatgctcagcccggacggcacctgcagatcctttgatgattcaggtaagggtggcctggggagcgatcattaggctctgctttgcagggctccagcctgtaccctgagtgtggtgtcttggcttctgatgggcgcacacatgtatagactcacaacacacacaccccatcaccccagagcacctagctgaggtgttgacctaccctagggagtggatattgtcgctctgaggctgttgtagcagttctgctgactaagaagtccctggctcggcgggtctatgccacgattctgaatgccggcaccaatacagatggcagcaaggagcaaggtgggcatggagggaaaagaaagagcatggatcataagaaatggggaagaggggcatgcaaggcttcataccataccgtaccactacccatctaccgtaggtgtaacattcccctctggagaagtccaagaacaactcatctgctctctgtatcagccagctggtctggccccggagtcgcttgagtatattgaagcccatggcacgggcaccaaggtgaaagccctttctgacccatacctgtgactcctctacccttgttagaggtccttccggctgcagccttaacctactctgtcccctgcaggtgggtgacccccaggaactgaatggcattactcggtccctgtgcgccttccgccaggcccctctgttaattggctccaccaaatccaacatgggacaccctgagcctgcctctgggcttgcagccctgaccaaggtgagcagactgggctctgggtcaagagtccctgttatgtggatagctgtgtagtgtaaccatt

SEQ ID NO: 20888 - DNA, 1159 bp, Mus musculus
cgtataggtattatgtttttaatctttaccaatataaattttaagatttgtatctttaataaaaatgtcttggagctggagagatgactcggtaattaagagtacttgtttctcttccagaagaactgagtttgtctcagtcagctcatagccaactgtaacttactgtagctccaggggatgtgtctcagcttactttctattactgtgaccaaactccagaaccaaaagcaacttggcaaggaaatagtttaattggcttctgagtcccagtcctagtccctcctaaagggaagtcagggcaggaacctgagagccagcccctgaggcaaaggccatggagtgagggacattgctcccagtgtgcttcttgtggcttgctcagttagcttttgttttgttttcttaattgatttgtattttatgtgcattggtgttttgcttgcatgtttgtctgtaaatgtgtgcatgcctggtacttgtggagatgaggagagacatttaatcccttgaaactaaagtcccagatggttgttaaccaccatgtgcataggtcctagaactcaaacctgggcctctggaagagcagcctgtgctctcttggagacagagtctcctcctgctcatgggctgttgagccgtctgtctcctcagccacttgtcatatacagtccaggaccacttgccagagagtgggtgtggcgcatccacagcgggatgggtgggaccctctcacatcaaccattaatgaagaaaatgctcccatgacttgcctgtaggcctcctaaagtgggcatttttctccattgagattctccttgccagatgactctagccaacattaatccacacctttcctttctgtttcccgactgttagtaaatgtgtccctctgctgctctgtgcagctgtctgagggacggctgtggattaggattagactaggaagttgtgctgtgtgtccctgagctctgctcatgttaatatcacaatataatatatattccaagccaggtggtggtggcacatgcctttaatcccagcactcaggaggaagaggcaggtggatctctcttgagttcaaggccagcctggtctacaaagctaattccaggacagcctgggctattacacagagaaaccttatattgaaaaacaa

SEQ ID NO: 20889 - DNA, 2014 bp, Mus musculus
catgtctgaggcacttcctcaatgccaggagatggagccctggcccagggtggaggcggggcactccctggagcttctagtgaccctgggtcttctttgcaggcaagctgctggatgcaaccaaagtttacaagtatgtgttcatcctggcgggggccgaggtgctcacctcctcccttgtgctgctgctgggcaacttcttctgcatcgggaagaggaagaggcccgaggtgacagagcctgaggaggtggcctcagaggagaagctccacaagccccctgtggacgtgggagtggactcgagggaggtggagcacttcctgaaggcagagcctgagaaaaatggggaggtggttcataccccggaaaccagcgtgtgagcagcctggccgggcgggcagggagcagggaagaggtccagagactggcaacgctcatatttatttcacaaacaggaccagctgagggcgggcggggccatcggctcagctcttggctgcctggtcagccggtcagtgttttgcggggagaggtggcggggtgggaaccgcgtcattccaaagtggatctgcggtgaagccaaggaagccccatagttatcagccacctaaaccagggacccagcctgctgagcccaagcagcctgtggctcccccgccccctccccaccctccatccccactgtggccaaggacctagaaacccacacttaggagacaacacgactttaatcagagggcagggctgggacaggctggcaggtggacactgcctgcagggtcttccctgatcccaccatcctacctacgccccccctcccctcagccctagtctcctccattgacagtcatccatctctgcctaagggacaaagaaatccttctacctgagaaggcagaaatagacctgcccgtgggaggagcatcaaggggcctgtctctaggagctgtgtggttctgggcagtggtctgttcaccctgagtcccaccctttgttaaataacaaactgctgattcttaaaaagtggttctggccctcattagctcttccaggtctgcctgctgtaacattctctgctgcccctagggtttgttcaatagccacagcattcatacagcaggaagaaagggggagaggggaatagcaagggagggagccccatgctagagaggggtgcctgggtggcatttggaggccatggggaacccccaagggcgagctgaagtatagcataagctgttcactgtgtgtgggcttccaacctaagtttcctgccttctgtttattcgaccctctggagggctggtaaatttctctatgtggtcagcacctgctgacctctgtccagcccatgctcagctcgggctcgccctgggcacctcacacccacctgccctgtggccggtggcggcctgtgtggctggaagcccggtcagaggccgctggggccgcctcagtaggtggtacgtcgtgggcgctggggtcggcagcgggcaccttggcgggccgcgtgcagccggagagacgccatgtccctgctcctctgcaaggaaaaggaggcgagtgctcatatctgggcccagcctcccatgccccatgttgggtctggccctgctcactctgggatgcctctcccatctggtctgttctctgtactaggaggtcagttggtgggcactgcttatagcagcagcagtcacatgcatcctgggagtctaatttgccaatctcaccagactagtggcaatggcaaggcttcaagataggccgagccccagaggcaaagtggtgataagtgggtagcattcttgtgcagaggcactgggcctctccacatcactgctctgcgtgtccccccccaccccccaggcttcaggcttcctagttctagacctggctgtggagagtggatcttggaggggaaggctcctagagctatctgtactgctcaggctcagcctggatgagagcagtaggctgtgctgcacgcccccctcccccctgcttgtgtcac

SEQ ID NO: 20890 - DNA, 3861 bp, Mus musculus
cttttctaaagcatgaagttaggaaacagcaatgtcacttttatcaagggtcatgagaggcagatgagctgtgcactgtgtggagagacttgccgtgagctggagtccccagagtgtctgtctgtgtcttgacctggtcaaggcaagggacacatcaggactcaggctcagtacaagcagccaggggaccaggacctcatgtgctggtgtggccagcaggacacttaccaacagctgtcttttcccccacctcagaatagcattcctttcgaacaccacggcaagtagctgctcgtctccatcggaaggcagcactgggtgagtgtgctcgtggtggggctctgcaagtagcaggtgccaggcaaggtgggaacaactccccacccatcatctgggctcgctggtgggctgggcttgcatgccaaatgctggagatagagtgaggcttcttctgcttgtttttctttgtgtgggtttggagtagttatggtgagctacccagtctgggggaatcagtggcatccttagaatctctggactgagtgaccttagagaaccatcctgctgtgcctttgtcctctgacctcctgtaattgtattcagtatgctggaactgcccccagtcctggctctgggccaagcacatgtgtctgttgtactcagctgagtggtccatgcttggtgttgggctttcttgagctcttgctacatgcagactcccagtggtctgtgctcatcctggcttttttagtcatccctcttcctctttcatttatctttgtcctcattttgtgtttctttccaaacttggtacctgcccagtcatcttgtccatgcagctgttgtctgtattaatccagccacagccgcctgctaccctgccgtcagtgcatggctgggtgtccacgctgagctcctttcttgttggccacatggtatttggtggttccttccttccatcaggggcttgagctttggtgggggttgtgctgctgggagatctgctttgtttaacacatatgtgcactcttggaagtgtccataagaatttttccgtcttccctaaggggtgtgcctgttctctctaggaagggaggctgggagcaagtgtcgctgctccactcggatctacaggagcacagctctgcagtttctttgcttgcatgccctttcttccccatcttcctgtcctggctagaggcctttctgtgcagccaggggtgaaggtgtttagattgaagccaggtggcagtgtgtcccttccctcccaggctctattgtgttatgtgcacccaaatgcctggctggcctattcctctggccttatgctgaccttgtactgtgctttggctccgacagattcccggtcgggtggcttccagtggtcttcagtctgtcgtgcaccgatgagaactctcctttttgctgtgaagggcagacaatgcatggctgatctactctgttaccaatggctttactagtgacacgccccccggtctaaacctgaaatgttaacgccgggagctctccaggccactcacccagcgatgcacatggggaatcaaaacacaaactaaatggacaggctccaagagctgccatcgccaggggctgccaccgtggccccgtgtgagctcagttatcatggggctgggacgaagagcagaggctgggagaccattgcagagagaacccgactccctgtgaagagcctctcagctcccaccagtggtggcggacctgcgctccctgatgatcccaccgcagctaccagtcttctacttggttaagacagttttgtatcattttgctaaaaattactggcttaaatctgtgtaaagaaatctgtctttttattgtttctttcttgtctgtttttgcggtcttaaacaaagaaggatgttgaccttaaagaatcctaagacacgctggcttggagcttctatgtaaaatggaggcaggcaagagaggggcacatgtgagtgttgaggatgtgtgtggtgttctgttttgttttctcatgttgtgctgttcactttggaaaggaacttctcatcagttgtgtatgtgtgtgcgtgtgcgcgtgtgcgtgtgtgtcttgtggctcccatcagcctaatttgggcatcttgcttactctttcccactgtaaactgatagcctgcagtcatcagagcaggtacaactgccatggcgtgagggctcacagttacagcctcagcaaagcaccacggcctggcagtcctcccaaaggaggcagaaggaagtcagagctgaagaacccacatgctgggacggggggcccctctaggctgctggagagctccaagattcaaagctgagcttgtgtttgtggtttctagggagaggattgctgttggtaggattggtttcctctatgcctttgaacttgggaagttgcagaatagactgaatagtctcatgcagatgccatttgggtttgtcatgggctctctgctcagagccagggagctggctgtcctagaaacacaccatggtttgcccagagggaccagtggccaaagggaatcaaccctgaagtgccaagaagcaggtaactgcctatctgactctaaaacaaaccttcacctccacatgctgcgtgacctccagaaaggtgtggtgccacacactgcgtggtcttcagctggacacactgcgggctgggctgctctgccgctggcggttaggatgccaccatgctcttccccaccatgtgcaccggatatgaagagacggcaggacctgagctccccatctgagaagtgggtgcagtacatgtgtgtgggtccatctctgattttccctgtcagcctatggagagttatgctggttacctcgctcccttggaggtttggctctaatggtgccaccatggcttctcccttcttcccagagttccctggctctgagcactggcccggggttgggagggacacactgctgatgtgtgatatagcacctcagaatgtggctgttaattgtgcctgccagccatctgagcctgtgggtgctgatttctgaatcctgaactggttactctgcaagcattttagggtgcagagacttgactccgtgggactgtgtgtctaggagtgcagagggaggttgggagggtcgggcgagtttgagatttttgttgcaaatcctttatcagagttggtcctcccctctccagtggcaggcctgcccggcaagtgttcttgttgatacctgtggttctggaggggtatggggtggccttgagactaatccaggttcagcctggccctgctgggttgtgccgagactaggaccattggaagtcctccagggtgtgttctgacggttcttgcccgatatgtaatcccatcgtcactcgcaggaagcgtagttagaatgtgtgtatcaacctgtgtcttggtgaccagtctctgagctgtgcgtttgtactaccactgtatttgtgtactttaacaattgtgtaaataataaattcataatgacttctacctttcttccctcccctttgtgtggtctttctttcagcagcatgtgtaagctacatgaaagctaacttggtgtgggttggggttctgaggttgatagtttctatagcttaggctggcctagaactgagcaatccttttgcatcagccttctgtgtgttggttttacaaacccaacagagtcaactttttcaggatgacattcctgcttgtccatttgtgggtattgggaagctagtggagtaggtgccagaaagatgatttctgcttggactctggtgtcatgagtagatgtgagttcccttagtgatgttgtgacagttctgtgagccctcctaagtacataacctag

SEQ ID NO: 20891 - DNA, 1197 bp, Mus musculus
ttaccattggcctgtatgtagaaaggctggcattgccatggcgtctgaactctgccttgctctactcccggtcttaggcagtcttctttcctttctctaatgcattcacatgccaacactgataggtagggattaaggtggcaggttgtacctgtgagttctagtatggtggagagtgcagagggactatggccttcctggtactgtgcaggcatcattcctgtgagagcatggactttctggtgtcgctgcctgctgtaggagacttcaaagggcactcttctcttctccttttgttttgttttgttttgtttaatttatttattttacttatatgagtatactgtagctgtcttgagacatatcagcgttgatttccattacagatggttgtgagccaccatgtggttaccaggaattgaactcaggacctctggaagagcagtcagtgctcttaaccgctgagccatctctctagccttttaaaaaaccaccaaggctattttcctcctgtttattctaatctttcctcatcagggtgccagccgggctgcagatgatgctgagcgggaacgccgggatcgagaagaacgattaagacactcccggaatccagccactcgtggcctcccttctacagcttccggccgtctgcggggaacccaggaagtggctcccccaacgccccttacccctacctcacacacgggtaagcacacctcttactgtgcttcaccaaactaggacctctgtttgctgtgttgatgaattgctaaccatcccagtatgtgactggattagtcagttaaggccagcctggtttacatagtgagatattgtctcaaagaaaagaaagaaatttcccttttataagacttgttttaaagttaatttccctgaaagttgttgctcatggggctggagagctcgctcagtggttaagagctctagctggtttttgtagaggacttgggtttatttcctaacacccacatgtcagtttttacactgtctctctagttccaagggaactgacactttcttctggattccttgggcacatggtacagagatgtgtagggaaaacatccacacacgtaaatttttttaaagtctagctctcatagattttctcaaacttttgaatactcggggctgacttttatattgataaatgtagggccttagaatgcattc

SEQ ID NO: 20892 - DNA, 1231 bp, Mus musculus
tggcagtggggacctgccactacaccacatcatcccactcccagtccctaagcacttttgcccaggagagactggaacgaggcaggactgggccttgggaaatgacccctatggccgggaggcctaagtacatctaaaactggctgtctttacctcttctacctcccagagctattttcctagttaatgctcctgggatgagaatgctcgaaataactaaattttgctctgtagtcttgactgtttaggggatgtggaaggtgctggatatggaatccaaggcctcacatgttctgtgtaagctttgcaagattctaccattgagctgtacctctacttagatgctgaatttatttttcaaacagtctcccaaaggccagatatgactagtcttcagattgtgtctctagtgtctttagtgtatggcatgtgggaggtgaactggatgaacttggccacagctggtagctccaggctagctttgagtttcttgtttctttagctgaatttgccacatacctgaatttctgccgttccttacgttttgatgacaaacctgactactcctacctgagacagctcttcagaaatctgttccatcgccaaggcttctcctacgactatgtgttcgactggaacatgctcaaatttgtaagtggaattgttagagcatgaaatgacaacagcctggtcctcaggacactggcgctggtggctgggctgggtctgtatgtaaagctttgctgtctgcaagactcgggtttgcaagtcacagtagagttgtgaaagccaaacacactggtagaactttggcctacagatcactttgcctgtgggttcagagtactgagaaggaagatgctggataaggcaaaaacttctatagcaaatggggctggagagatgacacagtagttaaagccacttgctgcttttccaaaggacatgggttcatttctcaggacaactaggggatccaattccccttcataccctcttctggcttctgtggttactgcacgccggtagtgcatttacttaatgcaaccaaaacactaaattaaaacaatctctggcatttatggatgtgcataataagaagcccaggaagctgtggtgaaggtctgctcagagtcagctccttctggattggtaagtcctccttagttcttagttgaaaggcttgcctgctgtccttcctatattttcctcctttctttaatttttaagg

SEQ ID NO: 20893 - DNA, 1371 bp, Mus musculus
gtgtccgctgggtcgtaaggactcaggtccagcactggcaggtgttgctggaccctggtgagatgtgggtggcccattttcggaaagaagttgggcagcacggcctgtaccatcagagcctgaatccctggaggctgagcatcctgacagcttcagaattagggatggagttattgcctgccacctgctacctgtggaataaaggcttctgggtaggttccttcttgccctggcacattaacatgccagagacctggagctgggagccaggagagaggctgtttatcacagatgctactatttgtggtactgactaccaccttgctcagtctttccttgattcccaccccaccccccaccccctcctgacccttactccctgatgcacattcctgagacactaaagctcagacattccccagggccctggggactgtgaagagcaagaggttgcctgttctgagcagctcaggggaacagttggtccaggacttgagggggcatcttgaacatcctgtgagcttatgaacctcagagggaagtctggcatgttcgtgtcagtgttcagtgtttggtaggtgaggcctagctgtatgtttagctgtatggagtgttgtgtggtgggtgttatgggggctccggtcacagatctacgtatgtatggactctgaggcactagttgaccttactgtcataggggtcatatgcttactgtcttagggtcaagatacctgattttagggttcactgtttttgttgttttactttgttcgttactcgtgctccttttgagggcttttgttgaataaagttggtgttttaaattttattgttttatgtgtatggttttgcctctacagtaccggcttcacacctgatacttgcagcagccagtagagggcatcagacctcctgaagccaaagttactgacagttttgaaccaccatatgggtgctggaaattgagtgtggctcctctaggagagtaaccagtgcttttagctgcagagccatctttgtagcctcagttttcagtgtttattggaggccttgtgcagttttcctgagtgggtcttggtggagtaacctccccaacttctgggctcgggcttgtgggatggtatcccacagagctgggaacatggtacagtgggttttgccctttcctgagtcctgtggggagtttgtagtatgtcctgtgacagtctacataaccagcaagtgctcaagggtttaaaatgagaaagagccctgtgtagaagttgtatgtcgtcatctagttgacgtaagtatgtgccctagaagttggaagggatctgtggaccaatccatgtgtcagatctactactatgagccagagtcacacctcag

SEQ ID NO: 20894 - DNA, 1190 bp, Mus musculus
gaacctgatggccctggtggccagagttgacagtgtggactggctgcaggtaaatgccatccacttctgatgcatctccaaccgacttgacaattgtaagggtacaggcagatcttgggcacctgcctgtggctccttgggcagttctactatgggccacctgccttttgcttgtttatgcttctacactttgcagaaccttgggctagacctctgccacaacccagaaaggttgcatctatcaggatgcagggtgtggatgctacatctagggggggcaaggtctcagaaatgagtgccttctccagagttacactgcagctctgggttgggcagcacagcctggtctggataagctcacccaagggcaatctgaagcagaaaatgccaagctctcttcagcataggcctagtgcctgccttggagacaccttgccactccaggctactgtaagcaagactccattcctagtgagtgagacacctatatgcacgtgggcagacacactcctatgcacagtgatgtctgttccctctgaccatccctcaagatggacactctcagtggtcaggggcttccctgaaggcaactctggatgctggacacctgaccacagaactctcagaggaatccgagtgctgctgactacccagttccttcttagaccatgtgtctgagagcccagcagtgttggagcccagctgtcaggaatggaaggctctcccaacccagcctggaaagaaggtgctagcagaggaaagatcacctctcctggcatcctgcagcctttaagacctgggggatcccttacagaaacagtcttagcctttcgagccttgaaaagacctgaagaaaacaggcatgtggagacacagcccaataaatcccagtgttgagaactgcagcgggaagaacgttcaaggccagcctgggccatggcctcttctaagaaaagttggtaccaaccactaatggtccttttctgctcttctagtctccttctgggtggactcaagttgctcaaaagtacattgtttactaagttcccagcctggcctctaggcctggaagctgtggctctctggcctaacacagctcctcgaagcctcatacgcatacctcatcaggcagaactggggaattgaagttacatagacaaaggccttgaggccactgtacctaagccgag

SEQ ID NO: 20895 - DNA, 1180 bp, Mus musculus
tgacctcttatcatttcctgaaaattacagatctagccaggaggcggtggcacacacctttaatcccagcattcgggaggcagaagcatgaagatccctctgagttccaggccagccagagctacacagagaaaccttgtctggaaaacccaaaaaaccccccaaaaacaaacaaacaaaaaaacccaatccagatccactcactccccaggcttctaaaccacgcccatatcctgcttaactaggaaacctccttgagtgacatctttcttggttggccaaggggctaaattcaggtgccctacctgtccctgtccccaggagtgtgaagcacaaaggcacaacccccgactgcgtaatcactcagtctccacccctgggaggttcccacccagctcttatcccggaagtctgcggaacagaagtccggaagttcgaggggctgttctctcccactcattctcctacaagtccctcgttgtccgcataggtgcgtgtcctacaacttttcgggttccgacccgccgagccctgtgcgggtcatcgcttgcggatctggaccaggcgcaaggcaaattgaggaagccgggcgtgtgcactccggaggaggagccagcgtaacgggccgctagtggagcttgttggtaactgaagccagagggaggcaagttatgtgcctaactaggattcttgaggatgtagggtatgaagcttgattgcccctgggaatccaaggagccactcagaactggggccttgggtgttaatctccagacgtcctgccgcagtgtcccattaattcggcgcatttgggccattgttaggtagtctggcgtcaataacagggatctgacagcttatgaatgtagagactcatacacgatggtactttcacttcccgttcttggtgggaagagttgtttctggaagattcgggtaaggtgccggaagcctgagttgtgtgtgtgtgtgtcggggcgggggagggggagggggcttactaatggaacaacttaaagataagagttcagtcaagaaaagggttcacaagactgggggcttggaagtgagttcagaccaacaccaaatttgtgagctgtgtagccccgatgcccatacataattgtgagttaagtgggctcataagagaaaggtgttcggggtctgctgtggaccttcc

SEQ ID NO: 20896 - DNA, 1194 bp, Mus musculus
gaagaggtccacttgtgtgtatctttcaggttgcttaaatggcagaggccaagcacagacagaggacggccacacagatcgtgcactgctgcagcaaatggaagggatctactccggcatccctgtgcggcccccagagagcagtacacatgtgcaggagttgtaccaggagtggctggagggtactgaatctcccaaagtccaggaggtgctgcacaccagctaccagagcttggagccctgcacagacggcctggatatcaagtggtgacaaagcctgaagggcaggaggggacagctctgagtggagagtggtgggtgcttcaaggaacaacaggtccctacagctttgccagcgcttcaggacacagttttcatgtggtgctatctttgtagtgtgtgagggagtggaatgtttgcacatgggagaggtattttccctctctgcgtagcctttcatcccaagattgtgagaaagatcccaaagaggccagggacagatccctgatttgcaggtttaaaaaaaaaaatcaagatgtgtttttagagaaccaagacccaggggttgtgatccacgagcctaagattattgctgcagaaatggaggcatcaggaaggccaggctgctgtacagtggataactatggccttcagagaggcccagtcttctggcccaatttggctctttcatttgtatacatttttttaaaaataattttgaattctagggccagcaagatggcttattggtaccaccattagtttgatccatggagcccacatggtggaaggagagaccaacgcctacaagctatcctctgactttcacacaggcacatggcatgcatatgtaccaccgagaccacaccccgaaaataaccgtaaagaaaattacactagttttaagtcatagtaacagtgagccatattttttatagtccttgaaggccggcagtcattacagccctgggccactggtgtgcctgagtcattcttttacttgacctgccatcagcgttgagctggactcacctcagaagaaaggctgctgagaatggcatgcatcacaccctgcatttgatgcaatgtatatttaaaaataaacaagtagagaattaagagggtggcccacctaggctttggggttctaagggtggtgcagctcatagttactgctgtggggccggaagacag

SEQ ID NO: 20897 - DNA, 1117 bp, Mus musculus
ctcatgtcttggtcttcctgtgagtctgtctaggagtgtaactggatatgttattgtaaaccagtggttctcaacttgtgggctgtgtccccacaaaggggtcacatatcagatatttacattataattcataacagtagcaatactacagttatgaagtagcaacagaataattttataattgttgggggggtcaccagaacagaagaaactattaaagggtcacagcataggaaggttgagaaccactactataaattatgattttttttttttttttgctttcagtctatatgccttgggtatccatccccaaagtaactggttatggaataaacaatgcaatggggtcttgagtgtggcattgaaggagtcagctgttctcctgtcctggactacaccccgcagtccgcctccctcaccaggccccagcctgggtgatgatacctttttcccagtccctctctaataggtcaggagaaggttcagaacacggggagtcagcgtgggaagggactgacttcctgcaaacttcatggcaccacccatgatagcaacataggctaggggctaagatgtgagatctatgaccttctgtttcactgatgctaggccgtggccctgtgagcttttcaagactacaggtgcctttctgtcccagcacttggagccagaggcaggtggatctctgtgaattagaggctagtctaggttacagagtgagttccaggacagtcaggaatacatagagcaaccctgccttatcccccaactccctcccccctaaaaacaaagcccaaagcaatggaagtatgaagtgagcaagttcttgacagacaggacccagtcaaagcatcacgacagtcagagtggacaacgtacgctggtgcaggcatgaggggcataacccaagctcctatctgcccagtgctctgttgtaccatgcttctgctctgcttgggcagaggcccaatcttagtttgattcctacctggcccgagctgtatgggtttgcactactgtgggtaaccgtgcttctacatgatgagattctgtctcaaagactaaatttggtttctgttacaggtaatttagaaatagttctgtcagggcttgt

SEQ ID NO: 20898 - DNA, 1219 bp, Mus musculus
gtgaacagttctttaaagtgacttccagttttgtaaactcaagatttctcatttgcctgattttaaaaccatatgtttcacattcattaagaatgtttttaacctgaaagaaatgaggttattagaagccttaaagccccacagtctgctcactgcggagtcctgctgactggttccttagaaacactgctctagagggtagcagccttctcatggaactgagcaacctgtgtggcatgcgtggcctagcgctggtactgtccattgagcctcactgggtctccacagagaaagtcagccacacagacctgggctcagttggcaggagacagaggcttccctttataaagattaaatgaatggacacatcctttttagagcatcactgtaaaatacccctgtcttcttttggtgacccaggagtgccccagcttctcccaaccatgccggagtgctgtctgctcactccagtggcgcccagacccccgagagcctgtcgagggagggctccccagcccccttggagcctgagcctggcgcctcacagcccaagcttgccgtcatccaggaggccaggtttgcccagagtgcaccaggtgagagagaccccaggagaaggaagaggggcaaaggggctgggagtggggccagacagagatgcctgcatttggcactttgtgtaagtacctgagtgttgtgtggatggaaagttttggaaaaaccggtggcactgggatttttttctttccttttttaaatcggcatgcaggtgtggtagtgagtgactatagtattacccaagaggctaaggcaaggattgttgtgagtttaaggccagcctggcgtatatagtggaaccctgttcctaaaaacaaaactaaaaagaatcggtatttcttaatggctttcttaaaaaaaaaaaaaaaaaaaaaaaaaaaaaaaagccctttcctcaccaaaagaagttagagaaactaggcactgattggaacaaagatgtatcccatttagtgagtagatgaatatttccagtttagttgcagatccacaatatagaataaaatgtgtatcttagtaaagctagaagatgggcattctggcggctaggctcaatggcccaaagagaccctgccctgccacctgtctccagctgctgatgtccacttgctgagaaccaggagggcagtggctctgactgcctgtggctgtttctgagttt

SEQ ID NO: 20899 - DNA, 3648 bp, Mus musculus
ttttcttactgatgggaattgacctgccgcggctttggccatgtagggctatccctggggttttgtgtaagactcaagagggtttggcatgccagtgtggactctgtggtcaggggtttatgcagtagcgtggggttctgattcactgtgtccttcagcagcagcaagtcctctccatatgttggccacccatgcatcagcatcggcatccctgcccacaaagcgccagaacggtgaccaggcagagcagccagagctcaagcgagttaaagcagaagatggcgagagcattgtcattgccctgagtgtggatgcaccaccagcagctgtgagagaaaaggcaatccagaactagctgtgggagaccttttcttcagacatcaactttgtggtgccaaaaggagatgctgcctctcattgaagcagggagcgctgcctctctctcactgaagcagggagcgcatcctcggtgggtaaagggccctgcggttggacttcacctctcagcactgaaaacatgaacccaggtggccttaaaactccttaatttaaagacatcttacacttgaacagacccacaacagcaaccctggttccagaggtggtgtctccgacagagcacttgctgggccgttgtctgtgggctcagcttttactacaagcaagaaatccaggtcccaaaggactgagtctcctgggaggacgcagcacctgctacaagtggatcgcgctggctttcctttaggggacagggccacagccatctgctgccctcataggacctgctggctgtggctgagagacaagacagtgttttgttgttcacatacggaattagaatacttggcagtgtcctttctttactgaataatggggtctttgacatttcatatcactccatttctactctggaaatttgagattcatttgggggaaagagcgtcattctgtttgtttctgtggtttgattttagcccgtgggatggtttgctctagtctgtcctgcctgtgtttgggtggctctcccttaggacacctacctgcccgtttccgtttagagcagttacctgatgaatttgacctaccttgtgccattgtagagggtgggtgggctgaggctgcatggacccatgaggccagggggcattgggacaagagaccctgggagccttccagccgtcaggctgcacgcacgtacctgctctagcttgctgggtttgttgtttgtttctttatgtagactttgtccttggcgtaatttcccactctagtaaaacaagtctcctaaatattgtgtatgcttaaagcaacagatccctccctcctgggaaacagatccaggcctctgtcacgccttttcagaccaaggtcataaatctctctctcccagaacctggggaatcatagaggtcagctctggcctctgactggctatctgtatggcacactcgcagcaagagctggtggagagatgttgccagttaacttgagggtcttgggagtaagaccctgcagccaagtatcaagcattcaggccattttatgattctcaagaggtttctctggattttcagaatgacgtcccacactaatcctgacttatgtcacatagcaagtaaactaagagggaagggtgaggagaagtggggaggccagcagcccagcccacactcaggatcaccgctcacctttccagagcattctggactgagctgagcaacaggcagagggcgttagcctcattgtgaggtttttttttccctgatgtcatcatcataacgttatttatttaaatgtagttattttggtatttaattttttttaagagagggggggaaaccctgtattttcctggtagaatgaaatggctcagaatggtatatttaggcaatttaaaacattatttacataaagaccaaatatgataagtctgttctaagtattgcttcacccacagtatggagctgtcacaatgttactgcagatgatgcgtgttgacatggagttactgcacccaagctggatttatataactcagccacttaaacaataaaggtgagacatgatgcgagtgagaacatgtgtgtgcccaccgcagtctgcctcctccatcgtttctgcaggtaacctcggaatgtctgtctcgtaaaggtttgcagtttgcagagtactttaatttgggttatattgtgcccagcatgtgcatccagactatgggcctcagttaacgtggtacactggcaggccgctgccctagtcaagggtgggctcaggtaccaccaactggacatactgtgtatctggagatgtgtgtgtatagcatgcttgcccaggacttgttccctatgagtgagatctgcaaactcgttacctctgagccccaaacagaccttatgggtctgtaggagtttcttttggggatcatagaaaacatttaaagatggaaggaggattttttttttttctttaaggccaccttctcagtctcgcgtgagtgaagtgtgccaataggcacacacccatcttttctccttgctgctgtatcggccttgctgctgctttggtccataggaatgtaacgctgccaaggagagggcagaagctggacccttaggttattaactgagtactaaacccagggtttcttcccagtgttgaaggcactactttagttttatgttcatctaagttcccagaagcccctccatacaccagagctgggctcacgtgctttggccctcagcagaggtctgatgtgggaacgtactatcctgacacaaggagctcacagcagtccccagtgcctgtggcaccactgctaaatgcttatggagtctcactttgacctttaccaaacttctgagctccctcaggaacgagataacttcagcagcgtaggcttgaaccacaccgaccacaaagggaagctcacctgtgtcctgggtacggtgcattccagaatgtgtgtggcataacattgtatagctatttcccacactgtagaatgtgttcacagacagcagctggtctccgtaaataccccaccccacttccttgtcctctgctggggagctggtcacagagtagccgtagtagttcagaaggggtcggggagcatcaggacttgggttttctatgctgtgtgacacaaggagagaagtgacaatcgtgaaggccaagcatctgcagctcagaggaagcagagtgctgatctgtgtgcaaagatttggaatttttaaaaagtaccaagttcctgaaattcaataaaatatttttattaattttaatgaatacagagtatcattgtcttctgataagcagatacatctatcttactttttagcttgtgctggggagactggaccaggaacacagatgggcggcagcacaggctcccttagaggtgagggaaggcacagggtcttcatgatgctacggctgtacagtcaactgtgtggcatcttactgacattccgttgttagagttataaagtgttctaagttgtgattgtcccccactcccaccccactcgccctttgaggttcccaggcggtaacactcatcttccagctgctgtcccaggccacccacataaccaaataataaatctatgggcatggagtcagtctgagctacatgagacttgc

SEQ ID NO: 20900 - DNA, 2171 bp, Mus musculus
gttcttatagtttggcatcagccagtttccttccaaaatacttcagctccaagtggagtttttccaagtttcaggttccttcaggctcaccatgcatctgtgcctttggaacagagcccaatgcagtcattggtaagtgccccatcttgtgggaggcctcagcatgtggtccaggctgtaccaacttcccagattccctttcttccttctttaactgggctgggtcctactcacagcctccaagtgttcagggcactattagtacctgcctgccaggttcccagggatgctttgagagcagatgtgggcattgtgaagatgacccaaagactatttgcaaagtcaaccctcattggataagcatgagccttggcttggtgtggctagctgtgctcaggttgagtcatgtttgctttgattctgggaagtaaccatgaatcaatctggtctcctttcccagctatctgtgcagatggcagctactacaagttcctgttcagtccgaagggcgagtgtgtccgggacgtgtgtgcacagttcctggagatgaccgatgacaagctgtgactgtgcctgtgagcgcaggtgatgccaccacccagccgccctgtggactcctggggctggtgccagtgccccaggcctgtgggtgaggggctcaaggcccccctggaggaccttggtctcgaagccatacgtggttgtctgccttcctgagcaaggcttctcatcccatattaaaggatcatcatcatggttctgcagacactccgtggctctgggcggttcgtgcccttgctagccactacccttcaattcacctgtgatgctagcattaatggcaccaccatattcatgccagtaggctccctgcagtccttgggaactatccaagcacgaatcagcagaagcttgtaggatgagtgtgtcggggcttaaatactagacagttccaatgagataacactatcagcttgtctggtagagcaccccctgcctcacatggggagcactgttcagagcacacactggggagttctgactttggccattagagtgagtcacatcccagacctaccagagagcagaatgcttgtggcacccatttgaggcacagccctcaggatgcagggtgctgggtcttctggttttgtttgggttaaaacagaactttcccattatctgtagggaacagagtaacgcatagtctttaaaaatcagtcccagaagagagcattgctttactgaggggccttctcagtgcagtgtccatgtgcctctagctcccgttggtgtggagggtactgccttggcctgtggcgtttgtcctgtctcatctctcccagcatccataggaacacactaacattgggatggcaggcacatcctggtactggcacagactgaagagtctgtgtttctgtaccacttgaggtatatgtttagtttttttacgtatcttctaagaagctcagttttgcggttttgatttcaggttgcaaacatttaaattgtgcacagcaacaggttctcagttctgccagttcctttatgctcctgtaatcggctaactgtggatttgatgtcaagtatgcatgttaccttatgtgtatttaatcatgaaacttaatttttgcacacttgtttgtactgttttctttgaaataaaagtgactaattttgtcgtactctatctgtaaagagcagagccatatgtaatgtacccacaaattctctcttcctcctgtttatgtaatggtattggtgttcctgtacctgctgcaggacagacttgtaggctgttgacctgatagtagggtgcctgttatgtgggaccttaccagcatagccactgaacagagaagctgagtttgtaaggtttagggttagccagggagcaggtacagatgaaataaatcatgaatgtttagttttgggcatctctgccctgtgccctgccagtgctgtgtgccctggtttcatagaagtcagcatgctgccctggtagaagacactaatagaccgtcatctgtggatgttggctggtgtcactggtttgcgtaatatttttgcaatgttggggggcaggcggtgtttttctagcttgtgttcctgaaggtaccctaagagaatccatacagaagagtgggtcttcccacagtatgacttga

SEQ ID NO: 20901 - DNA, 1232 bp, Mus musculus
cttccctggcactcacactggccacgtacagcttgtggacctggccagcactgaaaagccacccgtggacattcccgcacatgagggtgtcctgagctgtattgctctcaacctgcagggaacaagaattgcaactgcatctgaaaaagtaagttcaggccatctatgtgagtctaattacaggacgggaactaggccaggccttcagacatcgtctgctttatctcctgttctttacaaaccagtttgttgttaaagcatgataaagatagaacgaacgctaacctaggtatagtgacacaggtctataataccagacagaaaggatattaagttcaagaccacttagtaccttagtcttggttgtctgatgacacgtcagaagtatctttcacacctgccgaagaatatttcctcattgaattatcacaatcttaaaatttgaagtattggccgttatattagttactttttgttgctgtgataaaacaccataagcaaaagcaaccctggaagtgcttctttttacttacacttccagaggggcaatccttaataactgggggagcatggcagcagacggctagaccagaaagcagagagaacaaagggtaaatgaggctagccagcggaagtttcaaggctacccccaagccagcagagtttcgggctacccccagtagtacttcctcaaggaagattctgtctcctcaaggttccataatctccccacatagtaacagcagctgggggccaagtgttcccactcaagcctgtggggaaacattgcttatctaagcccctataactatgtcatcctcattttgtctaaagtgaaaactgatcatttatacctggtttagattcagtggtaggggttgggggcagctcagggataactttgtgaagttggtctctttatacatttgtgtggtttccaggaattaaactgtagttgccaggtttgtgatgcaagtacctttacctgctgacgattgcacacatctctgaaaattgcatctttataccgtggtttccatttgataatacgtctagtatcactttgtctgaaactattaattggaatatatctattagtgggttcagcctcctgggagaacaggtcacagttgtggtctgccctgtctagttgtttcctgagctgtcacagacagcagtggtcgggaggagagaaaaagccaggcctgcttcttgtcctggttaccaggagg

SEQ ID NO: 20902 - DNA, 1193 bp, Mus musculus
tcgcgaggtctggggatcttttctgtgaggttatgtcctattatgtctctttggaaatttgtgtctgtgagaggacgtgtcagatggttgggaaagctcgggaagaaataggggatagtctgtctgtgtttgtctctcggggaaaatgcaggtaccattacacgaaggctgcttctggtcgaacacgatgtgtatcgtgggaacgcggtgagggtttcaggagactgtgttgtgggcaggagcgttggcgcagtctcttctctgccctgtccttggtcccatcagtcctgccctgcttgtgtgagtgcggggcacccagctctctccgcagcttcccctcggctgcgtcctgccccgccccttatggacgcgcccggcgagccctcgccacctacttcccgccacctacttccctgcagtggacgcgtctgtccctcggcgcttgctggttgcgcgcacgcgcgcccacagatccgcgcgcactgatgacgcagcactgacgacacacgcacgacgcaagtccccaggaccctggcttccggccgcggcggccctagcgccgcgcgaccggagagatcgcctggttgcgagcggtatgcggtgctgaggagccacagtccctacgacggcgccatgaacctcctgccgtgtaaccctcacggcaacgggctgctgtacgccggcttcaaccaggaccacggtgagaccccgggcccagctccgtggtaacaccccagcccttccgggagaccccgacccaacgctaccgcgaccgcagggccccggagctgtcgcgagcgtcccccggaccctaaccggagactcggtcgcgccctgagagctcagactctggcggctctttcaggaaatctccgaaccgctctgtagggaggaccccccccccccgcggtcctttccagcccgggcacccatagcggggagaaacacccaccccaccccacccctccgcgcgctgccgccgcccgggtcggcgggcagtgccacttttttaccgggtacctaagaacccgcaggcttactgctgggcgtcagggtctccagcgcttacgttgccagcgggtggcgtagcgggacctgcccgtcgcggggcggcagtttgtcgtggttcttgcggctggcaccttcgtggagtgtaggttcttcgccttgatgtcttagctgtacgcctctcc

SEQ ID NO: 20903 - DNA, 1364 bp, Mus musculus
gggtcaggtgacctgactccaacgatttggtcaaggaggttatgattcttcatagtcactctcctcatgaatccttcccatttattccatggtaggacttgcttaagatcccttgtttctttctctttttctcctcccttttttcctattctctcatatattacatcctgactgcagtttcccctccctctctcctcagaatctcctctgccacgccccccagggacatcaaccaagcacagtataacaagctacaataagccaggcacataacatcacatccaggctggataaggcaacccaggaggagggaacgggaacgggaacgggtcgcacagtaggcaagagtcagggacaccctccattcccactgttaggattcccacacgaacaccaagctactcagccataacatatgcagaggacttgctcagactcctacaggctcctgatcactgcaagcccccagtaccggtcagttgattctgtgggctgtaaactgtgaagtatgggttctctcagaggaaaggttatgaaattctgttgtgtgcatagtaagactgcctggctaaattaggcctcactggcgatagaacagacttactgaagtttaggtatagtgagccacactccactgccaaggtagagaactgtgagtgactgttggtgtggtgaagggtgttgaccatgcagggaagtggccaatgtgcccacttcccatctcttccttgcgcattgtcagcatttctgagtgattcacagtgatgttttatgatggttagacttctggacatggactcatcttgtgagaagatttgaataatgaccaattctaaaatcaataacgttccatttgcttatgtagcacttctggaccctgctataagctgagaagtctagaggttggtttggggaccaaccaagctaccaaccttaagggtaacttggtctcgatttaggagcctggaaatactccgttatacaagtttgtgctttctttctttctttctttctttctttctttctttctttctttctaatttgtttttttctctttctttctttctttcttttttttttttttttttttttttttttttttttttttacaagacagggtttctctgtgtagccctggctgtcctgaaactcactctgtagagcaggctggcctcgaacttggatatccacctgcctctccctcccgagtgctgggtttaaaggtatgcaccaccaccaccacctggttttatgttattttctaaaattgtcattcctttgcaacatatgagcattaatatcttttctcttttaacattgaagaaatgggaaatttcattaatgacattgttgttgataaatct

SEQ ID NO: 20904 - DNA, 1186 bp, Mus musculus
gtgactgtgctaggtctccaagaccgtggcaggtccgtggtgccctagaaaggcttacagggcacagcacagagctgcgcttattgtaacagtgggcttagtgacgtcttcgggcctatggtaggcactgggttggtgggaaggccacttgggtggcaggggagtatggttggatctctctttaattattacttgggatgggttcttgttatgtagtccagactaacttggatcttactatgtggtatagactggctttgaacttgagatcctcattcctcagcttcctgaatgttgggaggacaagggaatgagtggatgccaaaacgcttggctgctttttccttcccttccccttcccttcccctttccctccctcccttccagatcaggttttactatgttgccctggctggcctggaacctcaggctggcttggaacgatctacctgcctggccttttgagagcaaggattcagggcgtgcaccaccatacgcagcagctcccttttctattgggttcattctgactgtgatttaactccttagacgtgggaaacacgctacatgcttctactgtggctctctgtgacctgcttgatcccttttgatttttcacgccttgatgggaacctgtctactcaaactggagaaacacgagtacccaccatggaccgaattctgcaaatagcagaggtaacgatgggcacacaaacctttttcagttagttgtgcacttgtcttgagatgagagtttagttatatttgtttcactgacatttccgctttcagtgataccccagctttgaaactgtgatgttatgtagaggtcagatggattgctttagcaaatctcatttctttacagataatacaaatgtttgttaaacataatggtaatatgtaaggggtttgggggcaagagatggttagagaaactattcattttacatttaattttgaatattgtgtaaataatacataattgtaggaaatctagaaagtgaagataaaaatgctaaattgaaacctgtcaaattcttgcagtcttacttggtggtcagtgacaaggcgcgagatgcagctgctgtccttgtgtccaagtaagttttgttggctgtgcaggactgttgactgagatgtgactgcccattataagcctgtttgttttacatactggtgtgtg

SEQ ID NO: 20905 - DNA, 1211 bp, Mus musculus
gagggaagcaccttgtatcggtcctcacggggctcgccgcagggtagagagccaggcagaagctacctgcctcttttgaattccctttggaggtaagctttggttactgtggcataatgactcttaggagcgagttgcttggtcaaggctagtggtcaaggcttggctccaggtggtggtgcagtggtgaccatgagccacattttcattggctattcttttcttgttcccaggcaagtgggagatcccttttgcctgggctgaggccaaaaagccaagcaggtggagaaggcagccacttgcttgtgaacaagggtgaggccctggtgtctttcatgtgcacgtataggtgttgccattgccttctgttatgaagctttgctgtagaaggctcttcagaatcagggcctgcatctgacctaggttggctttcttttgaggtttgtatgaattgagatttccgctggcatcatgtatgattattctgagggatgctaagttgatgacatcagttaccaaaaattttattttcagggccaggctgaacctaccaacttgagatggttttgttgtgcataggtatcagcgtggctgtcggtctttggctgctaacctgaagctctgtgccccgggtaagagtgaccagaagctgctgtctgatagtttgacctctgatggtgatgaagactatgatgtcccagagggggtagaaactgtgataggtaagtggagcctacagcagatctgtgcatgcctctctctgcagtacagtctgggctttctctctgtttaccctcccttttttcctctcctggttaccttctgctacctcacctagcatgtggtcagtgactgacgtcatggactcttggtccagcagtaccacctctccactgtctcttcaccccgccctctagcctatcggacacctgaccttaagtttctctctctgggtgtcctcaggtacatggacttgaaccatgggaccatggttctctgcctcctccatattcttgtcttgtccaagcatgctttccttgggcatcatctcagaccactttaggtgtccatactgatgaggaatcttgacccagtgtctgttcccagcagtcctttactgtgcccaccctcaggttccctccctcttcctgctttcttgcctcgtgctggatgaagtgtgatcccgactgggaggcacaaagccagcggcc

SEQ ID NO: 20906 - DNA, 1146 bp, Mus musculus
aaataatactaaattagttaattctctttcccagcagacaagacatctaagcctgtctcacacatggcctcgtcagctgatctcagccaggctttcttctgctcccaagagaaaatgctgagcttaggaaagaggtgtttgagactggaatgaagtgtgaaccaggccgcaggcccctagaagtccctgccaccagggcagcacagcaaacctgcagacccaggcctggaaagtggctcccagtaaaggcagcagcctgtgtgctttcaagtctggctattacactgaggggacacatactaccatgacttggcttgaggccctggccacttcactgtgagctgttaccttgaattctgcccatctgcaacagcttaatgagcctcaggcatcagatacaaagaggcagaggaggcagacatgggactcccacagcaggacaggtaggcatgcaggccctgggaccagaggtgccattcatatgcccacagggatgctggcttctgatgatctctcagactgttgtagcattgttggtgtcttggctggccgagcacgtgggagctgcctgtcacttcatctgcccagcacttcagactacaccagggtctgaaacgcccctcatgctacaggaatcacacagcaaagcactgaaggggagagagccacagcagatcctccagctccttgtgcacggacgtcccagagataggcagaggctgggctgtgtgatacatgatttaatgagaagcacgtctgtgacagcaaacgtatgggcagtcccggccaccagagcaaagcacgcatgaggaattactgctctccagggatggcctcccaatgaaggtgctaccttcctcagatgtctgtggcaccaagtttccatgatggtaaagcttgttgtggagcctcagggcgagacatcccagctaggtaggcaaggctcagcttcctggaataggctgtaaagagacatggcaacatcaggctggttgctacctcaccctctcttgatagatggctaaagcctgccatgtcccagaatcctggcagcttgaattgtgtagtaatagctctgtggccttgtcagagtacattaataaactgtttgcatatgtttaaacttttctaacaatgtaaagggca

SEQ ID NO: 20907 - DNA, 1219 bp, Mus musculus
atcaaataattcatacaggagagaagccctatgaatgtaatcaatgtggtaaagcctttgtacgtcacgatactcttcgaagacatgaaagaatacattctagagtgaaacgttatgaatgtaaacaatgcataccctcttaatctttgaattctttttttattttttagatattttctttatttacatttcaaatgctatcctaaaagttccctataccctccccccaccctgctcccacttcttggccctggcattcccctgtactggggcatataaagtttgcaagaccaaggggcctctcttcccaatgatggccgactaggcgatcttctgctacatatgcagctagagacacgagctctgggggtactgattagtttatattgttccacctatagagttgcagcccccttcagctccttgggtgctttctctagcttctctgttgggggccctgtgttccatccaatagatgactgagcatctacttctgtatttgccaggcactggcatagcctcatacaagacagttatatcagggtcactttagcaaaatcttgctggcatatgcaatagtgtctgggtttggtggctgattatgggatggatccccgggtgggatagtcctggatggtccatccttttgtcttagctccaaactttgtcactgtaactcctttcatgggtattttgttccctattctaaggaggaatgaagtatccacaatttgttcttccgtcttcttgattttcttctgttttacaaattgtttcttgggtattctaagtttctgggctaatatccacttatcagtgagtgcatatcaagtgacttcttttgtaattgggttacctcactcgggatgatgtcttccagatacatccatttgataggctttcttctaatgagctgtttctaatctcccaatggaaagccttcctgtgctccagtcaaggcccaaactaaggactctcacctgcatggggacctctcttcctctgccctctctcctgtatccctgggctgaggttgtcacctcagggcccctggtattagggactgccccttgtcctccaccccaccccccgcccccatcgactggggtcagtggcttagatgcccacccggagtcaagtggaaagtgtctggcagccctcccatgtctgcctgcccagagcataggaggaactctggccagacatgggatctttccct

SEQ ID NO: 20908 - DNA, 1148 bp, Mus musculus
catattttgggctcatttgaataaatttgtataagttaacaccagttctctcaggacaaatttgcatagatttgtgtgtgacgtcttgggcaaattagcataaaccaaaatgatgtcatagttgtgctctgcatgcgttttttgtgggttttgcatgaatttgcatacatcagcttctttgaagtaggtttgcatgagctgaggtgactttggtggcttcctctgtgaatttgcataaatttgcataaacctgaatgataacacagtgatgctctgggtggatttgcatggcgtcatgctttctgtctgtatgactttgcataaatttgcataaatcttcatgggcaagggggaagcttccatggctgtcagctgcaccagcgaagtgacgtcacatgacctcatttgcatgaccagagtcactttgcataaattaacataaactagtgatcgatcccccttgagtgctgtgacctcgacgtgacccctgacctaccgctgaccccggtgtgaccccacaaccccaaggtgatccctgacctccccatgaccccagcaacctcgaagtcaccatgtaatcccaccatgaccctgacccaacagggacaaggcctggggcctccgccatccatgcgtggggagtgatgctggtagagggcaaattggtgacgtcatcaatgcagcgggcttcccactcaaccactttagccgcaagcttgcaagggcagctgccagagacaggaagtgacatcgctgtggagagggcagcaggaagtgaggtcagagtgggggtgatgggaagtaatgtcatgggctcaggaagtgatgtgctgctgctctacatgtgtacgtatatgcctggtctgtgatgctgcagaatatgtgtacatgtgtgctgggtgtgggatgtacatgtatgcctcatgtttgcctggtgtgtgatgccactttacatgtgatccaggtgtgagatgatgctgtacatgtatacatgtgtacctggtgtgtgatgccagtgcattgtgactggtgtgtgatgcggatgcacatgtgtgcttgttgtgtgaagctacttcacatgtacacatgtgtgccaggtgagtgatgctgtttcccctgtgtatatgtatgcctgttgtctgatgctg

SEQ ID NO: 20909 - DNA, 1208 bp, Mus musculus
atgcgtgagttttctatttttctagtaacaaagagtgggttttatagtgttcacgtgtatttatttattagacatattagagtacgttataattgtatttttatgatgaaaacaacacagttttactcaatagatgtgagtttctaaatgtgataagaaagatcgtactcgaacattattttcattcctgggctatactgtatgccattactttgacgtattttcatatgtacattttaaataatactgtccaatgtgttaagaaagaaaaatgttttaacacagatgctacagaaaagagtgttaatcctgaatgcctgtgtgttctactctatgctagtaacaacaagagtgttttttttgagagttcacctgcgtttatttattagacatattagactatattatagctatctttgaaagaagaaaaccagacagttttggcaatagatgtcaatttctaaatgcaatgagaaagattttattgaatgttatttcctttagtgggctacactgtatatcctttgacgtattttcatatgcacattttaaataaaactgtacaatgcgccgggcgtggtggcacatgcctttaatcccagcactcgggaggcaggggcaggcgaatttctgagttcaaggccagcctggtctacaaagtgagttccaggacagccagggctatacagagaaaccctgtcttgaaaaacaacacaaaacaaaacaaaaacctgcacaatgcgataaacctggaattaaagtgttttaacacactctagtgaaaaagagttcatcatgaatgcctgattgttctactgtgtgctagttacaagagtgattttttttagtgttcatgtgtatttatttattagaaatattatactacaatgtactgtctttttatgaagaaaacaagacagtttcacacaatagatgtgaatttataaatgtgataaaatggtgtttttcgaatgttatttcctttagtgggctacactatatgtcattaggtttaagaattttcatatgcacaatgtaaatgaaactctacaatgtgttaaggctggatgaaaagtgtttttacaaagatgctacagaaaagagaattagtcgtgaatgcctgagtgttccactctgttagcaacaagagtgttttgttttttattgttcgggtgaatttatgtattagacatattagactacattat

SEQ ID NO: 20910 - DNA, 2619 bp, Mus musculus
tcctgtccatctgctgccatccaccatccggttctcttcttgctgcaaaataaaacactctgtccatttttaactctaaacagatatttttgtttctcatcttaactattcaatccacctattttatttgttctttcatctgtgactgcttgcggactattataattttcttcaaacaaacaaacaaaaatgtatagagaaatcatgtctgtgagttcattttgagatttacttgctcactcagccctgcacttcagttgtattatagtccagttcttatcaacattaaactagagcaatcatttcaactattctgcaaattgtataagaataaaagttagaattaacaattttattttgtacaacagtgggattttctgtcatgaataatgtgcttgatccctataatctatagacgtgatagcaaagaaacaaaagccaggaaaacactcattttcgccttgaactgtatgtgggttaatttgtcctgtgccttatgtggaaaggaacgtctttggttttctttttttgttttggtggaagcatgagcaggagacatttcatcccagcataaactccttcagatgcttgtggtttgcttggctgtatctttcacgatagttaactgaggacaaagggtaatgcagaagtgatatttgatttccattctcattcccagtggccttgatatttaaactgattcctgccaccaggtccttgggccaccctgtccctgcgtctcatctttctgcatgctgctttgtttgcccctactactcctggtgtgagttatttaaagatgaaaggtttgtcaagtttaacatacagcactgattttaccttgctaagtaaacagaaagataaattctaactgcctattaactgtcagttaattcgggtcagcccctcatttactctctccccaaacctgccccgctgttggccttctgtcccccaccccttcctgtctatccatggagtttatgaaatggaagagttaattgcatgcactagtgtttggagggtgttgtggcttgtctttctaattaggtatatatcctattcactttcctagagtaaacctcctaacctggatttgactagtctccattatgccagctcctctggcagttcggcagcccaggaaagactggttttaaaaaagagcaagaaggagtgggtcttagtagcgtttgtcaaatgtattgagatttggcctttgaagaacacatttggtattaagttgtctttactgtaagatttagaaatgcattataatattattaatttcaagtcctatctttacatcctctcagaaaacttctgataccatgaatattttaaaaaagaaaaaggaccgcaaaaggcttctcgtgtaaagctgagcactctggctctgtctgacccgcccttctctcccctttctagtttggcttcattgcttctcattaggatagggtaggctaagttccctatgctgctagcatcctaagatgatacctttgtggaaataattgtgaatagcatgattcatttcaagcagaggctgagtttaggacagcagctaccattgagaagatttctgtgacatgcattttaatgacctcttggctcacataaacaatatagggacatatctgctaaaagaacccatgaatttttcagatagtgtcccacagacaattctacatgcctcactggtggctcttagggtttcttccctcacttgactttatcattgtttactagtaaaaagcagcattgccaaataacccctgattttccactatgaaaaatgcgatgtgtaagcttttaaagttgtaggttaaacctcctgttgttatctttgctgtttgtgttgcttccttctatctggaatgtggtagccacctctttaaactttttttaacccttaattcagtgacttaaggtttggagatacacactgggattttggctaacagactgacagttttgttgtttgcataattataatcgacattgtacagagaaaggataaggctacctttgttaaatctgcactttctgaatatcaaaaaaaaaaacaaaaaaaacaaaaaaacccaccaaaagggaaatggaagtataaatcaatttttgtataatctgtttgaaacctgagttttatttgcttactattagggctttgtcccctttctgtaagtctcttgggatcctgtgtaggagctgttctcattaaacatcaacagttcagtccattctctggtactagctacaaattcggtttcatactctacttaacaatttaaataaactgaaatatttctagatggtctacttctgttcatataaaaacaaacctgatttccaactgtgtggtttggttttcatttatttttggagttggagatggagggttgcttctaacaactgtataggagggtatcctgtgaagcacagtagagagaagggcaaatactttgtcagtatcaacacttggaagaaaccacgaggagcaagcatctcctcatacaggaagaccaccaagccctctcccgttcacacaagttcaatgaaccaagagaaaccgggtccactgatgggcccagggctcccaggtcccatggctctcggtcc

SEQ ID NO: 20911 - DNA, 1146 bp, Mus musculus
ttcatctctggcaagagagagatacatcaggaagtatgctttgactcttttctaggcctctcacctcagacaagttaattgacacagtagttgttttgtttctttgtggtactggagattgggcctgagccttgggcatactaggcaagcactccacatatatggctagtgatgaaaagaattgtatacatgaactttattcttattagtaaatgtagtttctcacagagtatggacttacataaatacaaatgtatgaatatagaaataaatgttttagttttttattttatgttgaaaaggtttacaaataggaaaaatgctggaatgaactctggggttgggttagaactgaaggcgtatgagctttatatattacatgtatatggaataaataattatagatatgtaggcatacatatatccattggctaatacacacaaatgcctgcctataggaaaggcatagaaacaatgttattccagtaaccatgagcatatttcaaatacaaccccccttttaaagatttatttatttatttgtttatatattatatgtaagtacactgtagctgtcttcagaagagggcataagatctcattatggatggttgtgagccactatgtggttgctgggaattgaactcgggaccttcagaaaagcagtcagtgctcttaaccgctgagccatctctccatcccctcaaatactctctttaagagttcttaaagagttgctgaagagatggctcagtgtgaagaacacttgctgctcttacaaaaaacctatttggttcctaactaccatgtgtctgtaaacacacacataatctttaaaaaaaaataaacaagccaggttctctgaagaacttgtttttagagctaaagtaagagaaataaaaggtactgatgattctagattatatgatgccagaaaataaagaagtacttagaaattgatagatggaaaagagcacaggagcaaatctaagtagcatttaatggccaactgaagtgaaataatactactgggttgtatcaatggaatatactatctattagttcatattggtgagcagttgaggaaataaaaagatgaacattatagctacaaagagcaaatctcaaagaactttaggtcgtgta

SEQ ID NO: 20912 - DNA, 1176 bp, Mus musculus
tatagtacagtgataccctcttcatacagaacatactggaccagggctaacttattttactactttacttttaattttctttctgagtattgtgaagtaaataaattgtgatcagattttacttaatagtaagtattagctgtttgataattgagaaatttgtggggtgtgtttgtgttgcatgtggaggccagaggatgaggtcaggtgtgggcctctgttctctccattgtgctttttgagatagggtcgctcattgaaccctgagcctgctgattgattgctggcaagcaagccctcaagatcctcctgtctcatttttcccagtgctgggattccctatgccatgcctagctttttacttggttgttggaaatctgcactcaggttctatggttttacatcagacactctagggcaaaactggtcttagaaatttaatgattgtttggaaagtaattaagaaagtaagtaattactggttttagatgtacacaaatttcagtggttgatttgaccgtaattttcttggcagtatgcactctggaaagtattactcaatgataggataattacaagaatttgttgttgttcttctttttcttcttttttcctctgttaagatttattaatttattttatgtatatgagtgcattgtagctgtcttcagacataccagaagagggcatcatatctctttatagatggtcgtgagctaccatgtggttgctggtaattgaactcaggacctctggaagagcagtctgtgcttttaatgcctgagccatcatactagcccaagaatttgttcttaaagtacattttttccccccatttttgtttttttgaaacagtgtttctctgtccttagctgttctggaacttgctttgtagaccaggttggtttcaaactcagggatccacctgcctctgcctcccaagtgctgggattaaatgtatgagccatcaccacctggcaaagcacacgtgtccatgtgttttgtgtgtgtgtgtgtgtgtgtgttagcttaatattatttattttatgtgtttgagtgttttgtctccacgtttgtatgtagactttgtgcctagtgtcctttgaagccagaggtggtagatcttccagaactggggttgtagacaggagccactatgtgggtgctgggaactaa

SEQ ID NO: 20913 - DNA, 1184 bp, Mus musculus
tgcgtctcaggctgcgcgcacgccggcgtgagagggcacggggaaaaaggtggctctggccggggcggctctgtttcctggggttatgtagcagggcttgtcggctcgcgagacctcccgctgccctcgcccgtgtcctagcgcggggtttctgctccgggcggaggccgtgttcaagcccgccgcgctccctcgacgtagagctcgctcgtccgcccgtgggagcgtcccggccgagctgcgctgaggggggaggggaggccattttgtcccgaccgactccccggaaccgggcggagcggctgggagaggctgcggagccgcgggcgccgcccctcggaggcacgggcgccgccaccgtcggggcttcctcgacgaggccgttcggaaggtctcctgctccgtctcgagagctgctttctccttccgcacacgctacccggctgctgcggccccagaacgcccgggtgaggagttggttgtagtgagcagttccgatcccttggggctaccggcggcgagcgcccgagccgctcctcccaatggcgaagaagacgtacgacctgcttttcaagctgctcctgatcggggactcgggagtgggcaagacctgcgtcctttttcgtttttcggacgatgccttcaataccacctttatttccaccataggtaagacctgtgggaggatggtgtgggggctctgtagccgcgagccgttttcttttattccagacatcttgcttcccggaatttacgcctttgttccagtgattccgattccagacgacagacctaagttactgttggaatcggaatagccttactggggcggggtcttcccatgcttaccatccggtctcaagtctccttctctgttcggtgccttctggcacaaaatatgcagcatttagcagcgttccagaatccggtttctttaagtgacttgcctggccttaccataattgcatgaagttacttgatgtgctatttgtaatagacgtaatttagtggttgggattgaagcagtactggctatgtggcaaaggcccgaattgggggtcaaagagaaaatattctatctgactgtaacttggagtaaacttgagagttgcagaatcattaaggaaaatgagaggggcgggggaaagtgagttggctgtcttgactgaaccattgatgtgtca

SEQ ID NO: 20914 - DNA, 1197 bp, Mus musculus
tattttggttagagttggtggattatgctggtttgtgagtgtgcctgtttaatttctcccttgttttgcttctagggatagaggttaaactcagtgataggcactgagtgtctactttggtgtctactttgtcacacgagaaaatggttgggcttgactttgttttaaaaaccagtcttagccaggcgtagcggcgcacgcctttgatcccagcactcgggaggcagaggcaggcagatttctaggtttgaggccagcctggtctacaaagttagttccaggacagccagggctacacagagaaaccctgtctcgaaaaacaaaacaaacaaaaaaacaaaacaaaacaaaaacaaaaaacaaaaagagaaagaaaaaaaaggaagcataaagaccagtcttagtccattgctcaggctggtccccaactcctggtctgaaaggactctcctcccttagctcctcaaacagctggtactacaggcacatgctaccctgttcaactctgagaaacttctggcatttatttacttatttatttatttatttaagttagcctctcactctatagccctggatggccctgaatgtagcatgtagctaaggctggctttgaactcctgactttctgcctccccagttctgggatatatatgagggtgtgagaccccgtgcccagacttgacccagccatagaggagccagtctacaaacattctccatgccatcatattgatgaagacaccaatctcctgagtcacaagttggcctcagatgcccctcatcttctgagtcttctgcttctacctcccaaatgcggagagcataggcccgtggcagcatgcctgtttggtacagtgcttaggatcaaacccaggacttcatgcatgctaggtacactctctaccatctgaactatggtcccaccctccccactttgctttcatagttttgagacagggtctcctgtgcactaggttggccttaagctcactttgtagccatggatgacttagacctcctcatccccctgccttcgccacccaagaacctggacagaaacatgagctcccacacctggctccgggttaggagagcattccctcctcctacaggagggaagaaggccaaactgggtttgttacagaggcaactttatttttaaaatcttggtaaaaacattccttaaatcatatg

SEQ ID NO: 20915 - DNA, 1231 bp, Mus musculus
tctggttttcctaatctttcctttggtccatctcattgcctctctacaggtgccagagtcctcagcggatgcctccaccctccacagctcatgcatccatgacctctgttcctttgcaccctgcaacagtggtagaccatgactgataccccccagtcaggctgcccatccctggttcatcccatctgatgcttggtgcgtgtgtgtttgtgtgtgtggtatgtatgcatgtgtgtgtgaactagtgtgtgtaccagtgtgtgtgaaggggcaagaaactatcaggtgatgtctctgcctgttctctgtgcctcctttatttaattcatgttatttattcacggagcttggttagtgagaagagatccccctgcttgagatgcctggtcctgccatggtcacagcacagcctcctgttctcttggctagggagagacttaggcaggccccaagctccttatgtcagctgcctccaagagggaagatggctagtgcctgagaagacagtgcttcctttacccatccaagtccacagtttccatcttcttgtgtgtgatggtgagcagccgtggatgctttctggctctgggagactgctggtgtcctctgaaggtgagaggtgtcctaatggtgttgggcttgcactcccggtggactgagctgtgctcgattctctctgggccctagactcttccagcctccagggctctttcccaaggactttcagtagcccaagactcatgccaggctttccagccttggcaggaacttgtggcttccccaactccacttcattgccagccctctctgcccttggattgggaattgtcaaccaaacagttgttgccaccatgagacctgcaggaaatggagcagtgtggagaaccagtggcctgccgtcaggggcaatctttcttcagtgccctctcttctccaagaagctcctttggagaacaaaccatcaggccacctctccagtgagatgtggctccttcatgttctcatcactgttccctgaagctgtcaggtctcggtccacagcggagagaaccagagcccttctccccttactgaatgcagataacaaaatcctttgctttgtgcctccagctaagacaagaaacaaacccaggcccaatttttgccagatttaccttttactcttacttcttagttacatcttgggggagggggcactattttgttgaaaaatcaatccattctttaccac

SEQ ID NO: 20916 - DNA, 1110 bp, Mus musculus
agaagcaggcaagcgactccacaatgatactcattcctttattgtcaactgtgttcatctcaacagggctggggcctgcaggctgctggcagcaccaagttaaggtgcatttccactcaacagaaaggcctccatcctaaaccaagggggcagaggttaatgctttatatatatttatatatttatatattacatatgtcctagatatacatatgtcccatatgtatagagtgacaagaatgggccactttgtgtaactttaattaaaggccatagcaacagacatagaaatttgatcctaattaaggcccgtactttgtcaatcaaatgtgtgatacagtaaaagaaaaaggagagagacagagactgagatccagccacctccaggagtcctgtctccagggtatcttacattgagtgtagtgccccctgtacaggtgaacataaacacacacataaacacacacatataataccacaggcaggagcacctcttctgaccacaccttgggcccagcctttggctgcggtgctgaagtggggtgtattgtgctataagactgtgagggtagtggaccagacaatgtggagtcagtgtgtccaagtgatgaatggggtgactcatgcagcttcatctacaaatgacagagagctcagggggaggtccctcaatgcccagttcacatcaggagatttctacacacagctcctgttccagagaaagccattcctctgatttgaatcctgagtgtcaatcacagggttctgacagaaacctgggatccctttgaagggcaggcagccgcaaggctccgccattcagtccagtggagcagcagagagcacaacagtggagtcaaagcaaatgatgcgcagacaggaccctgaatggtgcaagaggggctcatttcccaaaaggtcgagaaggactgctgccctttgccacacagaacttctggcagatctgtcagcttcatgtcttacataagtaacagacctgctcctaagccagggaaggagacgcccaacattagggcactggaaatcctaactccctgttttctctccccgaatttacccactaccacccaccaaaatatgcatattgaa

SEQ ID NO: 20917 - DNA, 1241 bp, Mus musculus
aaacactaggttatgtcagcttttttcccctaattttcaccatttctctatttgtttggctttggaggatagactcggtttgtgtggacccccagaatggaatctcttcctcaggactcatacttgagtatgtgctgcccaaagcactattaacaagcctttcacactgtgtccattcaacagtcagcgaatgaatgactataatctttactgataaagtgaggaatgttataaattattccaactggattccattttctagttgataagacttttgtataggtgcctttgggcatggataggtcaggttttttgtttttgtttttcgagacaaggtttctctgtgtagccctgtctgtcctggagctcactttgtagaccaagttggcctcaaactagagatctctgcctgcctctgctgcaattaaaggtgtgtactgacatcacccagcttaaaagtcaattttaacttggctttgcttgctagtttcctgaggcccggattgggtcccttgagcgagcaccaactgagcatcttctgggtccaaggccaccttaatttcctctgagcattgttctttctcaatgatgcatttgctgtgtgactccctagattgtgtgtgtgtgtgtgtgtgtgtgtgtgtgtgtgtgtgtgtgtgtgcaggcatgggctggctcccatggagctagaagtgaatttaagggacctactctattcctctctatcttcatggcttgagattcagactcactgaagctcactgatgggctagactggccagaaggcccctggatggtcctgtctccaatcctagctctagggtcagtggtgcctggctttctctgtgggtgctgggactcaggctcaggttctcatgcttgcagcacaagcactttacctactgaaccatctcccagccctagagtgctctcagatctatttctttgggtaaaggggatattttgttggttagtttttcttttttattgattttttagtcatttatatgggtgtgtatctctctgttggtgagtgtaggtaccctgggaatctagaagtattggatccctgaagttgcaggcaattgtaagtcgcgtgctgtgggtgctggggaccaaacctggatcctatacaagaatagtctctctaggcccacactggtcctcttgagacaggacattactgtatataacctaggctcactcggagtttgccatggagatcaattttgccttgaact

SEQ ID NO: 20918 - DNA, 1198 bp, Mus musculus
atgaagttcttgtgactcaggatggcttgggcccagcatttcaacgccctgtcccaagaaatacaacaaaaccaaacacagaggcacatgattgtcatgtcaacactaggaaggtttctgctagaaaaacagaaaggaatgggctagagagatagctagacttaaaaggacttgttgttcttccaaaggacttgggttcctagtactctgtgatggtttgtatatgcttgggccaggaagtgacactattaggatgtgtggcatatttggagtaggtgtgtcactgtggatgtggactttaatactctagtcctaggtccctagaagtcagtcttctcacagcagccttcagataaagatgtagaactctcaactgcaccatgcctgtctaaatgctgtcatactctgctttgatgataatggacggaacctgtaagccaaccccaattaaatgttgtccttataagagttgccttggtcatggtgtctgttcacagcagtaaaaccctaagatatatccagatcaggtggttctcaattgcacaatttcaattccagctctagagcatctgatgttctcttctgaactccagaggaaactgtttgtgtgtgtataaccacaccaggacatgtaggttgcttttgtttttttttgttttgttttgttttaagatttatttatttatttattttcatgtatatgagtacacactgtagctgtacatatggttgtgagccttcatatagttgttgggaattgaatttaggacctctgctctctctaggcaaccctgctcgctcagtccctgctcgctcgacccaaagatttatttattatagataagtacactgtagatgcaccagaatagggcatcagatcacattatgggtggttgtgagccaccctgtggttgctggaatttgaactcaggatcttcggaagagcagtcaagtgctcttaccagctgagctatcttaccatcccccaacatgtggattttttatttgtttgacagggtctctgtatatagctctgactggcctgcaacttactatgtctggtctcaaactcacaaataatccacctgcttctgcctcttgggtttagaggtatgtaccatcatcataccaggttgaaataatttttaaaaaagagtgcttactggttatttgtgaaagactatgatttaaatgttaa

SEQ ID NO: 20919 - DNA, 1152 bp, Mus musculus
ttttttggaagattactttcttgttttttctagggtgtagtttccctccttgtgtttaccatctattaccctttgtaggactggatttatggagaaatattgtgtaaatttggttttgtcacggaatatcttggtttctccatctatggtaattgagagttttgctgggaatagtagcctgggctgacatttgtgttcttttagggtctgtatgacatttgcccaagatctttgttttgtgcatttgatgttttgactattatgtaatgggaggaatttcttttctggtccaatctatttggagttctataggcttcttgtatgttcttgggcatctctttctttaggttagggagattttcttctataattttgttgaagatatttactggccctttaagttgggaatcttcactctcttctatacctattttccttaggtttgtgtcctggatttcctgggttaggagctttttgcattttgctttttctttgactgttgtgttaatgttttctatggtatcttctgcccttgagattctctcttctatcttttatatatacacacacacacatacacacacactgtagctgtcttcagacactccagaagagggcatcagatttcattacagatggttgtgagccactatgtggttgctgggatttgaactcaggacttttggaagagcagtcagcgctcctaaccgctgagccatctcaccagcccccctcttctatcttttgtattctgtgggtgatgcttgagtctatgactcctgatctttcctaggttttctatctccctttgtgatttccattttagatcctggatggttttgttcaattccttcacctgtttggttgtgttttcctgtaattctttaagggatttttgtgtttcctctttaagggtttctacttttttacctgtgttctcctatatttctttaagggatttatttatgtccttctttaaagtcctctatcatcattatgagatatgattttaaatcagagtcttgcttttctagtgtgttttctagtgggtatccagggcttgctgtggtgggagaactaggttctgatgatgccaagtagccttgctttctgtttttgcacttgcctctcaccagatggttatctgtggtg

SEQ ID NO: 20920 - DNA, 1192 bp, Mus musculus
tattaaacctcttttaaggtgtttaaagtgatcttctgataggtgtaagtacaagaaaccatggcagtttgttttactgatcagatttagtttagtgcagcagtgtacaagagaataaatacttatttgaatctatgtgtgtgtgtgcaagcatgttctctcatgcatgtgtgcatgctttccactttcatgtctacttgtaaagtttcatgcataaataaagtaggtttgcaaaataagtttcatattgctatatgaaatttttgttttgcttctatttaagtgttaagttaaaattttccccctttatatattcaaagatgaattgtccattcatttttttttttgtggcaatctctttctgtactgatccggtttgtagttagtaaaaaattatataaaggaatattgatcaactaaaaattaggttagaattataaaaaatatttagatcatgattagataaactaatcactaagttcttcactttatttgcttttagtgggacttcccctcttgcatgcttgaatgcaatgctgcacacaaactcccgaggagaagaaggcatcttctataaagttccaggtagaatgggcgtgtatactttgaaggtaagttgctggggagacaagcaatagtaagggttggcagcatataactactgagttacatagacagaattctgttcttgaggaacttatttccagaaagaaataaaatttcaaccctaaagtaagtaaataaattttggggagttgaactcagagcctcatgaatactaaataaattttttgagcattatttgatcttaagtgtatggatgccttgcctgcatgtataatttatgtaccacattcttgtggtactcatggatgccagaagagggtattggatcctctggagctagagttccagttgattgttaccttctgtgtgggtgatggattgaacccatgtcctctggaggaacagcagttcatgttcctaactgctgagccccctctctagcccctacttcttattttaaagaggccaaaaatatttacatatttacaaattgggtattgctttagatggctttgctttactcatcttccccactaaaacctacagttatggttattattcctgtttttataagggagaaaactaagttcaaaagttgtgatttctttaccagtggtggctgtat

SEQ ID NO: 20921 - DNA, 1150 bp, Mus musculus
aaaaacaacagaacaaacaatagttcttttcttgctgctacttattagccaatgttgaggacctagttagatgaaaataatatgataatcttattctcctgacttgaattatgtaattgaattcagaatatatgagatgctaccctatacaaacacagctatgtctaagaaaattatgtgatttttaaaccttagcgtttcatcttttacctggatttatatataccagttatcatgtaatttaaatatatgttgtacctgcatataaatgttttgtgtaatttttatctttggatatagatcgaaaattaacttatttgatccccaaaaagggaagtataaggatttcggcaagtatttatggttttactatattaatactaaaaattaatcagctaattatctgctgcattacgtattagacatttagtttcgatttgctaaaatggtgacagtcctaacaggatgcctacattttcagaaagatgtgccagatggagtgaaagagctgtcagaaggttcagaagaaagcagtgatggtcagtcagattctcagagctctgagaacagcagcagcagtgatggtggcagcaacaaagaagggagaaagagcaggtggaaaaggaaaggtaatctccgactgctgcagcagtgccttgtcactttcctcagaccatcagcttcctctttctctagtagtttagtgttctgcaatagtctcttgcaggggtccaagtgtttgtatttaacctttcaggcagcagccactagcatcatgaacctgtctgactgcgtaactgaggagcttttaaaaaataatatttttcttttagggactgagagattgctctgtggctaatatgctgtgtaagcctaaacatttgagtttggatccccagcacccatccatatataacaatgaagggggaaaggggccatgctccaggatcaatgagagaggggcgtgggggaagggggggggggagagagagaaacagcgacagaggcagacagacagagactgactggactttgaattatcagcaaaaccaaaacatgatgttgaaaggggtacattggggggatgatgatgggaatatataaagtttaagcataaggattacagtttaaattaccagaatgtaaaagt

SEQ ID NO: 20922 - DNA, 1130 bp, Mus musculus
tagtaaaaatgtatttacatagtgttacactttgtagaacatagataggaatgccgtgaattcagtatagtctgtcaggctatacagaacagataataatgaaatagaaggtggtggtttccagccaagaaatcttcaaaaatcccctttaccttggaaacatagatactactcataatcttaggaccttattctaagttctaacttgataacatgatttatacatgacttcctgctttttaaatcacttctaatatattaaacaatgagaagtaatatatactaatacacaccccttccccatcctatcatcctacactagaactttctgaggaaataaactgaaaagggagactgtttgcagtacaactccaaaaagaagatcctccctaaagtgtttggtcccagttcttaacaggtagcagcatatgatctggggaaggaatggtgcttgatatctactctgataatacaacttttccttgtcaatttttctctagtatcatctagactgtcacatccaccctctcccccgtcaggctgcccatcacccaccattccagcaagtaaagtcatttctccatcacagaagcacagcaaaaaggcattaaaacaggtaagaagtgagtctgcatttatcagaataatctctccaattaaaaataattatgagggggccggtgagatggctcagtggttaagtactgactgctcttccaaagatcccaaccacatggtggctcacaaccatccgtaacaagaactgacgccctcttcttgtgtgtctgaagacaactacagtgtacttacatataataaataagtaaatctttaaaaataattatgagagcctcatggtgtttgaggctttacttttgttgtataatggacagtcatgtactaagaccatgtttcaagaaaatcctgcatcaactcttctgttagtaaaatttcttgaaagattgtagatttctctctttacagagtaaatgtcagcagtctacaaatttaccgctgataatttgtgtacactgtgtgtaacacccattgtagggtttggtaattctttttaacatgattttgaagacccagaccttttcctactttgctaaattgtccatgaatgtgct

SEQ ID NO: 20923 - DNA, 1156 bp, Mus musculus
cctctagtatctgtgggcactgcacatacaggtgaggcaataagataagatacatgcaggcaaaacatttattcacatcaagtcaaaataaacgtaaaactaagacgtggaaaattgtgtaggctttctaaaatatacactttattttccatcagacatgtttcttgggctttgggtattattgttgcttgttttgttattagttgtattgccacacacagactttgttttgcattatataattgaatgaaaacattctatggactgccacaaaaatgaaacgtctgagtgttacagaacttttcgtttttgccagagcagatactcacaattggataaataatgtaagagaagatgaatgattgtacaaatcatttagaaggcctatgttttgtcaatcataactcctgtaattaccatggaataatagtttgattaaatttattgggccctgggagcaaatgtatgtggcagtctgaggcaaacttgtcagttctcttctaccatggagggcccacaggtgaactcaggttgttgggttggtagccacctgtcttgctcagcctcaatgggcttttgtgtatgcgcctctgtcaccagtcttcacctatttttccccctagccctatgggaaggaaagcaatctgatggacagtcaagcagtccccagaactcaaattccagcttttcttcctcagtgaaagtggaaagttctctgctaggcttggggaagaagtctttccagaggtctgacagactccacacaagtaagttagtttacaaggacttcttttttcagtgcaacagtgtgttcacagcatatttgaaatcattagccactggcttgagttattgtataattttaattttaattttaaaaagtcagacatgatttctttccttttttgttttgaaacaaggtctcactataaaaccctggctgtcctggaatttgttctatagatgaggctggccttgaactcatagagatcctcgggcctttacctcccaacgtgctgggactaaagttgtgtgctagacatactttctttgttttacattatctcgatgtttttaaaactgtttctgatacaatttctttggggtttcatttggttttgttggtttgtttcatatgagcaataactgccacagc

SEQ ID NO: 20924 - DNA, 1646 bp, Mus musculus
taaatcacagaaataaagtttcagttgtctcaagagacattaatcaggaatacagaatgcaggtcttcacatttacaggaagagcaccttgtatagtaggtctgagtcaaataggactgaattggtgacaaagtttgcacttacaaaatcatgtaaatatgtcacattttgttttaacatttttttcaaagtatttaggtaatgatgtattaacttcacattcagatttatgttccatttcttttgactgagaaaagttgaacggtatgcatggtgaaaggaagctgtctgcctctgacctttccccaggctatgaaaaggaaagtgagggagcgatcatagtgctgattatgtcttcacagactggctcaggttcttcacgaagaagatggcctttgtgggatttaattcggggtttgctcatccctttactttaggtggaactattttcagtgaaattttcaaaaggtattaacagcacagacagtgtttttgaccctgacagccctggcttagcttttggcttccatgaatcagtactgttgttaaaagcagagctctgctgttaagaggttctgtttctaagggactgctgagttagattagtatatacgtggcagtagttcagcaataatacatcacaacattgcatcaatcatgggctcccaccaataaacactttacgggtgggtgtgtgtgtgtgtgcgcgcgcgcgcatgtgcgcatactgtgtaatgttggaaaagggatgaaattgaagaaactgaaacttcacggaatttggaagagtggttttaacatgggacagaaaatagtcttttcctattctctcaatccatttttaggtagaaagggtcttaagtgatacttatgctttggcatccagagcataagagatgaatgcagctaccctgtgccatcctactataataaattttgcacccacacacaagtacacagtttgctgttttagaaagtgattctacaatctcggctgtcaggacagctgggatgcttactgtgaaagggtcttgtgagtgactaatggaatatatggctgtgagattttgctgtttttctttccttttgatttttttttaatcctcccagtactccagagacagagacagaccagtctctgagttcaaggccagcctgatcttcataatgagctccagacaaccagggctatctaagaagccttgtctcaaaacaaaaataatcacaaaaaccctaaataaataaaagaagtaaaaaaaaaccacacacacacaaggagctggagagatggctcagtggttacgagcactgactgctcttctagagatcctgagttcaattcccagcaaccgcatggtggctcacaaccatctgtaatgggatctgatgccctcttctagtgtgtctgaagacagtgacagtgtactcatatacataaagaaatctttttttaaaaaagagagaaaagaaaaactagttggtggacatggtgggtgacacgcctttaatctcagcacttgggaggaagaggcaggtgaatctctgggttaggaccagtatggtttgcatagcaagttccagagtacacagtgaaacacttgtcttttttaaaaaacaaaagctagctacgaatttttaaagaaata

SEQ ID NO: 20925 - DNA, 4617 bp, Mus musculus
cttttgtgtgttcttttataaggccccaccatcccctctgcacatggcagctccggtcctggaatgtgatgtttttggtcatctctaaagactgcagtttcatacttgggaggctgatgacacctttattataattattcttatggttctggctataattgttttaagattttctttcagaaaacaaaaacccaacacccttccctttaggtttcaaaccaaggtgcgggggggtggcaggtgcttttttaaggaccagtggctctggtgccctggctcccacccctcaggccaggtgagccactgggcaacaagctaggcagccagggagtttgaggcccaccctccgggccagtcactcttctcttcttcttcccttcctcgtgagtccggtgtgtcagggctggagggaggccggggcagcctccctccttgtgtgtgtggttggagtggcgtgtgtttcttttctagtgtttgctctgatggctgtgctctcacttgagtcagcttcacctgggccatgtgctcgcactttgttccgctccccagccagggcaggcagcctggcattggcagcgggaagggaaggtgtgcttggccccagggtgagggcttgcctggatggatggagtgtagatatgtggcatatagagatatatattttataatgggaggggggacggcacctcctgggaccagcagagactgggaggtgtgctgtcaagcacatggtcccaagaccgcatccctagaaagatggggcctatgataggccctatataaatacatagatagggtcatgtataagaaatatacacagagggggttggagggagtgggctctgtgttgagcctgggtccttcccgcagacagccccacaaacagtatatcagtctaacacatgcacaggaatctatttctgtctggatgcacaccagggagcccccagcacacttctctgcaggatcaggacgatggagtcggctacacagctctctctcgtacatctgttgccctgatgacaggtagactcgatcccagaagttgctaggtgctgaagtcaggaaaaggaggaggtttgatccaagcaggtgcttcctctagcaggtctgtgttgtattccctttgcctctggtgatgtcagcttctgttagcagcctgtggttactgacctgcaactctcggcaccagtcaagtcagccctcagcccctacctattctccccaaccaaagtcgaactgaaatctctcttggccatggggcttccattgggaaaataaaatgttaaaaaaaaaattaaaatgggacagtgaacctcacttttggagtaaagcaaatcagtaattagtgctaaaactagtcagaggctttggccccttgctcactgctcgggactaagcttggctggtggcttggtacactgcttgggctgtgtagtcctgcccacctctgctcattttctctggatagagttttaagatcgcagctagtttcccctgccatggcaggtatgactatggggctggagcatccaggagagggggatgcttgccctcttggagtccctgtactaaatgtaacgtcctcccttgctccagcagggctccattctgacctggagtccaccagcaccatgcaggaggactggaggggaggaaggctgctttaggcagtccaaggtgctccctccccctctagcaatggcaaggtcttcccagctcctgtcaggactgtcttcaaaggccatctctgcccaccgcatatgtgacgaagctagcctttcccaggagcctagtgccgcctcagctgggcctggtgctcccgtgcctggggttagtgtgagggctcaggaggaggagttcccaagggactgagtagaggcttccaggtggctgaccagtactgacctgacacggtccctgatggactcctcatggggcgggcatcgggtggccttctctagctttccttccagccccatctgtaggcttagtcttaccatagtgtgagggcaccaggcgagttagcccccaatatcttttggggaggggtgtctttgggactgtgccaatctggctattcatccgtctctaccccaagtgcggcttctagggtcacctctgaggagagctgctgggatgctggggtagctgaggggaggttgtggggagtttgcagtgcatctaggaactagctcactgcaggtggggctgaagctggattcagtcatgggaggttccctgtgggctttcctttccaaagactaggcttgttttccctagaaactaaggtgctggggactgggtgacagccacctctcagcaggtgccgtgtaagtgtgaagatttgtgaagatctgtggcccttgcccaggggaggtagctggtgctagcaccagggtcacagaactaaggcctcctgaggaggcacacataccagcggggtcccaagctggtgctaattcctctcataggacccagtaagcccgggagcctgcagtcggctgtttctctgctgtggaataccctgttagaaagctgaggtcccctaaagagcctcctggaccgagtcacttttgtggccgggctgagtatggcagcaggtagaaagatccgcaggcataaagatccctgtggcttttggcaaatgactgaagtgtggatgcaggagcaatgagtggaggccaacatcaacagcatctaccctccccaatagtgtctctgttctgggggtgctgtggtcctcacttgctggcttaggattggagttaggctgagccactttgaaggagtgtgtttacaggaagatacaaattgttggtttctctattctttactgtacagtgtgtccagagagtagaagaaaattcctgggcctgtctggttggtgcagagcttttatggcactacaaggtcttcaggaactgtcactgtaagagccctggctgtgagctggggctacgtgaccactgcagctgagtttccaagcaggcctgtgtttggatctgagtttgacgcttggcggctcccagggcttgggatgagtggcagtgctgacttgttcacttggcagagccaccctgtgaggaggtggacttagtggccctttccaattgatcctgtcccatccaggcagtatcagcactaggagcagtgctgggtcagaagtccgaaggaaaggactcggttgatcggggtcattgtgagcttgtgtatgtttgtgtagagaaagctgaactttgggaggaaaggccttgtccttgcaggcttccaagacaccgctaaggttagcctttggttggagacaagtctctagcccagacactggagtaggcgctgagaccaagaggcaggccaagatggagatctatggaaggccctttgctggtagggattcaaagcttctccaggggaccccagaactctattaactggctcccctaccgggacaagcttcgtttgtgggctcatagagtggccatagagtgggtttaacccagcaccaagcctgagggcatgagcagtggtctaaagtctcacatagtcccattttacagactaatttgattgcccggccgtagaattctacagaaacaacaatcactgaaattccttagaatacgcagagggaggaggtgactcaacacggtgctaaacacattttattaaaaatatatattgttaaattaagtctgctgtctggacaatgatgttctgttttgttttcttgtagtggagtttaaaagagactattattttactctgatatattattattaaaaaggcattttaactttgtacttgaaaactaagtgagcgatttcacgtgttttagctgagacatcgaagtagcgggtgcttacttgtgggaaatcatgtattcatactacaacataaactccgtagctgatttggtaataacttttactgttacagacgaattcgctttgaccccggtggcagagcgctttgactccacattccacgcagctaagtgcaggaccttccagaaccttccccggtcccccctggtcctctttcggttcctcttcctagctctctcttttcctaattcttttttttaagaattgtcgtttgtttttcctggtcccggcttccttctaccactgtattttttgttagggttgcttctctatttattgacagtaataatgtacatttcacagtctggttctgggacagccaggaggggtgtggggggctgcatacagcttgctgcactctccggtgtcctgttgtatctctgtgtacgtgatgcttgtgacatagctgttgaagaaatattaaaaggtcaatgcgtacagcaggtgtagagagtccgtcagttccgcttcatcactttttttttttttttttgtgcccagaagaatataataaagctcctttctaatgtacttgtgctggagaacacttgaataaatggactgtttttgtgcaaaaagaaaaacggaaaaaaaaaaaaaagcaccgtcataatgtccttttgtcctgcgactcctttcccctgatgtggccactcacagtcctccagtgggctgaagtgggtgcagtttacgttgggagggtctgggaaatggatttctaaagtatctctca

SEQ ID NO: 20926 - DNA, 1170 bp, Mus musculus
agcctgcactgagatttgtgggcagacaatgtggtaatcaacaggacctaagacctttctgcctggctggaagtgtgctgccttcaaggtggatgcaggacatctaggtcctgaagccaagcaggcattacattcttgaacctagtgacagattgtcttaggttatctttgtgaccatgctcaatcctacagaccaatctagatgttgcaatttcctttatttaccctaagagatagaatttccaattctcttgagttccagtcttctgatggcacccgcagcttttagtgtaacaagccaagccaatcagccaagcttcggcaatgctatggttaatggtaatgaggagggcttggacagtggtgctcactatagctggagccacagagtagggagatgcggccattgtctctatgcttagtggggatttaggagcccccagctcacagattattccatgaaccattttctctagctttgtaaggaagacttcagcctccccaggttttgggacaaagatttagtctagagagatgagacatttctaagaagactggggagaggtcaggtgggagcgtgtagactttaaattgtcagggaaaatctctggaagcctatctatgttaccacaggatgtggctcaggtcaacgaagagaatctgcctacctataaccgctgtgcgctctatgctctgggcgcagcctacctgaacctcatcagccagctcacaacagtgcctgctttctgccagcacatccacgaggttggtgtcattaggggaccaagagcctggtgagccctttgctttggagaaagtgtggaagagctaaagatcctctgtcctcagccacctgagcacaggggtctcatacctgctccccaccctctgtcctcatggaagcatgtggcacacactcctccaaccactcagaagaaagcaagagtttgggggaggagtgaggatgtgattccggtggtagagtacccagctagcatgcataaatccctgggttcgattcccagcaccacataaaactgggtatggtgacatatgcctctaatcctcagccctcaaaaaggctcaggggcaggaagacctcagcatagcaaggtttggccagcctgggctaataaacaaaggctggggaaactgagtgtggtgatatag

SEQ ID NO: 20927 - DNA, 1197 bp, Mus musculus
agtgactgaccctccttacttagcctcagggcttggccacgtcccaatagtgccaggctcagaaccaggccttcagtttatgggcctttggagaacattccagatctaaactagagcagatcccagcactgtgtgcccgtccgtgcacacatatgaacatatttaggggactcatgatatttacatatatattcatacgtatatgtgcattataatgttcaaatcaggcgaaacccatctagatgctccaacagttatcattcccctgtgatgaaaacattaaaaaatcctgtcatctagctaaagtatatatactgggggttggagagatggttcagaggttaagagcacttgctctgcttccagaggacctgagttcgaatcccagcactcatatcaggtggcacacatctgcctataactgtgattctcaacctggaggtcttggcccctttgggggttgaacaaccctttcataggggtaagcatatcagatatttacattaggattcataacagaagcaagataatagttatgaagtagcaatgaaaatgatgttattgtaggggtcaccacaacatgatggggaagcatgtgaatcaggaaggttgagaaccactggtctataacgccagcttccgaggaccccacaccttctctggcctccacaagtgtgcacattcatacacataagtgaaaataataaaaataaatctttttttaaagaattatttattttatgcatatgagtacactgtagctgtcttctgacacaccagaagagggcatcagatctcattacagatggttgtaagccatcatgtggttgctgggaattgaacttaggacccctggaagagcagtcagagctcttaactgctgagccatctctccagccccacatgtccatatttttaagcatttacatttcagtgaattgtaagaatataagtgctgtatttttttaaggtattagccatttgattctcatttgcttggttttgttttgaatggaaatagataaaaaaaaaaaaaatacccatcctagaagacacaaaaatatataaaagtctttttatcaagcttgtgacttaaagagccagggagatggctcagtaagtaagcatgcatgcctccaagactgaaaacataaattcaattcccaagacccagttggtggaaggagaggaccaacc

SEQ ID NO: 20928 - DNA, 1171 bp, Mus musculus
aggagtcagacctggagcctcaaggtaagcagtttcaggatgcttagttctggaagaggctctgttgccaaaacttgtacacaacctttcttcttctgattgcctaggaacttgaagacatgtagaaataagtctcataaggactctgccccactaacttaacgcagaggtaaatgaagcagaaggaacactgcctgctgagcaggctgtgtcctgtttttcgtgaacacttgaggaaatggcttgctccaccttcaactgtgttgagcaagaatctgacataacctaagaaaactttacaaaaaataatttttaaatcatagagttttagaagaagaaagatctttcaacttgttctcatttccctggggaactggggttcagtgaaatgggtggtcattggggacccaggagccagcagtgtgtcctggcccaggagccctgtctgcccagctgtcttctcatgaacctgcttgttctctgctgtgattggttgatgtgtatgtgtgattgggtgatacgtggttacctgttggattgaggaggagctgggcatagtggtgcacacctgtaagcccagtactgtagagtctgaagaagagtacaaacttgaggtcagtttaggttagtcagactctttctccaaaggaaaaatgaaaaagaggactgggggcatttagttcagtggtaaagaacttacacacacagctctgggatcagtctcccaacacacaaggagaaggaaaagaaagtattcttcactgtgcaaaaacaactcattactgagcatggtaacatgactgcacatgaagtgtggttggctacgagggtatgagggtttcattttctttatttttgatgttatttttggggggagagttgttttggatttttttaaagctctggctgggctagaactcactatgtagaccaggctgtctcttgctcacagaggtccccctcctctgcctcccaagtgtttagggtcttattttatcatactgtcctcccgtgctttaccctttggcaccaagactgccgcggtggaagcacctgaccttgaaactgcatgtcagcagcagctccccttttcttcttggccttgtggcacatcttcacacccaaggcaaagaggggagaactgggaaggctgatggggccacctggacct

SEQ ID NO: 20929 - DNA, 2629 bp, Mus musculus
ctgcgcagctgctctgagctttaaaatgttgttcttagtgaactcagatgtgtataaaaggataaagaggtctggcatacggctgtattagcatacggctgcgtggcttgaattagcttctgaggtgattgagctccacctcatggttctcatgggcctcagttctgcttgaggctccctcacgcctagcacatctgattatccagctgctcctggaacagaaagtgggagtcatgaggatgagaggtgtgtgtggtgctgtcagcctgagtgcggggcccaggctgcgcctcgttcaaccacatgggcaggagagcagttacagcagggggctttagtgttcccatttgggtccctcaggtcacttgctgattctcagatcttgagacgctgttcctgacatcttacttatatctagggtggctgcgtagcatcttatttatttatttatttatgtaagagtaataaaatgaagaggtgaagcctcagggtcccagaatgtgtctggtttctttagtctctcagcagagcattaggaaacaacagagcatagctcagaacgaaaagtattctgaaccctggcttcgtgatccggtacagacctctgcattcattgaaattcttagtgcagctgtgtgctttgtccttcgacattttgaaaactgcttgcacatttaagatcttaggacgtcagcaggagtctcaactcagtcatttcagaggctgaaacgtttttataaagaaccttgcccccccccaaaaaaaagaagggataaaatatttgaacaactgttatcttaaaaagctgtgtccttctccatctgagtcaccaactggtgtcacctcttcacttgttggaagtccctggaggcatttctgagttcgtcttccagccttcgtcagcactttagagcgtcctcccctcccctggtgtgtgctctcctctgtgtctccctggagctgctgggctccactctcagtgtctctctaaccccggagctactgggctctgctctcagtgtctctatcccgggagctgctgggctctgctctcagtgtctctctatcctgggagctactgggctctgctctcagtgtctctatcctgggagctgctggactccgctctcagtgtctctctacgcactgccgctttacttctccatgtcaatgtcgtctgtggctttgccagcatcttaactcacgagtccagatgctgagagtaaggctgctgtccttctgcacactgtacaccattctttaaggcttgtatttacctcaggaaacatattctagtatcttctcactgattgaaatctcaagtgataaatacttctttatacctgcaaaatggtacctatttctgtcttagttcggtgagcagctagatggtcaggtatctagatggtcaggtacctatttctgtcttagttcggtcaggcagctagatggtcaggtatctaaatggctgaaagctcgtcagagtaggacaaggggctcctgccagcactgaatcggggacaagtggtagaaagacagagggattgccatttgaagctaggaagcaaggagccagcatatcgcctctagcaatgacagtgatcccttccaggtcagctcagtaggttctctcatgctgcctcccatggagctaagtccccagcgtttttgtaaaccttttgaagatgaatttagttgcaaaatcaagctaagcaatttccacttcaggctttgcaagcaaagagctattgctccttctcatcctggtgctgagcacagttttagacctggttagtgcccttggacattgattgctccattaactgtccctgaggagggtggatgtgtttacttgtggtatgggcaggcagtgggtctgtgtcttaacacacagtgcggtgctgggcagtctggagaaggcccttggtgaaaggctgttactgaagagttggacagtttgggttagctccctgcactggtgctgaccgctccctgcacattctttccctccactgtgaatgctcgtacaaggtaatttacatatttgctttctgttgaaataactgaaagtgttaaatctaccagttgtttatgtcttgtatacagagtgtcatatgtatttaagttgtgtatttttatagagtaaagtcaaatagcaaacactggtctgctggctgcattgatttgttgagacctgatctttggtgtaaaactagaccacacaaaaatccaggtcctaatctgctgtgatcttcattccgcaagacatgtacctcaccatatgcccagcacttgggaggctgaggcacgaagatcaggagtctgaagccaacgtaggtcgcaaagagaccctgccttaaaaatcacaagctaggtgtagtggtgaatgtctgtctgtagtctaccttacctaggtgtagtggtgaatgtctgtagtctaccttacctaggtgtagtggtgaatgtctgtagtctaccttacctaggtgtagtggtgaatgtctgtagtctaccttacctaggtgtagtggtgaatgtctgtagtctaccttacctaggtgtagtggtgaatgtctgtagtctaccttacctaggtgtagaggtgaatgtctgtagtctaccttaccta

SEQ ID NO: 20930 - DNA, 1108 bp, Mus musculus
gttagtgtgcaagagtggaagccgaggccaggctaagagatgacagtgactgaaataagccaatggcgacttggaccaggcagagttagagaaggtgaggatggactcttgagttttattggctggattctgaagaccaagatggcaagagtcactggcaggtttgttttgggctatgaaagggcagagccaaggacatctccagagcctttttatttgagcaaagcacatcagccaaggtagagaatataggaagagctttagagcaggagaggtctagagtgagctgcctgtgaccattgcccaggaggtagctgagttacagtctggggctcagggagaggctggctggaggaacagatctgagtgccacccacacagagcacacttgggaacatgagactcactgaggtcatgaaggtgagtgagtgagtgagtgggaagagaagccctttaaggcctgggtgtgtgtcttaaaaccagagaccggaaggtcccctaagtgagaaggtataagaggtgaccctgagttggatactggattggcaacctaagtttctgggggctcttggcaagagtgttctttctctgtggaggagtgagaaggtcctagaacagacggatttatttctcagagcggaggggaagaaatggatgtggaaaaacctcagtcatgtccgtgtgctctgtgcggtcagaggtcacttcacgccctcggcacgtctgtgctctgcactgttctcaccctagctagagggctgatgctcattcctaaggacccgttcccaggctatttctggactattttcagggcctctatgaccctcctcacctccacaaaagtcccagtgggcagttagcagctcgagggtggcattcccaggccctttgttggcattcctctgtcagggcctgtcatcttgttctaagacaaaaacagcagtttcttggtgtcaaagagaagctgccagtcataaggttgtgctcagctgacccctgtaccacccagtcaccttctctctaccacaggctgatgacaaactatgtgacctttgtggttggggaggttctgctcctgatcctgaccatctgctcgatggctgccatc

SEQ ID NO: 20931 - DNA, 1687 bp, Mus musculus
ctgtcacgctcctcccaccgcagcctcccctcccccggccccaggcaacttgtgtgtacaatcagcttcttcaagcaaccctgtatctgtggcatcaagagaatattttgcgtctacatatgtaccccttctcctttttataatgatggatttaaaccaagatgcctccaggaaaaaggatgaaattagtatattcattcaccaaggaatccaaaaatgcagtttgggggaaaatgcaataatttttgatgagatgggtgaaggacaagaaccaagttctatcaattattgtagatatgattttctgattgagtctgcggggaaggcagcctgttctttctgcttttactttgttaacagcaaggtagctaaagttatttaaaataaaattaagtttatgatccgagtagctttttttccttaaatctcactgtaaatatatttttgatttcttgtagaaattgattttgttctgtttaattttatgcttttttttttcaacctcttggtttttctaaatttgtgtgtgaagtataatgttgattggattgccattatgtttggctggtaatttcattatcccaataactgtgaggccatgtatggatttactttgggtctcatcaaagtggcaccgctggaaaagagctattgtagctgagctaggggaggccaccccagagtggccaggctcagctgatcaaagtgcacaggccacttggatgaagggaaatcagtgctcaaagagaatctcctttttttttttttttttggtctcagaataactttgggaatttgaatttccatcagtgcaaatgtgtttctctgctctgctccgaggctaattggtaccatgttacccccttgccttgttactctgctgcatcccttctcatcctgcccccacccccacctccacctcaagaaaggagccagcgaactgactctagtgctagcagttgtgctactgaccgggcaggtgagcttgattaaggtgtggccagaggccaagggagtctcccttgctaaccttgcccagcatccctgggcctgtggacagcaacagtgaccttcgtcaccagctacctctgctcacgtggcagagaaaaggccataagaaccaatgcagacaaggagcacggactcaagacttcaaggaagaagccatttccccaggtccttccttctgcatctcgccacccctggtacaaacaactccattgaatggcatctactcagaaactacaggattttgaaaatggtggaagggctcatgtggtagcaactatgaaccagaaataggaccctcagttacagacattatcttttttagttttgcagaaaatgcatccctgatctcattcatttccagcttgaaagccccgccatgttactctagttcctaccaaaccgctctaggaggtcatttcaattttgtttgtgataataaacgtgcagacttcaggaagttcacctttaatttcagcattccagatgaagtttcctgacgcggcgctttggcataaggacctagaaaagaacagcagtaaggaaagttggagatgctaatgccctcccctatccccactgcaccttaaagtatgcatgtcaccttcaaggttttataattgcactgtttgttttatgtatgtacagattaaaattattgctacatttgaggaaaata

SEQ ID NO: 20932 - DNA, 1191 bp, Mus musculus
tcaagaagcccaggctgacttcagctaattgtggcatgaccttgagcttgtgctccttgtgcgcttctacctcccaagtgctgcattacaggcatgtgccaccatgctctgtttagcagtactaggaactgagcccagagactcatgcattgtagacaatcactggaccaactgagcttgtccagccttagcttaaccttgctatgatttcaatgcctgactagaactgaatctgacacagtaatgcatagcaatccaagactacagtctgtgtcttgtctctaatatgctctagtatatactatgggtaacaagtagaaacagccctttttactgttttgtctatcaaatatttagaaggagaatattcattacacatagctggtgattttgaagtgtggatgatttataatcaagactctaacataaatgtaaatgttctttctctgtgcaggcaaaatcatctctattgacactagctccctgagggctgctggcaggactggctgggaagacctagtaaggaagtgcatctatgctttcttccaacctcagggcagagagccatcttacgcccggcagctgtttcaagaaggtaacacttttgttgtgtctgtctgtctgtctgtctgtctgtctgtctctctctctctctctctctctctcatattaacctgtgtgttgctgttaagtaactcttcttggagttcatagcttggtaagtattttctccaaattacagctctgtaataagttttaggaaaggaagaaatgggtaagcaaagtcactcatgagtggatcctgaaacccaggatgcacatcctaaagactaggatgtcatgtggcagtcactcactcactcattcattcatccattcattcagcagatgtgtcgagttccttacatgcatagaacactatgtatatataaggtgccagggatacagtgatggctaggaagcagggtttgctcagaatgtattagggaacataggacagctctaaaatcagtgtgactctggtgataatagaagtataactgttaaaaggcaatttcaagtttgatgataatttgagagagcaagagatctttttttctccaggaaaacaagtgtgtcagagagccccagtactgttcactgttcattttaacttgatgactgttgaaacatgtatcttctgatgtagat

SEQ ID NO: 20933 - DNA, 1151 bp, Mus musculus
agtgaaaccctctctctttacctcataaaatgtgtcattaaataaccctgttattaatgcttattgggtccctgctatgagtagttctctgttcttagatcattgtcagtatgcaggaaggtacctgaggagcacatgctgttagctgagcgcttacccacgataggccgtggcttcagagtcacctcacgtaatgaggtagatggtagcatgctccttgtgtttgctcaaacaccttttctgctttggagtttttcaagacctgatctttcagtacagaactaatctttgtatccatttcctttgagaatctttacaaggtattatttggaaataaaaaggattgtctctgtattatataccttctgtatctctttagttacatcattttgaccagacaggaaatgacatgagtatttgccaaatgtgacctgacttgatatttttgtacttcagattcagggatcagtttacttcataaaaagtcatcagaaaaggaagaattatgccaaagacttaaagaacaattagatgctcttgaaaaagaaactgcatctaagctctcagaaatggattcatttaacaatcagctgaaggtatttctctccttttatcttcatgctttatagctgctgcttgctaaaaaaaaaaaagctactgttaacataatgttacatgttacattttcattattgcttataccatgccaactactagaatcatagtactatttttgatgttctctgaagtttagtaactattttgtcatgagccgagatattttccctagcatttccagggtttgatgactatatgaatctttttattggcatctgtgcatctcaaaagcagcttcattgccagcccttcagaagtaatgtcagcaacaccctaaggtacaaacagactggcatggtggtgcacactgtaaatcctagaagttgggaggctgacacaaaaggatcagaattcaaggccattcctcagcaacctacagagtttaagaccggcctgggccacttgagagctatctcagagtgggaaggagggatgagcatggaaatttccagactgtctgatggtggtcttctaacactaagttcttcttgctggtttgtctctgtgatctaatataattaataagaaataat

SEQ ID NO: 20934 - DNA, 1208 bp, Mus musculus
agtgactcagaactataattgtcacaggtggattgtcacaagttaaagaccaaccaagaccttgtgagtgctattaaactatgtatacatggagtagagaactaatttttcggttataaactgtatatatatgctacttttgttataacttattttcatatattaactttttgttattttttgtttctttgtttctttgttttgagacagtgactcactatgtaactctgagtgtcctgtaactgactgttacaggctggcctcagactcaccaagatctatctgcctctgcctcctgagtgctgggattaaaggcgcacagcaccatgcctggccacaaatattaactttgataagatgtaaaaaaagaatctctccatgatgagaaataataaactaataatttgtgagaaatgcctttttatttccactgtgattaattctgaacctgagagtgctgcgcagtagtctatactcttgtaaatgtatacatttctaagccctggactttttttcttcttccataggttgatgaaaaaactgtaggagagcctggttggctttatggtagttttcagggaaagtttggctggttcccgtgcaactatgtagaaaaagtgctgtcaagtgaaaaagctctgtctcctaagaaggccttacttcctcctacagtgtctctctctgctacctcaacttcttcccagtgagtcgggggctaacagtgtgtgcatgtaactcgtgtgtaaatacaaatgcatgttgggccaacctgattcttgatcatagttttatgtgggctggcacttccaacatttcaatacttaaatctagtgagtgaacttacactgcaccagtgtcttatctaccaatcatagtcaagcgtgggtaagctggtagcacttcattagtttctgggtaacggagtgtgctcacattacagttttgcacttgcaggccaccagcatcagtgactgattatcacaatgtatccttctcaaaccttactgttaatacaacatggcagcagaagtcagcttttacccgcactgtgtcccctggatctgtgtcccccattcacggacaggtatgttacctctactttacagaggcatccatctttcccccgttaagcagagcctgtagcactcagtttctgttgttgtttataagtgatgtgcaactgaaacctgatttctaagggtttgctc

SEQ ID NO: 20935 - DNA, 1113 bp, Mus musculus
gcgacgacatcagaaagcaagttgatgctctctgaacaaccggaatgtagaagaaagtggtgaaggaaggtgtgggagacgtgctggggcagcaggaggctgcaggagggctcagggtccctgctggaagagtgagtgaacagctgacctgtgcagggaggagtcctgagtgttgttaggaggaaccagcaagggagatgctgagtgtggtcatccttactgcagtaaccaacagcgggtagaaaccattgggagctggaggggaggaactcatttcagtaactcttctttgcattttatttgatggattcatgaatacttccctgaggatacatttaatcagtgctgtgatgaagtggccttaagtggtgggatgcccaggaaggcgactcacatggctgtgtgtcattttaagttcataggtttctctgtcacgtactagaaattagaaatcatgatctgcgtggtctggtcttaagttttggtgactttgtattctaggggcaggctgtagaaaacctgaaagcccaggccctttgttcctggacggcaaagaaggagaaccacctgaacttctcaaagcacgacgtcatcactgtcctggagcagcaggaaaactggtggtttggggaggtgcacggaggaagaggatggttccccaagtcttatgtcaagctcattcctgggaatgaagtacagcgaggagagtaagcaccccgtgttcttatgtgagctgacgctggtgtccttaccacatgagcactctgcagaggatgactcctgctgtgaaaacgcttacttcacctttgtctctgttttggctctttcagtctacttttcaaaacactcaggtttagatctttgttttctttttaccataggaccaatgagagtcctcactattcatttcacttgaagcatttctccattgttcactgaaatctttcaatatttaatgcattctttacttagatcttaccctttcaaattggagcaaacattcccatgcctgggcctccggggctctttaaatataatctccctattgttcagagcacttcttttagttactgacttttttgacccatattccctattaagtcacaagcccca

SEQ ID NO: 20936 - DNA, 1099 bp, Mus musculus
aagcgattattgatgttactgtctacatgttactggttaatagtcgtctcccacattggctattttggcatagaattttacttcttcctttgagtggaaagcaccctaaacataatagacattattataaattaatatgtgtgatagcacttagctgatatgagttttaatacagtattaaaccatatttgaaaatcaatgaacagtttatgcagtttaaaatgtttacaaattgccgtgcaatctactgtttgtgaaatgtcagataggtgtatatacaattagagtcctactcctcacagcattctttgagaaagtaaaccatgcttttatacctctcgctttaatttaaaggcatattttgtgcaatatttatgttaatgtgcctatatataatgaatgaattattacaatcgtgcattgcctaaatcatgacttgaggggaaaaaaacaacagtttagttacagttttacaaaacccaaatatctgtactggaaacattcacattcttgaggttattagatgtctgtgtgctccctgggtgggggttctgtagagtccttagaccacctccattttagcacttgccatcatgacagtattttacataacattcataggaaagcaataatttcaatttacagatgggtaagagaattgcctgcagtcactaaatgacaatgcaaagactgatttcaaactgacttttccacgttatatagatcacctgatttttctttttgtctcatcaacattctgcctttacctccttaaatgccacgtgtggccagctgctctctatgctgagctcagaaagccagccccactaactaactgcattgtttcataaagtaccttttttctttataatttttatttggggcttctctactatacttataaatttatccaaaagtatttttataggtcaaatcccttgacttcgccatcatgaaaagtagattatagccaagtgtggtggtgcacgcctttaatcccagtactcgagtggcagagacaggcagatctctgtgagtccgaggccagcctggtgtaccatgtgagtccaggatagccagggctctgttacacagagaa

SEQ ID NO: 20937 - DNA, 1113 bp, Mus musculus
caggccttccccacaggacgctccccgttctcaaggcccaagtagagctgtcttagggtttcactgcccccagacttcacttctccatcctctgaagtcaccactgactcctggggagcaggggatctgtgtcacgctgtgtcctctgttcataggacaggtcgtccgccagctcagtgccctaaaggatccttggaaagcatccttggcccccttggcaatgccagccccaccttcccagtgcaagccggcctcccctcccaacctcctccctcctagtgctcccagttcaggctggcctcccctcccgacctcctccctttcagtgctcccacttaggctccactgctgaagccgaagctctttgtgtgtttttattcaggttgcccttattttgttctgtgctcctgaaggtatgtgaaaattaccttttcctaattgaatactattttaaaagcttgctactgaaaaatcaatgattggatcatttcataaaacatataatcatctcctaatttatcaaaagtgcaaatcaaggttttcctgagtttctcgctgtgtgtgttctgcattctccatgggtacaatccttcagacacagttctgtgctgtgtgccaggccctgtggtgtgcatatcggggcctaccgagttagtaaggccaggctctgccttcagggaacaagggcattctccatcgtggagatatgagacactggggagtggaccactgcttgtagaccaggctaccccactgacgctgaggcaagaggcctcaaggttgtggccagccatcctgagaaacctaacaataccttgtctcaaaaaaattttattaaaaaaatctttaaaaagaaaaaagttgagaagactgcacatccccagaccacaggactcactcggtctccattagagcatctcaagagtctttctcaatagattaaacaggaaatcaacctgctcaccaagacaaaaggcttacatagaagtgaaatgttgatgagtggctcacactttgttatctgatgttgacattttaaccttgcagtttaaaaactctggcctaggtgtgatggcacacacctttagtcgccacgctggaggcagaggcagg

SEQ ID NO: 20938 - DNA, 1322 bp, Mus musculus
ctaaatgctactgcactctctcctgcctgggagtgtttagatcttaatgggaacaaagatatctgatgctcacatgatgtttattccccagacttcttgggtcgtactgaagttccagtggcaaaaatccgaacagaacaggaaagcaaaggccccaccacccgccgactactactgcacgaagtccccactggagaagtctgggtccgctttgacctgcaactttttgaacaaaaaactctcctttgagggcctggggaagccagaaccaggggagctgcccacaaggctgggtctaaagacagattttgctctcccaggacagaggagcatcacatggcttcatccatcaaacagccacactcgctgggcctgtattttattgcacactaaattgctagcaatctatgcaaacatgatcttttaaacaaacgccacagcacagtgccttgtactagtgttaacctgttcagctgtgttagatgccagggtttccattttcagggctataaaagtattatgtggaaatgaggcatcagaccaccggacgttaccacttggcaaatctgtccactgtggagttggtgatgttggaaccattccacactatgtgacctctgctgggtcacacactcaggaggtgaagggctgagatgaaatgctgcagccttggggcttgtgcagcctgatactgaaatagcatccacttgtgcactgaataaatagaaacttgatcgttttattctgactagatattatcattctctgctaagacaatatagtttgaaatattatagtttgaatataaggaggaaagcttgatgtactttaaatatactgtgaactctaataatgtggggatatttttcaactttaattttcttaagtataaattatttatgtaaattctttgttttgcatatttcatagaacatgcatctttaagctttatcattgccaacaatgtacagaaagagaataaaagtataagtttatgaatgtaatcctttcaaagcttgactctctatgtggaaggctttttaacagttactttcagaagttgcttataatgaaaccagaaggatggggtgaggtggggccaagagatctgcctgacccttctactcgcttgcccagggctttgtaggcatctctgtcaggtttctggggcttgatttcactggtggcttttgtgggtgggtgaagtgcataggagctatgcttggcctgtctgaaccaaaggggtgacccacaggaaggatgaagggcaaaggtcgggactctctgcacatctgttgctctgcacctccagggtctcgatc

SEQ ID NO: 20939 - DNA, 1170 bp, Mus musculus
cctagggctgcacagtgaacaccgagagccttcatcggcattactggctagcaggccatcagtcctaggtactgtccctgcgtcaagcctgaggagtttctctgagcagtgtgtgctggtctcacacggctttgattgggctcatgtgtatgcagctttgcccttagtctaagatattccacttcaaagcacattagcttaaaaatgacacgctcctttagcttatctagtcatagtgtttgttccctctgctattttttcaggttgatttcaaattacttacacttatttctgttgtctccaatcagttcttacagggctgagagtagagcccagcagtagagagagcacttggaacagaaggcttggatatgtcctttgtagttttaaaaattcagtgccaaaataaacaagacccagttacaggttcaaaaagactggaaattgttgatgcttaggtatctgtcttctcactgttgtgcagagggaatacacctgaaaccagaggaacagcctatgtggtctatgaggacatctttgatgctaagaatgcctgcgaccacctatcaggattcaacgtttgtaacagataccttgtggttttgtattacaatgctaaccgggtgagtgtagcccactctacagagaggctggtgctggggtggggttcctctaggctagtgctgctggtgggctgtgtagctcagtcccgttaactgtggggcttgtcatacttgtaggcatttcagaagatggacaccaagaagaaggaggagcagctgaaacttctcaaggaaaagtatggcatcaacacagatcctcccaagtgaatgacagccacgcgtggtcctggttacctgttctcttctcttcctttttaattagtactgaatattgtgatttcttatttgagaactagaatgacttatgtgaaagttttctagcattagaaaatataatgttaataaacttgtagcttttttctataatgtgtcttctgttaaacttctcacttctttttcctaatatcagtagaaaacaaatgaggagaaacacatgtaggttatagatgagctaaggactgaggtgcttgtgctggggacgctcggcctggggagcctggctgttagcagtgtaacctcagtggagtgctgtgttgctgtgagcaag

SEQ ID NO: 20940 - DNA, 3442 bp, Mus musculus
ctgccgagccttttagaaaactttgatagtttttatttttgagagactgagaaaaatgatggttgcaagtagacatgcagagtgggagacagaagtcaatgtgactaaacttgcggtttgagggcttctcaatcccttatgagggggttcagtcgtcacaagctaggagagtgacatggctctaagccagggtcagtgcatttttctcaacaggctattcagaaaaaaatacctatttttcaaatattagttagccaatatgacattaaatagctgtgtcattaatcttaatgtggtctaaattagcagagtattcaattagctaaatcagcatcagcattcaaatattatctccaaacagcagatatttatataaatgttagctatctcagtttttaaatagcaatacatcaaaatattatccatgccatattaaaagcatcaatgtagttattgcccgtgcttcatcctcggagcttttcagtttctacttgtgatggcaaaagatactcaaatactcatttggcaacagtatccaagatgtagactcttctcggaataaaattgtgtagcttagtataatatcaatactaatctatatacacagttttctataccttctacatgtaattttatggactgggaatgtagttcagtggtagggattatttgccatacatacatgagactagtttaaatccatcccagcactacaaaaaaatcctttcaatttgtaatgtaaaagcacacacaaaaaaaattcttcaaagctgggtggtggtagtggcaaagcaggcctttagtttaatcctagcactttggaggcagaggcaggaggatctctgagttcaaggacagcctgtcctacagagctaactaacttccagggttacacagagaaaccctgtctagaaaaaactatagaaaagttttcaaatctttactcatttaaaaggaactttgaaactgcccacaggtgtatgccctagctctagctcacaccaagctgagaggagaggagcccaggagtttggtcagcataagagacatagcaaaaccctgtctcttgatagtaacaaccttcccacccggagacatagatggctcagctgttaagaacactggctgcgccaggcggtggtggcgcacgcctttaatcccagcactcgggaggcagaggcaggtggatttgtgaggccagtctacaaagtgagttccaggacagccagggctacacagagaaaccctctctcgaaaaacaaacaaaaagcaaaacaaacaaacaaacaaacaaaaaaacactggctgccctggctgtagatccaggttcaatttccagcatacacatggcagtgcacagccatatgaaacttctgctacaagatatccaactccctcttctggcctctgtggtcactgcactcaagttatacgtagacatacacgcagacaaaatatcatgcatattaaactaataattttcaacgagtggaaagatttatagagaaaggtggtgttgtatttccttttctccaaaaatgtaatgtctaacaatgaagataaagattctcacctggctgggtgtggttgtacatgcctttaatcccagcgctctggaggcagaggcaggcggatttctgagttcaaggacagcctggtctacagagtgagttccaggacagccagggctatacagagaaaccctgtctcgaaaaaaaaaaacaaaacaaaaaacccacaaaagattcttacctgtttcacattcactgtgatgcagtgtcacctagcttatagtctctagaagacaacactccatttgtgggaatgaaaaagaaacatttaactatatgattagaaaagacagtttgacaaggggtcatttgggagtcctggccaaacatgggaattcacactgatcacaagcccttgagaggctgaggcaggaggattactgtgaagtcagggccagcttgggctacagaatgagagtctgtttcctgcccctgtcacaagcattgtgcgtcactgtctgagatgggtgacagctgcacttggaaccttgagtgactcgtaggtatttggtgtaaatgcaggaattctaccctcgcccgagtcggccccatatgcttcaccaaggacagagaatggctccacccaagtggtttccgcggttgagctttatccccttgcccagtttcctcaggctctgccttgcctcccatccgcccaggaggatggaaagtgtgaatgaggctttaaggaagactcaggaagaacaagagggagcctgtgtgcgtgtataactagatgtcctttctttcagcccttccttgtgcaatcctgttttaaagatgctttcttcccaggcttccatgccagacttctgtattttgggtgggctttgtgtaatagagaatgaaagagagcattttattttgccctttacctatgaaatcagcatgtatataatagaaaaattaaatatttgtcaataacatttacacaacactatcagagtcccttttagcaatataaacaattcattaacaagaaaggggatagtaaaatcaatggttttatttttcagatataggcaaaaacttttgattgttaatatgttcaggaatctctatggaaatgtttcatataggcctatcctgaaacctttctatttacatagttataattgacaaatggttctccatatttttatgaggaacctctcacaagaatgtttcttgtgtatctacaaataaggcctccagtctctaaccagaaggtaaagtgggggttcttgtgtgtccatgtagagtacttgccagggaaatgttccactaggaaggtaaagtgggggttcttgtgtgtccgtgtagagtacttgccagggaaatgttccactaggaaggtaaagtgggggttcttgtgtgtccgtgtagagtacttgccagggaaatgttccactaggaagaacaatcatcagcaataagttgcattttttaaaactgtgaaaatgttaatgtaaataatgtttgcaaagatttccttaaagataatcacctgataaatctttttacttgaaaattcaaaagttataaagttgctagcatatagactccttattacaggttgattttgaaaggataaattgccaagggaagcaaaatttaaagtaagtgaacatctcaggagtagaatacaggttgacccaagtcattgctccagaattgtcatagtccgttgtcttgttttgcagatgagatagacattgaaatacatatctgattgcacacatcataatttacgagttagattactatcactatcacagctaaaatagccgtacttcatcacgactcattcagcaaacctcatgatgtttccattcattgacaatgtagtagtatgtatttattttagtgccttaatatatttttgatgtatt

SEQ ID NO: 20941 - DNA, 1177 bp, Mus musculus
aaaaaagcaatacacaaatgaatagacaaacaccaaaccaacaataaaaaaggccccttttaggacaggcagcggtggttgtgtgcctttaatcccagcacatgggaggcagaggcagacagatctctgtgagttcaaggccaggctggtctacataggaagttccaggacagccaagactacacagaagaaaccctgtctccaaggggtgaggggtcgggtagggagggggaggtttctttttaggtcttctttctctttcagaagagatcttgctatgttgactaggttggccttgaacttctgccatagccctttcaataactaactatagaccatgtacctagtacctttagactgtaggaaaattggctgtaggcatcatgagggcaggcactttattttcctattaattcctccattcaggacctactccaacatgtgacataaacaagatgctcactgtatctgctaatggttgaatgaatagtaatttgacgagctggcctattttgtgaaatgaaaatccagtgctttaagaatagaggacatgcctgacacatatacagcagaggactgcctgttctggcctcagtgagagaagattcacctaaccctggagagacttgaggccccagggagtggagaggcctggtggggtgggggtgggagagaagaagtggaatgaggtactgtctgtggtagggcagcctggaaggcggtaatgactaactgtaaaaaaaagattaaagagaattacaaaacaaaacaaaacaaaaaaagaaaaaaaaatgaggacaagtgaaatgtagcccctacattaagaactatgaatgtatatgtgataggcgtatgagaaaacagagtgagttgcttctgacatagataagttcaattatagttctggattctaccttctgaatgttttgatggaattctttcatgttctctgttgttgagatgtagtttcaaaggagatccagtcttctgtgttgcttaggctgttcttgaatttgtactctatctcagcttcccagggagctgggatgctaagcgtacattaccttgactgatgtattctgcaagttgaggtcccattcacaatatagtctgcgtgagttgcccctcctggaattgtacagtgtcgttcttggatgttatgactattgaagtctcc

SEQ ID NO: 20942 - DNA, 1163 bp, Mus musculus
tacctaataaaaaaaataattaaaaaaaatcatttaaaagttattagtatagagcaggacctagtggctcatacctttaatcccagcacttgggaggcaaaggcaggtggatctctaacttcgaggtcatcctgtttacatcgcaagtttcaggccagtcagggctgtatagtgagaccttgggttcaattttctttgttataaaaagataacatatgtctgacaatagtactttttgggctgtgggacagcttgcagctgactctcctcatgatgtttctttttactgtgatgtctttgtttctgttgtttggtgtttgattctagatccttgtacccattagaaaacggacccagatcttgtacgcactcaactatattcctcagccctactgtgtgcttttaaatacttgctgcatgttgtactgtttgcttttatgttcattattaagaaaatactaagttaaattcaaaaatgaaaagtaatattaattttctctttataggcatatttgatgaggccttctataatattttttgatgaaatagatggcttagctcctgttcgttctagtagacaagatcagatccacaggtaatttttcctaaactgactgtattgattttcctttctccacttatcaacgtagtatttggcatttgcctttggttaaacacttgaagtcttataagaatttttaaatgtgtctatttcctgagttactttcattcaacacaggattaatttaaagtctgtagcaatttggctgcctttggtttgggccactgtaatagtcctgctgtgaatatttgtatttgtgattctgtgtgtatatttcactttttttctgggtagatcttaaaaatttttttaaaatatgttttaaattgccccccctcactctgtgtgtgtatgtgtgtgcgtgcgcgcacgcacgtgctcaggctgtcgtgcttggtagcaagctatcttctgcttagttatcttgccaaacttttaaaattttattcttttgaaacagagttctactgcgtagccatagcttgggattcaccaaaccgggttgtcctaaaaattgtaaaaacaacattcattcattcattcattcattctgagtgctcaagcagcagagcacattttcccatgatgtgtgcggcgatgt

SEQ ID NO: 20943 - DNA, 1151 bp, Mus musculus
aatgttgatcctgccaatccatgaacatgggagatccttccatcttctgagatcttctttaatttctttcttcagagacttgaagtttttatcatacagatctttcacttccttagttagagtcatgccgagatattttatattatttgtgactattgagaagggtgttgtttccctaatttctttctcagcctgtttattctttgtatagagaaaggacattgacttgtttgagtttattttatatccagctacttcaccgaagctgtttatcaggtttaggagttctctggtagaatttttggggtcacttatatatactatcatatcatctgcaaaaagtgatattttgacttcctcttttccaatttgtatccccttgatcttattttgttgtcggattgctctggctaatacttcaagtactatgttgaaaaggtagggagaaagtgggcagccttgtctagtccctgattttagtgggattgcttccagcttctctccatttactttgatgttggctactggtttgctttagattgcttttatcatgtttaggtatgggccttgaattcctgatcttccagaacttttatcatgaatgggtgttggatcttgtcaaatgctttttctgcatctaactagatgatcatgtggtttttgtctttgagtttgtttatataatggattacattgatggattttcgtatattaaaccatccctgcatccctggaataaaacctacttggtcagggtggatgattgctttaatgtgttcttggattcggttagtgagaattttattgaggatttttgcatcgatattcataagagaaattggtctgaagttctctatctttgttggatctttctgtggtttaggtatcagagtaatagtggcgtcataaaatgagttgggtagagtaccttctacttctatcttgtgaaaaagtttgtgcagaactggaattagatcttctttgaaggtctgatagaactctgcactaaacccgtctggtcctgggcttttttttggctgggagactatttataagtgcttctatttctttaggggatatgggactgtttagaacgtcaacttgaccctgattcaactttggtacctggtatctgtcaaaatttgtccatt

SEQ ID NO: 20944 - DNA, 1196 bp, Mus musculus
ttcaaaactctctcgctattgttggccagtgtatctcttagcagcaaatctattcaacgggcaacggtccatttctactgcttggtgttgagcttgcaggtctcgtccagcacctgtgaggcaaactcaggactggtttctttcctgtgcatccctttcaatggtaagagggctttggcagccacacacttcctgagacccgtttctgtgtttggtatgaaggtgtgagaggcacattttgctcatcaggtgaactcccttccagaggggaactctgctttcagagggaatggaaagagaggctctgtagtcccgaatgtctcatccctttcaatggctacataaataaactgcctaaggaaatcagaagagacttaagccaaacccaggccccgtaggtacagtgctacagacctccagaagaaggccagctattttgcttttgctagttgttttgctattatttgaatggtggtggctggagatgtggccaggcaggaggtgggcatggagttgtcttcttgtagccaggtactgctccatatgaccagcactggcatctaacacccccagttccactgtctagagatgggatgacatgccatgctctgcatctagggccctcagactctcggctgtcagtatctagaattatgtctggctgtttggcatgtgcaaatgtggaccaaacaagagttgtggtaaaggtgctgtagaagtcctgctgagttagaagctaatgtgaactgagccctctaaagcacacaatctcaactcccttgggggggggcacatatggccccatgcctgaaaaatacttgctctcagcaattgcatataacctgtctctacttagacagtcagaacttccagaccctcctgatagcctcagacaacccacgagggcggcagaaagcccttgcctggcttctcagtggatcaagtctgcaaggcagtgataggggtgggtgagtggctttccctgagacaggagtgaggtctgtgattcctcccaggggtgggggctgcggtggtggtgcagcagccatctgctttgaggattgtggacgccttgaggaatgagcctcacttttggagccagcctgtccatacagagtccactaatctgcacctctgtttagaaacgatgatccagttcagtgagaaggctgagcatgcaacgctgggattcctgg

SEQ ID NO: 20945 - DNA, 1190 bp, Mus musculus
gtccttttcgggagagggaagggcatctgtgtttatgttgcagtaattggcactaaatccaagtagaaatgggttagcattggattctccttttagttggaggcggtgtggctggattcctgacgttggatatggagtgcactgcagggctgggatacccagattctctggagtgggcattgggaaccttcaaaagtaaggagccactggggcttgggagggagcacccggttcctaaacaagtctgatgtggtactggctcagttttgaaaacgaagctttatccaaaagaatgtgttgtgttgcaaaatgccaacacacacagacttaaaaattcattccaattaggaatgatctggaaagtagaaagaatagttttctcccgagggtgagtgtgaaatggaggagtcaggtgaggaacaggatagggtctgccaggtttaggagtgtctagaaggtgccaagaggatttcctaaggggctgtcagggattcagtgtcctggggccaccagcatcagcccagaattcaaacccatttgccaggtcggcacagccccctccaaaaggcaaagagtgtttatgctttgctgtcaaatctgtggtagcctgtgtgtgtctttcactgtgttccttgctattttttttggcagcaagggggagtgaagccacaccaacacctttgtcagacctaaacacacagcctggacctgcagggctggaggaagcagggttccactcctacactgtggaatgagaaggtggcaagcctgtctcccatctccagaatttttgttctgcagagccctttgatttcttggtgccagttcatcctttggggccccctgtcagtggccagggaaacagaaacaagctgggctgcacctgttgagagtcagaggaccactttgacagcaccctaggttttccacttcgggctttaggggaggagttaactctgcactcgtcctgaatgccaaggcccatgacctttacaggtcgtttagttcttagtggatactcctgagagaaggaaggatggacatttagattcagctaatttatttaagtctcatctgagtccttttcattttgtaaagtttcctcccaaggggaaaataatccatgtataatttattcttaaaatgaagacttctctccttttagaatgtgaacttatatgactggggat

SEQ ID NO: 20946 - DNA, 1931 bp, Mus musculus
ggagggcatttgtgagcatgtcttgagatcagaggacagtgcccccaccaagggaaaggacatcttcttcatacttgtacccactggctctgccagctcagcatgggaagtggggcttatcctgagcctaggctgggctaaaggagaacatgggacaggccactctgaactctctacttagcatggctgctcgggcccccaaggtgtgttctgaggagaaagaccagctctccaggctgccctgacccaagtcccttctcaggctcttctggcttccaatgctaagaagaaaacgtagtcccagccttgcctttctagtgcacggagggcttccaggaccccaagccttctactccctttcccacgagagggcctggccagcccatggtccttggatgtggctttcaacaaagtaggtcttagcatctcccagagtttagcccatggggtttgaggctctgaggcctcgtctgccctcaggatctgaacttgctcgtcagcctttctccagtggagccaccagccaagctgtgcccagagcaaccctgtgccttccagtagatggtgttttgtggagcatagaatgttagaatgtattctgtgtgtcagggacttttttttttttaatgaaacacatttttttttaaaacaaaatgcagccactttgttccttgggtcagttgtgcttcacagaggcattagaagggcccagttgggtccaagagtcactttcaggagcccctgagtggcacagttcaattgtttgttgccttcagtatcttgggtccccagctcctactctgtagtaagacctacaggatcagactaggagtatcaagtctgacagcctttcatctcactgtgtcccctgtcacctgcctagttctgagcaggtgtccaagctgttctgtgtaaggaccggatactctgctctcctaggttaaggtccccagagctgaggactgactctagacagcctccacccaactctgcttccctttcaccagcaggccttcaccccctccatctcttggtgcctagaactcagcccagtgcccagaagccccttcctctctgactgcggaggaaggttcacgtggcccaatcttttgtagagccaccctactgtggtccctgggcatctttgaaccctagtccctttatatccattcctgtgtgccttggctaccagctctctacctctttcatacacaccttgcacctactttgggtgacagatgacataggagccaatgggtgtgtaggagcttggatgaccatggactgatccccacgtggggtccctaacagtatctgacctgacctaccactctctagtgtggctttgcccactagtggggacttgtctgctgtggagcttttgggacaccctggcatggttgtttgccccacagatagcatttttccaatcatgacttcttttgatcactggtctgtgacctacagccagtctgtctcccagttatccagtaaagtctgtgtgtgataaagccagaatttcagtgttgttcttttccatgcctgggctgagaggagaagtggtggtggtggtggtggtggtggtggtggtggtggtgttgtgtgtgtgtgtgtgtgtgtgtgtgtgtgtgttgaggggattgtcctttgtagccagggaaggtactcttatgtctctgactctgtgtgtttctctctctctctctctctctctctctctctctctctctctctctctgtgtgtgtgtgtgtgtctgtctgtctgtctgtctgtctgtctgtttccatgtctctgtctatttctatccccacctctctatctctgtctttctgtctgtctcttcctttctctctttgtgatggaggctgggatagtcccttgtaaccagggaaggtactctatgcctctgactctctgtgtttctgtctct

SEQ ID NO: 20947 - DNA, 1219 bp, Mus musculus
aatcactgtgcagagtccaggctagctgagtcaagcctgagtctcctgtcgtggcattacagatatgggccactgcttctagtttagccataggactgaaagaaactttaaagtatttacaatttgctttctttatttagttcataaaattatagaataatcacaggtacttacgtttttatgaccgtgttaacaaaaaccaagtcattttaaaactttctttgcaaaggtaatattgcttagtcctgatagtacttaatctgtacctaagtcaaattatgtaacaataaactactttaatttgtggtgttactgcttttcctgtaccgctatagttaaggttgacttagcccttctgttataaatccctaggttttttggcctttgctaaattagttcacttaacaagattaaattgttgttttattattacatacactacagggtagttttagactaccttttggtgcctttttttttctgttctattaagtattgagaatcaaacagattctttttcctcagggtactagagatgctgaaacagatggacctgagaaaggagatcaaaaaggcaaggcttctccatttgaggaggaccaaaacagagatcttaaacaagatgatgaggactctaaaataaatggcagaggtttgccaaatggaatggatgccgattgcaaagattttaagtaagatttttaactttttcaagaagaaaaatatttcttttaggagatattccagttagttgatgtgattgatttagatggtttttccaatttagggttacttgatttcctttgtgccttgtgttaatctggatggatttttaaaaaatagttaatcatcatgagtcattgaaaagtcttcacaatcatatctaaaacagtgtgttatgttagaagattaatgttagaagctgctatttttgtcttatgaactaaattagaactttttttttgttgctaattagtgacttacaggtttaacatgatttttcctctccccttgagttgtgcttgcatatcttgtagtggaatttttctttgtattgctatattaactactttttcatcccctgccatttggcttttttcatcttagatatatgaagcaaaattagtttagtaatcagtggttttcttatactatatgaattgtgctaaaacataattgcttcttcaaatatgaaatagctttttaagcttgaatttct

SEQ ID NO: 20948 - DNA, 1111 bp, Mus musculus
atcccagcacttgagaggcagaggcaggggagtttctgagtttgaggctagcctgctctacagagtgagttccaggacagagaaaccctgtctcaaaaaacaaaacaacaacaacaacaaaaagaatactgcaaagacagaattttcaatagtttttggcttttacctaatctgtgtgggcttatattaagctcagaaatcatagaagctttaaaagtaactctctttaaactctttcttgtttctctgttgttttgaggacaaaatccaaactacttaggatgaccaaaagtttaataaaacagctgatgttctaaatggggttattcagtaaaaatttaaacctttattgtatggggtcccaccccagattcagaattacaatggttgtgaagaaatgctttacattttcgtttattatttctcacccttttaaatatagctggtgtattctcagcaggccttgctccagctgcatttgtgccaaatccatatattattagtgctgctcctccagggactgacccgtatactgcagcaggattggctgcagcagcaacattagcaggtaacttgtttattctttgttgcttgttatgaacttggttttaatcttgatataaggttttttttggggggaggggtaatctatgagtaatttgaagttcttctgagaaactaatatattttccataataaactgaaatttgaagagagttcatttttcaattacacttacagggcagcaacaataactcttgtgtagttggtttatatttctagtttgtagtttagaaatcctacagtgtggaacctacaccttcattttaaataactgatcctaataatcaaaacaaagcgacattattttttcagaaataatttggaggtcgatgaaattcttggagagaatgtatatctaaaacatttcttaagtattacaagcaagctgggtgcaaacagtatggaaggaattttattgacaggtgctcttcaagccaaatgtgtattaattgcttatttaagttaagggaaacttgcgtgctagtcaggtgcagtcttactgacagactattttgatggtcttgtgtaaagtcattaggggtatttg

SEQ ID NO: 20949 - DNA, 1120 bp, Mus musculus
cttctgttttaagaaaataattcttttcataatctgtaagtaaaagacatgactgataaacacatttttaaaatacctcagatgtggtttttccatctgtattcagaggtttagtagtaataatgtgaaatcattgactaaacacgaatataagggaaagtattcatgttttatgttgtaaagtgttttcattaataaatactcattttaatgttatctaggctatcaagtactagctccaactgcctattatgatcagactggtgccttagtggttggccccggagcaagaactggccttggagctccagtacgattaatggctccaacacctgtcttaataagttcaacagcagcacaagctggtaagcatgactgacatttttagagattttaggtacttttctgagtagtttcaagaagtttctgaaattattttacagcagcagcagcagcagcagctggaggaactgcaaatagtcttacaggcagcacaaatggtctgtttcggccaattggcactcagccaccacagcagcagcagcagcagcagcaaccaagcactaacctgcagtctaattcattttatgggagcagctctttgactaacagctcccagagcagctctttattctctcatggacctggccaacctggaagtgcgtctcttggctttggaagtggtagctctttaggagctgctataggctcagctctcagtggatttggctcatcaggtaagtttgtttaaaaactttgctaagcatacttgaggtatttgaatttttaatataaagacaagcagtaataacatagtgtaggagggataggaataaagtatgaggcgttagtttaattttacagaattcctgtaaatctttcagtcatttataaatgtttagctcattctagcaagcccatactccccttcccccagcatttaaaaatttggtactctatattttgctaatcactatttcttccttattccccataatgttggaggagtttaatacatggccatcctaaaatttggataacttaaaaagaacaatagtcattattggatggtacagtcgtactaggtttgggtagctaattatggttttctgtatttggc

SEQ ID NO: 20950 - DNA, 2804 bp, Mus musculus
gtaggtctacaaccccatagcacaacaggtttatagagatgtatatagaattatagttcttatttttttcctttgtgtgaagccttttataacagattaacaatcaactgcataaatattattaatattttaaaaagaaagttaagttgtattttggtaattcacaaactatcatgcaaagaaaaactcagaaagacagaaaagaataaaatgatttgagataacattatttacagtggatgtggttttaataaaattactgccctataatgtccctgacaatgtacagaattgtatatacttataattgtaatgagttagaaacaaaatcatggtggcacttccatccagttaaaactgcactgaatgaaaagttaaatctcacactaacttttcaatttggtttgcaacaagaatggatggagatttatattttcttctaattatagaattactaggctgttgaggaagtgttggtttgttctgcgttttcatagtagatacataaagtaggaccccgatagaggtgagagaggccactgagaagtgaagtgatagctcagcatttacgcatgattgcatattcagagagcttttttcccttcctataaataaacgcattgtgtgtgtaggggtagatgtaagtgtagaatttgaaagcaaatcttgtttcagtgtttgttatggaagccttgctaatttcatagtgacgttccttggttgtacaggtgtacatttgtaaaccttcatgctgtaaatggaatctgttttctctcttcgggaaacatttgcatcttagtgtacatttccatccctgccccttaacctggcaatatagtgttgtataatgtaaatttatttctccaaatcgagagtgatttttacaaattttttatctttatatggtttcagaagtatgaaccagctttcttgttattattgtgggagacattttgttttataacatagttgttgactctgttaataacggacgtgctaggatctggatcactttcaattgaagtcagggtattgtgcataatgaacagaaagtattggactgagattgattaccacagaggccaatgctttttccatctttaaatgtgatgtgactttttttctttgtacagaagagtactgtatttttgaatagcctactcccaagtaagagcaaatctgtatgataacatttttttcctctggacataagtcattataacagtaacatgatgtacatttacaagcggccttatgtacatttcccaacaatctttttaaggcaaaattgtgaccatatgtgtataattaaaatcgtttttaatcctttgcctatgaaaatattttggaaaaaattgctttgtatattcagtttctgaaagataaagaaagtgctttgtattttgttgaagtcagtattttatataaactttatgttgacccacttatgttcagtgctaaaaactgaaaggaacatgctatttctggcagatgaatagtagaagggatttttttattcgaggtctgcagaagaaaaacaatcagagcacaatattgagtataaagattctatccttgtgttactcatatcatgaaccttaaaatttggcatgaagtttggggtgccaggagtctttaacattgatgctgagttactctagctttcaaacacaacattccttggtgaggccactaagtctggccatgtttcaccattctcagtcacactgcttcatcagcaggtccctgtcacagtagcagtattctcgctcatgtagaataattctcttctccccttttctactttgttttgccagtctcagagtatcttggccctgggttgaatttaacttcctctcatcagcccatagtttcggatcaaagttgttggtgttagagattagtaacagctcttcctgcagaaatgcagcccattctggtttgtcctcacccttccctttggatgccccggcagctgtcactcggctcagaaaagtggcaagtcctagagaaagttatttggaactgaatcctcctctagcagtcctgattcatacttcccagtgctgacaacccagtcctcctgatacttttaggcatattctagaaaaaacctgttcgtgtagaaaatttatgatctgccagttttggtgcccaccctgattccaccttctagtatgttggcatggaactttagaaaaatctgacaatacagaataaagacatctgattgggcagaatccacttaggctttaattcttgagtagtctctttttgatgtagattgtttctggaccagtttgtctaagtcctggctcttattggctcaaatgaaatgttatcttcactttgtatattatgtataaattagaaaatgaaacgtgtgaataacattgtatgaaataaacctggtcttgtgtttttctctagataaaatatccctctatatctctgtcaagagtgcctgattacatcacttcacacacacacacacacacacacgcacacacgcacgcacgcacgcacgcacgcacacacacacacacgtgtggcttgctttctgcataaacttgggactgttctaggaaaatgtatattgggttcaaacctgagtttaagacttaccttactatttccagactttggctgtcaacagcctgggtgccctagtgaactaaagatttacttaggtgttttatgtatatgagtgttccgtctgcacgtagatctgcatggcagaagagggcatcagatcacattacagattgttgtgagcccccatgtggttgctgggagttgaattc

SEQ ID NO: 20951 - DNA, 1730 bp, Mus musculus
gtcaattctactccaggccacctcctaggctgtccgtctagtctgggagagactaccactgaccccgtggagctactgatctgagcctgcctctgttcactccctaggtgtcattgccggaggcctagtgggcctcatctttgctgtgtgcctggtggctttcatgctgtaccggatgaagaagaaggacgaaggcagctactccttggaggagcccaaacaagccaatggcggtgcctaccagaaacccaccaagcaggaggagttctacgcctgatggggaaatagttctttctccccccacagcccctgccactcactaggctcccacttgcctcttctgtgaaaaacttcaagccctggcctccccaccactgggtcatgtcctctgcacccaggcccttccagctgttcctgcccgagcggtcccagggtgtgctgggaactgattcccctcctttgacttctgcctagaagcttgggtgcaaagggtttcttgcatctgatctttctaccacaaccacacctgtcgtccactcttctgacttggtttctccaaatgggaggagacccagctctggacagaaaggggacccgactgctttggacctagatggcctattgcggctggaggatcctgaggacaggagaggggcttcggctgaccagccatagcacttacccatagagaccgctagggttggccgtgctgtggtgggggatggaggcctgagctccttggaatccacttttcattgtggggaggtctactttagacaacttggttttgcacatattttctctaatttctctgttcagagccccagcagaccttattactggggtaaggcaagtctgttgactggtgtccctcacctcgcttccctaatctacattcaggagaccgaatcgggggttaataagactttttttgttttttgtttttgtttttaacctagaagaaccaaatctggacgccaaaacgtaggcttagtttgtgtgttgtctctgagtttgtcgctcatgcgtacaacagggtatggactatctgtatggtgccccatttttggcggcccgtaagtaggctggctagtccaggatactgtggaatagccacctcttgaccagtcatgcctgtgtgcatggactcagggccacggccttggcctgggccaccgtgacattggaagagcctgtgtgagaacttactcgaagttcacagtctaggagtggaggggaggagactgtagagttttgggggaggggtggcaagggtgcccaagcgtctcccacctttggtaccatctctagtcatccttcctcccggaagttgacaagacacatcttgagtatggctggcactggttcctccatcaagaaccaagttcaccttcagctcctgtggccccgcccccaggctggagtcagaaatgtttcccaaagagtgagtcttttgcttttggcaaaacgctacttaatccaatgggttctgtacagtagattttgcagatgtaataaactttaatataaaggagtcctatgaactctactgcttctgcttcttcttctctggactggtggtatagatatagccaccctttgcccaaaccctggtagctcggggaagcttggcttaaggctgcacgcctccaatcccccaaagggtaggatcctggctgggtccagggttcctctgatttatttggttttgttgtgttgtgttgtgtttt

SEQ ID NO: 20952 - DNA, 1594 bp, Mus musculus
tccattcccatccatccatcctatccatccactccatctacccgtccattcgtccatctcatttacccatccttccctgcatttcgttcgtccatctgtctatcttgtcttggccactgatctactgctgtgaagagacaccatgaacaaggcaacttttatttataaaaaaaagcattaatcgaggacttgcttacagttcagaggcttagtctattatcaaggcagggagcgtggcaggagtgcacagcagcactgaccgtgctagagagatagctgagagctacatcctgatcataggcaggcaggcagactgacagacagacactgactctgacatcaactttctcgggttttgtgcttctacttatgacataaagtctgaaagctgattatttttggaaagaatttaaagtgacattgtctgacgtgattcttttctctcttcagtatgttttgccaacctatgaaatggctgtgaagattcctgagaaagagccaccacctccttacctgcctgcctgaggacattctgccttgtcaataaagcctataccagcttctcgtcttgtttattttacagaaagctgcagtgcgggcctctcagacttgtttgatagaaagtacactgtcttgtctgagcatttattttcaaacactaaggagcttttggacatttattaaaaactttttgttaagtatcacattttagagactttttgaagacaatctagattaagcaagagccaagtgccattgttagcctttagctgagggtatgggggggaggggtctccatgttttcttttttaactttgcactttctttgtataataatagtttatgttttggatgtttggtgccctgagtagtttccggggcgtgactacagtgttgaggatgaataggttgggtataacacctgcagtttccagctctatgaaacaggagagagagagaaatagcagtttgacttgactgtggaagatgatggttgcatgcttctcatttgtacgtttccatctttgtgataaaccgctttaataaagctcataaattttaccattgtccttaaatgtgcctcatgtttatgctataacttagagcgatcctgtccttgtgacaggaatatgttaggagaagtgttgctgggtagtttctcatcttaaaatttttatttattttgttgtttcttatgtgatgaaagaaactggtgtactggtttctggatagagggatgatggaggagtaagaggagaggagtcggggggagtgaggctggagccctttaggcagaggaaggcggagtgatcccaccatataggagcaggagtacagcctagcatttcaagaagccaggacaggacatttaaagatggccagtcaaagtcccttagagtccctcagtaggctctcgagggtttgtacacactggcttgtggggtgcttcattgtgtcctcccaaccctaatttagcttccaaggattgacttgagggtgattaagccaggattcgatttcagacacttggatggctggtacactggaagtgcataatttcagggttgttttggaatcctgaaataatgccact

SEQ ID NO: 20953 - DNA, 1180 bp, Mus musculus
taattccagtttgcctcaaattcatcaagtgtgtaaggggtggagatggtcctatattctagtgacatttcccaaacactgatgtcattcattttaacctcatgaaatccctaaaagttttgcttacatttatttgctgttgggttcttagtcttctaactgttagcaacaacatctcagacagtttttttttaaaaaaaaaaaaactttgctaagttaaaaaaaattattgcagactagaaactaatgacttcagtcgggtgtggagaaaacagttggtattttccagtctccacctgtaaccagctttaggctgtgagctactggtaagctgaaaagcagcagacatcacttgcctcccacagcatgttttcctctctcccttcttatctacagaatcccacttatttccacagtgaggagtaatgcacagagatagaatgtcttactctcaagcatgttgtagcttgaagtagacaaggtgctatgagtgtgtcaaacttacaaagagatctgccacgtaggcaagggttgcctttgctgatttagaaggtttagctgggttgtgccttttatctgtcttcttctcccccccccccaacctggaacacagtgctcacatctcaaggtaaaagctactttggaaaataaataaataaataaataaataaataaaacctctaactataaagccatttccttgaactgcactgtttccaaactgcccatctccacgtctcttattctatgggggaaaatgatcacatacagggctgaagagaggactcagcagttaggaacactgtctgcttttccagaggacctggcttcaattctcagcacccatacggcagcaaacactgtaactccagctccagggaacaggatgccctcttctggcttcagcaggcgtcaggcacatacactgtgcacagacaggcaaaacaccgaaacacatagaaaataaggtaaaataaaaataaaacctaccatactgcacacgcacagaccccaaacaactccctgtcacacatctgggaacgagggagactctcctccccatgtccctctcagttcatcctgtcacctgcactgttgtacagaattgccaaactcagcctccttggaatcctgaaggccacctccaagggaaaaatttctgccgtcatgaagagtgccc

SEQ ID NO: 20954 - DNA, 1196 bp, Mus musculus
cttctcatcaagaacaccaactcttctcgggcataggcctatgattgtgtgcatcacctctggcagattttctcccccagaccactgaggttccaaactttgacctttctcctcttggctctttttttaaatctaaaacatatgcacagcctagtctcttcaatgaatatcttctacctgccttctaaagttgttgctaataatagtgtgacatcatgagggggggcagggttttgaaacccatataagcttctgaaaggcccattttgaacctctaccagtgcctatctcttggaaagatctggaatgtctaatacaaactacaggtcagagagccctcctttcaccacctcttgaaatgccagccagcccagaggatacactttctctgatagaagactcaaagaagagacacattctctctgatgcacaagctgcaggataggatgcagctacccagaatggaaagagatgatgaaggtatgagagatgtgaacaagcagggaagaatggggaccagattgtatcatcagcccttattgaaaaggagggctggcagcacccagagacggctggttcctttcttcccaagcagtcagtggaaaggcgaaaagaacctggtagggaggggccttccaagacatgagtctgccaacccctcccattgcagcccaacattctcagcccacatgtaaccttcagcccctgcccagaacactcagtgtgacaataataatagcagtcacaagaaaatgtaacctcgatcatactaacagcttttgaaaagtaaaatgctgtggatatgatttcaattaaaactcacattgtctgacttgtctctatgcacagccagagttcaccttctcctgccctcttacctcctctattcaaaacgtagccaacaggagagactgcttcaatgcatgctccaatcttgaggagacagggtctgtgtgctacacatcacttcccattccccagtctgctgtgctcccacagccctgggaatggcctttctgttaacctttcctcaaatcaatcataacatagaggaggaattgtgggtagagtttgagtttctcctcccccctcctctctctctctctctctccctctctctctccccttctgtatctgcctctttctctctccccctacccctcatatttttcttaatttatgaaagaacaattata

SEQ ID NO: 20955 - DNA, 1220 bp, Mus musculus
ggtgataggggaagagtacttcaaaacaggagaagtctcttctggggacaggttgtcactatggggccatgcctattcctggcagaaggtatggcgggtcacccacctgatgacacctgtgctttcagcaccagaaactggccttcttgatgttaggaggcttccagggaacaagaattcacctgcccttaagataccttacagttcagtctcggtgctggtgtttccagacttctgggccctatgtggccagcaacacggcttcctcaggggtggcctgaaaagtttaactacccatttgtccaagaaagcagctgatggttcagcatttgtgttcataaagcaagaatgaagatgatcataactcgtataacatccagtttcaactttatgactaatacatctgtcgctgaagattgagaaggaaaaagatacctgccacagaaaccattcaagtgagtacttcagtctgagccttaatctggattccacgaaaagagctgacctccccttcaggagcacctcaagcagatattccagaggaccttctcaatggtgccacattgcaagtggacatccaagggactatagatgcgagttgccccacccccacaagccctggtggaaggaacaggagggccagagctggatcaggtggggagcatccttagtccagaaggaagctccctggcccctggttccctgcttacctggtaggtgaggatgggatttatctctggcctccacttttgctacagcacatccaatcccacacccccggtggtatgaaagctgctttcctggagaggtggagtgggctgggcttgtataagtcccttttccctgctgccccatccccgggaccaggccatctcaatacggagaagtcagagccacggcacatgggcagtgtgatggcaccacagcccattacacatgcagggttactgaggaggagggtgaatgatgtattgacccagagtggcttgaactgagattgccatattatctgtccacttgttcacaaagcagccttcacgcgtgtcagtgagagttcagttcgatggacacacacgccagcgagcaggggcttcagtccaatgcactcttctcacgttttgttgaaataaacctccacatttgtaaaaaaaaaaaaaaaaaaaaaaaaaaagaaaatcagattctgtgcaaactgtgaacttgagcaatgatttgcagtt

SEQ ID NO: 20956 - DNA, 1259 bp, Mus musculus
agaccatggaggagtgctgattattggattgttccctagtgactcgctcagcctgctttgttatagaatacaggaccatcagtccaggagtgacaccaccgctactgtgctgggatgacctgtataagttattaattagaaaaaatgccttacagagttataggtcagtctgataggacattttctcagttggggtttttctctttccagataactctagtttgtgattagttgccagaagaaaacaaacaaacaaacaaacaaacaaaccagtcatcatagtttttatatgagtgccttatatctttctgattggatttgaagtttgaataaagaattcaggcagaacggtcacgtgggggctagccatgaaaatggcggcttcgggagagagtggtgcctcgggtggcggaggcagcacagaggaggcatttgtgaccttctacactgaggtgaaacaaatagagaagagagattcagttctaacatccaaaaatcaaatcgaaagattgactcgtcctggttcctcttactttaatctgaacccatttgaggttcttcagatagatcctgaagtgacagatgaagaaataaaaaagaggtttcgtcagttgtccatcttggtgcatcctgacaaaaaccaggacgatgctgacagagcaaagaaggcttttgaagctgtggacaaagcttacaagttgctactggattaggaacaaaagaagagggtcctggatgtaattcaggcaagaaaagaatacgtggaacacactgttaaagagtgaaacaacaacaacaacaacaacaacaacaacaactgaagaaggaaggaaaacctacagatgtggaggaagatgatcccgaactgttcaaacaggcagtctacaaacagaccatgaagctgtttgctgagctagagattaaaaggaaagagagagaagccaaagaaatgcatgagaggaagcgacagagagaagaggagatcgaagtccagaaaaaaagccaagcgagaaagagagtggcagaaaaactttgaggaaagtcgggattgtcgagtggacagttggcgaaatttccaggcaaatacaaaggggatgaaggagaagaagaattggaccttcctgcggccaccgaaagtcaagatggagcagcgggagtaagcagcaggaccacggccgggccaccctggccgagcctccccactgcctcctcctgcttcacggactcattcattctttctccacctccaccccaacata

SEQ ID NO: 20957 - DNA, 1161 bp, Mus musculus
tgggagagacgagtcttatgtatctagtcttgaactcttaatcccaatcctcctgtctcagtctcctgagtgcctcaattacaggcatgtgttacactcttggctcacatatttaaacataatgagaaaattgttttaaataccttcctttccttttgctcttttaaaatctaaagcaagaaaaagaacttgggaaaagaattgtagtcgattaaccaggcggcctgtagacgtgaagccattgtgaagagataacaaaagcagcaccgctcttgactcacgtacactataaaatggcttccctctcacttgctacttcatttagaccatgtgatctccagcacagcctttttcagtttgaaagtccccacctatttatttttatttgtttctatttagggttttagaaactttttagtcaagttcttctagggagtgatctctctgtaggacgatattacttaaatatttacttatcctgtgatctttttgtgggggatcacttttaggtgcttgcattcatctacgggaccctgaacttgctttggccattgaatcttgcttaaaaggacttctgcaagcctattgttgccataatcatgctgatgagagagtacttcagtctttgatgaaaaaattttatccaccagggacctctcggccacagataattgtgtctgagtttcgggatgaggtatatgatgtgagactcaggtaatcagataaatactggttttgcttaattatgtgcgcagttgaaaagatgtttcataggatgcttgcagaactgttttcttctaaaggggatgatagccaaaactcttttattatctctagctgaccactccattttatatagagaggtatgtgagcttggcacagtagtgtgcacctatagttccaattactcatgagataattttgaacgtaggacctagaaacctactgcaaagttgaaataaaataaatatatgagtccaaggttgcattttgaaattttctttccatctttacttttgtcaaaataatactatttctgattattttgtaattaccttattcatcttcaagtaaatttgtgtagaaacaattacctttggttctttttttttaaagattttatttattgttatatgtaagtacactgtagctgtcttcaga

SEQ ID NO: 20958 - DNA, 1287 bp, Mus musculus
gatggggggatgcagtgagcgagaacattaggccgacatactgatgtttacgtattagagatctgctaagattggtgatactggcaagatctctgcttgccattgttttttaaccctgtggtacaactgtagatttggatacagtttctaatcactacacttcatcagttataagatcttctccactagacacttttatgcagccttgaagcactgccaactgtgacaagtgctttctcctttgtcctttaactatcctccttcaagaaggagcttagcatggctgtgacagtttccactttggcctgtggcatggtggccaaattgtaaaagccctcagcttttggtgggtgcaaccactggggtggcagatgcaagaagatcacaagttcaaggccagcctggatagcttggcctccggcttaaaatgaaagtgaaattgaggcctgaaaatacagcttagttgtcgagcagggctggagaaagcgggaaggcgagtgcctgtggtcaggtagaggagctagtggctattgagtcaaaatatacatctcatgtgagatgatataagctacaccctgaacttagagacattaaaatgtccacaatgatcagtttcctgtaaaaaaaaaaaatggtatttgtgaatttaattttttttttaaaagaaaacagtgtatttgtgcctatgttctgtttcatactagggttaggactagcctttaaactttgaatagcctcaagaagcattccttttattaccagcaataaattagaatacatatttatgaacttaaaaaggaagtattttaagaaaagtactatttttaaaagctagtataattctatagttattgatgaaaactgagttttgttttggtggggaagagaatgtattcttagaatacaatagttgccaaaaatccaaaagcatttctactctaagaatatagaaggagaaaactgttgttttaaactttcctcaccaaccataagcagtataactcctttgtatcagaactattttaacataacatacattttttcaaataaataaaaatgaagtgagaccagtgcattaattttaattagtgaagaagtttgagtattttgagtttttgtggtagttttaaatgtgcttctacagaatgagaaatgcagccctcagatcctgagcatctcctgccgaagacaatgcattatgggaaatgaaaccctcagatccgagcatctcctgctgaagacagtattattgctttggcctcagaaagctttggtttcaatcataag

SEQ ID NO: 20959 - DNA, 1232 bp, Mus musculus
atttgcttggtctttttgaggaagtgttccttgtatcagaggttaaactcctattcttcatgcctctacctccaaagtcctgggtacatactgcttttaatatgagtgtcatttttccttattattctatcatacaatacatccagactgcagcttcccctcctttaactcatcctgtttctcccatcagctcccttctccagatacacttccctccctagtttccttccatagaagagcaggtctccaggaacactaatcaaacacatggcacaacaacttacagtaagaccaggcacaaaccctcacagcaagactggacctttaaaaagagggaaacatggcctgagagatgactcagtgttaagaacactttttgttcttgcaggacccactacccaaataatagctcatagtgatccacaactccagtttgaggaggactaacaccaccttctgacttctgtgggcacaacaaggctcacatatggtacataaacattcatagaagcaagacacttaagctttcttttccgagtaaccgccaagattgctgaagtggagcagaagaagaagcggacctaccatggcgtagacctcgaccaactgctcgacatgtcctatgagcagctgatgcagctgtacagcgcccgccagaggtggcgcctgaaccgtggtcttcggtggaagcagcactcactgctcaagcgcttgagaaaggccaagaaggaagcgccacccatggagaagcccgaggtggtgaagacgcacctgagggacatgatcatcctgcccgagatggtgggtagcatggtgggcatgtacaacggcaagaccttaaactaggtggagatcaaaccagagatgattggccactacctgggcgagttctccatcacctacaaacccgtgaagcaaggccggcctgggattggtgccatccactcctcccgattcatccccctcaagtagccgaggccaataaagactggttttggtcccgggggtcggggggaagaagcaagacacttacatacaaaaaattaaataaataaatctaaaagaatttaaaaggaaacaagaggaagccacagagaagatgggatgaaaagataagcatagagagagtcatttatacaccaaggagttagacctagaacaaagcctttcttcttgggaacaagcaaaatggcctataccaacactctggttttaaagagctggtctagaac

SEQ ID NO: 20960 - DNA, 1139 bp, Mus musculus
tttacataatttaatacagattgatgttaatacttgtgtatttacataaccatttccttcttgtcactgaaatatatggacctgaatttgtatcctgactgattcaacccagccgagcataaattgacttgagcgccttacctttgatgtctgaagcgaaactcctttcaccaagggccagattcggaaacttcaaccttggctgctggagtcctgtagtgatacctgtaacaatcagaaattcttaatcgcttgtggtatggttttaattctagatgttttatctctctgggagtatagtttatagaaacacaaagtacttgatttcctgtgtcggctcagatacaagaaacacacacaactgttaccctgacagagaacagagagagaagatccaagataagaaaactgcatgtggagagcggcgcacaagagttctgagttcagcacgtcccccaccctcttcctgccgcctgcaaacctcacgtgcagcttttctatatgcacgtgttttattaatctgaatattctccttctgtctcggtttgtgtccctttcattcccttttagtatttgcaagaggaaaattgtctgtgttttaatcagctaatgaggaggctatgggatggacagagggcttcttgcaggagaattgagaaaagtgactatcttaagaatattatttctttttttaaaaaagaatattagagagaaagagagagagagagagttggcataaggacagtcttatctgtgtcaaccctctgcctgcagggacagataaatggaactctggttgtgatatcataactaagatcagtcacctcccaggagtctgcagagttctaggtacaccacccgtcttaatatgggagctcccattctgtatcaaaatggactgttcatatcagagctgagaactaaagcacttcgttcattatcagaaaactggaggaatttagagagaggaaatctacgatttctaattacctggagtcagcccccactagtctgagtacttcggcaaattcactttttgtctcaccttcatcatatggctcagtggttaagagtacctgttgctgttgcagaggacctggattggattcccagcacccactcagtggcccacaactatc

SEQ ID NO: 20961 - DNA, 1431 bp, Mus musculus
acgccctacaggccaacgagcaccagctcctgctggaaaaggagaaactgcaggcgaggcagcagcagttgctaaagaagatcgaacacgctcggacttgctaaacgtttcccacacggacagtcactgccactttgcacattttgatttttttttttttttaaacaaacattgtgttgacattaagaatgttggtttactttcaaattggtcccctgtcgagtctggatctgggtagggggcaggacacggggttctgccatgaccttggaaaaaaaactgacttatgggatgctgggtggcttgttttcctcctccatatcacctggtgacagccgtggaagttcgggacactaaggagcttcaggaggctgtgaagtcaccttgttccggtccaagattccaaacagagtcattccttctttttacaatggtgcttaagttccagcaaatgccacagaagggggggttgccatttgatgcccctgggaacacttgtgtaaataccattgatacacccgccttttgtatacgtcctgggtaatgagaggtggctcttgcggccagtattagactggaagttcacacctaagtactgtaagaatacctcaatgtttgaggggcatgttttgtatacaaatatattgttaatctgttatgtactgtactaattcctacacggcctgtatactttagtatgacgctgatacataactaaatttgatacttatattttcgtatgaaaatgagttgtggaagttttgagtagatattactttatcactttttgaactaagaaacttttgtaaagaaattttactatatatatatattcctttttttcctagcctgtttcttccttgtttactgtatttgttcatgtttggtgcatagaactgggtaaaatggcaaagttctgtgtttaatttcttcaaaatgtatatatttagtgctgcaccttagagcactttgaaatacctcatgtttatgaaaataaatagcaattaaatgatgcaaggcgatgttttccttcctagcttggctgcagtctctgcacacagtccattccttacccggacttttaacattgtggaatcctggttagggagggtacttgtagagggataaatgggtttgtgaattccacagattagaaccaactactttcaataggcaatcaatgggtgttaaagctctttcaaatattttgttttgggtgtgagtgtgcccacaatgtcacatcccctgcaactggagttcaagtctaggaacaaggcagaggccctgcgcaacagtaacaagtgactcacccctgagccatctgtcaccccttcatttttgaggcctctttgggtctctagctgggattataggtgtgtgccccccatatctagttaccaaaacactttcacatactcgaactctcaaagc

SEQ ID NO: 20962 - DNA, 1089 bp, Mus musculus
tctctttccccagaatgtttccgaattcttttgattcagggtatactaaaggagtgggagatgtgggcatcgaggcaactagtagtgaggcttgattactgatttatattgaaattcttgatttaaaaacttaaagctcaaggttctgaagataacttgtctgttggcaagtttttactgctggaaacaatatttgaagtgataaaattgggagcagggcttcctgacaagtgcttcaagcatgccacttacattgctcctggtttgtatgttcgtgcaggtggaaactacaaaggccatgtggatgtcctggcacctaccgttcaagagttggctgcccttgaaaaggaagcacagacctctttcctacaccttggctaccttcccaaccagctgttccgaaccttctgacgtcatgtagacagaggagcattggagtcataaagtctgtagtcttaactctaaccctctggtgctgctctctgagcagcagtatttacaataaccgagctatcacggctaactctcgcatgtcaggaaacacagaccttagcgattctccataaaatggcagcccaatgaaaataaacttgacaactatattttcatgaaggcttgtgtcttcttttaaagttatacttgttttttttttttttttttcttttaagaacactgtgggcttgtgaaatatagtttatggatgtacaaatgtgaccctggacccatatcaaacccagactgaatatcttttgagtgaaattttccacaggagtgatgctacgctgaagtgattttcagatatttcaggctgtctaggtacattatgaagctggaggagagctgtaaaacaaaagccaaggacctcaaggtggtttggaaactaggagggtgcttggaaattcagtatggattgatgactaatgctggtgacagggtgtctctgaatttttttcaagaacctttctttgcagttgattcacagaaggacaaaatgactttgctgtgtctctgtgttcgaaaatcagttaatttctgtcctttgattaaaataacctcaaggagaaatttcgagacataattgaattgctc

SEQ ID NO: 20963 - DNA, 1225 bp, Mus musculus
ttagttgttacagataaccgtcagatagtctcagtggctctttctgtagagccctgggtgcttagagtctagtgggtgctgctgcttgtgcaaaggggaagtagcatcggctgttgactgtcaggcacctttgtagggttgtttctgaaaacgttgcccttgttttatccataggaaacatttgagagggagagacttttgagagaagggagtgaataacaatttgtggcctttgatttaaaacaaaaaacaaaaaaacaaaccttcctagagggagagatggcatggtttgtgtgagagagtcaggactgacagcctgccaaggtcacactgttagttactacatggaggcagggattagatgtgttctgggttccctgactactattctgtgttctcttatcatccattgttagtgtgaatctcaaaacaaaataaatattttttaaaaactagtgtgatagaaagctgactgttataaaagttggtctgaatgttcgttttcctgtctctaggtgattgtttgctctgctactctgcattcttttgatgtaaagaagctatcggagaagataatgcattttcccacatgggtcgatttgaaaggagaagattctgttccagatactgtgcatcatgtcgttgtccctgtgaaccccaaaactgacaagctttgggaaaggctggggaagaaccacattcgagtaagcgctgcgaggtgtggacactggtgagctagtctcctcaggccgagtcattccttagcatcctcatgccttctttatctctgcctctcaacagactgatgatgtacacgcaaaggataacacaagacctggtgctaacagtccaggtaagatgaaagagtgagtagaaagtgttacatagcttggaaatgattggtttgtttctgtgcctagtgttctcttgaaagatgggagatatgacctacaaagttagaatggggaaaatagaagtaataagaataatcacgagatggggcaagctcgtaccacttagcttagaggagtagtgttaaccactgaacgtaggtgttagttgtgtggcctcaggatcataagccttctggattgttgatgtagatgatggaaaactagcaaatctgtctagaaacaaatttatattgaccctgaaattccagaaaaataaagatgaaggatgctgggggttgggggtgtctttatgaaatggtgaaagacaaata

SEQ ID NO: 20964 - DNA, 1192 bp, Mus musculus
aaatcttcattttaatttctctggttttgtttgtttatttgttttaaaggaaaagatcttggtctggcatttgaaataccagcacatataaaaaaccaagccctcttccctgcctgtgttttgaaggtaattagaagttttactgctgctatgaggcccccaacatagatagcatacacagcagaggactgccgggtctgggtttactcagagaagatctacccatccctcaaaagcctggaggccccagggagtttagaggtctgctggggtaaaggggaagggtggggaaatccttgtggagacgggtgtggggagggggtatgggatgtggaacagtcagaggttcgactattccaggagaggaataaaatctgaactttaaagaaagaaatgaagaaagaatgaacattaaaaaagaagaagaagttttgctgtaatctaaactgtttgatttttcattatttttgttttactgggcagtttgccattaggttaaacttttgttttcttttattcaatgctagaatgctgaattgaaatttaactttggtgaagaagaatttaagtttccaccaaaagatggttttgttgctctttccaaggccccagataattacatcgtcaaatctcagcacacaggtatttgttgcagcagagagggtgggggtttctggactaggactagtgcgtaggacttctcttagtgagtcccttttgcctcctgctctggtttaaccaacctcattggttaacagattaatgaacttcagtttgaaaacttaattgatgaactacttttgtgtctgttaaggctcttaagctacctcagtcttgatggcagtgatatgcttggttcctgtgcttgtgaaatgccatagcagaatgctaagtgctttccatggattgtttagtcttcacacagcaccctgagaaagaactcttcatattttacaggggcctgaagaacaaggtgtacctggtctttgctacttgtagggttttcttttttccactctctataccccacccctgtttctctcccttacattaaagaggagaaaaagaagggtacaggggagagatcactgaccctaagctcctcagcagccactcaccctgtctctggggcgctctcatttatgcatcttctgaaaagtgcccaaaactccagatgttacagaattacaga

SEQ ID NO: 20965 - DNA, 1144 bp, Mus musculus
tttctttccagtatagacaaaagctaaatctttatttacataagcacctgtctgactggtgtatgatgtaaaacttgatcgcttagagccctgatactagccaagcgcacactgggtatttgtttgcttctcgaagtcagggcagcaaagtgtggtgaataggccccatgccatcccttagtacccttgtttcacagcactggagtatggccttctagaccagtgtgtgggggccatgaggctattattccagcaaaaccctctagggtctgtgctcatctttcctggatttgttggtgtgtattcttgtcctaacagtgacagtgtagaccctggtcaccagcatagccaaagagatggtagggataaagaagaagaactgctgtcatcttggagtcaacaagaacattctaacaagtaacaagattattagaatgaatggcttttgttttataaaggatggtttgtaaaacctgtactgactcccatttctgtacgcttgttctccaatgcagcaattggatcagatggtctgtgttgtcagagcagagaagtgaaggagtggcatggatgcagaggaactagaggactgctgaaaggtacttggccagtgctcatgtccgtctacgtgttgaaactgtcactatggatttcccgcaggagctttaaagcaaagacctgaacagtcttaatgacacagaaagatccacaggtcttctgtcacatacaaatgtaacacagtggaagttggtatatgagtcatgcatatgcaatttgtgtaaatttcatggaacttgacctttacagggaagcactactatgaggtgtcctgtcatgaccaagggctatgcagagttgggtggtctaccatgcaggcttccttagacctaggtaagtgtttctaaaaaacctgaactgctttatatttataggatgttagcatattaattgagagacaaactaataggctttactgtaatttaattttatggacaaaaaaaccctttatctgtacctcacctggttcaggaaagacttgaaatgagatactgcgtgctccctgttagcacctgcgccccatgttctgacaatgtgaaatcggggtgtttgggtttttttgctatgaagacacaccatgacccca

SEQ ID NO: 20966 - DNA, 1186 bp, Mus musculus
cctgaggtggccatccttgtgctccatgactagagtgtgcttgctggttgtgccactgcattgtggttctccaactgagtgggacagcagtgcagtgcagggaatgcttacatggaatgcagatgggaaacggtaggctctacagtttgtgatactacttcaggaattttatagatgtttgtaattgaaacgcagaattcagatgtttgggttagagatgttatttttaatgtcactgcctttataattcactgtgttatttgttacttgcatctgctttgtctggaatgggccataaattgaagagtccgattttagtagatgaagcttgtgggttacaaatgatcctttttagctgattctgtaattaaagtgtgatttcatcatttcatagaattattaaatacctcaaaagtctgcaagctacagaaaaatcaagatttgtttctttggctgattaatggcactgtttaatattctattgaaagtggtactgggatatggagaaactgacttttagtccaacatgctttcttttccctagctccagcaaaaaattattcctgatgaggaccagctgatggccatagcgctcgaatgcatctataactgtgaacgaagtgaccagctctccctctgctatgacatcctagaatgcctcccacaaagggggtgtgggtaaggagccctggaagccaggctcacccaggcttcttagtctagtagtaaaagaaaggcactgcttttctaagtgttcatcagcagagaactttgagactataagaaagacaaaagtctgggagatagcttaatggtggggtgagtgctctatattcacgtggccttgagtccaccccagcccttcaaaatataaaggggagccatatagagataaaattaaaattgttatcttggtgtctggagatagattccactgtaattataatttctgatatcattccgtcagtgtgatcctcacatactgagtagtaagaaccccagcactgcaaggagaatctctgatcgtctacagcactgacctcttggttcttaaattgggctttagttttctttttctttcttatctttgcttgtatttattctgtgaattcttccttcttagtctgtgtttagtagttctttccttggacaacaggtagctgtcattctctctccctttgcagtc

SEQ ID NO: 20967 - DNA, 1147 bp, Mus musculus
agtgcattcagtcctgcaccatgagtctccatagtctttttaaaaaaaaacaattctttttattagatattttcatttatatttcaaatgctattctgaaagttccctatacccttcccctctcgccctgctctccaacccacccactcctgcttcctgacccaggcatttcccagaattggggcatataatcttggaaagaccaagggtctctcctcccagtgatggctgactaggccatcttctgctacatatgcagctagagtcacgagctctgggggtactggttagttcatattgttgttccgcctatagggttgcagaccccttcagctccttgggtacttcctctagctcctccattgggggccctgtgtttgatccaatagatgactgtgagcatccacttctgtatttgccaggcactggcataacctcacaagagacagatatatcagggtcctttcagcaaaatcttgctggcatatgcaatagtgtctgcatttggaggctgattatgggatggatccccaggtggggcagtccctggatggtctttccatctgtcccagctccaaacttagtctctgtaactttctccatggatgttttgttccccattctaaggaggaatgaagtatccacactttgatcttccttcttgattcatgtgttttgcaaattgtatcttgggtattctaaatttctgtgagtacatatcatgtgagttcttttgtgattgggttacctcactcagtacttacagtattcaaagtgctaagttccaagtgcctctgtaatgctcaaggtacttcttagctctaggatccatgaaaataaaagcaacatgcacacttgctcttttcagtggcactcaggtaaatatgcctgttccagatgagaacgggagacaaggaaggggagaccattgtattcagactgataatagaggtgtcacagtcatggtgaacccaagttacagccacatgctcacttctgtgtcacttgtgactaacccagtacaacaacttaggatagaagggtgaccttcgctcacagttttgcatccacagttgatatgtgtcgggtataaaacaaccaaaatgtcaaggcagttatgagtgtgtggcagaggctgagctcctca

SEQ ID NO: 20968 - DNA, 1328 bp, Mus musculus
aataactgcatacctacagaacagcttatatatttcatgcaatctcacttgtcaatttgtgggattatcatctgcattaggaaggaggtccttgccaatacctatatgatggtctgctttcctgtgctttcctccatttcagagtttaaggtcattggtcgattctgaattaattcttggggtaccctgtgacttccaggcagcacacgaggtccactggccccagctcgggcgaccacctgtctgggacgtgttgactcatctcccatgaccctgcggtgcctggagccctccgggaatggagcggacaggacgcggagccagtgggggaccgcggggttgccggaggaacagtcccccgaggcggcacgtctggcgaaagccctgcgcgagctcagtcaaacaggatggtactggggaagtatgactgttaatgaagccaaagagaaattaaaagaggctccagaaggaactttcttgattagagatagttcgcattcagactacctactaactatattcgttaagacgtcagctggaccgactaacctgcggattgagtaccaagatgggaaattcagattggattctatcatatgcgtcaagtccaagcttaaacagtttgacagtgtggttcatctgattgactactatgtccagatgtgcaaggataaacggacaggcccagaagccccacggaatgggactgttcacctgtacctgaccaaacctctgtatacatcagcacccactctgcagcatttctgtcgactcgccattaacaaatgtaccggtacgatctggggactgcctttaccaacaagactaaaagattacttggaagaatataaattccaggtataagtatttctctctctttttcgtttttttaaaaaaaaaaaaaaaacacatgcctcatatagactatctccgaatgcagctatgtgaaagagaacccagaggccccccccttactgcttttagtattctatctttatttagtgcgtttgatgttctgattattatgtgtcgggaggaatttcttttctggtccagtctatttggagttctgtaggcttcttgtatgttcatgggcatctctttctttagatttgggaagttttcttcaataattttgttgaagatgtttgctggtcctttaagttgaaaatcatcattctcatccactcctattatccgtaggtttggtcttctcattgtgtcttgcatttcctggatattttgagttaggatctttttgcattttctattttctttgattgttgtgccgatgttctctatggaatcttctgcacctgagattctct

SEQ ID NO: 20969 - DNA, 1100 bp, Mus musculus
gttatgaactcattaatttatttttgagacgtgttctctcactacccaggatctcaccaggttaacttgtttgcttggacagcaagccgtggagattggcttgattctgtctcttgagtactgagattaaaatatattgcaattggttgtttcccagtagttctagagatcaaatccatctcagagagactgactagttctcttttaatttatctccggttttctgtaaacaatcagcattttctttatttaaggtatttttctagaatttacatatatgtctttgtaaagattacattttatcttcttaacttccatctcaatgctcattcagggtatttctaatttttttcctaattaaacataagtaaactaaaaatggattaaccaaagtcaattagactgttgggggcaattggactcatgtaaatttctcacccatcatttttagaatattttctcacgaggagtgactgtgaactgttgtctgggaattacaatggtggactctgttctgttgcttctctagttgtcaggtcatttattggttgacagaaatagattgtggccatagaagttggaatctgctaaggagtgtgtaacaacttatttgctgaatatattttcatgtggggaagggtcatatgagatggctcagaagtaaatgtggttgggagaatagcaacaaaacaattttaaaaataattcggaatctattgccctcaacttgtgagaaatcctttcttcccatgaaagatgaaaaatcacaaaaggatatggaccattctagaggctaagcaattacaacatacatgctgcatcaccagtacagaatcctctcactcaagaataaaggagccttctccatcaaactgggcaaaaccatttttgtttataatatttctgactgaagctgattttttaacaacttgaaagataatgttagtcattcccaaaacttatttgcctctcatctctgctcatcaccctcatcatctatttcatctattaaaaatatcctggttcagcatacatatgctatatatcccagtcctagctcaaacaacatctctagttatttttttcctttcataaatact

SEQ ID NO: 20970 - DNA, 1171 bp, Mus musculus
tatctctaatgatccatatttacctcacaatgcaaaacccactgtctttaaacttttcatcttaaaagtctaaaatttcttaactgttagcttctataatataaaatatcttttaaaaaatattttcaacctatatagacagataataaacatttccagttcaaaatgattagaaggattataaagtcaaggttcgccatgaaagaacttctaatggttctaaaactgactctgaggaggaggaggaagagggaggaggaggaagaggaggaggaggaggagaaggaggaggaggaggaggaggaggaggaggaggaggaggaggaggaggaggaggaggaggaggaggaggaggagaagcagcagaaggagcagaggagcctggctgctcatcctgggttcaagcggcaccaccactcagaagactgtggtggaggtcctcggtccctgtccagggggctcccttgtaaaaaaaaaaaaaaaagcagcctcggagggcagcagtgaaaagacagtttcagacacaaagccttctgtacctaccacttcagaaggtgggcctgagctggagttacaaatccctgaactgcctcttgacaacaacgaattttgggtccatgacggttgtattctctgggccaatggaatctacctggtttgtggcaggctctatggcctgcagggagcgctggaaatcaccagagagatgaaatgctcccactaccaggaggctggaactactttgggctgctacaacacaggctgctccttctgacaccattacccatgtgccattgatgcagattgtttgctgcatgaggagaatttctcggtgaggtgccccaagcacaaggttggaatgacagagaacttacttgacataggcctgaggcctagctacctcctctgagccatgtttcacgcaacgaaacacagtctctgcaagtgtcacctcctgaagaacatgagctgcttcatcttgaagatggattttaaggtgagactgtagagatgagaaggtggaggacacatgtaacagaatcctcctgctgtgcaaccacaccccactctgccctgtcctgcacccccgctgcgctgtgcgcactgcccatgccaacacttccttcctatgttctcacatcacactcaaactggtgataccacaggaaaa

SEQ ID NO: 20971 - DNA, 1154 bp, Mus musculus
tttactgtcactgggctgctgttgtgagcatcctagccagatccttaggcttatagccgtcatgaatgcattaaaagttaagtgtgatagacagtccaaagagcctcattctgtggatgtcacactctgatcttctagaatctccgaatcactcatttttcttagttttttttccccccacagtctaagggaaagaaaaaaaagtaataatttgagcaatgttctttaagctgatagaaggttgctgtgaactgtctcagaacaatgtgaaaaatgaaaagtattttgctaaaagagttgctttactttgaaagtattatttttcttaaagggtgttttactccaaagacagatctttctatttaaatttcattgttagggtcagaggagacaggaacaaaaaaaaaaaaaaaaaaaggaaaagatagaaagaagagttaaaaaagaaaaaaagcagtagaatggactgttactctttctgtgaaagaaaacctagagtcactgcccttgtagtcactgggctctgttaaggtctcatgtggtccacatagttcacaggaatgtaatgaaagccactgtcatctgctgtgggcgcccactgatggagaaactcggccctgagtgtgtggctccctctgggagtcaggaaagccattaagctcctggcttgttctctcgtgacctttggaggccatggtaacccttctgccaccacggtggttttgtgtgtattttgattgctgtggactgtatacgagctcactggcctgcagaggttcacggccgtctccctcatgcccaggggaagctctggcatctcttttcaaatgccctctgcagcccgctgtccaggtggctccctgatgccatgttaggacttgagccagagtctctatagccaaggctggtctacaatgcaccatcttagacatacagcagtccttccacctggcttgggaacctagttttgatataccttaaacttccctgtcactctaccctgaaacagagcacacctcccacaaaaccacactctatgatctctgtgaaaatcttcaggagccctgtccaggcagtgatgtggacgtctactgttaggctccctgtgagatccaaatgagagctgcaccccggttctctcaagttgcttattt

SEQ ID NO: 20972 - DNA, 1120 bp, Mus musculus
caaggcaggattgatgtcagatctgcactgtgataagaacaagaccctgtacctgttcactgtgactgtagttgtcctgctccttcagagctgtgacttgtcttcggttcctcccccgtggcctgcacatggcctctgtggcaggcagatgcccctgactgtgctgtccgtcccttgtacctctgcgcaggctgtctgttcttcacgatgccaggcttggcataccctgtctcccctgctcacttccagggaattcctaaggctagaatggctctggttaggcagagatagtgtacccttccccagcctgaagtgcagcccagagtctggcattgcccttcatgtatcaggtacgactccgtgggcagtgacctcactgttcctttaccttccaggtacgtgcggctctgcgaagtggtcgatcacgtcttcccattgctaaagagaagccattcctgtgacttcccctgttcagacactttcagtaacttcaccttttggagagagccactgccaccttttgaaaaccaggacatgcattcagcctcagcttgacgcgaccgagcattaaaggataggttgtggggaccctggagctgctgggaaggctgatatgtggccacctgcctaagagagaagcatttctccctcggctcgctcgctcgctcgctcgctcgccccagggtgacacttctaagcatggagggcggagagaggctgcatctcatcccataggctgcaagaggattgggtgcactaggagtgtgcagagcagccctctgtttgggtttagcacacctcatgctgcaccctccagtcccgtctgctccagcaattagttaatgtgcaatacgggtgatgaccccttatcagcgggcaggccacctgagagcctgtctcagtatcactgtgcccctaccccctggaactctgatgtgcatagggatcagtagcatcagggacacatttccacgacagagacatccatgccaccttctgcacacaggctgtgtcccgagtctaagtgaagggaacatgggcctcgctgggtctcagccctagccttggctttgactttttagacgttcccttgcagtattgccgactgtctcactttagg

SEQ ID NO: 20973 - DNA, 1188 bp, Mus musculus
caccgaggactggcaaagggatgctgccctccgtttaatccacactgctggattcaggcgctcctgcttccctggaatgcctttccccttgtcccggagctccatgtgaacctgagaacggaactgcagctcctctgggcacaagtgaccttcccgaagttctgccaagaacctagggagggcaaagaccctgttttcttgtgggacaggctcacccctgctagggagaaaactggttgcttcttgggtggcagacagatcctgggcatgataatggtttgtggcctctaaaggaccatagttttaagtgtcatggtgggtggaggataggttgttaacttgccaagctgtttggggatgtggatatagtcaagccagctaagcaacatggtggctatggtgtccttgggctagcctaccggatgctgtatgtttacttgtagtttagaatggaagtgagtgtaccctgggactgtggcatgcgctgccatccttgtcagacacctgtcttggttccagtttgctcagggtcatcttgagaataaggcagccgcaagtcataagctagggctgagctatcatgcttgatcctagctgggactgactggaaatgctcatctaccagaggatagggtctacttgcttagagatcagaccttccattaggtaccaaatacttagccatatatatgtatatgtgtgtgtgtgtgtgtatatgtgtgtgtgtgtgtgtatgtgtgtatatatatatatatataatgcttatgtttatgtatatatgtgtatataagtacatatatgtatataagtatatatttataagcatataagtatatgtaagtatatatatatgcatgtgtgaatgtatgtatatatataaatatgtatatgtatgtagttttatattagacatgttgttttaatttcttttcctattgttgtaataaaatgccctgacaaaagcaacatgcatgcacacatgcacacaaacacaagtacaaaaaaacctttgcaaaaaaatcaaattaacttaaaagattttattcgacccacatttcacagagtaatccatttaaaaacattaatgagatattttaaatattgttttcataataaaccttttaggtcagtgatccattctttggacccagcagacaactatctacacctctctaagatgcctggaac

SEQ ID NO: 20974 - DNA, 1234 bp, Mus musculus
ctgtagagatggcgcagctcttaagagctctaactgttcttccagaggtcctgagttcaattcccagcaaccacatggtggctcacaaccatctgtaaagggatctgatgccctcttctggtgtgtctgaagagagtgacagtgtagttacatacattaaataaataaataaataaataaataaatctttttaaaaaatagatcctattcttacttaagcacaataggaattgatcaagtaactatattgttagttgtgtgtgtgtgtgttttttttcttttctatcttttaaacagatacttaggaacaaaggagaatgaattaattaaatcaggttatctcttacaaactaacctagtagattattaatgttcatagagtgagcgacatgcaccccacacatacaacacatataacactgatgtttcagacaaaaagagatgttttcccccgtagtaaacatttcttgaaaattgcctgctaaatatagtatcttattgttttaaagcatggttagcttaaagagtctgagggaaaatggtcattaccaaggcttttagaatgcagtttctcatttgctgtggacatgaccataaagaaaaattcccatgagggttttcatatgctacttgactagcagttaacctgttgggaacatgtgggggggggggagaatctgaggggatttatttagctgaaatgtgatagttgcttatttgactttaattaaaaggtatatttcctgaaatttgggcccttacatatgttctccctggtaagtgtcatacttctgctctggaggctcacctggaaacagggtattacatgcatctacttggctaagggtcagtttgttttgcagctagttgttaacagcattgcagcaccatcattctccttatgcaattaaagtattcatttttgtttgtttttttataaatcctcaggttcgtcataaggcatcacagaaggtttatgcaatgaagcttcttagtaaatttgaaatgataaaaagatcagattctgcttttttctgggaagaaagagatattatggcctttgccaacagtccctgggtagttcaggtaagcataataactttttgtgttaaggtgcctattcagaagactgttttgtgtgctttgttcacatagtaaaaagtgtaattattttttactagacctgattcagtatgcttgtttagtgtttcttggtggaatagctatatagaca

SEQ ID NO: 20975 - DNA, 1185 bp, Mus musculus
ttcatgtatgtatatacatatgagttgagcctcatatagatatgtacacacatacacataaaacacattgtactgtaatactgcaaggttttttttaacttaccattttattttttatacacattaatcagctatcattatttcagttgcaactatgcacttgtataaagccataatgttggagtttatatccttcattcatgtacctaataaggagttgcatgtttgtgtaaaaaaaaaaataactgtaacaagaagtttgaagttaattattccagtttcctaatgcttaaggtaggcagctttacccattttgaatgccttaatttaattttctctccccccaaatctcagcccttttctatatttaactaaagaaagaacaagtgtttaccagctcttaggatgcagcttgctttgtggggaaagtagtgcacaattttatgtgtagtagttatatcagtgttggcctatttgatgtatattggtttttaatgtacttggtcatagaaacaataatggattctattgaaactaatgtgtgtgatgtacctctgttactgttttcatccctttttgcagactttagcaggtctgtgactatagaatatttcctttgctttgaactttctggttaccttagatgtgtttttatttatggtaaagataatttttcatgttttcattcaatattcaaaaattgtctcaaatataaggaaaactaacatgtactgtgtagatatattttaaatatttaaatgtgatcctaaaaaaaaatctgtgtgtggcaatatttcagctttgatatctgggaagaggcagcttcaaaagtgcttaatttgattttcactgttaaatgctgctgagggtagagaacaggtaggacctatcctgccatgctactggcccaggtaagtgtgcttaaccccacagcagagtgcagcagtgagcagcatcaggctctgtacatatgcaaagttcaatatgacattgaaatgtttgcctgatattttagtgaaaccagtagacatttttgattgcttccttctagggtcagtgtagagatgttgtaaaaactttgatcctcgctatagttactattgtggaaatagtggctgttggcccactgatatactaaatccagttctgtgaccttcagatggcccagtttgcatctttcatgct

SEQ ID NO: 20976 - DNA, 1211 bp, Mus musculus
atagcccaagctatcctccaacctgtgatcctccagcagccttttgagcactgggagtgctggacaagagtggaccactcttgactttgacaactcaaatgatggaacctgcccaagaggccatcttcacccttaaagtcatgattatattccccgaagagccagctacagctacactgtggctttcagaatattaagtagtcttcccacagtgagtggggtctgctcagtaacaagtggaactgttcacacctgggcagtttaactcttccataaacataatgcagtataacatcctctcaagctaagcagggctagcaaagtatgcagagatggaactgggttcatataccaagcagtcgtccaacacagtgtgccttactaaacagagccccatctgtttagacgaggaaatctcaactgtctctctatttaagcacaatcccaccattttttaaagggctatatctcacaattaccactgttggaactttgtataagttttagttactggaaggtatacatacagtaaaaagtattgctaagtcctagccaattcttaggtattttattcatactaaagtaagaatatcctaagcatatcctaaacactgttgtctgcagaacttcctctgatgttttataaatccagcctttaaaagctcagtttcttcttctaagtgaatgtcattactctggtatactgcaagaaagtaaatgaagtttactgaaaaatgtttagttttctatatttaataaactttaatttgttgaacgcccccgaattcttaagctgtcatgaattttcagttaggtaggtataactcactagcaagccagctaatcttgtttaggtcaattgccttggacccggaggagagaaatactacatctaaacataaatcattctatggttatttcaaccagttcatctttcctcacatatactgacaatcagaccgttaacttgttaattaatttaatataacctgtagtctttactacaagtgttttccatatattcaatcaggacttttatcactacttaaagcaattcctttaaataaaaacaaaaaaaatcaaccaaaccaaaaaactaaccaaccaacccccaaaactttcccctttagttacccaagctggcttcagactcatctttctgccttcatctcttcaatgtattttaccagcatgcatccccatcactggcc

SEQ ID NO: 20977 - DNA, 1198 bp, Mus musculus
caatcaatttaacaaaataaagtttggaatgatactatatacagaataagtttggcaaatggttttcactgaatgctgagtccgcgaacaaaagaataaataaggtcccaaacacactgaagtcttaggactattctcccgacataaagggacagttcaaggaatgagagctggaaggggccacgagagaggcaaagaggaaaaagaatgaaagccaggaagaaatgaggaccccttagtcctgggttttttgttttgtttcagttaactcagaaaaaaattaggggaacaaggggtaccccgcaggaacagggccggaggtcccctgaccccgccccttcattccccgcccatcctcgccctgccccgccccgctccgctactccgctcgcccccacccccgaggaaaaaaaaacaaaccggtaacctctacccggccgctttcaattggccacgcacatgagcgaagtccacagagaccaatgaaaggcggccacggcgtggcgagcccttccggcccgcctccgcgcgccggcgcaccgcccgctagaagccgagggcgggacgtgggcgcggcagagccgaggcagcggcggcacggacagaatgcgggtgatcggcatggctcgcctggtgctcggtaagcgcgggcctgtggtgggaagccggtcggaggcagcctgaagggccggggccgcgaagcagggccgagtggagggacgagttgccgggcctgcctggggacttcgcggcgagctgggtgggagaggccaggtcgggcccactacgggaggccccggggagtcggagacttgcagcctctgctccccacgagtgcggtccgcctccggtccagctcagccttcacttttataggcagatagcagaggcctgtcccgaaggtgtcttagaagtgggcagtgcccactgaccaaggcctcacaactcctgagcacttaaaatgcctttggtcgtccacccaggtgtccgggaatgatgtttagcgactcgtgggcgaatctgaggggccctcatctcccggctgtccttgtaaatgggcctatagtttttgacattagttaactcagctgatcctggctagaaagtaggagagggaggtggatccctacaccacttctccctccatttactagttgagacccggagcatattttctcactgctctgccagctttttt

SEQ ID NO: 20978 - DNA, 1149 bp, Mus musculus
aaggctaaagtctgagggggtccttacaactgcactcagcctttacctgcgcacttgagtgttgaggttgtagtagtaggaagagaggtaacccttctgcatttcctcaggatgttgttaaagtcggggccgtcaatgcagacaaacatcagtccctgggaggtcagtatggtgtccagggatttcctaccatcaagatatttggagctaacaaaaacaagccagaagattatcagggtaaggattcttccctactccattcccctgtgcgcattcccttctcaaacagttagctggctcctgcagtattttaacgttttctgtaatggcatagagcacttaatatctcctccacgtttcgagcattagctcgtaggtaaaggtgtatgtgcttgaattatttagggtagtggagacccacacctttttacctccctgcctttttcattatagcttaattataatttaattatatttaaattattatatttatatttaattataattaaattaatatttgataaagatctgtttgcctcccttgactgtaagactagggtctggcgaaacatgcatggcttggctcataatctttatgccttgtgtacatatgcagttgactatgaaactgttgttagtgtcataaactattggcaataggtactccaaattctcccagttctagagatgcaaaacttgtgaaagtctgttaggagtcaccgaggcagctagaggagagttctggccctgaactctagggaattaatgctgctctcacactgcatggcaggctgtgatggctgagtggtgagcttattatgctcagcgcgtgcagggtcctccatcagtcgttagccacatacacacaaacagtatctaatgagaattgttgaattgcgacagattatggtcctaattaaagtgttgaatataatctttacagcaaatctggctgatggttgcttaggtgaacagaagtgcctgtgggctgagtaggagaatcacagttaaacacaggatggggagggccaagattacgaagtctgaagtaagctcaaggcagcagactcccatgactgccctccgtctcatgcttacgcctcacacagcacttaactgctctgccttgcttcttttctctgtaaacag

SEQ ID NO: 20979 - DNA, 3030 bp, Mus musculus
atagcagagtgtttgcctgtcacgtacacagcctgggaaaggagatgaaacaatcgtttaagctatctcgaatgatctggatttcagatatgaaaatgagcaacagttgtgtttacacagaatgctctgtcagagtctgcattcatccctgctgtggagtacttgagcgctccataaaatatagcaggtatagatcatatgttgtttaaatgtagcaggaattggttaagactgtttccaatcttccagtgcaatcctggtgaacgatgattttcatttgtttgctgatgaacaagtaaaaaacttgattgccttgtgaaatgattgttttgtcggtacttgtagtagaagtggcgttcatatttgtcatgttgctgtgacagggcagaggtgatagttcaagtaagaaagacgtggtagagctgacggatgacacctttgataagaatgtccttgacagtgaagacgtttggatggttgagttttatgctccgtggtgtggacactgcaaaaagtaagtgccttcagccgagcgtgtaactcggtcacaacacttccagtgtactcatagagctcgttcagtaagagctgtacatcatccctttggtgaagctaccacagtgtatttgaattgtgacataagacagggattaggctgtgcagctcagtctaaggacctgtgctgtgaggtcactgtttctacagcctggagccagaatgggctgctgcggctacagaagtaaaggagcaaacaaagggaaaagtgaaactggcagctgtggatgccaccatgaatcaggttctggccagccgatacggggtgagtgtgtctacagtcatttactttgaggaatactcaagattttcagcagccacttggctcctagcctccctttaaagtaggtagggagatgtttgttttgtaggtgaagaggtgatgtccctcactgtcaagtctagaacccaggacttgtgggttcgttcaccagcactcacctggcttttgaaagttgatcttcttgctctgcagtatgcacattgtgttattaagtacccagagcctgaacagggtttgcctgaatgccacaattcatgtgcgcttccagccgggaattttcccccgtcttggtgatttaagccaggactgacatatgctaggcaagtgatctaccactgagctgtggtccctactcttacatacttgcttttgaggaagtgtttcattgcccagagttgcctccaacttgtgggccttgcttcagcctcccaaataactggagttacagatgttaccatgcttggctggagcatgcttttacttttgtgatagtgaaatgtctatgaagtggttttagaaaccataaagattttggggcttgggtttttttttggggggggttctttatccaagttttcatttaaatattctggttgttatactttgatagattaaaggattccctacaatcaagatatttcagaaaggcgagtctcctgtggactatgatggtggtcggacgagatctgacatagtgtcaagggccctcgatttgttctctgataatgcccctcctccagagctgcttgaggtaaagtacttaccccagtagtgaggaagcttccggtcagctgatggcactaccccttgttcacatgaagtcttcgctttttacacagtttgactatgtagcccaggcgagccttgacttcacagcagtcttcctgcttctgccccacaaagcctgagattacagcatgcatccccagaaattgactctgtcctcctttttttaattgactgcttttcataactttctggcattaaaatacttacactgtgatctaaagctcactaagctgcttaaaagttaagagtggattcagtcacttgggctgttggatcacctggcatggccacggctctgccctggtgtttatgcaggcactttcagttcttacagccccaccaaaggggaacatcattctcgtctttgtagacttctggagaagcagacagccaagagccttacactgtaaatggccatgcacagatgtgtgttcagccgtggcaagccaggctaggtcagggcactgtaattacagactgctaggtggcttgggaatgagcggtggcactttgttccagctgattctagatggcgtgtctgtagtaggcggcattgtatggaaggagtctcttgagtgttcatgttgctcagcttttcaactgcactgtcttccgtgcagataatcaacgaagacatagccaagaagacatgcgaggagcaccagctctgtgtcgtggccgtactgcctcacatcctggacactggtgagcacaggctgtttctcattactgtcactgctggctgcttaaagcacttcctaagtgaactgatatttgataaaatatcaaaatactttattgtaaaccaggagctgcaggcagaaactcttacttggaagttcttctgaaactggctgacaagtacaagaagaagatgtgggggtgagttccgaagccccgctcacctctgagagaacgggtcaggcctggtgactgctgtgagtgctgtctgtagcgcgtgcccgtgtttgtctgctccttgcttaccagctctgagactcagggcgtgcaagtgtgacacgggaaggaaaacgcagtggacactctggtggaatctgagcacacctcgtgcaacgctcctttctgaaggtttaaatgtattttagtctagtacacaaagcatccttaccctaagaccagtctgctttcccaggtggctgtggacagaagctggagcccagtatgaactggagaacgcactagggattggagggttcgggtaccctgccatggcagccatcaatgcacgcaagatgaaatttgctcttctcaaggggtctttcagtgaacaaggcatcaatgagtttctcaggtaattgttttcttagttgtttgttttatctgttgggttttgctttcattgttctatgtaagccaggaaggatgtttgtaaaattgaactt

SEQ ID NO: 20980 - DNA, 1429 bp, Mus musculus
tgttctactaaaatcacaatttagaactggagaggtgcctcagcagttaagaactctggctactgtttcaataggaccagagttcaattcccagcaccatcataatggcttaaaactatgtgtaacttgagacctgatagggcacacagccatacatgcttgcaaaacattcatacacatacattttttaagaaatcacagtttaaagtgatttggttggtttcatgtctgtaattgaacatatgccacttgaaaggctgaggcagaaggatggccatgagtttgagaccagactaaactgggctaaagaatgaagtcctattttaaacagaaagcctaggtgaggtgcagtcagctgtgggagtcaggtggttggacctctgaatttctgtggggttataattggtgcaagagccaggctgggatgtggaatccggctggaatttgcttttctattgagacctcttgtattctgaggctctaactgccgctctgtgccccagctccctgtggaggacgacattgacctcagtgacgtggagctggatgacctggagaaggatgagttgtgagccacggcccagccttccttgggctttccttgggagcgagcagttttccagcagtgaaagttcttccgggcagctgtctgccgctggcctttctgagcagcacatgcggccactggaaactgccaacagtgaacctcagcgtctcaagaaaacactgacgaattctatgaattgtagcagtgaattggattgtattctctggcatactttgaagaaaactgggctattgaaacatttttccctcctgactgctgcttgaatgttcctggaggctgtttcttatgtatagggtttttaaaatgtgattcctttgtttgaatattaatggctttttccattaaagaataaaatgatattttggacaatgctgataaatgtatgaaattagtagcacattataaaaccagagtctgaggtttagcctaaaatctaccagcactgtgacctgctggctcacatctccaccttcctgtagaaatggctgtaagcggaaacgcagaccttttggtaaggatgtggttctgtgtagaaaacgtggtaccaagtgagaacagcatttcatgtcctggagtctgtctgcggcttcactattaggctcagggtttcagggtgtttcattaatctcccattaaaaaccccagtgggttgccaagttaacttcacataaaactcttgagagaaagtttggaattaacattagaacacaagaaaagactcaggactgagcactttattgtaacttaaaaaaataaatacactctaactaacgtctgtgattatcttctgagtcagaatcctgcaggactcggttgtctggcaaggtctgaggctgcagtgaaacaggctggccacctagt

SEQ ID NO: 20981 - DNA, 1150 bp, Mus musculus
tctatagaaggagagaaatggggatgtgttctcttagtcagtaaggcagccttcatgtagagctggcacgagtgacgggtgttaccagtagggagacttgagagcagtgtgggctctcactgctgccagcctcccatcatggaagtcttggttggagtagttgggttatctgtggattggttttcaccagcatccacctgctgctgagtttctgttgtcttaggaggctgatgctgcagtgctctgtagtgtttgctctgagtgatagtaaaatgaaggctgttcaaacaggaagctgctgttctcctctattgtcaaatgctcctcttcccagcctcacgcatgccgttttacccatcttcccacgtttttgtggctttataggtatttgtttgttgcatcagctgtgtgccaggcactgtgctagatgctgcagcacacaatacatagtatattagcattgcttcatcctcaggattaaaacgggaagaaaggtggtttcaggtctgcaccatgagctgtaggaggaggactctttgagagtgcctgggaggagagacccttcctccagagtgggctaggtgcctgtgagaaactcagtaaactacccagagtgactttggggagagactggagcttgagtctgtagactaggtggaaggatggggtgagccacagaatgggagtagcatcgcagccgcaggagagtgcctgtggagagcgcagggagagggtctcatggagcagagcaagtgccaattgggaagggtctggaagtgtgtgctagggaggcgtgagagcctggcccatcatgagcagcagagtgaggaagccagggctgccctttggaaaggttgtttgtctctacaaagagaatggcatgggatctaagctggaaacagctagaacaggctgtggcagtctccacgagggaaggcagtgctaggctatacttttcagcatcaggacttcggtaggtcctataaataaagaaacaaatctgactcagagttaatgtccacctgtgaagatgcaggtggactataagaaaatgttcctcttgctcgcacctccctgtcaagggtagtctcttccttctccccagggcgtacttactgtacttttgagcagctagtgccacatcgagagg

SEQ ID NO: 20982 - DNA, 1166 bp, Mus musculus
tttgtggggctgcaggggtggcttggcaattaaaaaccacactgttcttccagagggcctgagtttgatttccagcacccatgcagcgcagtcatgaccacctgtaacgcaacgctaggggctctgattctttcttcttgcctcgaaatgaatatgtcatctatatttttaaatgtaaaacaaacagatacgtttcatttttacttcatgagttgggtttaaactctctctcactcactctcgctctgtgtgtgtgtgtgtctgtctgtctgtctgtctctgtctctctctctctctttctcttctcattttgttttttgagacaggggtctatttagtaggcagtcttctcaggtgtggggtgtggccttgacagtactcgggtctttctgacctctgtggctcagctttgcaggaatggcttcggcaagttggctcccagaaccaacttgttacctccaactcaatttaataccaaaatttggaaacaaatgaaaagatataaacattgataaaaatataagttccatgaagctgagcacctaatgcagaaattgtttccgtgataatcttggcacatgctccctaagactcctgccagaaatgttaactggatctcatgaagaactgtctgtatgatctcattatgaggagcatacttcaggacgggaacctggacaattcagctggccccagccccagagaatgtccccatctgaaagtcaggaatggtagagttgagtcttctagataagtgcatcatgtgatccttaattcaatgtttaaaaaacaactttgtcagaaactctgtcctttaaaggatataatctagtggcttctcatgtacccagaatcatgttgtcaccaccgtctcactctcaggtccttcacaccaaaaggaagctccctgcctgccgcctctctcctcatcccaccagccactgtagcgcttggggctgcttctgagcattgcatgtaagtggaatgctctgatagctgcttcggggtttccctgtgctcagggtccggctctgctccctttccctttgtacggagtggtaggtttagttcactctgtgtgtacagcacccctcccccattgtcagctgctgagcatctttatgactgcatgcaggtagctgtgcctaaggcaggttctgtccatc

SEQ ID NO: 20983 - DNA, 1109 bp, Mus musculus
ccccttaaatcttgtcttctcccctgctgatgatcaggcatcatttcagatattggaaaggcctccatgaagtgaaaagttcaccctctactggaaacaggacattatcatgctgtaagaatggcttgggttagcccagccgtggtggcgcacgcctttgatcccagcacttgggaggcagaggcaggcggatttctgagttcgaggccagcctggtctacagagtgagttccaggacagccagagctacacagagaaaacctgtctggaaccccccccccccaaaaaaaagaatggtttggggttttttgttttgttttgttttgtttttttgtcatttgtttatttgagacttgagtcagggtttctccgtgtagctctgggtgtcctggaattcaatctgtggccttgaactcatagagatccacttgcctctgcctcctgagtgctgaagttaaagggatgcaccaccaggcccagccagagtgtctgtccccactgtcttctgcccctcaggactgagtcacatgatgactgctgagtggccctgtttatgtgcatgagtatgttggcaggctgactggcttgcttatattcctttgtatagtttttaagctatttttatatcaagggtataaattaataaataataagtgaacgctactggctatttgtttagcttatcacaaaattacgtagttattttctgatgaagtactatttgatacaggcagcgcctataaaaggagatgcttttctttggacattttctctgaggaagactcctgcctgtggaaatttaaaattcactttagcttccatactttggagtttctcatgtaaacaaatagaatgggagctcgttaggctgtacctatggtgagtccacaaggcaggacacattagttagcagtcagtgttgttggacccttgtctctttagcctgtgatgtgtactcaagaactttctgactgttggtacatgaatctgcacatgcgcatgcacgcacccacgtacccacgcgcacacacactcctacctctttattaactattaagcagatccctcctggggctgtgagcccctggtgccctctcttccctttctca

SEQ ID NO: 20984 - DNA, 1076 bp, Mus musculus
gggcgctcctcggggtttggcggcggcgcctccatgggtcaggccagccgggccaccgtgctgtgaggtgagcgggacgcgggagggatgtgcggccacgtgtcgcgaggcccggactgcggccgccggcaggggacacgtggcccgggaccggtgaccttgcgagccgccgccctgaaggcagctgctcctggacctcggctgcaagccctcggatccccccatgggagccctcttcgcgtcagccggactcagcgctccacttgcccgggtgatgatggagggcaagcccgcggcaggtgcaggggagcgcggccgcgagcagcggtcctgcagttagtttcctgctgctttctttagtttcactacgtgtacagagcagaggcgatgacccggagtggaagttggtagaccaaatttagtctgggagtcactgctaatgaatacccaccagctgtgacttggaattagaactccttgaatgacttagtggtttaggggaaaacgggttcccggctgtcccggaaaccctactcagaatcctcaataactggaaaaagtgtggggggcagagcctgtcaggaatgtctgggagaggacaaagaatgtagtggtttgttttattcaaacctaagatcgggcagactttgactgattggaattcttttctgttttaattggcttatatcttccagagttaccttcttgtgctaattgtctgacacgatttagctacttcccataccaaaatgtgttagtaacatttttctttcagatcttatctattatattatttaggcaaagctacagaaaggcaaaacagtatctcaaagcttttcgtgtttaaaccggaaggttgcctggaaaatacttaagacctaaaattacaaagttactgccaaagcccattcatcagttgtaaatgatatacaacgagttggctggctctcttctctagtcttaacttaggagaggtttaggcagctaacggaagttgacattgccaaaagtctcgttaaattaaggcttaacatgtttaaccatgcatggatttggatttatggcaggctcttccc

SEQ ID NO: 20985 - DNA, 1164 bp, Mus musculus
gtcctgttccttacacactgcataacatggctgctcccttctctccctcttagatcaccagtgtaatcaacccagctctggacaagtacttcccatcagactctggagtgagaatcatagctgagccaggcagatactatgtcgcatcagctttcacgcttgcagtcaacatcattgccaaaaaaaccgtgtggaaggagcagcccggctctgacggtatgtggtggcagggtgagtcatgtagggtaactggaagttgatatgctgggtggtaattagggtgatctgtttttctagatgaagatgagtcaaatgaacaaaccttcatgtattatgtgaatgatggagtatatggatcatttaactgcattctttatgatcatgcccatgtgaaggccctgctgcagaaggtaagttctgagcatgctctttagcagtgagaatggtggacaggattcggggctattaaagaacaatgtcttcttcattcagagacccaagccagacgagaagtattactcatccagcatctggggaccaacatgtgatggccttgatcggatcgtggagcgctgtaacctgcctgaaatgcatgtgggtgattggatgctgtttgagaacatgggtgcatacactgttgctgctgcttctactttcaatgggttccagaggccaaacatctactatgtaatgtcacggccaatgtggtgagtgagattggttttgcttgtttggtggtggaatatttgccaaccaggagccagaagctatccctggttctatccctggtgcatacatacacacatactatggggaaaacaatatgtgctgaaggggagggatcacttgagtgagggccttgatagaataataacttgcttgcctgtctcaagaaaaggactgaacttgtactttggtttttgtctttttgatataagaaattatttttgtaccttgatctaaatacagataaatggaagggagttctccaataatactgtttgcttacagattcttatactaggaaaggtcttagaactaaaagcaattagatcctttgcaactaaaatgttaattaatgcaactaaagtattcagctggcatttgtgacctgtggtgcattgggttgtttcctggtgatgtagtgacaagggtgaggtctca

SEQ ID NO: 20986 - DNA, 1176 bp, Mus musculus
ctgcaagtttagcttgtgttaaggcatttggggggaccatttaacttactgctagtttgggatgtctttgtgagagtagggttggcaccaatgcagtatggaaggctaggagatggggggtcacacttactgtgttcctatggaaactttgaatatttgtattacatggatttttattcacttttcagacatgatactaacgtgtgcccctcagctgctgagcaagcgtttgtagcttgtacattggcagaatgggccagaagcttatgttgtgacccattgtgaaaataaagtatcttgaaataactgggcatcagggaatgtttgcaagtatccttaaagaaggcaccaacatctgcacaggctgctgtgtcatggagagacccactgcctgtggatctgaaggttgggctagccccgcatagcacagaggagaggtggatggcacaaggctgtgccctctctgtacagcatcagtctgcttagcccatcccaagtgtgcagttggctgagaactttgttgcccagagtctgttggtgaggaatgtcacctgcctagtgaccggttggcatggccacttcctagggaggtcatctgaagtccttgcctgcagaaaccctgactgttccctcaacccttgactcccaattgcatcaccacctagtaacagttgggagtatcatacaacatcggcagtcaacttcctgtaataaattcaacaacagcaactactgtgttgtaaatctttaccctgaccttttagattatagtttacacacacacctattgcctccccaaagtatgccagactcttaaactagttagcattgaaaacctgtaggtcaggaggaagggcagtcatatcctgtgatcccagcactgggagacaccagtgtgggctacatataggctctatttcaagcagaagtggctgagtaaaactgctgacctgtcatggagagactcactgcctgtggatctgaaggttgaactacctgcacctcaacagctgcttcctctccagggtttcctttcccaggcacggggctttatttgctaagaactttcttgggagccacaaatagtggctggagttggaagatctgaagtgaagctgctgtgtcctatgctgtgccagtaggctcaggtggaaatgttatagggttgaaggctcc

SEQ ID NO: 20987 - DNA, 1154 bp, Mus musculus
gctgcctccttttgcatctctatgtctgcaatccttgtgtattcctcacccttaataataaaatacagaggataatggggcatcactgacaccagggtctaaggctggagctgctatgctgggtctttacttttttttttttatttcatttccttgcaacccttgggtggaacccaggctgggcaaggcctctctgttgaggtctagcaccagctcctctcattctctctgggatgacttgccctgaagaaagtcagacgacatgtggaagacaactcatgaagaagcagtgcctgtggaaagcctgagcctgccaggaagcttggaggcacatgtctgtccctcagaggataaccctgtggctggcgttagagcaaggctctgacctcgcctccttctccatctggcctaaagaggctatgatttcagggtctcccaaaaggaccaagtgcaggcaggtcctcacgaaggccctggctgtgtcctcatggcaccttggggtctgccctctgaggaccagtggcttgcagctgagcggcttaatctatattaaggtattgctgaccatcattgggctctgggaacagatttactatttttagcaaaagtcagggagtgtgataaatcctgttagtccacacaactgaggagaggggttgtttattttgaagagtggctttttaaaaacattagtcatggctgtcctataggaccctaatgtgtcaccccacttatctgagatgtcctgagtagacaaaagtagacccattggaatggtttctgtctaaatgctgacccaatgagttaattcatgttccctgccaggaccctgtggaacttcaagtctctggtttcagggccagcagagaaactgaggcaggaataatatagcctgcactttcctatgtaggctcatctttgtgattctcatctttaatgaaccattcttcctacttgccttacatggctgctatggcaaactttagggacatcatagcaacacagcataggttctaaatgctctatgtgtcacctccagggtggctagaacccaaaccagacaatgacaagtgtcagtggagatatggaggtatttgtgccttgctggtaggaatgggaaacagtgcagccgcattgagaagtagtttgatggt

SEQ ID NO: 20988 - DNA, 1190 bp, Mus musculus
taatggagaacaggggtaaattaacagtgatacagactgtccttggtaggctcctggacagctgtgtgcttgggatgtgggtggaggcatcagggtcctctggattcatatcctgcaggacttgtgggtgggtgggtgggtggtgtccaacaggcagccagttcttccgtagagacagagaaagtgtctttaggtgcctggctcatgggctatctcctcctgctttctccttatctatctatctatctatctatctatctatctatctatctatctatctatctatctatctatggacagtctttatgaccagcagtagagggtaccgggcacctccaggatgccaggctttgcctctcattggtagaatctccattgcagcagctgccagatgtgggtcctgctaccacggagcctgccagcctgtcagcttggtgtcctccacacgggaccggaaggatgactgggggatgggggggggtgggactacctcaggacatggcacactgacacaatatggtggctcagggctttccataggtcgttaagggtagccagctcatagggagaccttggttagtgactgtataggggctggtcaggagatggtgggtctaacatagaaaccaagtggctatcactcggagtctaccacctagttagaagccactgaggagtgggacccactctctcctcctttcttcccccaccttttgtttttgtttttggtttcttgacagggtctcctgtggcccaggctggctttgaattctctatgtagctaaggatggccttgaacttttgatccacctccctctacctctcaagtactaggagtataagcacgtatcagcacacctgctttatgtggatgtggtgggcgggtggttgagccacgagcgcgctacccactgaggtacactcctgaccttttcccagaatttcaatctgtgatcctaatgaccttcaaatagtgggaagggaggattcccagagaagagtctggaatagtccatcatctaactgcagttgacttaccagtcttgcagctttcgtttgctgggaaggtgatgtgatgggggagcctgctctgcattctgccctgaacttctgccactccacagcctgagcaaaaccaccagccccccacccccacccccgcccccacacttgtcagcaggggttagcag

SEQ ID NO: 20989 - DNA, 1185 bp, Mus musculus
agcgacccatccattgtccggttgctgcagtgtgatcccagcagtgctagccagttctgaggggaatgggcttttggacatttgtgagaaacacaggcttggcctgccatgttcagctttgcttgtaaaagtggattcctccgtgatctctcctgctctcccaggacctgggtccaggcagcaatcgcaccctcctgacctggccaactgtggcttcctcctcctccagttcaggctggctccttccaatggttcaagtgttctcggctgtagggctccttcctgcccacagagggcctggcggcccttaaggacaccagacaggacttttcagtatcttaccaagaccagctaatttattctatgatcccagatgactttgtgaggatgaaaaagatggagagtagacaggcaagcccttcctgtgcatggctccacctcccttgttcattttctctgaccaaagccgcttgcatgtatataccgtggtatccttacttttaatatatgagttatatgtacggtgagatggactataatgttcagcccctgtatttaatgcctctgactgcctttgaagcatggtcccctgtggcctgtgattccccccacccccaagtctggctgtgctgtgatatttatgcattcatgatttgcctgattccacaggagatacatgcatgcccagggctgtggacatctgcctccgtcctgtaaatgcaggtgtttctgtgtgctctgtccttcctgtcgattggtctggcatattaaaatgatcaaataaaccaaggtctgtgagtttcctgtgttgcagcattcaccctgttcatggtgaatcctgagcagaagtgggtccctcttctaactgccactatgtctaaatacattctatgcctgttctacaatatctgcctaatgccaagaaagccttgtgaaaatataggatgactgttcttggcaggtctgactgtgacacgctgcctccctccccactccttctgtggtttaatcagcaaggtagcaggaaagccaacttcaagagaaaggagtagggtcagcagcagcagcagtgagggggaagacctgggctctcattatcctcttctgtgatcatgcctatgtctggtccctaaaagtgcttccatcatgaagatgtttacctcttgtacccagaagtcatcagga

SEQ ID NO: 20990 - DNA, 1157 bp, Mus musculus
atgggtcctatccttcctgagggagctggttacaatattcaggcaaggcaacctctgaagaacaaacatgtcatgcttatgcagcaaggagagacctggccctgatagagccaaagaggatgtttggagtcggagagggacagagaagataataaagagacatgtagatgggtatgaacagcaacaccagcagcagatacatctgtaaggaactgaaatatcttccagcagttaatacatcttccagcagcagatacatcttccagcagttaatacatcttccagcagccagagatttcagaaagaggtgagggcaaagaacaagaacccgtgcctatggttcgtgagttacaggcatccttgtggcttttgaggctgcaggtgactctcggaaaccttgtgtcaccaacctgggtggagatggaagttgttgggtagaaatttagaagtcctcatttgcaatagaagtgtctgcctaggctcgagagccggatactgttgtcctgcggccgtgccgcttccagtctccagaccatgtctcacttagtcgagccgccgccgcccttgcacaacaacaacaacaactgtgaggaaggggagcagcccctgccgccgcccgctggcctcaacagttcctgggtggagctacccatgaacagcagcaatggcaatgagaatggaaatgggaagaatggggggctggagcacgttccttcctcatcttccatccgcaatggagacatggagaagatcctcctggatgcacagcatgagtcgggacagagcagctcaagaggcagttcacactgtgacagcccttcaccacaagaagatgggcagatcatgtttgatgttgagatgcataccagcagggaccacagctctcagtcagaagaagaagttgtagaaggagaaaaggaagttgaggctttgaagaaaagtgcagactgggtatcagactggtccagtagacccgaaaacatcccacccaaagagttccatttcagacaccctaaacgtgctgcgtctctaagcatgaggaagagtggagccatgaagaaagggggcattttctctgcagagttcctaaaagttttcatcccatctctcttcctttctcatgtgctggccttggggctcggcatctatattggaaa

SEQ ID NO: 20991 - DNA, 1146 bp, Mus musculus
aatagtgggacatttcaaaatgtctcttggttagtgatggagctctgttattacaattgagaacaaggaagactgagctgaatagtgtccagtgatgtgaaaattcacagtaccttgaattttgccttatttccaatactgcatcattcattattctggtattgtcttttaggctacacttgggaaaaccatcatattgaaagacattgtcaaagttcaagaagaaatgaaaggtaattttctcttgaaagcttatgcaattatgcctctaaggaaattttactatgatatggacgctctaaatcaaagcaggagtgtaaaatgtcaatacttgaagtgtaactattgttacaatatttttttaatatttattaatttattgtatataagtacacagtagctgtccgcagatactccagaaaagggcatcaaattttgttacagatggttatgagccactatgtggttgccagaatttgatctcaggaccttcggatgagcagtctgtgctctttaccactgagccatcacggcagccctaattatactattcttaaaaaaatgtactgcctagatatacttatctgatttatctatcaaagcattcctttaaaaaaaaaaagactaggaaacattgccttaagggatacctttattcaatttgtacctctactagagctatactgatctgacaatgtatatagacttacaagacttagatattgcacatcgaatagtaataaatatatatgcaaaaccttccgataagcaaataatccatgggaaagttggtgatactcatatctttatagtgaaattgatcatttgtttagggtacagtttatgagagtcaagagcgttgtcataggagaaaccttaattcatatattacaggtctatgaggaacaaaaagtcaaactgtgaatgcagtgtggaaacctttcatcttttactcttctattaatatatgtatcatgtgtcacaattgataaaagccatgttagcatagggatattgaaagaagcaatgtaccgctttctatcccagaactgtgagaaaattgtcagattctatctttggtagacattctgagtatgataaaagtttgcaatgaattggttttctaattttactgggaacttctcc

SEQ ID NO: 20992 - DNA, 1149 bp, Mus musculus
taatcctttctcagctaaagctttttgtaaatctctataacacaaaagcaaatcctgggggtcttttcccaccatcaaaacatcatctgtgaaatgaatgatgtaaatcataggccattgttgtctcacaggctgaatggcttgtgccacaaacttttgacataagggaggactattagccatgccctctgggagaactgtccattgatatctctttataggtaccttaaaatttatagaaggaccactaaaagcaaatctttaacaatcctttggatgcaaaggaatagtaaagaaacaatccttcagatctaccacaattttataatatcctttaggaaaggatactagggatggaagcccaggttgtaaaggtcccatagataccatggtctcattaacctttcttaaatcttgtaacaatctccatgtaccagatatttttcttgataattaaaattggtgtattccaaggggacagagattctactaaatgtcctgcctctagttgctcctgcacttgcgaagaagtggcttctattttttctttaggtaaagaccactgatccacccacactggaatatcattaagccattgaaatttatctgcctgggatacaggcaagatagtggccattgccgaaaatactccaaaccttttgtgtcagagtgaggtttaggatcttcaaaattcttaattccttgtcccttcttttttactccatgaccaggcaaaagtccctttctgagcgtctacttaatcactatctcattaggacggtacattataacgcttatctgtgacaagagatctcttccccatagagttacaggcaaatttgacataacatacggctgaatttgtcctgatttaccttccccatctctccaggttagcaatttggagcttcgttttgggttactagcataaccaattccttgaaggtgagtaagtgtataagtcaaaggccaagttgagggccaatcctgtcctctaataattgtttcatcagctccagtatctctatcaatccttcaaagctttttccattaaatgtcaatttaaggttaggtctctgattagtaatagattgaccccaattcacaccagaggagtcaaaaccaccttgtcctctctcattcttaaca

SEQ ID NO: 20993 - DNA, 1279 bp, Mus musculus
ccagcaccatgtctgtgagacttgttctgatgagagaagggagtgagcaggtggagtgggaggaggggattgggagacggggtggaggtggggagaggggagtagatgaccctgtgaaactgttgatggcacagaggtgtttgggatacactctctgcctatgcaggcctgcccttttccagcccacttgattcagctctgattgagggagggagactagaattcagggtcaggtacacctagcctgcatcctgcacccttcctagggctctataaccatgggcatgtcagtagaccctctgagctgtaggcttcatccctgttgtctgagttagggtttccattgctctgatgacacaccatggccacaagcaacttggggaagaaagggtttattcactcacagtttccacataacagttcatcatcaaaagcaatgagggcaggactcaaacagggcagcaacctgaaggcaggagctgatacagagaccatgaaagggttgctacttactggcttgctccccatggcttgctcagccttctttcttatagaactcagaatcactagcccagggttggaccacctacactgggctgggctctgctccatcaatcactagttaagaaaatacactctggtcaggcatggtggcacatgtctttaatcggagctcataggagacagcagactctctgtgagttcaaggctaacctggtctaaaaagtgagttctagaacagccaggctgttacatagaggaaccctgtttcaataaacaaaacaaaagggaggaaaggagggagagagggagggatgtagaaagacagggagagagagagacaaagagagagagagagagagagagagagagagagagagagagagagagagagagagagagaagaggagactggacattgtccattttccagagggttccagactttaaccagagcactggctaatcctaagtctcccacttccattcctcaggcaaaatgtccctggaagaattcaacaaaggtgccaagagcgaccatttattgtccggttgctgcagtgtgatcccagcagtgctagccagttctaagggaaatgggctttacacagttgtgagaaacacaggcttgacctgccatcttcagctttgcttgcaaaagtggttttctctgtgatttctcctgctctctagggacctgggtccagacagcacatcaaactcacctggtctggctggatgcagctccctcctctgtctgatccaatagatgtccctc

SEQ ID NO: 20994 - DNA, 1200 bp, Mus musculus
atctattcttctatttatctatttatcatctatatatcttcaatctatacatatatatatcacctacaaatctatatatctacatatctatacatatatatttatatatctatatatttatacacctatacatctatatatctgtccatatatcaataaatctagatagatagatacatctatctatatatattatctataaatctatatatctatatatatataattatatatataattctatccatctgtctatctataagtctatatgtttagcttgatgtagccttgtctaaaaggactgttatattctaggttttagacgttcaggctgagaggaaacagtatgagtaacatttgatctaataccagatcctcgactctggacccatattttatgataatttggggattatgattacatcattcctacctcctgtgatcaattagtaaacacatctaatgcctgcagctggcaagaagaaaggttgatggcatttcagttctcggcctcggtgtctttggaagagaccatgactgagagggaagaagaagcaggaataaggtcctatgggtggatgaattgggagagcatggccaggagggtgagcctgagagtatgagcagcctgggcagaatatgtcaagtgagccgggcgtggtggcactcgccttcaatcccagcacttgggaggcagaggcaggcggatttctgagttctaggccagcttggtctacaaagttgagttccaggacagccagggctatacagagaaaccctgtctcaaaaaaaaaaaaaaaaaaaagaatatgtcgagtgatatctcacagttctttgtaaagaagtagagaaattagcataggggaatggtatctgccccatgctggtgctttaatgcttataataattattattatttcttattttattttttcacattatcatttactacattattatatcatattatttaatattacttctttttattatttcatattatttattattttattatttgatagcattgtttcttattcttattatttcttattagtttattatcatttctttttctcttcttcgtattattattattatttcatacctctataatttatgtggtggtaagaaatccacaagtaatatttaccacaacaagttggatgcaaatcagcttgtgaccaatgactttttgaa

SEQ ID NO: 20995 - DNA, 1138 bp, Mus musculus
aagaccctcctgcatatcacatatttacattatgattcataaccatagcaaaattagagttatgaagtagcaatgaaaatgactttatagctggaggttcaccataacatgaggaactgtattaaggggttgcagctttaagaaggctgagaaccactgctgtaatggatggcactggacatacagaggatattgcttagccagcatggtggtagggtgtgataggaagccagacttggggtttcaggtatccacagctcaccttgtgtcttggccttgcaggtttagtctccactgccagctgccatgggcaagcagaacagcaaactgggtcctgaggtgctgcaggacctgcggaaaacagggagttcacccaccatgagcttcaggagtggtacaagggcttcctcaatgactgtcccactggccacctgactgtggacaatttcaagatctaggccaacttcttcccctacagagattcctccaagtttgctgaacatgtcttccacacctttgacaccaacagcgacagcaccatcgactttcaagagttcatcattgctctgatcatgacctctcggggcaagctggaacagaagctcaagtgggccttcagaatgtctgaactagacagcaatagctacttcagctgcagtgaaatgctggagatagtgcaggtacctgcacttgacagggcctggagcatggggagtgcagggacccaggacccctatccccgaccccatacaccaggtcattcctctgcccacttgctacctgctgtattaaaggactggaggtctttgcagcgaggaatgataaaagccaagcatctatcgattgcttgctggacatcaggccccagctgagctcatccatcaggtttattcacacacttctataaaacgggtcttttttttttttaaacaaaacaaaacaaaacaaaacaaaacaaaacaaaacaaaacaaaacaaaacaaaacaaaacaaaacaacctctaatgagatctgaggctcagataggtgattaagaattgtcaaagcaagaactgggaaaatggctcagtggggaagaacacttgatacctagcatgaggacctgagttctgatcccaacacacacggaaaagtcagg

SEQ ID NO: 20996 - DNA, 1156 bp, Mus musculus
agtcagtagtggtgcttgcctttaatctccgtcctcgggagccagagcaggtggatcttgtgagtttgaggacagccaaggctcagaagagaatttctgtctcaaggacacaaaaacaaaacaaaatataaaattcttggtgctgaggcgatggcttaattggggctaggttcaggtggggatgttggacagagatgggaaggcgcttgcactctctgactctctctggactttctcagctagactaaaaccagccagatgccttcccactccttaactcatataatccttataccaaccccatgagttgagtcaggttcacaccggatatctagatcatataatgcaggccctgatagtgtacagagctgaaatctctctgtggagggtcagagcactctctcggttaccctggagggtgttctgctaataaatcctcgttcaggcagttgcacagccaactcaaaacagctcttctcctcatcttctattttctgtaaaagcaggaaggggactcaagcagggcaggaccaaggtgttgtgtctagaacattgcttataccgtggctttgccatttgcagcacttgaaaaaaaaaataaaaatcactgagtccagttgctgtgagactctgagcagagtggaagtctcagagggtaaggcatggtaagcctccactgtgtggcaagctggacctgaaagatcctctacgtcctttgcttctggtggctgcagtgcagaagagtttgtcctaccagttgctgaacatggggtgcataagctaagtgattcctggggccttagctggtgagggacggagctgggaattagcatgaggccttacagtccaaactcatggtgccttctactgttgacacccaaggaggcttcttggtggcatttggagggacagaacctgagagaaaaaataatgtagggtaaagtagtcagagatggtgagggctggtttccctgctgggacaacagcctgccttacatgaccagcacagaggagaattgaagttgaagggcttgcaaagtgctgcccagctcataggtgatctattggagttgttaggacttgtgaacttatgcaacatggccctggtagctttgaaacttaaagcaaggtggaatggggactgttcgtctttctt

SEQ ID NO: 20997 - DNA, 1195 bp, Mus musculus
catcaacctcagggaaacaaggagcatggaacagagaggaacgggaacctctacaagaagagcgatgggtaggtgactagccagctcggtgctggttggagcgtggctgattatgtcctgtgttctatctcctgagttcttatctaaactctcccgctctcccctcttctccttaaggatccggaaagtgtggcagaagaggaagtgttccgttaaaaatggcttcctcaccatctcccacggcactgtgagtatcttttaatcagcactctcggctgggggtggtggctgacgtctgttatgtgtgctctagtgaggacacattctcaaaatgtttccccttaagaaacttgtgtccttgcctgtgtggggagcacctgcaccctgggcatgctcctttggtcactgttcatggcatcaccaaatccaggacaaaccagtcactcaggccacttttcttttgtagcctttgacttccagaaaccgtcaaacctgctgccccagctaactttatgcagacatcctccttacttacagagacttctgctgcctctagaaagaaaggaataatctctctactcatcaggattttgggaaccaaatctagagagaaagggaatccatctttcttacagaaatctcatgtgccttaagttttcctacctttcttcctgttcgtaaaggctcatgcactataatagagccttgtaaggtgcttgtgtgagaatcaagtcactttccagtttagtttccagagatcaggaacactgccacaggcctttactctccccacctggtggggctggtgggctgatactggttgggattgtcaaagccaagttggccaccccttcattgaatgcagatgtgtaatgtgtactatattacacacacacatatatataatacagtctcataccacatatgtctcccttggtcatgagcgtgggcaataacctgagcctttctctcagacttttctcccatcctatagtccccttaagaggcataactgggcagaagcacagatgggtttcttggacacagtagaaaggttttaacttaagatgggtttttttttccatttttttattaggtatttagctcatttacatttccaatgctataccaaaagtcccccatacccacccacccccactcccctacccacccactccccctttttggccctggc

SEQ ID NO: 20998 - DNA, 1152 bp, Mus musculus
gcactgactcgggagagtttaggtcatccatcttcccgtaacccaactgctcctcactcctgagccttcggttaggatcttgatgtactgttctctccacacagcaggtgcacaggaatgagggggccttactgctcagactaagggaagtgtaaccgtgtgtgcatcctttagatgcagaacgtcaggccaggaggacggctggatttccctgacaagtctcatgctctctgatgtggttcatttccacagtgtccattagtttgttttagctgagacacacatcaggtcgatgcagaagtcactgtagaggaagttagaactcccatgttacaaggcatagctgctttcttggggtccctaaggggccctccacttaaatcaacaacagggctgtgatcccttgggcatgcctggtgattccgtgctggcattctaagtggcttcaagtgagttccagagttccagctggctctccaaaggcataataaaaattctttaaattttgatgggttgccccagttctggggcagacagtagttataattatctccaccaggatgctgatgctcttcttagacagtgggtatgtatttttaaaagctgtgttctttgagttgaaccctctcaagaatcctcctcttgcaggggcaggggggagtatcctctggctttagcagccacttcctcctctagctgtaggtgggtcccagagcagcctccacctaactaccccagaggagcctggataacaactcctggatcctgaagggccctccatgttcctgtgccatgcaaatgcttgcatattgcagatgtggatgacccaggctgagatcgaggactgggcgagcattatttgcgggtatgggtttttaatctggctcctatgtagcttgctcattttgccagtcgttcctgactctgcttcattaccagcaggaaagggggacaggtttccaaaggtgggtctgaggaagtaggaatctaagagcagctgctggcacacagctggaatagggtctgtgggaagtgtaagctcgtagggcgtgcttgcactatgggaaagactttcccttctggaagcaggcagccactgggaagtgaaattgctgcactctttactcccacagaggagtacaggtaccctct

SEQ ID NO: 20999 - DNA, 1669 bp, Mus musculus
tgtttgtagtcaagaacatatcagaaatctgtagaccttggggagcccagtgcccccaaacatcccagttacactatgtaagcccatcgcatcactcctaaacttacactatgtggggtgggggaggggaactaggttgtatatgataaaaatcaaaactcattagtttcatgaacttgactgtcatacctctacttaataacattaagcacaggtaagagccgtggttaggatatgggaaatgaaagaggcaagcataaggcctgaacgaaagctggagtttgagcaaaaggaatggattgagggttaagcttgacagtgaggcgatgttgctgccggaagtggcacacttgatcgaagcagccccttctttatgctctttgtgcaaggctcttacaagctcagagctctctctttgtttctttcaaggaaaacaggacaaactggaatgtcttaggatgctatatagtgattgcttcctgtctttcagattctgggtgaaaatgtgttagatctgtaattgatctctctctctctctctctctctctctctctctctctctctctctctctctctctctctctctctctctgctcccccaacactacatctgtttttcactacttgttaatttctgtccctttagcccttctcatcacttttctcgtagacttaagagcgtgaacagatgcgttttgcacattgcacttcccaataccttttacagtgcctcccccacccccacccccacccccacacgcatctgtatcatcggtcttaggtacctggtgccagctctctgaggaatctagttgatttatgtcaacattttaactccagtcccaagctaatctatcaggttcactggtacataaatacctaggaaatatttttccgctctctaatttggtggcactattgtgcagtaatgggtagtcctttttaccagaagagaagttctattgacttccctccttaattgtccttcctgttactcgctctttgcaaactgagaagagaaagcaactgaaaggaaagcattgtagatatctatttatatttaaagtttacatttcacaagcgtcagctgcggaatcggactttttttccgctgctttccatcaggtctgacttgggggacgatgactgagaaatagtgcgcagactaatgtgatctgctgaggtggagaatgacctgcagccaagaatgctattttgagatgtatgatattcaattcattcacttgattactttggtctagttgcagcgcaactgtatatactgtataacctaaacggattattttcattgtcttaatgcagtgatttataattagagcatgtttaataaattgacttcctgttaaccagtcatttgactggaaaaaaaataaagtacttttaaatggacatggttcatctgtaaagtattagctactggcgcccagcaaccagcaggcgtcctccaagattcttctaactctgtgataaactaagtgtactgggtattgtctagacagtacctctctggtagggtgctttttgtcccaagctgacatcatcactctaaggtcacatgcaattgaggttccccagtccaaacctctgcatgtctcagttccaagcaagtgatcccaagtccctgggaagctacagggtgcaggtcat

SEQ ID NO: 21000 - DNA, 1100 bp, Mus musculus
agtaacactatagtccaggctgggctggaactgtgctctgtagctgggctgtaccacatgagctgctctaagctcggtgggtaatgtaatgcatgtctgtaagccactgctcagggagctgaggcagacgatccccagctccagcctagcctgggctacaacaagagtggagtaccgtgtgtacagtgagactaacagtttaaatcagcagccgcaaggcagtggctgttggatggttaaagtcaaattcacacccagcggtgaacaattcaccaagttcattgctggctcagtaattcgtattacacgggctcagttgcatggccatcaagaaatgaacagagatgggggctttctttggtccaaagctctaggcatcccccacccccaccccaccccacccttggctctccagtcactgtgttgacagagatactgcaggtgacaggagggtgagtctgtggctcatatcctggcaatctgcctccagggcttagagtgctcattttcatgcaggggataattctaggctgaagttggcgcttttattttcaggctgtagaatgtgaagaaggaagtgaagatgatgaatccctccgagaaatggtggaactggccgcccagagactgtacgaggctctgacgccggtgcactgacagccttgcctcccagactcccagacttttttacactcagccaagagttaacttctgttcttcaaataaaataaccttagtttctccgggggtgcctgtttacttttgcatcagatggcttgactactgcaggaccaccaactgatgtgtcctttattctccaactaatcctcaagggagccacttctgcctgagcaccacactgagtctgcctccaggcactttccgcagtgtatgctgaaatcttcagctctccgtctgtcttcctctggtctgtactggcaaatctgagttttgagttgaatgcaaatgttgtgccacagctttgaaacccctgttctccacacccttacccaattccttggcttatgattctaaaaccaccacttttaggactcatctgttatgggatctacatgttcaattcagagatggggttttat

SEQ ID NO: 21001 - DNA, 1099 bp, Mus musculus
cacacttgactggaaaggtgtactgtggactttgtccaagctgcttgaaactggaggacaggcttgactgggacacactaatggcttttcagcacaggtccgctgtcaaaactggggaagagttttcttttcctcacacagctggtcagcctggctcctgccataccccagatcccttccctagcctctcaggaagatgtgtgattctcccccagccgggcttcccccaccaactggatattctgctgggaggtaggcaggcatgcaatgaatctgtccattttgtcctggaatctgcattaatggacaggcatggctgtcacatagactaggaaagcctcagaatggctgagcatgttcacaggcacagccgagtagtagtgcctagtgactacagtggctgttggctgcatgttgacactggaggtctcagtagcagtgtgtctctctctctcatgatcttgacatttctttctagccatgcccttccttgccctttacctacctcactggggtctatgctctagctgcttagcctcagtaccctgaccaggcctggtgccttaggagcctctggctgctccttggctgttcctccccacggtgcactcctgccattgttgcattgttgtgccattgttgcagcccctatgctggcatcagtggcatcagacgctgtccagtccatgtggccttcaaaaggaccagcactaagtttgccagtgacctctggagttttcgccaacaggttgcaaattaaaccgcctgaactcagttgttggtgaatatgcaaatgcgtgtttacaagtagcccgagactgtgggactgatgtccttgacctgtggaccctgatgcagaaggacagccaggtaccaaggttttctcggccctctcagggttattgggagcacacgggtaaacaagatgtgtgcagctttcctagaagagctctctagacgggcatggtgatgcacatctgtaatcccagtgaggtgagggtagaaggatcaggagttcaaggctagccctagctgcacagcatgtttgcatccagtctgccatataaaactgtgtctcaaaagacgtgaatgtcagtca

SEQ ID NO: 21002 - DNA, 1841 bp, Mus musculus
gacagagtgctagtggggaaccttggcctgctctaggacatatacctgcagatgttccatagagctgacctgaatcaaaacatagattataatgatctgagaaacggggaagcaacttagcagatgctggtcatgtgctatgaccttcacatgacatcctatgtatgtaggccctttgaagaggtgaggtaaatctggcttatgtaaggctttcaggttttgggtttttcttttataatctaaaatctcctttgacctgtggtgcagaagcagaaagtaaggctggaccccgttcctggtgacagtgctgttaagtcttcagtctgtttttctgtaccctctgactacagtgaagcacttaacagtgaggataactggaacacagacatacttgtttgtttgttttgtttttgtttttgtttttttttttttgaccctcaactaaaagaggagcaagagaaacctgcttgtatgttgtctccaaatgcggcctgtcttggcactgaattctttgtagatggagagacctgcctacacttagggccatctacattaagagcagtcctttccaagaggaacagtttatagaaacagccacatgaacttcgagatggcctattaactgttcagccccagattcactgggcagtttttccattttacaaatgtgtcgtctttaaactgtttgccttaaaaaaaaaaatcaatattgggctggagagttggccccacagttaagagcagttggtctcattctcagcacccacatggtggctctcaactctgtaactccaatcccagaggagatgacatcttctgaactctaggacacgaggcatacattggtgcaggcaaaacaaagccaagtgctgtaaaatgtggcaataaccacaaaacctatagtgcctcacagtatggactgagtggtgaatagacactcttcccagaaccacttctggacaggccgggatgtgctggctggctaggaagagggggtgggagtgggagagtggtgctgccatcggggcccagccctagaagaactgaccttcagtctcggcaagtagacacccacgtgacctctggctctggtgcttcaagatgttctgtacttactgtgtgaggaataaatgccattagcctgaattctgatttctataaattctagttataaatgctcttttcttctaagaattgcagtgtgctcacaagccaacacattttaaccaagataatttgtaaactctgaggacagttaaccaagcctgtgccttgtctctcctgaggacgcctgttacactaatacttgaatatataccttgtggtatttgctctttttactagtcatgatagtcttgtattttaattacactttgatgatttgctatagggagagtggggtgtgtgggtatatgtatgaatgaaacagttggcagaatataagaaaaccatttttataaaattgtgactttttaaaccaaaattgtcttaattgtattactttttttttctttggcatgtacagaattaataagatgctcagggcatattctatagctgtggcattgatgatacctgcctcagtcaataaatactgaatatcaaagcagtggattgcgtatataacatttccctgaaaaataagttagtaggttttttgatcaataatcatgaacagaagttaagcttggaaaagacatttaatcaatctcttgatgtctgtgaattactaataaagctacgcacatgttcacagaatgtttgtggctaccaacatgaatgatacgagccattaatttttgggaacatctcccaagctaatagtctccatctcccagcag

SEQ ID NO: 21003 - DNA, 1343 bp, Mus musculus
atttcatagaaacacgagtaacttccagacacttgtgtagaggagtgacagcacacttggtatttaagtaatctgaaccagttctacaagtgactgtgttttgtattactgcgaagatatggaaaatgtagtgcattacaatttaaagtaattgtaataataacgtcttgatttctacattccttttctgaaccttcttggaggtttcctttcagaagcaacttttccatgctcttactacaaattcctttttagtaggaatccagaagtgttagattgaatgggaaagcgcttaatgcatccgggcttggggtcacagatcgaaatgtctcctgtgtcacatattctggaggttacatctttctgtgacaacagggagtttccttatgcattcttcatttgctgctgtttaagttgacaacttccttcccaataaaaattcacttacacctcctgccttcgtagctctggtattcactttaccttgtgatagaagtagcatgttgctgccagaatacaagcattgcttcgggcaaattaaaatgcatgtcctttcttaatacactaggaaggagaaataaagtccacaagtccaagcctgcacttcaatacttttccatgcagagttgtgcacatgggagagggtatccggtttgtccagtgattgttctttagagagttggaccactatattgtgtgtttgctaatcattgactgtagtcccaaaaaagcctcgtggaaatgttatgccctatgtaacagcagagtaacataaaaataaaactacattttataaaaccatttattatggctttgtaacaattgcatacccatattttaaggaacagaatttactactttttgaaggcttttgctgtttctctttatgtaacatgtagtggtgatacccatatttctgcattgtggtacacttgtctaaggtgcctggcactgtaaagttggactatatttctccagatagcctcatgggtcatcttcctcagatgtaatgataatctggttagacatcatatgaaataaagtgatgtgatgatgagtgccttggctggtattagaattgggctttagttatgtgagcatcaggagtatctagttttcagataacccacttaggattctgtctacactcaaaatgatgtttttaatgccagtgatttttaaatactaagtatttgagaagtgatcttcaaggcaacatgattagaaaaaaaaatagcactgggcgtggttgcgcacgcctttaatcccagcactcgggaggcagaggcaggcggatttcgaggccagcctgtagacgaggtagacgaaagtgagttccagga

SEQ ID NO: 21004 - DNA, 1228 bp, Mus musculus
ttggcgcatgcctggggagcagcacttgggaggcagaggcaggtggatttctgagttcgaggccagcctggtctacagagtgagtgccaggactgcacagagaaaccctgtctcgaaaaaccaaaaaagaaaaagattatttactttatgtatatgaatacgatgtaactgtcttcagacacaccagaagaaggcatcagacctcactatagatagttgtgagccaccatgtggttgctgagaattgaactcaggacatctgagagagtagtcaatgctcttaactactgaaccatctcatcatccagcgcccccccccctttttttttttaagaagcagagcaagtatagctttagtgaggaaaggtgaggccagaactctcccgaattggggcatgggggcaggggagtgggacttgaagtgaggaacactcacaaaatcttaaactggggctccaagggagtacttccatagtgttaccctgtagcgtaatgtggttgtacacacggttgtatttgcagactggctagcttctgttcctgaactaaatgtataatactacaaatgttaactttaccaggcttttgatgaggccatcgcagagcttgatacactgaacgaagactcctacaaagacagcaccctcatcatgcagttgcttagagacaacttaacagtgagttgttcactattaacatgtctgttttcagaaacaacagtaatttcgttttgggggggtacagttatagaaaagttatagcctctttttttattgtcatttttgagacagggtttctctgagtagcctccttggctgtcctggaaatcactctgtggaccattctggcttcatacacacagatatccacttgccctgcctcccaagtgctgggattaaagatgtgcactactactgtaggactagagctatggtctcttacaaaatttggagaaatgtcttcatgatgacaaagtattttatcagacctttctatgaaagtagaatatagtattatcattacttttagacttagtggaatgtgttggtaacaacagttaatgtagagagcttgtctagttctagtatttcctttctttgggtaaattagatataacaaattagagattctatatgtgttgcaaactccttattttactaaaagtttccttggagggctagagagatgattcagtggttaggaacattggttgctatctcagagggcc

SEQ ID NO: 21005 - DNA, 1171 bp, Mus musculus
agagcatctatggtgatgatgtagagaacaggaggactggaccacttacatgtgatcagggcatctgtgatgatgatgtagagaacaggaagactggactgcttacatgtgatcagagcatctatggtgatgatgtagagaacaggaagactggaccacttacatgtgatcagagcatctatggtgatgatatagagaacaggaagactggactgcttacatgtgatccgggatgtggatgaaagggccttgaatggaagtctggtgtaagaggctccagggtggtttaatccagtcttctatatctgtgtccctaccttagggaaatttttatccactcttgggctggtgatcaactaggcctttggtggaattttcctatccatccaggctgcagaaggctgcttaggccaagaatttacagaggcctttcatggtgggggactgcgcttttggattttggtcagcattgtagcccaagaatgaagtcagctctttgttaacattacttggtctcagatgcttggtggccacattggttggtggccactctgttgcatgatgtagattcaggactttgttctacttgcagaaagtcctgtttatgagcataggcccttgcaactgcaaaatgcttcacctgaaagcaccagtcagtgtggtgtgcaacttgcagagcctcaggttccatggtagagctgtggaaatagagtctgcattttaatagcactctcaggagcagtgtgtgcaccagggtttgaaagtactgttgtaggctgccctgagtcctggctgtgttcagagttgcctggtgggggagggggtgtctgtggactggaagaacctggttctgctctcctgaattctgatttcataagatttggttgaggcctggagcttttatatttgtaaaaggctcctccctagttgataatcactgatagacaagtgattatgtcaagttgtgtgccaggtagtgataagtcaaggttattcataacttggggaaaggatgtggttttagaagggaggaaactgaagtcaagacaggcatctctgcagaggtgacctttgagcagtctggaatgtagaggctgcctgcttgcaaagacctaggcatagaggagtcctggaaaagggctgagacgttagtatcagggcagacagaagg

SEQ ID NO: 21006 - DNA, 1099 bp, Mus musculus
ttaaaagcccctaggctccgagtctgggggtcgactcccctgcctcctgcgcgaggtacgtgtcgacccagagctctgccaaataaacctcatgcgtcttgcaacgagaggattcttgtgttcgtgggtgttccctgttcctggattagagcggggtccctaaatttggggtcctacaggaccacattgatcagctggcaaccctgctgtcaaatcccttggtcttggccttgctgggctcccatctccagctaattactcagagggacccagagagcctgcctaaccagacatttctacaggtctggcccatatagtgaccttctttgccacactcagggattctacccaggggagggttcagggcatggccctggggaggctgggagcccctaggaaactttgaccaggacaggagctacctgcttctgcgtttacttcttggcactagtaagtgggactcaccaaaatgcaatgcagagtcagccagtgagatcagcattggctgtgaagcccaagctgagtgggagaggtcaggagagagagagaggagaactggaacaaacagaaccagaatgtaaccctgttttttaagcactaacaggaaagggaaagtttgggggcaaagtgcctggctccccactgctgtctgggggggattatgcccaaccctcaggctgctagagttagttttccaagcaagtcaaaaagactcaggaaaacaatctgtaagctttttgcaaagaaagccccccacagggcatcagacactatgaattccactgcactgagaaaacagtctgtagggactaggtcgcctctgtgatttgggcattgcttccacttacaggtagctcagaatcctacaagcaaatccctctgcctcaaacacataccaggagagcaaaggcatgatccaagcatggatattagacactttcagctccactgggaacgcttttggtcttaaaagtatttctcattatctttgtgtgagcatgcactaatgtggaaatcagagggcactctgcaggacttggttctctcttctaccacgttggttctgagatctgaacttaggtcactaggctttgtggca

SEQ ID NO: 21007 - DNA, 1155 bp, Mus musculus
ccttgtttcaataaacaaaacaaaagggaggaaatgagggagggagggagggagggagggagggaggtagaaagacagggagagagagagagagagagagagagaagagactggacattgtccattttccagagggttccagactttaaccagagcactggctaatcctaagtctccctcttccattcctcaggcaaaatgtccctggatgaattcaacaaaggtgccaagagggaccacccattgtccggttgctgcagtgtgataccagcagtgctagccagttctgaggggaatgggcttttacacagttgtgagaaacacaggcttgacctgccatcttcagctttgcttgatacagtggttttctccgtgatttctcctgctctctcgggacctgggcccaggcagcacatcacactcacctggtctggctggatgcagctccctcctctgtctgatccaatagatgtccctccccatccagtccaggctggttccttccaaggtttcaagtgttctgggctgtagggctccttccctgcccacagagggcctggagacccttaaggacaccagacaggacatttcagtatcttacggagaccagctgatttattttatgatcccaggtgagtttgtaaggatgaagaagatggagagtagataggcaagcccttcctgtgcatgactccacctcccttgttcattttctccgaccaaagctgcttgcatgtatatactgcagtatccttacttttaatatataagttttgtataaagtgagaaggttcagcccctgtatttaaagcctctgactgcctttaaagcatggtcccctgtggcctgtgattccccccacccccaagtctggctgtgctgtggtatttaagtatttatttgcctaatcacacaggagatacatgcatgcccaaggctgtggacatctgccctccgtcctgcaaatacaggtgttcctgtgtgctctgtccttcctttccattgacctggcatattaaaatgatcaaataaaccaaggtctgtgagtttcctgtgttatcacaagcaccctgttcatggttcactctctagtgagtgtggggatgaagcaggtaagtggtagacatcgggaaagtccttgaatgtaaggaacag

SEQ ID NO: 21008 - DNA, 1180 bp, Mus musculus
tagcacccctctgtaggttgggatcctgggctgaataaaatggagaaagcaggctgagcaccaggatccatctctctctgctcatgactacagacatttttaggcttggcaattgtggtcaagattcagcccgtggtcgacccatccttgtctcttctcagcacacaacccttccccatatttgtcctgcaggctagcagcacaagagacagactccttttctggctactgtcagggtcccagcactttccctatgtcagcttgaaattcctggtgaaaattccagttctttgggggtccgttgtcacagtcctcagaaagctgaagggagggcacaagtgtgtctttagaacaaccttggtcttgccatgacagtcacagtttcttcctgctttccaatgtaatagcttcaacagagtttgcatctccaacctgccctatctacacaatgaactctgtgcttttctagtggggtgcaatgtgggctccctcttctcagaacaatgctcctgtcgtctagtatcctatgctctacactcccatcctcacaaatcaatggctcttgaataaaccactaggctatccagcttcagttttctcattgaaaaatgaaggtttttatgttgggagacttcagtctctcttcattaggagagccctgcctaatgaagggttgctccaggcttgcattgaaggctaagaccagggctctcaagcttcagctcccaaaggaattgctgcaggagaggtgtaggaatccaggtgccacactccagtactgtgatgctgtggcctggagtcaggcccaaggagctgcattccaggagacccaacctcaggcacattgctgcctctctgactactgaagactgacaagcctacaggccaggggatggcttgaagaacacccagaaccctccctagacctgagcatgctcttcagactggctggtcccatgaaggacaagtgttttgttttgctttgtttttttgctgcttcctctgacttcacagccaacgggctctctgttccaaggaagcagcatcctttttggctaatggaagtagtatgggagtttatttgtgagatctgggtgactcccagatctccagagggtcccagactaggtgaggcactatgcaaccagaaccacgtgtcaactgtgtacagtggcatttg

SEQ ID NO: 21009 - DNA, 1149 bp, Mus musculus
gtcagagggtgatcagtagaaagatccctctgaagatgggacctcctccattcccacccacctgcctgtggttgaaatcatgtacaagtctggggcacagccttgctgccagctgtgtaccttggtaggcagaatggctgtgctcagcatgtattaagaatatactctatccccagtgagctagagggctctggcttctaatggcaaagaaaagcaaattaaagcctgggcattgaattcattataatattgggaaaagtaaagctggaaagaggttaggcttagaaggttgtgtgtagaggcttcacttttcaaccaagtattccagcaaggctaagagatgtgagcacggagagagcctgaagaaggtgtgggagcaaaggcccagtggcagccatagggatggagacagaagcagtggagatattcgtggccaaagaggatgggaagatgggtcaggctgaagggggtgcaatgaatcacagctgcagttcagagctcaacttgtactgagtaacagctctgtggttgtagataatgacctgttccctccctcccaaatttccccacatgttcctgctctctctgtgtcatagtgactcacctctgagcacactgaggcttgctctgagcatccatctttcccgtccaccagtcagcatcttctccatctgtccaaagttagggtcattcgctcagcacatcttcaggccaagtccatgcatacttggtaaaggtggctggatgaatgaatgagcaaaggactcatattcctgtgtgtaagaatagtgagttcccaatgggatatcttctggagtcctgtgtggtgctctgaggattccttcttctgaccgcttttcctcctgggctatcactggagccaggagggatgggagcctctgagtagtcagtgaggtaacacatctctgtgttgggggaggtttgttggtgtgtgtgtgtgtgtctgtaaacttggcgacatgtatggcatgaagtgtgagccactgcctgagggtccctaatcctcacaatcctattcccaagcagtaggcattgacttcccaggatacctgctgtcatgagagaaggggccttcctcctgaaaccccacccctgtgtctagcaagcccttggtgcttgggcccctgt

SEQ ID NO: 21010 - DNA, 1107 bp, Mus musculus
ctgtcttacccttgtgggaagagcagcactgtagaaggaacgggaaacactgaactaaaaacaactgagaaggttctttttggtggttgtgtctggtaaagtaaaggatgtggccccggtcctgggcccagatcaagaactactgtattgatcaccctccacctgactctctgccctgaaggctctttggcaggccatctcccaaatttctatgttgcagctccttcttcctgggaaacacacttttgccaggtgcagagccaaggtttccctgtcaagtcctggagactctggtagggctgttgtatctgaccactggagggcgcctggaaccttccaggtcagagagctttctcaacagcctgtcagattgaatacatctgcaggccagggtctccacctgttacagattttcacaattttttaaatgagtttttttaaaagatgtatttacttatttttatgtatatgagtacactgtagctgtacagatggttgtgagccttcatgtggttgcgggaattgaatttaggacctctgctcatcctggtcggccctgttctctccggtcaaccccacttgctccggcccaaagatgtatttattattattaataagtacactgtagctgcttcagacacaccaaaagagggagtcagatctcattacggatggttgtgagccaccatgtggttgctgggacttgaactcaggaccttcggaagagcagtcagtgctcttaaccactgagctatctcccagcccaaattttcacaaattcagtggtttaaagctcagagtcactgggccaacattgaagttgtgtgcagcattcctttcaagactgtcttctctgcatctttagaccgcctctgattgttccacctcctggtcccttgtaatcacctccagccttccctcccccttgccatgtaacctgccccttctccagccccaggatcaggtgtggggattactggaacccaggtgcttcctgtggcccgcacttggaaaccgtgagtcacaacttgtgggcaccggtacctctgacctaggccagtctcttcccatctgaccacattcctctggagcccaagaaaccctgac

SEQ ID NO: 21011 - DNA, 1390 bp, Mus musculus
tcgtgtctctgtctctctctctcttttgtaaggaaatggaagaaaatttgctctaaatcaccagcattcaaacaaatatttctgcaataaagtttacaaagtctggatttttttttatacctttctattcatgttttgtagaaatgtgacagggtactaatttttatactttttataaaaatatttatattgtgctcaaatcaccagtttgtggatagaaaattttacagccttcttttccatgttttataacaaagttttgtaataaccctgcttaagagtaagcctggtagttagtcagaaagaagcaaaaataacaagtttgttaccagccttttatagtcaatattttagatcagaactggttgaataaagaactcttaaaggggaaaaataaactttgtagttagcttctttgtatcagtttcaggggaaattctagcaatcgatcctatagcccacagaactaagattgtggttaggtaaaactaatcatgtgagtctcgtgtccctgtggaaggtgtgcccagtctgcctgggctgctggccagctgagcaggggcaaatatggaatgtggactcctgggccatctgtctgctaagagcaaatgaccccatgtcctgtctgtgttaagcaccaacactaagaatgtagacgcagaaactctgtatgttacctgttggcttctgttgtggttttgtactgcgtgctagattgaatgaccacagggaaaaggaaatgtctgtactggttggttaaactctccgccagagtgcagcttccacaaagcaaggcctttgtgcacattcggctctggggttcggatgcctctctgactatggacaaaacactgagaaacatatcattaaatggcagtggctgtcacccaactgctttttcaatcattgtgtgtgaaggaaattagtttgctcaaacaagaagacttggaatgggtatattgtagctttcctgaaaacagatttcaggcactgcttttacgcctcgtgagcgggtgttctgcatccaggtgatcacaaaaacagaatggttttagataaattctgggaagctcaggcagtacagcaagtgtgataacaggtatattgtgctgtttgggcagcctgagactatttttgtgtggtatgtattaggttttgtatttgccttttaatcattggtatttaactttattaaatgatggcaaggttgaaataattaaacgtaaaatgaggcttttgtgttcaggtcttttgagccttatataaccgttatgtggtcataccttgtatgttacttgacccctgttaagctgctgtggtagccgagttctgtatgtacatgtgtttaggaactgcccagacagcagtcttgctaatgtctttcaacata

SEQ ID NO: 21012 - DNA, 1126 bp, Mus musculus
ctaattgggacagaggggacaggggtctgacaggaggggcagggtagaaaaggaacccaaggctgcatccgtaccccttcatgagtttgaagacagctttttagggaaccctagtttgaggacccccttaatcccacaaggccggtgcgattgctcgggaccccgaatctctttaagaaaccagggtcccccgcacccctctacttgggacatgaagacagtcaaggcgacgtgtcccagaggccagcagcgtcactccacccttggcaccaacctcagcggcaacgcccgcccggcgaccccctgcgcgctcaatccccaaggctctcgcaatcctaaccggttccggccccgcgagcgcccgcgcacccggccggcgcaggctccttaaaggtctttgtgcggaaggcctgcggcgcaactcaaatctcccgcgctgggcggcgagcggggtcagcggcgtccaatgggaggcgaggccacgccccctcggagcgcgcggttgggtggctctttaaagggcgcgggcgctggcagtcggcggtgcaccggattccagctgttttcgcctgctcctcgccgtctccgccgctgccctcgttcgccatgctctccgtccgcaccccgctcgccaccatcgctgaccagcagcagctgcagttgtcgccgctgaagcgactcaccctggctgacaaggagaacacggtgagggcggcccaggtgccggctgggttggatgtgcactggcaggtcgtgggttcccggacccgggagggtggagggtgcctaccgccattcaccacgcgtgtccccctacagcccccgactctcagcagcacccgcgtcctggccagcaaagctgcgaggagaatcttccaggactccgccgagctggtgagtggcccgtgtggggctgaggtgggtcgcttaggctcccagtagagggcgcccgctcgttggcgctaaatctgcattgtcccagctgaattatttgactcttctttcccgccaaagtgtctcctcagaatgtcctactcgggtcggcctatggtaatagtagagtgcagcgtgacagctaagcacacgagattaccaatcgttgaaagtactcgatctgatgagacac

SEQ ID NO: 21013 - DNA, 1271 bp, Mus musculus
agcaaaaacaaccaactggctacaccatgaattgtcattaaatttgctaaacaggtgtctaaaaagctgtgtagctacctcagtcctgtttgccaggctggtcactagaagaaagtatacttcaaacaatgggtacttggatccttagggagatcctgtccttggcttttacaagtagtgtggtcacctttgacctcatcaaagtactaacagcactgggccaggttttaggagcagtgaccatcaagcaagcaggtttaaacatttagatgctgtttagggctgtttaaagatgtcggactgcttcctgcaggcatgcagggtctacttaacaagtttgtaaataaaattggcactttgcacacacacacacatagtgctgtcaggcgattaaactatacattttatgaggtagtacctctatgctttttttttttttttttaatgctcagtattatcttgaagtttgcaaatgctatgatggtacagtaaattctgacatttgccctaatagtgtcactttttttttttcttcgagacagagtttctctgtatagccctggctgtacggaattcacaagtgagtttgagcccagtggtgggtacacccgtgggactcttacaaaccaaaacaggaaaagcaagtgttccctgaggtagtttactgtgatctagcttcctcatgaactgacataaccctgatcagtttccttgattattgtatagatgtttttgtaatatgaaaagcctttgtaccttttaaattattgttacttaaaattaataaactcttgaattaacagtcttgaactttcatggcatacaagtattaaatgatttaactaaaaccttaatgtcagtcctttgggtaaaatgtacatctctttatttacatcccaaatgctcccctgcttggtctgccccacccccacggcccacacaagagaatccttccccacccccaagtttactttttgctttttgttacttctggggactttttcctcttttcttacatagagcagtgagatagatatgctctgggcctctgtatggagtggagccatgtctagcccaggctagctttaaccttttgtgtgtgtagcactttaggtttcatttgggagtgagggcagggggcagtggtcacacagaagccaggatgaccttgaattcctggttctgcctctagcttccaaatgttaaggtttttttgttatttttagtctggtagccttggttataagcccctttcacaattcaaagtatcc

SEQ ID NO: 21014 - DNA, 1146 bp, Mus musculus
gaagcaggattaaattggagtaaaaagtgttttgctgcctccttattgcttcagagttctttgtgacttgataatgtcccttctgactgccctgcctctctaagtgcatacaaccctagcctctctctgtttattaggtcagggtgtggctgacttgaagtactcaaaataactcacacacagccttcacctgcagtccagtttaacaggtgggattctgccaggatcaaatcttgtagtgtttctttcaaaacaaggcacatctgtgagcctcagaagagagatcatttagtgctgttgaggagtgaagccctcccttagtcgccatttaaaagctgatgtgcggagagttagtctttagagttgaggttcagcgattagaattgttaattcacaggtgtgaccaaggacacgcccctctcaccaccgcttcccatcccttgggggggggggggacacctacattcaggcctcttgctgctctcatctatgactcattccttattggaaccttgggagcattatagatctggcagacttctgagacgttcgttctgcccgctgctgcttgtatccattgggttctggtaggagacagattgaacaggcaaaccagagagatttaggcgcttagaaagatgtggtgggcgtgggcagagagagcagcagggaatgagatggttcccagatcagttgcactgtgagttcaggggcaagaggaagggagaggcagcaccccaggaggagggtggtcaaggaacaggggtgcttggcacggagttgaggcctctagcggaagggctcaacctagagtgagtctgaggggtggcagagacacctctccctttcctcccatctttgggtctctgcagagggtgggtgaagccctggggacatggggcagagctgaaagtggagctggagggatgtgtgggtaccacccagcactactgctgagctgcttctcctgactgaaggacagaggaggaggagccccgcctaggtggcttcacacccttctcttagtcccctccccctacacttggagagagtatttgactcttttcttgtcttcctagggcctgctcaatctttagaacctttgtcctaggccctgtctttgacactaaaagacaaatcccctgg

SEQ ID NO: 21015 - DNA, 1182 bp, Mus musculus
tgcagctggttggttatgaatgattacattttagtgggctaggtgtcaggcagtgccttgggctttctcacgagcggacatttatgtctctggtggggtagggtcaacgtctgaaagcctagtgtttgagcactctttgctcatttgaaaatgaattcatcagtttgccttgctgtttactaaaaggcaccaaaaagaccaaagttgttggtttagcactgggcacgttctcaaaactaattctgaggagatgggccccaagcatctttcctgtagacttagcgggctcatatctgagctagctcacgtgagctaagaggtgtaagaagagtggactatgggaaaagcttgtataagtctgttaaaagagggactcaaccctgcaggggtccagtcttcacctggtgttaggatggtgttaaagccacacccaggcagatcaccggagaccctctcattattcctgcaaacagttgtttgtctttctcagatccatacaatgtaagattcatagaatgtcagaggagttctgactgttgacttccggactgttgacttccgggttaatgagaactgtggatgttagggtgccccccccccccatgcctcccctttcttcacattgcttacatggtttttgttactcatgtgtttgaggtttttttttttttttcttttgagagattgttctggcagagctaccattttgcttttaacccacaagataagaagaattcaccaacagctttttcacgaaggaccgtttttatgacaactgaaaccaacaatcagaggcagttctcgaagttcatttaatgctagcacatgaaatggtttcacaaacgggaatattagggacagtaattttacaggaaaataagcgtgtcttaaaggatctaaggtccttgctgaggtggtttgtgtgagtcctctctcgatagtcatttgttttccattcatagccctgtcttcattagctaccatggaattttactcttgtagagacaagtggacttgtaggttaactggtagctggtgaatgtatcagacacagaggtgatttgcatgctgaattgcatacataatgattatatgtatttgaagctaatatttgttaacaataaatatgcacgatatgcatagtttatataactattttctgatcagaaatgatggcagctt

SEQ ID NO: 21016 - DNA, 1101 bp, Mus musculus
tgaccctttcacttggggaatgcatcagatcctttggagttggactcctagactgttgtgagccacctgaagtgggtgctgggaactgaacttgctactccagaagagcagtgtatgttcttaaccaccgctctccaccacactcaaccctctgggtacaattcttaaagatcacaacttgaaatgtatagaactaacaagacagttgagaaaaaaaatgattttaatacgttgtatacttttcatcctggagataaatgctttcaggtcaaaatgggaaagttccaccatttttccttgagttaatgttcttttggtaatcacagtggaagtgattgaacgtgaacctaagttttctgcccttaactatttctcctaggaagctttagaggatatgattcatgttgaaatttgaatgatgaatgagtccagcttgacacccatcccatgggcaagcaccaacccctaacattattagtgatattcttgcagataggtgcttgttctctgagagtctccacccagcagctggctcagacagacgcaaacacccacagccaaacagtggatggaggttaggactcttgtggaggaataggaggaaggattgtgggtcccaaaggggattgaaactccatggaaggaccagcagagtcagctatcttggacccttgggactggcagttggaatcaccaaccagagatcatacacaggctggacctaggcttccctgctcatgtatagtagatgtgcagcttggccttcatgtgggtcctgagcaactgcaatgggggctatttcctgtatgtgggatatgttctaccagctaggctgccttgtctggcctcttggagacttgagatgccaggttggagggggtgggagattgaagggggggtggtgactgctcagaggagaaggggaggaaggagggattgtgggaggggggtgaccaggacaggggcagtgaatgggatgtgaagtgaataactaaaagtaaaaataaaataaaataaaataaatggaaaaaaagtctgaatgatgatatgactgtgtttgctcattctagtgatagaagttgcgggttgagggaggtgggt

SEQ ID NO: 21017 - DNA, 1150 bp, Mus musculus
gctcccacttccacagacagtcctgtgtccccatctcatcaacttctggaaactcaggggagcagaaccctgccctgagcattgtgggaaacttggagcttttctatcagttgtgaagacctgactgagctgaatagttttctctgtcccttcaccatagagtgcccgtgctttccaccccagtgtcctcaccgttggcacttgccttccaggtggcctgccacacatgacctcaccttggcatgcctgtctcctaccagatgcagtgcaggaagtggatactgacccatccccaaacttaaagctcctccccaggaaaccacaccatttattggattgattttttttgttgttgttttgttttgtaaaccaaaagaactcagttttatattaactgtgattttttttttttgtccttagaatttaaatgtaacattgaagttccagtctattgctaacacggaattttaatttttctttacaggtcaactttgtagtgtgccagctctttgccttgttagcagccgtttggtttcgaacttatctacactcaagcaaaactagctcttttatcagacacgtagttgctacccttttgggcctttatcttgcatttttttgctttggatggtaagtaattattttgatcatgtttaaatgaatgctgttaggtatgtttgagagttgagtatgtagagaaatacattatataggggtttgttcggaaatgtactgacaaagttttctttccaggctatctttcaagatcttctagtcgagaaacgatggattgggagttgggtctcttgattcttgtcttagagaagaattactttttataatttatgaacaggggcatgagaaggatttataaagacagtcgattgttaagtggttcttttcactcatcttgcaaatattttatgctaggacaaccaataaattactatgttgtttgttcctttgggttttctctgtgccgttggctctgacaagtctgggaaagctcgtttgactaactccttcctgtaccattctctctctctgtctctgtctctctctctctctctctctgtctctctctctctgtctctgtctctgtctctctctctctctctctctctctctgtctctgtctctgtctctgtct

SEQ ID NO: 21018 - DNA, 1113 bp, Mus musculus
gagaatagatctgggtgtttttagcaacttgttttgtgaatggtacttaagaaggtcagcacaaatcagagatgctgctgttggggaagttgggaaataggagttctgccagaacttttctgaaagctgtgtttattactccttttaaagttactgttccttaacttatgaagaaggtggcagtccttgatccaaatggccccacactgctttcctgcggttaggttctgtggagtgctgaggcattgagctgggctcctggggctcagttttatttatctagctcctttggcctgaggtggggggcaccttgtccaggatgtttgaagagtgtcatttgggctttgggtttaaggtttttgttttctgttttttttgtttgcttgtttgtttgggaaatgttgtaggttacacatgtactttcccatctgtagcgtttgaacttgatgtttgtggctgcttctaacacattcttattttttataggtatgccttacactttcttgtacaaagtgggatttcctactgcatcatgatcatagcaggagtggagagcatgcagcagtgagtattgactgcattcatatagaaaaatacctttcacctgaatagagcctgaccaaaagtagtaacagagtcacatttattacacaacagtactccggaagggtgatgatttctcaaggaagcaacacagtataaaatctcctgtctatgaaagtcagcgctgacatttaaggatgggctgttctttgacatgaaggacttgcagtgtgggatgttcagcagtacccctggctcctaacccattagatactaggagaactctgagctgggacaaaaagcagatatgctcttgagggtgggattcttcctgtttagcacaattggcatagtgtacagatgattagcagtagagaacagaactaaagtagtagatggagatttagaaggtaaatttaggactgagtaactagagggaactctgggaaggaggcaaggaaataatgtccatgttcctggcttgaacactgaagtagtagaagcagttgcccaaagtatagggattctgaaagtagagaccatattgaggggtaaccagacccccaaaac

SEQ ID NO: 21019 - DNA, 2235 bp, Mus musculus
ctgggacagaacagtttttccacgatgaataacgtttgcaatcagaaccgagacactggctccagacactcgtcactaacacagtgactgcgagagcgtgtgatggctgtttcccggctgtgaacagaagccagtcttgaggcctttgcagagcctcttgtttaaggaagagagactaactgggtggaaagggatggtctcggatagggggtttcctatacactagattggaaatggaaagagataacccctcccatgccatgttcctgtgggtcacgccttatacaaaatcttcccttgtttcaatagggcactctgacctcagcatctgccctcaaggtcatctgtgtaccctgttgctgaatgtacactgcgtatcccaaggcactgaagaggtggaaaataatcatgtcgtctggatgattaaccttttccaaatgaatgtcttgccttaaatcttcctaaaatgttgttcccggatggtatttccaagtgtaaaatcgtgaggagacgatttcagtattcgatatggtgtgctacagagaggattgagggaagtctaaaaccagatacttaagatcgtgggtactttaaaaatgcaataaacatctcagtattcgaagggttttcttaaggtatcttagaggactgtgtgcatggtgggactgtaaacagtcagggcttaattacaggtgtcagtcaggggccccttctaggaggactttcttaaacataattaaaggttggtaatgtgatattttaggcttattttcttaagaacaaaaaaaaaaaacaaaacaataagagggaagctaagataaggaggcccgaacaaggaaagcacctcggagcctggagccggtggcagagggcttcccacttctgtgtccgagattagtgtaactgtatgggacacaacagcttactgatgagaacactgtggactttctgaagaaatccctcgagcataaattacatagagttacagggggttataagaataacagtgatagatgatttgaaggttttgaaagaaatctctagtaattaaggttcttgtatggttcatcggtttcttgttcctgtccctttcattgctatttgggaaagatgtagggaaaagaaaacttagttgatgagtctaagtgactttttttttttaattaaattagtttctatactctttaacttcatgcattaaaattcttccattaaactcttgttaaaatgggtgttagattctatctaaacaaatacgtgctttcctcttagggggccactcttgccttgagtgactgggtttgtctttaatcacatagcagtgtggtgtgggctgcagcagctgtaagtatggggtgggtttgaggccatggaaaatgagcctgagactatagaggggaaggtggggcctttgggcctcactgccatttgaccaatcttttttggtatgaattttgttttggttttgccttacattttcaaatgaaatgcaagctgtcagtctacggtgagtttggttttgttggcttttgtcactaatacgttgtaagtagggtgaaggaagaagcagcaacaggggtgggaacctaaagatgtcaggaagaagaaaggtgcagatgccgtacctgggagccatacgtggcatggttgcttttctgaagataggttgcatctgatgaggaaagtgttctcctggcctctagagtcctccccattactcctccccgggaatggctagtaaataccttttcttagttttctttcccatgtgttgagatcaagctaactgtagaattggaggagaaagaaaagcatatttctggagagtgcccgccccaaatgtttctacgatttcatgagcttgttaaagacagccctgggcggttcctaagtgaagccagagcagctttgggagctgctgcaggcttgatccatcgatctagccactcacagatgaccccatttatatctgctaccccaacagacttcgtttctatacattgagtcgctgtcgcctgtcccctcgtaatgaatttataatcatagttctatcatccaaagagcaagacagctgatcactgttcctcctggcccataacacagcactccaacttgactgatgtcctttctcattcttcttcagcgttctagttacgttcatgggattattttgggatggctgtcttctaatttggagacataatcagaacacaatctaaaatcaaataaattctc

SEQ ID NO: 21020 - DNA, 1211 bp, Mus musculus
agatggcatgtgtatgctagaaacgctgcattcagtagctgagtaacatcggcttggtcttcccccaaggtttctgtttacagattacaatagactctccagtgttgggggagagacttccttggctgaaatgatcgcgaccctctcagatgcttgtgagagagaattcggctttctggctacccggctgtttcgagtatttaagactgaagattctcagggtaggattacttccctccccctcttccttccttcttgaagtgtttctaggtgtgggggagggaataaatgttcatttattttcatgagaccatgaattgaaccttagagtcatcatatgctcttgaccaaaaagatttcagtattctgagtacgtgatacgataattgttaatacgatttattctattacaggtaaaaagaaatggaaaaaaacatgctgtctcccgtcttttataatctttctttttattgttggctgcattattgctggaattactcttttggctatattccgagttgacccaaaacatctgacagtgaatgctatcctcatatccattgcatctatcgtggggttggcctttgtgctgaactgtcgaacatggtggcaagtgctggactctctcctgaattctcagagaaaacgcctccatagtgctgcctccaaattacataagctgaaaagtgaaggattcatgaaagtaagaacttgtcactagataaactagtgggaatatgctgctgtccccatgctgacttgagcatgctctcgaaatgttaaaagttacgttcaagggttttgttgttgttctgtttttatttgctcagtagtagggacttgtgcataccaggcaagtaccctaagactccaagtctattgcatttaatttagtttaattagtttgttaggcttatagcaaactccatatataccccatgtatctttttttttttttttttagtttttaaaataaattcatttattatatgtaagtacactggagctgtcttcagacacacaagaagagggcatcagatctcattacagatggttgtaagctaccatgtgattgctggggtccaaactcaggacctctggaagagcagtcagtgctcttaactactgagccatctctccagctaccccatgtatcttgtgcacagcctctgttatcaatacctgtcaaaggagtgctatatttgttcagt

SEQ ID NO: 21021 - DNA, 1184 bp, Mus musculus
ccaccactcccagccagaggtgataaatcttatttcccacatgaagagtatgttgaaggctgaacagggcgatttcttggatagttttaaaaccttagactaccaaggtagtgtgtagaatagttaagatatttgatatagacacttgaagaaagttagtcttagacatgtctttgtgctctgtaagtgtaattttcttcttttctattcccttaagttctctccctcttactgagggcagtgcccttatttcttaaagttaagtggaattatttgaggacttgacataggcctgggccacaggatggccatcttgtaaaagtgctttgggtcaggctgtctctactgtaataaatgctactcgttacatgtcagatagctgaatctgtttattaagatcttttttttcttaaattctatatgcattggctgtgatttctttatttcagcagtataactagatgaatttttctgtcacatgacctcaaacacttcatattaatgttactcatatttcccttgacttatctaggcatccgtccctgccacaggcacctctctgttactgagttcaatgactgtggatatcgtgtgtgagaaactgagacagatagaagggctggaccagggcatgctgcctcagtattgcacaaccatcaaaaaggtgatgtgtgtttgcatctatgtagatatctctaagtgaaatggtgctttcttttttagaactactcttttttataattttatgagtagattaaagaaagagtagctgaattacagcgctacttaaccagtgtctaatataattaaaaataaaatagcatggtggaaaatacaagagctcattcaccgtggagcagagagcattgagcggctgcttggtacatccattaccttcagctgcacacagtattattcatctccaatctggaacctctggaataggaaactcttttgagcgtggaggtcagtataagtcagatatcagagcctttgattgttggactttgtgctgggtgctcagtgagtaaaacttgaatgaatatcccttcctcagtgggaagcactgcacttggaagcagttttggtcccaagcatttgggaaggatacctggcctgtatgtgtttgtgtgacttcgtagtaattagagagtgagcatcatttcctacaagttgtcattttg

SEQ ID NO: 21022 - DNA, 1209 bp, Mus musculus
ctctttccaacccagccctggcttccgacaccacccacctgtgccctcaaaaccatcttagtctgttctgcagctactaagtaatgctcatggctaaagaaaagttagtggtactggtgatgaaacgcaggacctcacagatctaagtcctctagtgactagctacgtccccagccccaagtgctaggcctttccttcctccagagatttgggaagacattaaaggagttagtgacggtggtactagacaaatgacagtatttagtttgctaacattaaatcactgcctctgtactgcaattatttaacgtatctgttcctaaatcagcattttagttctggggaggggggtggattataaaaatggaggcatggttttaaaaaggaatttgaaagcatacaacaaagcaagaatagaggcggagctggtgtgaccttgacacttttattattcttagcagagctaggagaatgaccacatacatttaggctagaggtgtgcctgtcttcatcctgcattgaaactgtttgtcatttgatcatagtgtgtttacgtagatcagctctagtggtgtgtcctgagccatgggtagaattgtagatggtaaggttgcaggcttagtgctcagtgagatgtccatcactgactggacctgtgtggttcacttgacactgtgctcatagctgctccgtgtcccactgccttgctgtttgagtgtaattgagcattttcatgaagtgcatatgttgcatgatctttaacaggtatttttaaacattaaaaacagcacgatgttactgacattatgcaatatcatgtgatgggtacttgagaggcagtttggtttctttccaggtgagtagttatagctcacggtcatgggagccctttattcacactgtctgtgaagttaatgctggagtgccaagtgcacacggggactaggaacaataaagagttgcatgccattctgactcacggagttttattcactatagcaatgacaattcccattctgattaaaaattaaaacatgatctgtgtgtctgttttgtcctatgactggagtatgtaaagacttacatgtaggtcatgaaattttcagaatttccaggcagcccttattgtctttctgagagaggttggctccgaagccactgtgcctgctttcttgaagcacagcatcccagagcacgtgggcaccacag

SEQ ID NO: 21023 - DNA, 1159 bp, Mus musculus
gcgagtctcggtgcccggctccctgggctcaggggcattgacctagagaaattatctcatcattttattttcggaggcagggtctgtcattcatttgaagcttcatgttccagctaggatggttggccagcaagctcctgaggtttgtctgtttctatcccctaacactggagctacagacataccatggccagcttttcctgggtattgattggggagttgaactcagcaggtgttcataccaagtgctcttgtgcaccgagtcgactctccagtcttcttgtggttctttacattacacaattgcagagactttgtgagacatacctgcagatagccataggttagtgatggtatatttggacaggttcattagaagctgtgagcttttatcccaggagcaacctgaagaacaggagaagacccagaaggagaagctggggcatgtgccagacaaagactgatgtgtccttcctctgattttaaaacgctcaaggccaacagtggagtttcatagacacactttcacatttacagaagtcccatgcagccgcctcccacatttgctgcctaagtaactccccactctagttcgtttgactcttggtgaattaaatataaatgagaaagccattagtgtcttggccttgtcggatgctttagagtggatagcataattcagtcatcgcaaactcacttcaatcctgacttcattggttacagtaatcattgtgtgagttgtgccttacctcgtatttctcagtgttttagaacctgtgtctcctgcatacatgttaaaacacatagagtatataacaaagatgaaacatttgtgttcaaatcgtaggcggggccgcttctgatagagcacaggtataattgacaggtttgaacataatctcttcccatttctattgtttcggcaatgaccaaaacagccaacaagacctcactatcatacggttaaagaattcttgtaataaaattacaatcatatactgatttccccccaacttttttctatatatatgggcctaaaatagtatgtgtttaagagacaagtcatagataaaaatgagttatttatataattctcatgtagtcttttgctgtggtctagctttctttctgttgctatgacaaaacactctgaccaaaa

SEQ ID NO: 21024 - DNA, 1229 bp, Mus musculus
gaggaagatgtcctcaaattccttgctgccggaacccacttaggtggcaccaaccttgactttcagatggagcagtacatctacaaaaggaaaagtgacagtatctacatcataaacctgaagaggacttgggagaaactgttgctcacagactgagctattgttgccattgagaactctgctgacctcagcgtcatctcctccaggaacactggccagcgagctgtgctgaagtttgctgctgccatgggagccactccaatcgctggccgcttcacacctgggaccttcactaaaccagatctaagcagccttcagggagccacagcttctagtggtgaccaatcccagggctgaccaccagccactcacagaggtctcttatgtcaacctgcccaccattgctctgtgtaacacagagtctcccctgcgctatgtggacattgccatcccatgcaacaacaagggagctcactcagtgggtctgatgtggtggatgctggccagagaagtactccgcatgcgaggtactatctcccgtgagcacccatgggaggttatgccttatctttacttctacagagacccagaggggattgagaaggaggagcgggctgctgctgagaaggctgtgaccaaggaggaattcagagtgaatggaccgcaccagctcctgagttcactgctgctcagcctgaggtggccgactggtctgagggtatgcaggtaccctctgtgcccatccagcagttccccacggaagactggagtgtgcagctagctactgaggattgatcagcagctcccatggcacaggccaccaagtgggttggagccaccactgagtggtcctgagcaaaggggaaaaggtgggaggaaaataaagttcctaaaagctgcagatgcctgagcaaaggggaaaaggtgggaggaaaataaagttcctaaaagctgaagaaaaaaaaaaaagagtaaaaatggaagaatctacctgacagctgctctaataggcttgtttggcctgggaaggatcaaaggtgttctacatagatgcactgtagcaagactagagagtggacaggataaatggaggttagagagggtcatctaggtgtcccatgtaaagatatgaaagaagagagttgtagtcataaaagtgagacactatgggaaggctttcttcatcccttttgcagttggcttgaatgcattaataataaactccaagt

SEQ ID NO: 21025 - DNA, 1188 bp, Mus musculus
tttgaaacgtcccatcttcgtggggaaggaagctgctttctttctttttcctagggccgtccggccgccaccactctgcccaggtctccaactaggggagcggagaattttcaccaacggagccgaacgctgacgactaccgggaacaagcgaaaccggcacgctcatcctcccgcattagttcccagtagggaactattttccggtacactctaggcggtccaactcttttcagaagagcttccggtttccacccacctacttccgctgtccccacctcttttcttccgccacccggatatgagccgttctcgcgagagccgtccctctttctaagccggcgatccgtcaggtaggttcgcgggccgcaatgtggccgcggtttttcgcagagtttgggggaacagactcttggggggcgtccggggcggcagagcctgctccccggggtgggatgcagcggattatccgccttgcgcccgtagatggccccggctttggcggcccgcgccccaggtgaccggtggcaccttcctcccctcagggtgaagccatgttcagctcgagcgccaagatcgtgaagcccaatggcgagaagccggacgagttcgagtctggcatctctcaggtgagcttgtcgcccgggtgccccccgcgatcgcgcttgacctcagggtcccctgacccccggcatggcgcccacgttctctgtctccccaggcgctgctcgagctggagatgaactccgatctcaaggcgcagctgcgggaactcaacatcaccgcagccaaggtgagcggggaccccggagtgcgctcgctcgctgcccacgggtggttgacagcctctattcccggggcaagagacgggagggcagcagacagggacttccagtgcaggccagtctcacgcttaagtccgtgctgccttctgcacttgattgctggacttttttttttttttttttctttccccactgacattaaccttaactttttggaagtgtttagacccagtaccactcggttgaggatcagtgggtgtttctgagtttggcgtttgacaggtgtttcgtttttgtaagttagtattttgcttctgttaatgtacatgcaccttgcgtgttcctgaaacttgaattacaaatgcttgtgagtgctgggaactgaacctgggtcctgtgccctg

SEQ ID NO: 21026 - DNA, 1133 bp, Mus musculus
tcatgtgtacctacagtattttacttggttcattaaaacctcccatttagattccttatgtgatttttatatgtacatagttaatttctatatcagggtgaaagatcctgacagaatgtaaaaggtcacagaagccctgaaattggcaaaatagatttcattgttaacagaactagcttcactgatttagaaaaatagaggtgcataatgctctggccgctccttgaacccgtgtgtctgccaatgttttgaccgttccttgacccatgtgtgtgcccactgctaaagtccactgccaggtgtttgtgatattggttgctggggaagagtcagaaaatctccccagcaaccacagccgggtcaatccggagttgctacacctgcaccagactctttccttgtacccctcccaaacccatttcttgagaaatcattttagaatagatattgtttagattgggaaatcccctactccttccttctcctttcccccctgagggcctataaaaactgggacccctttctcctcggggtcaactcctctacccctgcgtgggatatgagtcattcccagagctctggctttccccaataaagcctcgtgtggtttgcatcaaacttggtctctcgagagttcttgggggtccgctattatcccgagatatgagtgagggtctccctttgggggtctttcaagggtagatattatcagtgtggttttgggtccttttacaatcaagattcaaaggaagatataagatttttcttggtgagtatttggccaggcggtggtggcgcatgcctttaatcccagcacttgggaggcagaggcaggcagatttctgagttcgaggccagcctggtctacaaagtgagttccaggacagccaggactacacagagaaaccctgtctcgaaaaaccaaaaaaaaaaaaaatttttttttctttttctactccagcaccttgggttacatagtgtagatgtagaaaaagaacaagaatcctgaaatatgtctatgtgtagtatgttagttacagagaaccccaatgatctatgctggagaagatggctgtaggcattctctgagtggccactcaatgtaaatgaccgtgatctccgtgacagtttag

SEQ ID NO: 21027 - DNA, 1165 bp, Mus musculus
gggcttagttgtgtctctgtgcaggactgggtggttacgtgaagtgcacaccgctcgctgtatgtcactgcccacttacaccatcaccacagtcttgactcaagcttgcagcatcttatctttaaatggacatctaagagcctgcttctgaggctggatcgaaggtcctggcagtgggttgggcagtgctctggtgctcaggaccacggtttaggagtaaagctctgccaaccataatgccaagttaactgttctctttagggctcagatctttggaacttgagggagcagcgcaggataagagcgccgccctgatggacgtccattcccgctgcttttgctccgggcccggccttccaacccaggatctcctgtagctgctgggtctcatgaaaggccaaatgagcatgcgcagaataaaggcccagctgccattggccaccggggaggagcgtattgatgacgcgacgaagaaaacaggaagtgagccgtcagggagccggtctgggtctcgtagtccatttttcaggcggggaatgaatgggttctgagcgatccctggtgaggggggactcgagctctgaggcgtgagtagctgggtaggcagagtatcatggaagacgacgccccggtgatttacgggctggaattccaggtgagcatggcggagtcggtgaggtgccgcctgtgcctggccctcaccagagagcgcccacactcagtctggttccaaggattctgggcttcaaggcccggatttggggagagggtacgcgcagggagtgtggccaagtgagggccagggctggcatagacagcagagggtgagcactcggcctcgcaggtgacttgattacactcgcacttctggggtcttgagtagcaattattgaccattgagttgtgtgttggatactgctcagtacaagagcattaaagagggacttcgtggggaggggagttgctggctggctggtctgttatgaagcattttgctcactcaggttggaaatatacttgcctttttccttatgaactttttatttcaatagctactaaactcgttacagattcgagtcaatagtgggatgagggtttccatctcccagggagttcttcagacctggaccatgatttgctaagagctcactggagacttctgcca

SEQ ID NO: 21028 - DNA, 1200 bp, Mus musculus
cttcgggctcacttgctagtggctttgctgttacactctactagacatagtgtcctggtgcctggacagggccctcagaatactccagacagatgatcaccccaggaacccacagtcccagagccggttgtaccctgtccccatagctgtcatgagggctcttgagcgtcagcatgctggccacacataggctgcatatggtccttgccgtgttttcctctgtgaccctcatatctcctgtggctcactcgggtctctatgtcttgggctataggagcaaggaacccctgcaggacaacgttattgccacctatgaggagcatgaggacagcgtgtatgcagtggactgggcctcagctgacccatggctgtttgcttccctaagttacgacgggagactggttatcaacagagttcccagggcactgaagtaccacatactgctctagtggcccatggcactgctgcttggtacttggcaaattctcagaaatctgcagctacgaggtaattcctttcacagacagattccctccttgggagaaccagcattgcttctacaggagctctgagggacatggcgcttctgccagcagctcatctgatgctgtcagcacactgctcagcatgggcgggagctttactggacacagctgtccatgtgtgaattgatggctgcccagtctctgtttggtttctggtttctgtttaaagggtgttggaagtttaacttttccccagtgtgtttccaccttcctgttgtcatgagattgcaaactgaaataaagtcagtgggatgcgcacagcctcctcctttcaggctccctgccccactgaggaagtcattaggctctttgtttgttttttctatcacatctgaaaaaaacacagtgccatccctcacctgtgggacaggtatgccctccccacagtgccatccctcacctgtgggacagatatgtcctcctcacagtgccatccctcacctgtgagactggtgtgccctccccacagtgccatccctcacctgtggacaggtgtgccctctccacagtgccattcctcgcctgtggacaggtgtgccctccccacagtgccatccctcacctgtgggacaggtatgccctccccacagtgccatccctcacctgtggacaggagtgccctccccacagtgccatccctcacctgtgggacagg

SEQ ID NO: 21029 - DNA, 1121 bp, Mus musculus
atatttacagagctccacttgcttctgcttccagactgctgggattaagggtgtgttaccaccatgtctggcatttctcttttgttcttaatcaaggcgctaagtttgcccattgtccctgcaccttcagcagggcacagtagacaccagctggctgcccatggctctgcctcactctgtaaaggtagaggaaaggaactgtatgctttcagctcagtttgggaacctaatactgactcatgaaatgaaggaaaatcaccaaggcatgacatgtgctctgggccttgtttatagtgtgaccaagggtctgtggaagccatgatctggttgggctcgagttcagagagcagcacaactatatccttgttcttaggggattcaaacttaggtggtgagggagactcttgtaaatagacaatgcaatcctaaagggaactagaaagatgctttaaggctttggaagaaaggagagttgtcttgcaaaggagcaaatgatgatattagaagacacggtagtcgaggagggagggcatgctactaaggtgacccaggtctgtgcacagagtacaggtatttatttgagtttatgagattcagccagagagaagaactggcaggtagcagactgcaatcttctaccctggatggacagcttgacacatacctgtgataaccaaggaggaagggcatggatttctgtctgtgcgtattctatgcaaagaggttcttgtggctgctcattccatggcaggagagccccactgtgtgcacaatagtcaaggtgtcccacgtgtacaccatgcagaggagcctcacatgtggacgatggtccagggatgcaccatgactggaatgtctcatgtgtgtacaacatcgtgcagacatgagtctgaagaactctacctcagtaactacaaggtggccaggaaaagcaggcattgccagactaattagattaatgtaggaaaatgtaaggaaatgtctcttaccttaaagttcttatcttacctttatggggacctgagttcaatccccaggacccatgttttcaaaagctattgcgctaccataaggtgccaccattgtaccagtgtattttgtatgcacatccttactgtagc

SEQ ID NO: 21030 - DNA, 1151 bp, Mus musculus
tggacatgcccctcggtggtggggcatggcaccatctcacttcttcttcagtaggctttcctgcattagaagaagggcttcattccaagcacacattatttctgaagttcccaagctgggcttgtgcctgctttatgaaagccggtgacttgtagctgtcaaagctctgggctttcctaccctgctacctgaaaagaactcagcgctaactggctccccaccaccctggcctattaccttcccctggattttttggtacagtctcccgagtttctcaactgctgctcttgaagatttaagtcctagtccaacaatatctggtctccttggcttgctgctcggaacgttttttttagtgcctgtcaaacccaggaaaaaaaacgcctgaggtcttcactgcggtgtctgattccctgggaactcactgtcacctacagtggccttggctgtcttcatcctcctagcttcctcagtccctcccctgtctcttcatgtgggcaccccacagtgcatcttctgggagactcttcttccagacatatttggaaacttctgtcttccctctggtgcttctgtcccagggaggctcattcacctgccatgacctcgtagcccagtctgtctacatttccttacttactgcccccttttctatctgatacacctttgttagctgtctaactttaggtctagctccattcatttgaacggtagcggttgtgtaatgacagagagagtgatcagtgttttaaaatccattgcagcttagcacttgtaacaatagcaaatgagagggacttagtggatgctgggtaaggtacagcaggcagatgggaggacactgtagggacactagggcagtgtgtccaggacaagccctgatgcttacagccatatgacctcactgtttacttctaggaggctccttttgttcatgtggagaatgagaataaaacaaagagcatgtctgagtgcctgctccaagggaggtccctaagtggacgaagattgatgatgaatatgagcaagggtagtgaggtggaaggaacacgctgaggtcatccatggaaggaggtgctttcttagacctagtagcttcacatggagagtcctgcagaatccaagctggcatcctgtagaagctgagaccc

SEQ ID NO: 21031 - DNA, 1183 bp, Mus musculus
tagtgttcagcaggctctccattactagcattgccaggagtgtatgaactatgaacttcacagcaagttccctggctcctgaccgtgtcctagggacacccttggctctagtttcttagcatgtgctctcttcaggatggtcacaacaggagagctcatgaccctggtctcagagcccaaggatgctcagatgtgtgagcctgatgtttcattccactgctcacagctcaaccaaggcctgtgaatatgctgctcattttgggttctcggggtactggcctaagaggagaaccctcattgtccatccagggctcagttaggcctgtgtcatacgttgagaccatcggggtgctctttagggttgtattctgttgggatatattgcctgtgtgcatgatcttggatgtttgtaaggaagatgctcctgtgaggaagccatgttggtttagtccgtctatctctactctgccaaatttgttaacatccaagaaatggtgtaaagcgagtctgaatgcctgggaccctggcagctctgactggaagcttggtttgatcctaatgaagccaccttcctgtagttttctccccatggtccacttggcctccttttttgttagttgactccattggtggtaagtgggagctgtgggaagagccttcctggaacagcttgtttgagctcagtttgcttccactccatgtctccagtctgtgttccccaacatgtggaccagaaccagaggagggttggggtggaatagctgaagtttttggatgttgggcagactggagaagaggtgttctctacacagatctgagccccacggtcagcagataggcctgatgtgtatctacaaatgtgggagttggagagtcactatgaattgctggttcccattgacagaccatgttcttttcatgtcctgttggagaaattggccttttcctatgcacttggcaataaggggaaatgaaaacagattcaaatagataaaaggaagccaaggctgttctggggctcggaagtcaggactgtaggcctggagctagagatttcttaggagccaggaaattaaggaaatgaagaggcatctgcaggctgctggcctggcctgccactcagggagacctcttgaatttcacaatatccaggacaccgtcttggttttacagtgacagtttt

SEQ ID NO: 21032 - DNA, 1868 bp, Mus musculus
ttgagtgacccgaatagccccttgcatcggcaggatggtctgcagccaccacctgccttggttcctggccatggtgtagggagggtgatggtctgcagccaccacctgccttggttcctggccatggtgtagggagggtgattcactctccaggtcctttgaataggtgacagacaggcagagcctgaatgtcaggaaattccattgtatgaatgctttaaaggaaaacgttccctatacctcattattttttattgcatgatgttttataaaaatttgcccattttagatgttagaaaaattatttccactatgcaaatttctttttaattcagtgaaaagcaactgttatacctcatagtctcttgtttttaattgaccaaaatattccattctattctcacaaggttctgaggtctctgcctgaaaaagcaagtctcaccctatagacactgatgtgcccagcactacgtgccagccattgtgggaacacaagagggtcacctgcccaagggctagggaggaagacctcaagaacacagaggaggtggaaaaggacaaaataggtgccattttagggagaccatggtcagatagggggatgctcagttccttgcagcctcgggcgggcttatgttggcactaaggccattgtggagtgtacttatatgatccctatgctgataggattaccttcctagacatagctagacgcaaagccacatgtgtaaggctgctgagcaaagacagcatcccagcatgggtgtgttcacggtggattcaccacgttgcatatgtaaagtggtccccttggcttacccttcactttgctcatgagattcagaagctggtggtccagcaggggtgagcatttgtgaaatagtaagctgaacttagtggtgagatttcagaacagacttctgtgaagtaagagatgtaaccatgcatctaaaatcagatggccgtgtaactgctcgggcatagaaatggtgggagaacctgtcctgggtacctggcatttcacatgagcccagggatatgtcttgtgccaaggcacacaagtgtccatggacttggacaggtgccaagggtttttgtctctgttcctatgtgggaggctggctgtgatttacattaatttctgtatttcaaacgaagatgtctgcagatctccattttgatgttacagcctcattgcccaggcagtgggcagtgcccagacaccctttctgactagccactgcattgggcttctgtgattcaaagtagtgtatatatttatttacttctctgactgtggccaacagccaaatgccattttatgttccttgtattcagtccattaccaaagaggtgtttgcactttgtaatgatacctttcagttcaaataaaaggaccacatcgttaagtggagaatctgtcctttgtactttgacacaaacaataacttgttcactgagtgatgtggaagtaagaggaaggggtccagtcctccacagaaactcagagctatgctgtgagcctctgtgaagaagaacaaggaaagaaatgggggggggcgagtaagaggagcttttctttttgacatagagatgcctcagccagcctgatgctatgtgggttcagcccctggaacaaacctcatgaatttatttgtggaccagtatattccaccttcaggaaatgcatggtacttctggccctctgaggggacaggtagcccctgctcttccaaagcatgagtaaagatcgtgcagatctcatcacaccatcaatgtaggacgtcttccatgtgtttgtgcttacgtgtggccttcagcctgagcaaagtgacctgggacacaggatagggaaaggacgctgttct

SEQ ID NO: 21033 - DNA, 2115 bp, Mus musculus
cactgttctcctgttaccttccaggaccgaacgtcaatcattgtgttgtgttttgcttttcctacaacagattgttctcaaagtaccagtactttgactcccgggggatgttcatttctcttgtgttctcagcgccactgctcttcaacgccatgctcattgtggtatgtatgacacagacgcttatgtcctggctttcttcactcagagcctttgcagttttaatcatgactccaaatggtttttagattatgtgggtacggaagactttgactgtgatgaccgacctgaagaccttacaagaggaaagaaaggagaggaggaggaggaggaaggaagagtaatggtgaactgctgctgtgcgccatgtttgtcctctgacttgcttgtttccagctgggaactaactgcacatggcccagatgccaaatgtcagccgactcatggtttagaaaaaggtccttatagcttagcacaccacaactggttcttatagtttactctgtttggagccctcttaaagctggttcttaaaagaactgatggcatcaccgaaacacgttggatggggacccctcctttacatggggagagcttcctggttcagccactttattcacagcttctcacacgttgctggtagacctcattatgtaactagagttcacgaggttctaagtgtggacactgggaaataaagagccccgatcctgctgggatcactacctgctccctcttctgtttctagcctgtagcggtggctatcagctaagggtggctttgttccccaggaactttgctgatgcttgtcaccgcaggtggacatggtacttgtgtccataggacagagccgagtcctgcagggcacaggacagccccaccgtggagtattgctgtgtacataatgtcagcagtgcccaggctgagggagcggtgggtcaggtctggggaagaatgtggtgtgtttcagttcccatgaagctaggcctctaaataattgagttggggctatgccactgggaatgttttgtttaaaaatattaagctagaatgaaagctgtaaagtcaagactccgtggaaaatagtatgtcaaatgaaccgtttggtcttgttttttctggatacagaattataaatacctgcatgctctgtgaatggcttatctgtttctacccagactgtgacaagtgcagacagttcttcccaagtgtcacatttgtgcggttgggggctggcgaacacagcagggtgtattgtcacctgtgcctctgttttgtcagacacccttggtttccatggaatccggagcaataaacctttagagatttgaggtgacagagacccagacttagagacagtaagaaatacactcttggctttagtttaaagaaataatttgtgaagtattttctttatttaataggattttttcctttctaaacattcttcaaagttctaagctaaaataaaatctagttaaaaatatttaaaaggttaaaagtagatcgtttgatagactaccgttatgttctgaaacccagttatatagtttctaatgtttatccagcttccggatttaacagaaacctactcactgtcttgtgacaatctgatcatcctgtggtgtgagtttgcggctcctgctgcagcacttaacctgcattgtgcacagtctcttgatttgttccacttcacattgaacaaaaaagtgccaaggaaaataacacagtgttaagttcagattttgaatttaaatcacactgttaagtcgtggacattgtgtctaaagggatacttaattgtatgtttctgaagttttctggttcaggatatttgatcattttatggttacaaaggtgcttactataacattgattagtttcatagaaaataagaacaaattagtccgttagataaatctgaaacaactgagtgtcagataggcctggactcaccaactagatgtgttcccttcaggcctttgtgtctgaggccagtggggcagaatggggcagagagcggctgcgatgtccgcgttctggcatatgccggtattaatacctcagcttgtgtaaccatgaccctgaccggctttcttgccttgtttctgcacg

SEQ ID NO: 21034 - DNA, 1391 bp, Mus musculus
tgccgtttgcttgccgtgtactctcttctctaggctctcgttgtgacaatagctccattcacggcagccttccagttaacactggcagtttaagctcagacacactgagggtgttgagggatttgagagaggagacgctggatgtgctgatgggcctgggactccagcaggccgtcctgggctggacagtgacaccctgtctaaaaggggaacaaaaataacaacggatgggagcagcagatggataaagttaccatcttcagtcttacttggtttttgtctactttcctgagctttgttcttgtttgagccactttgctttaaaaaaaaagtaagtgtgcttaaatactggtatgtgtttgtaagtgttctctcatgggcaatttacaaagttataggcaagcaagagtaatttttgtgtattttcagaaaagagacctcaaatttatatgaatgtatgtcagaaaggaacatgaattcaactgggaagttatcaaatacaactgagatacaaatccagtgtctgcctgcttcttactgacaagtgaacaagatacctaaatgttgcctccatgtgcctttttatttgcttgagtgtgaagtttgggctctcagcctctgtgttagaaagtaaagtgatgagatggatacacacaatgctgtgttggatggcgatgggtgtctaattgagagactccaggcactatccttatccttgggccttcttcatgtagctggtgctccctacccgcttcccagctgaaaaggtggtaactgtctgtcttagcctgtcttagctcaggtcactactggtgagctccagtcacgcagaacttgtagttagaagagccatcctgacgtctgaaaggaaggaagcccaggggcctaggaatatgcagtctcttcttggccagggctcctctctcgaaggaggaaagcttacacctgactcttccagaagaaagcagctatcccagcaccctctcacagaaaggccatgatgtcccagcaaaggcagacacttcagctgcctttttgggctcctgtggggttttggtcagagtcttcacaaaattaaaaccgaggaagggagaggacaggtagtcagccacaaggaggaaatggattaagtcaaagctctccaccctacttcagtgcttgcttcagaatctcagatttctctttcaggtcataagatcctattgttttcttgaaattttacctgtgtatcttacacgcagatccttggaatgtcaggttctgctttgttctacggctgtctcaaacagcacagtgtgtttataagggctcatgaacagagaaattaactttttacattcaatcaaattacatttgtttaaaatacagccattaaattttaaaactgttct

SEQ ID NO: 21035 - DNA, 1174 bp, Mus musculus
tcaggtgtgcgcccgctgggcgggtcccgtcagggaggcggaccaaggagaacgctttcctcttcctggactggagtgaggagctcgggtaccgagaggagcggcaggcaccagtgagtaagggtctgagcggctggggcgtgtcggcaccgcggcaactcttcctcttgcgatgggcgttgtgaaagaggagagaaaacagtcaagtccctgggtttgtctgggcgcatccaccaagatcatactgcacggatccttttgtaaatcctcagaactcaagattagttttctacactcctggctaaaggttttggttgattgttaaccacagtcgttccgcttcattgcagaaaaaaaattttttttcctccagcatttccagttttgaagacagactttcattttgttatttttcccctaatatctgatgttttaccatcttctggtttcaaattgttttgagaattggcatcctgtgtacttgacacagatgaaggaggtgcagattgggggttgtgtagggcctttgtgggaatgtgatctctgggaaaggatagtccctaggggaggggctcacatgcgtttgggacttccagaggtagaggtgtcaggactttgacacagtgtctttggttctgcgatactttacaaaggggtggtgtggagggtaatttgattgctgcatctctagtatatagtgcctgtatggttttttttgtttggtttggttattgttttgttttgtttgttttgttttcttttagtgctctgaacaataggaataggtaacaataggaagcaggtttctcccctggcaaaatgtgccggcttcttttcaacagatgttactactgccctgccaaggcagaccagggaagaaagacttgaagtaaccacctccatggaggaatgccctggcctggggcagaagccttgccctgttctgtgtttaccaagtgaacaggttctgtattcctgctggcccaggtattttccttgagatatgaggaaatgtttcgattactaatgagttagttcacttgtacacaaagtttagagaataacacggctgggttgaaggtgctgttttattctgctctgtggcctgttattgaaataccatagtagcatctggttgtttgtaaattgctatgttggaggttaaaatagacta

SEQ ID NO: 21036 - DNA, 1162 bp, Mus musculus
agtggccaggtaccgccctcgggctcccatcattgctgtgacgtgcaatccccagactgctcgccaggcccatctgtaccgtggcatcttccctgtgctgtgtaaggatgccgtactgaatgcctgggctgaggatgttgaccttcgtgtaaacttggccatggatgttggcaaggcccgaggcttcttcaagaagggatatgtggtcattgtgctgaccgggtggcgccctggctctggattcaccaacaccatgcgtgtagtgcctgtaccttgatggccctctggagcccctcttctagcccctgtcccttcccctcccctatcctttccattaggccagcaacgctaggccaaagtgtggcgctggtgggctgggacaccagggaaaattaatgcctcgaaaacatgcaatagagaccagctgtttttcatggccctacttgagccaggggtgaaggaggaatacagaattggaaaccctctgactttatcaaagatgggcagcagcatctctgtactttgctcctatagaaagttgtccagagatttcccagccctagcctggagtcgggagacagcaagagtaggggctgagggcgtggggcccagggtcccagtatagatgacgtttgcccctggccctgacctgctttcccaacagctttggcctccccactccttgtgcactccactgctgtcactgcagacactctactctccaccttgtattctgcagtctccaggccttttgctatagtgcccacctgaacgtcagtaaacagcagctgatgcaaaaaaacaacaacaacaacaacaacaacaacttttcctccacaactttttcttggtcattgtgttttaacactgtaattctaagacagacatgaaatagagttatttatatcaaataatttgtgtcaagtacacgatatccctcaatgcagtaagcactcaatgatacaattatggtcatgagataattgaaacagaagactgtggcaaatgactacagcaccattcccagactctaaaagcccagaattgtacatgaagtgtgagtgattaaagcacttatgggacaatattgctccttgtccttgcttgccagtgcaggtgctgcctttgagtcaacaaagtcctcattccttacatggatcag

SEQ ID NO: 21037 - DNA, 1132 bp, Mus musculus
gagagagagagagagagagagagagagagagagagagagagagagagagagagagagaaagaaagagaacatccacagtggtagttgtactggctagttttgtgtcaacttgacacaagctggagttatcacagagaaaggagcttcagttgggaaatgcctccatgagatccaacagtaaggcattttctcaattagtgatcaagggggaaaggccccttgtgggtgggaccatctctgggctggtagtcttggttttataagagagcaggctgagcaagccaggggaggcaagccagtaaagaacatccctccatggcctctgcatcagcttctgctttctgacctgcttgagttccagtcctgacttcctttggtgatgaacagcagtggaaatgtaagctgaataaaccctttcctccccaacttgcttcttggtcatgatgttttgtgcaggaatagaaaccctaagacagtagtgcttcactagaccttcatctacaagaacgtgtgctgtgttggatctgacctgtgggctgacctgtttacagagcccctgtgcagagacaactgatgaatgagaaataaatttgattctagatgatagaaaggatattgtgttctgaaggaacggccatcattggtatagctcaacaaattatgtgtagcttctaaataaaggaagaatccgggaagatttcgcaaattttccttgaatgtatcattgaaaatataccagttgtattcgaaagtattctacgtctagtttgctgtgtcataggtttccatgtcttcagagtgtaatggctgtgaatatcagtgtcatggctttcagccctgctgggtttggtcttctcaggaaactttctatttttaattttttatttaatctttagagtactgaggcttaagacatggccttgtgcatgcctgggagcacagtactactgctatactgccagtccctaccattctccttttaatggctgtgcttttataaaatttaatatgatctggaaaaaaaacccatcagatctaatcttaactgggcaagaagaaacaacaaacacaattaaaagcccacttttgggcccatggtgctggctcaggagaaaaagtgcttgccacttac

SEQ ID NO: 21038 - DNA, 1193 bp, Mus musculus
gattccatctaagctttgagggctttggtaagtctacatacccattgcgtttcacttacaagaagatggcaagacccagtccagagtaattttcttttatttttgtttttcaaaaaaaaagattgaatgggggctggagagatggctcagtggttaagaccactgatagctagctcttccggaggttctgagttcaattcccagcaaccacacggtggcccacaaccatctgtaatgggttctgatgccctcttctggtgtgtgtctgaagatagtgacagtgtactcacaaatgtaaaataaataagtcttaaaaaaataaataaccagccacccgccactgcacctgaccagtattgttggctggtgcaatccagtggtgagctgacagtaagccccagcttttaggaaacagggctgtcctacatgtggatggctctgtgccgaaagcatgggaacaacctagcgataggtaaaatggaaccatgatctcagaagacaggggaagctgtaaaaggccctgtgctttctttctgcagttaaacacagtgggaacattacttttgatgagattgccaacattgcccggcagatgagacaccggtctttggctagagaactttctgaaactatcaaggagatcctgggtactgcacagtctgtgggctgcaatgtggatggccgccaccctcatgacatcatagatgacatcaacagtggtgcagtggagtgcccagctagttaagaagcaacaagaaaatatttcaataaaagactatctgataaaaaaaataaataaataaataaataaataaaaagaaagtccagtgatagtcccaaagtgggatccagctcaaggggaggtcccaaggcctaacactattactgaggctatgaagcactcacaaaaagggacctatcatgactgccctctgaaatatccaacaagcagctgagtcagatgaagatatttgcacccaaccaatggacagaagcagctgaccctgttgttgaattagggaaggctgaaagaagttgaggagagggcaatcctgtaggagggccaaaagtcttaattaatctggaacccccaagatctctcaaacactagaccaccaaacaggcagcaaacatcagctgatatgaggcccccaacacacacacagtagaggatttcctgttcattcagagat

SEQ ID NO: 21039 - DNA, 1135 bp, Mus musculus
gttctttaccagctaataggcactttggctgttgccattcttgggctagtgtgagtaatgctgcttgttttctcacatttcctgtgatggtactgtggtgcttgacatattattgtacaatgactatgatttttatgtgtgtgtgctccttattaaactgtgtgtagcatatggatgttatataagccacaggctatatcatctatggaatgattaaatgaagaagtgagaaagcaagcattcaaaattagttctctcctgggcatggtggttaatatacccaagtgtgtttgctacaagggcctgtttataatcagcttcaagaaggaacagtttactggtctaccaggtggttgctacaagtgcggcctttcaagaacagtctccacagaaataccaagcacacagtcagcttaggcacacaggagggacaaaaggacagagtagcaagcagaaccatggaatgagactttcctcctgcttttagacattccgcccagccgccatgctgatcgagcggtcttctgactttgggaaggcttggggcgtgtacagatacttcgcctacgactgtgagagctcgttcccaggcatttcaactggacccatgaagaaagtggatgacatcatctgtgactctcgatattctgacattgagccctcgacagaaggagaggtttgtatgcctctgattgagttctctacttgctagtctgccttttgatcattgcaaaaataccaaccctctgatctatttttaggtaatatttcgtgctttagatcctgctttcaaaattgaagacccttatagtccaaggatacagagtgagtttgttttgaaatacatgctttggtgggaaacagtacttacggagggtctcatcctacccagtgctgtgtggcccgatatcttgatactcagtcctacatacacctagatcttcttcctttctttgtggtcttccaaaaaaaaaaacccacttcaaattaccagtaatcaggcttcactgataagaaacacattttgactatgtcagcagaactccaaaaatcagactgaccatgccaccttctgtttttgatgctcagtatataaattagagtacagattaaactgctgtaatcaaacaccccc

SEQ ID NO: 21040 - DNA, 1271 bp, Mus musculus
tttttttaaatcatagcatggagttacttttgccttaaaaacaatttttcatttcaagggtgctggagaaatggtgaacgaggcggccctggcattggaatatggtgcttcctgtgaagatatagctcgagtctgccatgcgcatccggtaattattaccaatacacacaggcttaatggctacccccgttttcttttgatctgtaactactcatgtttaattgtgaattgttttcccttgcagaccttatcagaggcttttagagaagcaaacttggctgcagcttttggaaaaccaatcaacttttaattagaagattgtttttcttaaaatctggaagcttttgtcaacattacatttttgaacaggataatcttccagttccaagaatttgcaggatgaaattatgaaacttctgggagatctttagtaggtttgaacagaatggaataaccatgtacctatatttcacgtatcttgttccagtgcattaatgcaaacagaaaactacatatagaagaatcctggaaagttttgacctgttttcatactgtctacgagattcaacttcactgaattagcactaatagattttacctctaatttagtggaggtgaatctgttgacaggaaggagctggaaaatatgtgtgaacaacttgaagaagactggcaaacttactttaaatttggttttcatattggaaacgagtcaatgactagaacaagattcaaatatgtacaaacaacttatgtaaataaaaatgattttctctcatttatttaacttccaaattgctggcagtttaagaggtagaaatacatgttacctaagtgaagatttttgtctacagaagtattaaatggagactcatgattataccagggaatgaagacaccaaaataaacatgtcttaaatattaatttactggttattctgagtgcatactaagattgtcctaattctcactacctccgattaccttttattttgaattgtcgcatctgcagcactgagtgttcacactgtccaacagtactaagttgttggtgtggtcactgccctttcatttcctttacagtaactactaacctgtgctttagcctgtgctgaaggggtaagcgaagctcttgtgtgctgtagtttccatgtggatctccttggcttagtaatgtttttaatcttagtaaatggccattttttaagagtgctacaatttatatttattgatgttattgaacgtctaaatgttaaaatgactgagtatct

SEQ ID NO: 21041 - DNA, 1119 bp, Mus musculus
attgaaaaaaaattcactgttccactttgagaaatactgactttattaaacccaatgtttagttttcttgtgatgcattttgttaacctgtgtaaaagaattaaatttcaaaatggttgtaaaaatgctatttttatgtgaatttaagtgcagccatatcattttttaacccatattttaccactaattttccaaggttaaaatcctaaaagtaaaaatctactaaatcgttaccaggcagactgttaaatgtagggaattattcacactttaggcactgaaagttcaaagtgtagttctgtaatacggttcactcggatgccttttcacagcagctgcagatcatcagcgtttctgtaactgtgcttggctggcatgtctccaggtagtgtgtaattgggaaaccgacctgctctacaggctctaagctgccagtgagtgctgttctcattgacgctttttctgagtggctacaatcacataacttgtcacacttaaaggtcttaagttacattattttataggactgtttaaagttgttattggatgaaatgtgctctctgttcactgtcttaacctacatgtttggggctgactaggctttatttaaatctcctttttctcagtttgattctgtgttttagtgcatagtgtgttcttatttatggaattacacactgcagtttgaatgatgtggaggaatctgactaatgtattagcagacggtgttccttgtagtcacaagctagcatgtactcgggtttttgtggctgtggtgagtttttcctctaagttgaaattttaaaactatcatttcttttattggtaaaacagtcaaaaattggaacaatttactgtcgaatcaatagtaaggacaaccagataattttgaattggacagaagaaaagtcatggttagattgtgaatttcagtgccatgtaaggtgcctttagagtcagtgtttgcattataggggcttgttacagtccattggagatgaccactcagtttatacatatttctaagtcagcatccttaggatattatcgtatatcctttggattgactaaactcttgtgaagcttttcttcccctttaaaatggtgcataatataaac

SEQ ID NO: 21042 - DNA, 1470 bp, Mus musculus
tgatttgggaaggactaaatgaaaaggaggtgggaggacggacagaaagaaggatgagggggagggggagctggccatggcagttaacaggctttggttttattttttgttctataatgtttaaagtttcaaactttctcaatccgtattttcacattttaattctctaatgactagcagaataccatttatatacaagtgtttgtatctatgaacgtacttcttaatctgctattttttcttacagaaccgtttagagaaagagaagaagaaaggcctgtgaactaactttataaaagaagactgtaatacaccttgtcaaagttcagttgaaaacaaagaaagctgtgctagcgcctgcagacccgcacaggctatacagtagtgacatttccaaaatatttgataatgtttcagatttcagatataaagtatggatttcagctcttttggaaaatataagcatgttaaataccatatttacatattgctaatagcattgatatatggtggctctttacccataaaaggaaattttcatttgctagcatttacttcccaaattagatctgaagttgcatgaaaccattattagctttgaaagctttgatgtgtttttagtaataatcagatgatggtagtggtaaaaatgatgtgtttgaaaagagaactcagtatcagaaaatgttttcacagggaaacaaggatgagtaaccacaattagccactgcgcttatcgagaagagtcagagaacagcgaaaactacggccttagggctcttcaagcctcatgattgtacaacctactcgaaatatgacagcactgttgatagtgtgtgttgctactgtgcttctgtgcctataagactattgataatttgtttagtcatatatggtcagtagtctgtcttttcaaggtcatctgctaatagaatgtatgcccatttgcaaaactgtcataccactgaactgagcttatgttgcactgtggatttctccactgacaaagcttatttacgacatcctaaaagcagcgttttttctatttgtgaaagttactgattgtactggtattacctcagtattcatgcactggtatcatacagatctctctactatgtttctatattctcaaagttaaatacaggttttcatgcaaatattcatgtagaagtagtgagtgtaataatatgatttaggttatttcagtgtttaactgtgaaaagccacttgtcttaaaatgcttaaatataaaagaaaatgcaaaataataattggagtttttattctctagtttttatctataattttaatgccaatcctatgtatatttaattgttctcattgcaaagtgggtaaaatgagtaatacctaattgtatttcagataaaagttaggatttagtgctagaaaacagacatgaggaagacactctccggggtaaaatacaggagttacaccttgtgggct

SEQ ID NO: 21043 - DNA, 1184 bp, Mus musculus
actatgaccaaggcaacccttataaaggaaaacatttacctggggctggcttacagtttcagaggtttagtccgttatcatcatggtgggaagcatggcagcatccaggcagacttggtgctggagaaggagctgagagtgctacatcttgatctgaagtagcttgaacatgggaaacctcaaagcccatctccacagtgacacacttcctccagaaaggccacacctcctccaacaaggccgcacttcctaatagtgtcactccctaagggccaagcattcaaacatgagtttctggataccatacctattcaagcaccacatggcctatgcccatttccatagacaactccagagtttaatattgcagctggtaagcccggcaaacatccattgcctgtccctttccctaaaagattagttgtctatcccttggattaaaaaaaacataagttcctaatagtttttacataggaatatatctgagaagatgcatactaagatatttaggggaaaatatcaaagagactttggactgaaaaacaaagcaaatatgacaaattcttcaaaatttgaattcctatgataggattataggtgtgtgcaggacagattgagcatccccaactaaaaattccaaatttaaaaatttgaatctaaagaattgaaaacatttttgcacaagcatgctggcacaggtagaaaatcttatccctcattttgtatgatagattagagtccaaatccaagaacagtaaagacattgtctgaaattaacttcaggcttacagctgtaaagcatgtgtaaaatttaagtgtatttcatgtttacatgagtaatatttaaaacatgaaatttcaaagttcttaacaacagcagcaaaaacagcctaaatccaagcatgtctggtagtaggcattttacagaaaatatgcagcctaaatgagtttttcaacaggtcagaaatgttcctggcaatggtacttcatacattaaaagtagagctttaaggtttccaaagcagaaattccacaagccttcataatctccatgttcttttagaaacgactgagaccagcaagattaagtgacttgtctaagattgcctacccacttcttacaaatgtcactccttgctactttagcttttaatatgtattgcaaactgttttccctaggaact

SEQ ID NO: 21044 - DNA, 1959 bp, Mus musculus
agccaccagatgaactgtagtgtagagatttgttctgtgttttttggtgtatatgtgtgtgagtcgaggtttcataagtagcccaggctggcctcaaacttgcttttgtctccaaggatgaccttcaccttctgatgcttccgcctccaacccttgcggtcctttcagggattacagctatgcaatacaagctcaggttctgtgtatgtgtacattcaagtcacagaacaaactcaagtgttggtcttgccgccttttatttagtgcaggggtttgaacccaaggttctgtgcttaaaggcaaagtatatctatggaaccacacagccattccctacaaattctctaatgtctggaacttcatttgggacattagcacttttctgtgcatgctggtctcacatttgtttaaattttccagatacttaagctatgagccattaggaaactgagaaccaattattttgtttccacagggctctcaacagcattaaacctgatgcttgtgtttgtaagtctgcatctgcataagtactgactctggatggaaaagcttggaagaccttggtctcaccatttgtctacatttgtgtgaccataaaatgctgggagcattgagttttgtaatgatttaatgggtgaggattgctttctccattagagcattaagctataactatcaacattgtaaaccaaattgccttattttccttccaaacttcatatatctatcaggtaatataggcttgaaaattgatatcctgtggtgctaaagtacagtagaaagatgtgtatacgttttattttaaattgtacgaaggggaatttaaaaatacgtaactgctgtttatacatcagctccttactgcttattaatctgtattgtacccacgatatcaggagtgaagcagacgctggcctttccatgaatagccaccacatggcccagcatctctgccaaacacagttgcttctagtctggccagtgccaagagacaacataacatggcaggtggatggtgtcggtgtcattgtctcagctcaaagagccacctgcttcagataccatgggcatgtgctgagtggatgcaccagggggcagcacagctccatgattcccagtggggcccaagccaggccaaggtgcagtcagttaatagcattgggacagtcattgtaatggtgctgttaccagtcgacaccattgtgtttgaccgcgttcctgtctcctcagccacataccctcatctgtgctgtcagtgtgtctctggtggggcagactttgcacttactgcagtgcaccacttgcactttactccctccggcttctgagacagagcaagtacttcagcagtcctgctgctcttgctctgagctacaatcatggcttctcatgttacttaccaagtgagagttttggttagtaatcacagctgtaaaattgatttacacttgttaaacatattgcccctcaattttgcacactatattcttgtatattatttcaaataaaaggaaaaaaaaggtctgtctttgatttctggttgactgaattcatgatacctatcagtataatctgattggcagatggaaaacaaattcttgataaaactgagttctggtgttataagtaggtttctggtggggttttaaaaattaaagaatgttaacaatggagtaaagactaaaaaataaggccctgagtgcctgtttctagtaaaatgactgtaaagaaaccctgacttcatttaaagctgtagttagatccagtaaagagcatttagcagtgtgtctgcctcagccttgggctccgccatagttactgggcttgactacatgcccacatcactttggggtagagtggctctgtcaggtgtatactcctcaactccctgccgatgtgacttctttcactggttcgttatgtgcttaacactaaagaaagtggcaggctgggagg

SEQ ID NO: 21045 - DNA, 2816 bp, Mus musculus
tccattgttaacattctttaatttttaaaaccccaccagaaacctacttataacaccagaactcagttttatcaagaatttgttttccatctgccaatcagattatactgataggtatcatgaattcagtcaaccagaaatcaaagacagaccttttttttccttttatttgaaataatatacaagaatatagtgtgcaaaattgaggggcaatatgtttaacaagtgtaaatcaattttacagctgtgattactaaccaaaactctcacttggtaagtaacatgagaagccatgattgtagctcagagcaagagcagcaggactgctgaagtacttgctctgtctcagaagccggagggagtaaagtgcaagtggtgcactgcagtaagtgcaaagtctgccccaccagagacacactgacagcacagatgagggtatgtggctgaggagacaggaacgcggtcaaacacaatggtgtcgactggtaacagcaccattacaatgactgtcccaatgctattaactgactgcaccttggcctggcttgggccccactgggaatcatggagctgtgctgccccctggtgcatccactcagcacatgcccatggtatctgaagcaggtggctctttgagctgagacaatgacaccgacaccatccacctgccatgttatgttgtctcttggcactggccagactagaagcaactgtgtttggcagagatgctgggccatgtggtggctattcatggaaaggccagcgtctgcttcactcctgatatcgtgggtacaatacagattaataagcagtaaggagctgatgtataaacagcagttacgtatttttaaattccccttcgtacaatttaaaataaaacgtatacacatctttctactgtactttagcaccacaggatatcaattttcaagcctatattacctgatagatatatgaagtttggaaggaaaataaggcaatttggtttacaatgttgatagttatagcttaatgctctaatggagaaagcaatcctcacccattaaatcattacaaaactcaatgctcccagcattttatggtcacacaaatgtagacaaatggtgagaccaaggtcttccaagcttttccatccagagtcagtacttatgcagatgcagacttacaaacacaagcatcaggtttaatgctgttgagagccctgtggaaacaaaataattggttctcagtttcctaatggctcatagcttaagtatctggaaaatttaaacaaatgtgagaccagcatgcacagaaaagtgctaatgtcccaaatgaagttccagacattagagaatttgtagggaatggctgtgtggttccatagatatactttgcctttaagcacagaaccttgggttcaaacccctgcactaaataaaaggcggcaagaccaacacttgagtttgttctgtgacttgaatgtacacatacacagaacctgagcttgtattgcatagctgtaatccctgaaaggaccgcaagggttggaggcggaagcatcagaaggtgaaggtcatccttggagacaaaagcaagtttgaggccagcctgggctacttatgaaacctcgactcacacacatatacaccaaaaaacacagaacaaatctctacactacagttcatctggtggctgaccctactttaaaataaatccctgagccatttaacctacaaattatataggattggctaaacacccttaataagccttctttctgattaccgttccaataatcttcattttaaaaaaataatacataagtttattctagtctatcctatgtattttgtgctaaataatctaaaatgtaaacataaaggatgctattcaagtaaagaacagttataagaatggcgtctaccagccaaagacagcattgtgaaacttctttctcatccttcctgtgtctcctagtttctgcctatagcagaagcctgcaaggatgttaccaaaaactaaagatcttctactgtaatgagttaatgatgtccatcttttaaccagactactagtagtatactctaaaacttcctcagcacttggggcattcttcagctagcttgagaaaatctgcttgctgtactactcaagtggttcttgatagaaaaggcagactccagtattaggtttgaagtataataatggtgagggatctttaagactctgcctgccatcatggcacaagaacacacagagcatcagatcaggacttctgttactactaacacttactgagttggttcttttccttttccaacagtcaggatttaaacgcttttgttcttcagccaaagcctttgcttctaatgtgtacatcctcctttcttcgttcttcatttttttccacctgtcaccaaggatcacacttatggctctgcaaagtaaatatttacataatgtaaagtttcataaaatgtgtagcagctgctactactttggggagaaatgtaaaaaaaaaaaaaaaaaaaaaaaacagaaggggaaagatcaagactaccatggtcatttcaacgaaatcctggcatatgcatccatttatcagttggtggaataatgatagtatttacaattgttctaaaacatccaaaattgccagaaaactggcaattttccaaaggaaagttcagtgtcagcagcgtggggcattcaacttgtattaaaacttattttgtgtgcaaagctattgtggttatgataataaaagctttactccccccatgcagtgcaagccaagtaagaaagactatctttgctttagagtttatgtctag

SEQ ID NO: 21046 - DNA, 1106 bp, Mus musculus
gagattaatctctttccattgctggaacaacatgcctgagataagcatctgtattagtcagggttctcttagagaaacagattgaggattcatttcagggcagggagttatattatcttcttagtgttagtagtttacgagaatttattccctgttttacatagctaagttggcagttaagcaagcaagggtcctttggtgaggctatgaatcaaaggattaatggccaagccatgtccataagtagagtagttaacaagggaacaagcagaacaaagatttataccagttattagatttttttgatctttttttttttcttcctgaaatttattagatggtttacaggctgtggatcaggtagtctaaaaatggctgtctaccatcagaaggttcaagaatccagtagtagttcatccacgaggttggatgtttcagctggtctttagtatatgcaagaatcctcattgtctattactgcacaaacatcatgaccaagaaacaagttggggaggaaagggtttattcagcttacacttccatactgctgttcatcaccaaggaagtcaagactggaattcaagcaggtcaggaaacaggagctgatgcagaggccatggagggatgttttttactggcttgattctcctggcttgctcagcctgctctcttatagaatcgaagactagcagcccagagatggtcccacccacaaggggcctctcccccttgatcactatttgagaaaatgccttacagttgtatctcatggaggcactttcccaactgaggctcctttctctgtgataactctagcatgtgtcaagttgacacacaaaaccagccagtacactcatgaaataggctcttatgccagagaaagaattacttttccagtgagagcaggcaggcaaagagagcaagcttcccttttccatgtcctttatggacgttcacagtaaaaggtgtggcccagattaaagctggatcatcccacctcaaaaagatctagacaaaaggtgggtctcgccacttcaaatgatttaattaagaaaaatctttcataggtatacctaaccgcttagattttacttaattccagatat

SEQ ID NO: 21047 - DNA, 3528 bp, Mus musculus
ggctttgcagttacagtctatgtaactcggtcatataaatgagacagaaatacctgcttttctgtttctgtcttgggttgggtttttggattgtatccgtttttaaggccaaaatttaaggacaacaagtttattaaacttgtagattggcaggtctaggcaatattaaggcacttggccagatcctgagtaataattaccaggactacgtgtagttctcccaagcaaacattttcttcagcagtagaaaagatgaggcatctgatggtttgcctctccctttaagaaaaccagtctacgaatgtttatcataacctcactcgtattgacccttgacagctttgtggatttgacctctttaagtaaattggtcaaagcatgatctgaatatttggtagacggtctttttaataacaaattttacattcggcaggatcttctccatacggttttcaagaatgggaaggtgacaaaaagctactcatttgatgaagtcagaaaaaatgcacagctgaacatcgagcaggacgtggcacctcattaggcttcatgtggccgggttgttatgtgtgcagtgtgtgtatacatacatgcacgtatgtgtgcgcctgtgcgtatgtactaacatgttcattgtacagatgtgtgggttcgtgtttatgatacactgcagccagattatttgttggtttatggacatactgccctttttatttttctcccagtgtttagatgatctcagattagaaaacacttacaaccatgtacaagattaatgctgaagcaagcttttcagggtcctttgctaatagatagtaatccaatctggtgttgatcttttcacaaataacaaaccaagaaacttttatatataactacagatcacataaaacagatttgcataaaattaccatgcctgctttatgtttatatttaacttgtatttttgtacaaacgagattgtgtaagatatatttaaagtttcagtgatttaccagtctgtttccaacttttcatgatttttatgagcacagactttcaagaaaatacttgaaataaattacattgccttttgtccattaatcagcaaataaaacatggccttaaccaagttgtttgtggtgttgtacatttgcaaattatgtcaggacagacagacacccaacagagttccgaacatcactgcccttgtagagtatgcagcagtcattctccgtggaagagaagaatggttcttacgcgaatgtttaggcattgtacagttctgtgccctggtcagtgtatgtaccagtgatgccaaatcccaaaggcctgttctgcaattttatatgttggatattgcctgtggctctaatatgcacctcaagattttaagaagataatgtttttagagagaatttctgcttccactatagaatatatacataaatgtaaaatattgaaagtggaagtagtgtattttaaagtaattacacttctgaatttatttttcatattctatagttggtatgtcttaaatgaattgctggagtgggtagtgagtgtacttattttaaatgttttgattctgttatattttcattaagttttttaaaaattaaattggatattaaactgtatggacatcatttattaattttaagttaaaccctcagtaactaatatttaagtaagttcttgatgttatccccagtggaaagcctgattcttaatagaagaatcttaatacagagatttagctaaatttaagatactcatcctcaaaatgtttatagcgatttactgctaggtcctgagtcagccattgcactcaacaagacaccagtctctttgaggtgactcctaggtcacctgtaggtgacactacacagttctaagccaaggttggccagccaacttcatactgcttcttcatttttagttacacactgtctaaggatgtttcccacttcggtggcagaaatagagtagttacaatagagaccagatagtcctcaaagcctggaatgttcactaaacacaatcacagagagctcgctagcctgtgttctaagaaaaggagcatgcgtttgcattttaagagagatgttggtttttctgggaagggaggaagttgaattttacagagtacctcttgttctttctcatttaagaatctgataatagaaaactgatttagaaaagttttcacaacttgccattaagatagaatattaaaagccatacatcatgtaaaacaatttcatgaggaaccatatgaggtgaattagaggggttagcaggtgatcctaagacttggaacagtaagcattactcatttttagtaatctttattttgtaatacatgaaaaaaatcttaaactgactttaaaaagtggaacttgagtagtgtggtcatggtgtatacactacaatgcctgtaatcccagaaatgaggtagacacagggatcggaaaccaacatcattcttgactacataacaaattttaggctagcccgcactacctggctcaagaaaaaatgtacctgagattagtagtactgcagagacatgtcctgcatgggtataggcatagccagtacctgagactttatacacaggaggtttgttaagttcaaaaccagtctgagcttaaatagacccttgagtctcctcctcttcacaaaggcttgtagagtactacacaaaacccattggtgtcatactacaagcagtgtttttgtgttgtgtgaattccaccggctgcacatgccagttttgtttagaagcatgtagtataaactagtagcttccatttgtgcacagaatgggtctagagatggaaggagtcatgtctcttggctccagtccccttggaacgggttcattttggatttctgtcacttagcagtatttggccatcccccttctgagtaccaaatggttaacatgaatgtcaaattgagttgatttgcgtgtcacccttagattggactagctcttaagacactagatttgcagttgacattagtcccctcaattcataactttgaagtaggcagtagaatttgtgttatttgtaccctctacttaaagtaaaaggtttttatgagtagccttcctttcttgaaatgaaaagaaaaaaaagcttttttagtgaaatccatcatggaaaattagagaaaaatagcaagatgtttgttgttgtatttaccataccttagaactcacacttaaactagtattttgtagttttacattcctttttaactcattcagtggagaatatcagactttctcccaagttgtatgttaagtcaattctaataatgtactcagcatcaaagacaaacatgtaataaacatggaaataaagtttagttctgttagtgaaatgttaaatttgattgtgtgtatcagatgccatttccagacctacctcttctaggtatctctccagagaatcaggctgagaggagggcgtggtgaagatggttcccgttctccgccttcagcagctctggatagcagtaccatttactaagaat

SEQ ID NO: 21048 - DNA, 1200 bp, Mus musculus
ccaacaccttgaaaagcattattgtttctaataaaaagtaatggctttttcagtaaattggtgggtttaaaaatttgctgcttttctacataaaatgtgccttttctagaaatttaagatgtaaatgtatttttacatgaaagtttgaaaattcgggagcctgttatgagatgatgttacttttaactgaacaataatttaactaagttgcttctaaagtgtttacaccttaaactttaacataaaccttcattcagaaaacagttatgtcgtatcataatataggaagaatgtgtttggaaaatacactactgttagtttgtatacattagatctttcaggcttggcttgtttaaagaaaaccttgattgcataaatcatatttagaaaaaaattagtgcaattttatatttgaatattgttcatgttaaaatttttttgaattgcaaagactgggtatatattttgtttctgttttttctaaatgatctgctgtacttattaggtgtactaaaattgtcttagaagcgagggtttgaaaattgtacaaatgtgtagaggtaactttgcacttgtgctgcatgggtatatccattatttctggtggtttcttaggcttgcaaagagcacggttcccaagacgggtttatacacgtaggcgttctccatcaggcttgtttactatcttttgttcataccaagagaaaaaaatctactttttttttccagaccctgtttagagggttactaaaaattaaggttgccttttacgtttgaaatgtttaacatttagtcaatgatgtttcttctcctgagtttaacattgatattgtgaaaataaatgcagttcagatttatttcttaagattcattcttcacaaaagggtgattaaggaattatgctcataaaggaacctaagcaagctgtattgtgtgtgtgctgtgtgtacacacatttgtgtgtgctcagaatacatgctttctgctcctgactttttgttgtacaggattcagattcctagtcctacaagatgatgtttgtgtgtaaggcacaccttttttgttgctttattcatgacaaagtgtcagtttgagaatgtatgtttaataagcaaacaataaagaagtgaaaataaagaatgccccgttgttatattacaatgaactcttcatcctaaaggtataagcattgcaaaatgg

SEQ ID NO: 21049 - DNA, 1084 bp, Mus musculus
gctaggggacacaggctgagaagcggaaaaagctttaagcatctaagtttttcctttggtagtgtttacaatttggtttcccttaatcaatcctaagtgtttgggtgtatttgtttttctgttggtgcagatattggcaaggctaatgaaattaaaaaaaaaaaaagtagtccattgaaatgagagtaaactcagaaagggctcctgctagcctcccctccccgctgttttttagggaacattgtagaggcaatttctaggacagaagtgataagctttaacttcccagaagacaagctgcagagagacagctaacagactcgttactaattgtttttaaaaaacattcacctagataaagatctttaaatgtgtaaaaggtaggggtagaattacatggtattttgtgtttgggcataattataatttttatgtaatatttccagaaacaggtgcctgtaaaatcataccgaagaactttatatgtaccagatttttaaaagaaataaaatattgctagaagaacttgttcctcatggagatagaattggtacagatagctcagaatgaatattctcctcagtacttgatgctgccgggccactcgtcactgctctgagtttgaagcgtcatgtttgttttaaagcctgtttgtggttgctgttgaggctgacctccctttagtttagttacagctcctctgcttctcctgccttcccttctcaaacccttagctgagttttcttctgtgagactttctctgtggatgtacacagttccctacatcaccttggtagtaaccccttggcgtttccatggctgcagtgttcgccccatctgtggcttgtattttcactggattttgtcatataaatttgtaatttcttcatttcaatggtatgtaactaccttcctggtgggtttagtttctgcaatggttttggctgtggtgaagtcacatattcctgtatacattttagaatcctcttatcaagctcctaaagaccctttgtgaggtttcagttgtgaagaattgcattgaatttgtacatcagttaatttgtgaagaattgtcaaatttata

SEQ ID NO: 21050 - DNA, 1136 bp, Mus musculus
aacaaaacaaaaacagaaaaccaaaagaattaaaacaaaacaaaacaaaacaaaacaaaagctcaaaccattaattcactaggccttgacccagtattgaaagaaactgggagcttaaaaaacaaaacaaaacaaaacaagctattttgggcctctgcctttttatacttaggtgcccagatcaataaattcaataaattcaagcttcgctccataactgagcatactttgaagtgatgaacatctgcctatagatatcagagaaccgcctctggatatcacacatgctctataggtacacggcctcagaggtttatctggactcgggaaagagcagcagccctctgctggtcaaacctctataatgcagctttagaagattaaaaatccccaggccgcggtcggtcgccttttgatgatgtcagccatcatcaacactcagaggtgaggcgggaggaatgcttgcgtcatccgtgcgcgccccgaagcacccagccaagcctcatggctgcgggatctgtggagtctcagcggtcccaggcggcctccgagaggcccgtggcgggtcaggccggggtcctgccttgcctggagttgccgagctacgcggcggcgtgcgcgctggtgggcagccgctattcgtgcttggtggctgccccgcaccgcaggcacatcgccctgtcgccccgctacctgagcaggaagcgcacgggcatccgcgagcagctggacgccgagctcctgcgctactccgagaggtaagatgtcgccgcgtcctcccgggagccccgtctctgctggccaacgggccctcagctccgtaaccccacggcgccgcggaagtaaagtcgcacgagcttcgtgaaccttagccccggcgtctaccgtcgccttcggcgccgctggcctggatgcagtggcccggttcctggggatgaaactggctggtgtggtgtgagtggcggctgctgcagtgctaaaagcactccccgtgtggagactagaggtgcccggtgtctagaaacccaccaggctgagctttgggtattaaacgtttcgtttaatcacttccgggtgtgttctcacctaataatgaaaatttgctgtcagtattattctcctaatgtggaagccgg

SEQ ID NO: 21051 - DNA, 1709 bp, Mus musculus
cagtggctaccagagtgaccataacaagaaaaaaaagaaaagaaagcacagtgaagaggctaactttgagtcacctaagaagagacagtaatcgtcttttctattgttaacatattcagatacacgaggaatagattttttgagtggtaggaaatgcttatgggacattcacaaataaatacttgattggtagggttttgtactaaaatcatacattgataaatacattttggaaaatgccagtattaaagtattattttattacagttcagtggaaaatgttaacaattgcatttactcttgactcatattgttaaagctctacataaagttttagattctcagcatttgccaaagaactttataatattttcattttttttctgataataaattttgtttttagccagaacatcttttctaaaagcttaatacatttaccaggtttagattttccttaaacagtatttctatttacttaacatgtatagctaaagaagattatctagagctcttatataccctgtggctatctgttgaatgtatgatgggcagaaaactcattgttccctcccacagggggtatgtgcatgtgttcttgaattctgagactgttaatttttactttgtgtttcagtagtcttcatgtcattatatatggatcatgagcaagatgaagaaagggtaaatatggttcttgctagttgaaaatctctagttaaccttttaatgattagaggtagtctactagacttgctttgaggaggagctccacagtcattgcttttattgataaaaatgtgtgatgtgttatgcctaaccagaaggtggtaatgaggataagctgtttgaggctcataatcagcccatagccatgcatttacaggtacttaatatctgtaatatattttattgaggccaaagcctataaagtcaatcaagatagtatagttccttcctccatgaggcaacatgggagaaacacttgtgtgcacacagcctaagtgaggaaataaaacagtatttgtagtaaatactgtgaagaaaacattgactactctttagttagtatctggaaatgtacagggttagggttggccttcccgtgtcagtcactgctgttgtcactgactagcagacatagtgtggtcgtcagcttaatgtttcataaggagtaaattctggcaaccatgtttcttgacttcatctacggtatatagagcataaggaatgacagcaatttaatatgtacaggtagataaataaccagcatctttaactcaggatacttgacattttttggtggctttcaggtctcttcttaaactgtgactattctaaattgacatgtgttgtctgtcagtacaaaatatgagattttaaattaaagacgttaaaaaaataaaaagaataccccaatacagttgtctttccctcctcttaccttatccctcttgttcccatacctacccactcccccacccactttcctccctccatgcacccttgatgtctattaaaaaactgggtatggacctgaacaaaattcttggcaggaatctctaatggtggagaagcacttaaaggaatgtttaacatccttagacatcaaggaattgtacatcaaaacaactctgaaattccatattatacccaccagaatgactaagataaaaaactcaagcaacagctcgtgctgacgaagatat

SEQ ID NO: 21052 - DNA, 1214 bp, Mus musculus
ataattgtgagcataccgaacacaaccattctacattctacattcttaaccaaacattttcacaagatcagtgttttcccttgtgggtgatagttttatatgtaactttttagatgctaaatttggatctacaaattcaacatattatatattgcatttctcttataacaactttttgactctttgtttctctttatttacaaggctattaaatataaaattagaggagctggaaagtaactgggcgtcattctcatgacacctcaccgccacatgcaactccagttccaggggatccagtgcctccttctggtaccaagtctgtacctaatgcacacgcatacacgagcaggcaaacattcatctacttaaaatattactgcctgagtattaaaaagtaaaaccatataagcccataacgataaattaatacctataatatgctttctaaatcaaaatttcttgcaacagaaacatcagataaatcttaggtagaagcaataatctggttatatgtaataaatgtagtcaaacaactatatcaactaaagtctggagatacaattaaatagcagaggacttgtctaagcatgtatgtgcaaggcccagggttcagtccctagtgttgtgagtaagcgaatgtacgaagcacgtacctatgagcagttaaaggtatgtcaggaaatacagaggcagcctgtgtagtctgtttactcaaatatcttaatcttactatatttagttctttctatatctcccaatgtctaaggttgggcatatgtcactcttttactctagaccccctctctgtctgtctgtttgaggctcattaaatttcctaatcttcagctttaacaaagaattactgattttttattctttttgtaaaaaaaaaaaacctatttgaattcaatttggattttgtttttttgctctgaagaatcatttcttctctgccaaagaaaagttataacttgagcatccctgtaataggaatcggttgttcaccagggccagatcacattgcacattaaaacttctctctagtgacactgtagagatgttataggtaacaagtgtgaagcagattttgggaaatgaagccaaagtgtctaaatgaccgttaggatcaggatattggtcagtttgtgagggaaactctccaacaaacaaacaacaaagcttctatcccctcatagtgaatagttacctga

SEQ ID NO: 21053 - DNA, 1333 bp, Mus musculus
tcattcaaggtcaaagcaaatgcagaaatataaacaaaaacttcaaagtactcaagcgccttctttacaaaaaaggtgacactccaacgtgtgaagctggtgttcattttgtctaggactaatggtgtggacagatctcctggggtgtaactcccgtactgttgtgtctataccagtctttccatgtctgaaaacagaatcctagtacatcgtaagactggttctccttttcaactgtaatccaccaataccaagagagtcctgtgtcttacatggtttgctgcgttatttgcaacatcgagaggatcctgccccgtctcgttcaagaatggagtcggtctcttctgttccagactaatcagcattctctcccagtgccagagtgccagagtgtgtgtgtgggagctgagggaagcacaaagcaatgggtcacaggtaacttagctaactagtgtggtggctgcagagcgcagctcagagttggagagatttgtctccctcaaggatcttgtggggcatcagcattttgctatcatgtgggttagcaggtgagtgatcttcagaacaattgtccagttgtttccaggtagcctgggcaaagtgagggaaagaatgcccttagtgcaggaaatcacccttcccaaattaccgtcctgtgtaaagcattttaatataaagccaatcaaaactagcatttgattggatttattattcaccgatggaaatgttggttgattctctttggtgatgtgctgtatgggctcggccttgctcttagggccctcacctctccacctctcctttggcattctgtgcagaagaagcatgtggtagctctcttaggagttcacattttttaatcttttaacagattactgattatatagaagggaaattatttattgtaagaactgccaaatacattgtccttctaaaaattggaaattaaagcagtactctattgaaagttaccatatgataactttaaattgtatgatctagacatgccttaggtaactaccaatatagcaaatcaaaggattaatgagcttctagtcctatgtaaacatacaaatgcctaattctactatgtgtacatatataaaaataaataatgaaaacagaactgtactatttttaaaaatatgcttttatttatatttcgcataatgtaaaattctaaataaagctagtacacaaaaccctttggtgtatacatttaactccctaatattttatatcagtgaaacaaataccttttccagttgtgaagcctttgcatttcctagtgttctctccattttgtccattaggaagtcttcatatcccatac

SEQ ID NO: 21054 - DNA, 1109 bp, Mus musculus
aacagttgtgccattgaccagtggatgcactttgttagccttaatttaaacaacaacaacaacaaaatttcttgaatatatcagtttgatcactacaagtttgctgcaggtgtttggggaaaaaagagttaagtgcaatgaaagtgtacctttttttttagaaaaaaattaagaacataattttcacaatctacagttttaattttgtgcaatattttcatttaatgcatgtttgagtaattgtataataactacatttttaatgttttgagatctaatttaactgtcttattaacccaacaacttcattccgttgttgctgcaccttaattaaggacttgttttaaaagtctttttgtcactccttgtaaaattcttttcttagtagaaaattttgcttatgggagcatggctcctgtattataagggaaaactaaagagcacattttagggttttaattgttaaaaactaccttgtgcatatctctgtatataagcgtcgatcgtgcctaccgctctatcaatgctctcctctaaccaaggggaaagaatcagaatgtcagttacttttattaacgacagaaattaaaatttttatttggtttgtgttatgttctgtctgttagaaaatactaataaagtattaacaaacagttctgatgtgtttacttggcagtatgtattttttaaaatgcttgttcaatggtcttgtttttatagtctctgagcacttttgtttcaattcagaatttgagcagtcaagtttcaagattatagatgaactacagaataattaaaactagctgcatttaatttctttcatgggataaaccattggctaccaaaatcttaaaagaaactttctattttattgtcacataaaattaggtagtgattttctgaaagacaaagatctagaacttagcaaattttatttgatgtcatttgcaattcacattttgactggtattttagacatgttctgttttaaaagacagttgctttgacattcagtaatatgcttggttggtcaaaatatgtatagctttcttggtctacatccagaaactgctcaggcattaaatcaatacctgttaccttactaagaa

SEQ ID NO: 21055 - DNA, 1536 bp, Mus musculus
taaactaatttgttcatacgacaaaggaagcagtatctgaaaaccacattatgtcaacgatggaattaaaaattttactcttaagtttctccagacattttttttttctttccattgctaaaaaagcaatcgaagttccccatattccctggccctcagtggtccctgtaatctactgttgttggtgtctggcactgtccaccgtggcctttcttagcatttttacctgctgtaaactgtgtatggcacccctgggtagatgatatttgaccccagatcttcatctcactgtctaattacccagagcactggggctcccacccaagacagttgatgttttatgaatccagaaaggaagagactctgttgtgttcagttcattaggagaaatctatgttcctgatactttttgccttttggaaaagctacattgtagtgaaaagtgttagcacagaagtgataatttagttctagtagtctgtcaggattgcatccctgtgttctagaaatagctgtgtctttaggaaaatgaaatttagtttttgacctttttagtcaagggcaaaggaagataccatttgggaaatgctttggtgtgtaacatcttcagctctcaaaatgggatgaatttgaggaagatagagcatatatctacataatctgatgtaaaaaaaaaaaatacgaagttcaaaacactgtatatgtaaacaacttgccgtcaatacattggcccaggcccatgtaacaaatagatatttggttatctttaaaaagtaactttttttttcaagacagggtttctttgtgtagccttggttgtcctagaactagctctgtggaccaggctggccttgaactcacagggatccgcctgcctctgcctcccaattgctgggattaaaggcacgtgccaccatcgcctgtcaaaaaataactttttaatgacatttcttggtattgtgacagcaagttgtcaaatctaaatatatttgaatgtactacctcccataagttgagagagaaatggtgtttgtggctctgtatattacattaaaaaaataaaagctgaaaaccttcctttgtatatgggtgtttaaatcaaagaaggtactagaaacattgacaaggcaagtaggcatctttccttctgcttttccatagccttttattataccttaagatggtgtttaaccaagccttagaaatacacccccagtaatgatgtcttttggaagttattcccaaatcctttcttttttttttttttttaaagatttattttattattatatgtaactacactgtagctgtcttcagacacaccagaagagggagtcagatcttgttacggatggttgtgagccaccatgtggttgctgggatttgaactctggaccttcggaagaacagtcgggtgctcttacccactgagccatctcaccagcccaaatcctttcttaaattaagaaacaatttgtgtgtgtgtgtgtgtgtgtaagtcagaagacaatttgtaagaattggttctccccacaa

SEQ ID NO: 21056 - DNA, 1285 bp, Mus musculus
ctttgatgacccagctgatcaaaggccatatatactgtttaatgatgtacaaggccttactgcattgttagaaagctggagttcactgggaagcaaaaggtagggagggttttcgatctgttctcatgtgtaactgttttgcctaactaatacatgataaaagtatcccatagcattgggctgttacccataacatatcccatagcattgggctgttacccataacatatcccatagcattgggctgctcattagaagtccacccataatctgacaatgcctcatttgtctttcttttctcttagaatctgaatcagaaggcgaagaaagctaaatgtctccagcacactgcctaaaaaagaaaaaaaaaattaaaacgccacacttttcggttgggaatgctgaagcgtttggggagggaaacttggcttctgtttgcaccaaggaaataaatgataggcgaggcctcccccgctccccggggaaggcatttttttcatttctgttttgtttcaatggagccctgaggcgtcggctactacacttgggactctacctctcactgtacgctaactaaagccattcaacaagggggtcaggtaggaacctgaagctcaaaactcagtacacccctttttttagctgtattttcaggtactgtgtgaacgccccactggtgtctatgttacagggccacttcaatagttgtgtttcttctgctcgtgtatgtgatttgacaaaccagtttttttaaaataaacggctttttaaaaatccttgtgtatatggtcagagcgtgttttatttattagcatagtgtgttgtggggtctgggagaacaggcctgggcatggcggtcagagggttcccattctcttctccagtacttttacctgctaagccatctcatgggcccccagaggttggttggtttgtttaacattacttcttataaaggtgtcatcatttttttccctatccaaacattaaacggttacatttttttggtacaaatttcaaatctgtcccaaaatatactcacattaaataaaatacgcatttcagtaagatctactacagtaagtgactgcattctgggaagtgtcacatttaggttcggtcagcgttcctggaagaagctaagagagtgtgcatcccatcactgtttatagcgggtttcttattgccaatccgccagtcacatggaacaagtcattacatcacctgtgcaggacaccgattgttgggggaaaggaagcaagcgctatctcctcaggggtgagtt

SEQ ID NO: 21057 - DNA, 1180 bp, Mus musculus
tggagaatagatagcaaagtccaccatggctcctttactgtatccttggctgcagcatttacttgtgatgagtggaggtccctggggaggagcggtttggtttttttgtttttgtttttgtttttgtttttttttctagtgtttccaatcatttcagctttacagaaagagccttgttaactcaacgaaggaagcagtgcaaacggtttcagtttccttcctctcactttaaaaacaatttaaatactgttcagagtttttatcatattcatgtggtcaggtgaatttagtcctgtgccattgttgattaaagcaaagaaaaagagatgggtgggtacggtgaacaaagcaagtttgtctatgttgctcaatactttattttaaaagatgctcacctccgtgactgtataggaacacttcagtcctcctcagctgaatgagcgatgtcacaagtggctttagtatgagaatcccatcctaatttgaatagcctgtagcttacaaacctccttttctccttcaggaactcttcccagtgaacagacagagtgtggatcatttcgctaagtacttcactgacgcggggctgaaggagctgtcggactttctccgagtccagcagtcgctgggcaccaggaaagaactgcagaaggagctgcaagagcgactgtctcaggaatgccccatcaaggaggtaggaggccgtagtgaactcctgcacaacacacacagataaagggtaagggtggcgcccctcagcgagctaggagaccagagtgaactccaggacaacatacatggttgatgggtgtgggtgtgtccagtggtagagtgcttgaagaagtatttacgaggtcacggcttacatccccaacactgcagaaagctatgcatgctgaggtgtgtgtgtctgtgtgtgtgtgtgtgtgtgtgtgtgtgtgtgtgtgtgtagaattacacgggtcatataacataagctttccctccctcatatgtgttaccattcactgttcccttactcctagcactgaagttggctcaaggtactcactcaaaatcctattttattatattttgggctattctagaaattgatgttattttggctcacattgcttcctcataaccaggctgctatgattatcacactgttttatcaacatatagacttggctgtctg

SEQ ID NO: 21058 - DNA, 1182 bp, Mus musculus
ctgctctgtgtatgcatcacacatctagtttctcatatgcagggttctttgctcatggtccagggtagtttgtcttatacaagagatatctccatctatctctgtcttgttcgttttcttcttctacagtctggtgattctctgtttcatttctttacctttgacaaagcaataatttaagttttagtcgtcataattttttcccatgattagacttaatagattacaaacattattagcctagcctacaaatgatgacataaatgaataattgttacagttaatatgtgtgagatacttaaaatgctaggtggccttgttgtacagagctattcaatttgtttgaataaatgtgtaaacaagtgttttagatcatagaaatttacatggccagtttctttccagactatatggataaacacatatgctcacgaaatcattttatttattatttcagatgaaaaagagaaattcgaacccacagttttcagggatacacttgtccaggggcttaatgaagctggtgatgaccttgaagctgtagccaaatttttggattctactggctcacgattagattaccgtcgctatgcagacacactctttgatatcctggtggctggcagtatgcttggtaagccatatggtttggcattttcttatagtgtgcatgaatttcaattctattgtcatatttcctcttaagatagaatctttggaagcttatattaattatatttggtaaaaaaaaatctgtaatttttacctagattacaatttagaatggttttaatgtagtataggcttacatttttcataaacctactttaataaggataaaggctttaaccttcccttcaagtccaccactcaccacaggtagtagaaagaaaaggttaatagcacaaaggagcatatggacctgttttttggggggcgattctaatctgtgttgtaggataccagcagtcagttcacatgaatcaacagcagtagctcgatccactcacaaacactactcacgaatcagcaatggctgttggatccagaaactgcaaggctctaccaactggcccaaatccacagaagcagcaaaaagctgcttgtcacaagctggaataccacaagaagttctttggtgtgtttctttctacaaattcacaacatgatcagccaggaagg

SEQ ID NO: 21059 - DNA, 1556 bp, Mus musculus
agaagctgaagagggcatcactcaagaaaattccattcctagcgattctgtggaaggggagaaagaagctgctaatgacactggactggccagtgcacaagacgctcctacagggccacagttgtccgaggaataaaggctgtcgacagtggccggcatgggtggtcttcatcctggccgatagctgcagaactgatgtgaatgtaccttcatttgctctgacactgcatggcacagtggcaggattgcacatccctagagtagaggctttcaagcaaagctgcctcccccgtcttgatttcctgttgatttctattctataattgaacaggcatttctgtggaatttctttcttttctttctttcttttttttttttttcaaaatacacaaaaacaggtccattcctttgctggcttctcagtgattgtacacaaaggagaagaaatcaccttaaagaagaaatctgggtcctagggaacaaagagaagaatagggaagatgtagaaagagaggtgatatttaggaaagaaggaatcgtgggcacagagatgggcattcagagaaacaaaacttacttgtgaatgttgtcctcaagttggacatacaaagccgtaatgaggaacaatctttggtcttaaagctttgccatagttgagcctcctgtggtataaccaggaattgttgagagcactttgaaccctctgttccttgcagcgatacgctacttgatttgaacaatcagaaaggttggatccaaccctggtagtcactgtgtttatttcccgtagaaccacccatgcaccatcctccccacccagaaggccaacacttaccttcccatcagcctttcctgaccctcctcctatccagaaactgtgatttcttgctgtcatttcgagaatgtcccattctgcattttcagtgtcggggcatgtaagcaaagctggagtgtcctgtctcaagaaggtgctgtctttctgttccctctgttggctttaaaataaatctacctacatgcacagttcatcttgtttcataattcgtgttgagaggctaaatatcaaagaagataacatgtaacaaggctgacacacatgggggaatgaagttaagattatataatctgcccagtacctcagattctttcttccatcagtcctggctcattctaatcctctttatggccattttttccccagccccagcacacatatctcctccacatcctagactcgttcagtgatgacctcgtgtgagtacagtgttaaaaagtttatacttgtcagttgtaaaatgtttctcttgaggactcaaggaatccatcgatgtgccacagttatgcagtgataaacacttacttttaggttgtgagtgagcctttcagccccctctgaatgttaccactctcctctctctccgttttaacaatttttaatgtatacttatagcattttccttacccctgtctcactaagctcttgcccacactctgacagcctgcctacaaatcctggagtccacgcactgacatgtggtaagttctctgggcctttt

SEQ ID NO: 21060 - DNA, 1880 bp, Mus musculus
ctaaacaaagaattctcacctgaggaataccgaatagctgagaagcacctgaaaaaatgttcagcatccttaatcatcagggaaatgcaaatcaaaacaaccctgagattccatcttacaccagtcagaatggctaagatcaaaaattcaggtgactgttagttcatagcaaggttgtcttctgaagagttgtgaaagtgtatcatccaagtgacgggtgcctatgtcacgggacacaagatgggctgaaggggaagaaaggtcggagaccagaatgtcctcaccagaagacacttggagatctaactagttacatgtgtgtggtttcagtactactatgtatataggggacaaattcatgtcctcatctgaaacatctagtccttctaggtgtttagaagtgcacaaagtatgttaaaagtagacatagtaaataatacgtgttgtagattctgtttaaactcatggtgaagtgttgtcttttggaactagaaagagaaaccgcttctgagcaatgcagccttgtttgcgcaggtctaggagggaggaagaaagaaaatgaatgaagagcctaatgctgatgcaagtttggtaatacaaggttatccattgttgcttatatctgtgcatcttactttgcaatgtatagaaaacataggtccaaatttgcagcacccagtcttcctagactgtaaaggtgccagtgtgtgacaaagtagaattagtgaaaaaacatatttatagattatgttaaaatttgtagaaaaaaaccttaaaaccacttaggaagtgaaattgttaatattccacaaaaacatgacagatgcatacacatggcccctggggggagagagaactggaagaggggctggaccagaaccttgctgtttagaaggcagtctgaccacagcctttgttaggtgtgcagtgtattcactgtggtgtacacatgctggggaagccaaagtgcttactgggaacatctggtctccagccttttaggtgcatgatagacctgatgtggtaatgcatgcctttaattctaggctgaggcaggtggatctctgttctgggtcaaccagggctatagactttgtctcaaaacagtgagaaagtgtacataacggattggtagggtggctcagcatgtaaaggtgcttgctactaagctggtgatctgagtttgatttccgggatccacttgataaaagcgattcacagcttgtcttttagcctccacacaagtgcagtggcacatgtgcacacatgcatacagtattgcatacatgtaaaaatagagggctgacaccactttgttaaggatgattttgttacaggaatggtcacactgggggaatggaggttaagcttggcctttgagcagatgctgttaccaagtgatggaggtgggctagggcaaagcttagtgctcagaaagaggcactgtagctgttggttggttcgagttgtctagccattggttgggtgtgcatttcacttaatgttgccaggtagtagaggtaagtcccagtgcctaaaggatgttagaagtagcaagagtcactaaaggccaggttcatctttggggagggctgttttcttggtgtggcctttgttaatcctctcactagcatcatctgcacttaggagttgtgcagtgaagaggatggctgagggaaaggctgctagtgcctctgtccaggggacagctctacccaggggtcctatgtgcatcgtggtaaaatcttgtgttcattacgcacagttgtcatctgaatgttacatcctaaaggaaagcacatggttaagagtagagctaatggctatggtggaattgacaaaagggttcctcttgaacatggaactgctaagccatgtct

SEQ ID NO: 21061 - DNA, 1195 bp, Mus musculus
tcagagagattatgagccccatgaagatagatgtcttagtcagggtttctactgctgtgataaaaacaccatggcaaaagaaaaggaaaacaaaacaaacaaacaaaaccaaacaaaaataaaaaactggagcagacaaagtttatttcactttacaggctgtagtgcattatccaggaaagtcaggataggaactcatgtcaggtacctggaggcagaaacagatgtagaagctatggtggagtgttgattactggctggttcagcttgatttattcatccaggaccatccacccaggggtagcactacttcctgtgggatgggcccacctacattgatcatcagtcaagaaaatgtaccacaggtttgtccactggccaatctggtgggacattttctcaactgtggtttcctctgtgaaaatgactatagcctgtgtcaagttgacataaaagtagtcattaaactgatatggtatcttttttattcttagcggcctgtctaatattttatgaatatcacatatatatctgttttaaagaatagctgtgaaagggtgtctgagcatgagaatacaaagtgtatgtatgtgagtgtgtgtgtgtgtgtgtgtgtgtgtgtgtgttctatgcatgctccttagatacttctcactatggtttacgtctttgtgcaaatgtcactccctcctttactccaaatgtggcaatctctgtcatacacctctttgttttctctattagatctcaccttcccctaacatctaccactttgtgatttttttcccttctattatgatagaattttaattccatgagtgtaagaagtttgtcttatccaccttatctctagcatctggaagacttcaaggttcacatttggttcttaataaatattgttgagttgaattttgtatagagatacatgtgtatgtgctaccagtggaaggaattgtgtttattggcaatctctgtctctctgtctctgcctctatctctgtctctgtttatatccttcctatcactctgtctctttctctttctctctgtgtctctctatctaccatttgtctgcatctatctatctatctatctatctatctatctatctatcatctatcatctatctatctctgtgcttggatgtgcatgtataaggggaactggagctatagccccgtggtaggacatgtag

SEQ ID NO: 21062 - DNA, 1195 bp, Mus musculus
tgatttgtactaaataccaacactgataattaaagtacatttggaaacaggagaaagaaaacttggagtgttacttttggacttttgaagttgtgagacacagcagtatgtggtagtatatacctgtaatcccagtactggtgagacagagaggaagatcgatccttaaggctcagtggtccatcagcccaggtgaatcagtgggctcaggttatccaagggaccctatatcaaaatgtcaggtcgaaagcagctggttgtgacacccagtgtctggcttatacatgactgtacatttatatgtcctcttgccacacatatgcacacaagttgttaaatgcaatgcggttagcagaagcctattaaaattatttatttgcaagcttgccttttccaactatataagttagggttatccagggaaagtaatacaatacagagaggtatagatatacctctctatagtgatatagatataagattcgtcttagcaatggtaggaagatgagccagagttcaatgaaagtccctgctgttaccccaagaattcctttccaagtttttcactaaggtgaagttgagattcttgactctgcaaaaaaaaaaaaaaaaaaaaaaattagaatctgtcagtatgaatcacactttgagtttaataagtgttttattcagtaacaggttagaaaaaaattactcagggaaagagtacacagtcactcgtgggtgtgggcttctcatgcatttgatgttaatgggttctgaagttccatcttcccagggttgctatggaatctaaatgagatcactgggtggttcctgagatgtgcagacaaaaggattgaggacaaatttcatttggtaccataaaacccaagatcacaagagctgcatgggaagttaagatgtttcctctgtcaacaaaaagttaatggtcttgcttgtgagattcccagataatatctgggagaggaataaggtaatattcaggggtgtatatatttgtgcctgaagcatgtttcattgctgttttaatattcttaagtatctgtatataaatgaatattatctccacattagcaaccttcacagtacatgtcatttactatgctggaatgcttgagttccgcctgctcgagtcttcatgcagagtcctgagtgagggactcatctcccttttcacgtctttcctgttttt

SEQ ID NO: 21063 - DNA, 1205 bp, Mus musculus
agggctacttttcctgatccttacatgccagtgggcctttaagttccatctttgtgcttccccattatggtgaatctctgcctcttcctcctcttcctcctcctcctccttctcctcccccttccccctcctcctcctcctcctcctcctcctcctcctcctcctcctccttctgtttctcagtcctttgcccactgcaatctaaatgtccctccccatctccttgccaagctattggttgtacagcaattctttatttaccagtcaaagccagctgggtgcagagacgctgaggtctgtaagtgaggctctgggagccaaattgagacaaagcattagaactacttcccaacaacatggctcttaaatctttccacatctctcttccaccatgtttcctgtgccattagatgtggggttgtattgtattgtagctgtactaatttccctgagaacatttaccagttgtggatctctctagtaacccctatctattgtaagaagacattccataacaggatgtggcactttatgtgacttttgaataaatgtttagaattcagttagaaattacattgatttaagaagtggtaatgggcttagatcgatgtggtgctcctgagttctcttcaggccagggcctaagctgcgccaggcgagggacagacattcatggcgaatggaggccgctcttctcgttctgccctcgggcccctcgtctctccaccccatccttataccggtggtgtatggaaggcaggggtgcggctctctggcccaagctcttacccgagcgcgcacttttctcagtggttcgcgtggtccttgtggacgagtcaggcgcctggttgcccttacgtgtttcacttcggtcgtgtctcgcttgaccatgttctccgagccggggaatgtggctggtggtgttgcatattcttcctgtctggtgtgtgtgtgcacgcgctgtttcttgcaatcctcgaggtgctccttgggggtgggggtgggggaaagaagtagtaatggcagcttttcctttagtgtctataattactacaactctagtagatggccagatttaaagtgccaggtatgaatttcctcccattgatcaggtctgaagttcaatcagagaactcttgattacataaaagatgtaagtgtcactgctgctccattgggcacatcttgtcaagctggtccttgtt

SEQ ID NO: 21064 - DNA, 1162 bp, Mus musculus
tgcaggtcaggctagttcgaaattgaagctgttttgagaccttctcttcctgctttgagtgcacatgcagagtgtgtcaagcattaaaggactctctgtctagggaagtcccccttccctttctgcttaaatatgtttatatttctgcactaattaatgcttttactttgcaaccattttaatgtgaaaaccggatgtggtctataaaaccaggcttagtggactcatgattattttgttccatggactgaagcctcattttaggattagaaggggtaccaccgcgcaaatgtcgattttcttctttatttacttaaaataaatcgcaaattccttcaggtaaattcgttcctaaactttgatccgaacgctatgaacctccacagtgatctcttacattcttatggctcaaaatctgaatgataggcaaggaggaaaggccatttatttatttgattactcgtatttattttcctccagggaatcagggcttcccacatgctcatcaagggctctgtactttagtggccctttcttctcccccctttctttcccctcccccctgcttgctcttctttctcccttctttctgttcacctttccttatttttcttgcactttcctaagttttgtacatccatgtttttggaacagggtgcccataaactatgatggatttaatatgtgtgtatccatctctttccttctctccctcccatattcctctctttatgtatacgcgtgtgtcatttatatgaacgtgcttctcagtggatctgtttgagaaagagcagtaaacttggcgtgtttaccctgcaagttcggcctccttgcttcagttctctggaagggtgtgacatgaaaagattgcggttgggccacatggttcatgctggactgtgtttttgtgaatggaggcagaaatccagttctgcctgcttgtcttgaggaaatgctgaggagatcagctgtctcattcacgggcagaaagtatgagtcatacatcttccgccttgtttggctccaggtcattgttacagtggatagaactggttttaattaaatattaacccctttaatacttgacatttgtttcatttgtaattttcccactcctcccccgcttggctttaaaagaaaattcaacagacagctagctagc

SEQ ID NO: 21065 - DNA, 1472 bp, Mus musculus
tcttcatttaagtgttaaagctgggatcacaatgaagcaaaaaatagaaaaagaaaaaaaaattacctgtctcctttcactatcttcagtacataaatacattatttaatcagtaagaattaactgtactaaatcacatatgatgctgttctagttacagcaagcactctttaagaaaaatatccactacactaaataggtactatagtaatttttagacatggtacccattgatatgcatttaaatgtttcactgctgtgttctgttgataacatatataaatattagataatgctaatgcttccgctgctgtcctttctgtaatattctctcatgctgaatttattatgaccatttataagcaatgcagttaactacagatagcatttcaggacaaaatagatgactcaaaccatttatggcttaaaaaaatagcttaccaccttgctatgctataagcagcttctatgcacattgacaaacgaagagtgagcctcagcttgctaaaggaaactggggaaacttttgtaacttttggtgaaatggaacattgtttatgaactgttaaagaatatgaggaagttcctgtgtgacatagtgctggcactgatgttgtccttcatctcctttggacacacctgtaaatgtgatcagattgtacgaaagacgattcaaagatctgaaatctcaaagtttctgccttgttttcattttgtttgctgttcgtttggtttattgtccatccgaaaatgacagcattgagcgtgtgccttgctgtttcattcactctgaaaaccataaggaaatggtgtctaaataccccctgagtagctgcttaccagatccaagcaaagaaaatgaattgtgttcacttcgttactactctggaagaacagcttcataaagagcctataggaaaacactatttcttagaaaaccattaaagaccaaataaacccagggaagcagttcaccagcacaagaaagaacttgtgaagacgagccctcagtatccttcccccaccccccaaccctctgcagatcacagttgtttccgtaacataactgtcccttcacttactctccccatgcacaaatgggcactatccacatcctccagaaatattctgatccctgcagatgtctataaatgattccctcgactgtgctgcatgtgtttcttctggcccttcatgggctgataagtatgccttaaaaatcaggacagccaccatgaccatgtggctttttacagcacttggactttctaagtaaccagcgaagtatttattggatagacacccaagattgagctcttggtaaaatagaaaaattctaagtgtggattgacatgtaaatcatattcaggagccttttctctgtctatagttcttcccctatccttttaatattcttgtcctagtcaatcagagaggaaaatttggactctgacttactctaacggatcaaa

SEQ ID NO: 21066 - DNA, 1158 bp, Mus musculus
attttatgttctgatttcttccttttctttctccttccttccttccttccttccttccttccttccttccttccttccttccttccttccttcctccctccctccctccctccctccctccctccctccctccctccctccctccctccctctctctctctctttctttctttctttctttctttctttctttctttctttctttctttctttttttagattgattaaaaaaatcaagttcctgatgtttgcaagagtcttgcattttgtatttcaacagcattggctacaaagcataggaattagtaaagtagtcatttttttcaacttgataaaagaaatggaaagctacatctactagtgtttgatgtctctagttgaacatctgcatatatccaatcatttctttaaacaaaggatgttaccttccaaatatgtcatgagaaattattttcttaaggggtacttcaaaagcaaaatccacaaaactgagtatgtagtatttcttaaaaccacagaagacttgcttcctgtagatgctataacaaatttctcagacttgagtaacaatacaaatgtcctgtcttacaatcctggaggtcaaaatttcaaagtcagccttagagggctaaaactaagatgctaggaacagcaactcattttgaaggctccagagaagccttgttttttccattttctgaggctatataacaacatttcaattttgcctccctgtttatgcccctttctctgcactcacagatctttctagcttcctgcaagaacacataggatgatatttagggtttacatagaaaacccaggttgatcttccccttctcagcctcctcacttatgctgtttgtaccttttaacagataaacaattcataggttcttgggttataatgtagctatggggaagatctgggaaaggctatttattcagtcttattcagtttcccacatagccaaagaccccagagagcaaaatgctaattgatttattcatggaaaaaagttctaagattagtacatactaagggatattgtcatgtaccattcaaatttccccttactttgcataaatacttttaaaaaagtacctcagtataaaaattctcctattctagtaaaccatctggattatcacatcaaa

SEQ ID NO: 21067 - DNA, 1166 bp, Mus musculus
atcaacccatctcaaaaaaatagtttttaatttcagtatttgctcaaaccttctactgtgcgtgtctttgaaaaatgatctaaatttatctttatgtagaaagatcttttactttaatcatttattttgttaaaatagtcagaagagggactctgcatatgtccttaggtaagtcatgcttagggttactgtagcagccctgttagtgtgagttccttaaggaattagaaggcagagcttgacggggaccacttgcctttgcagtcaataaaataattcctcaagaaggatactacactctgtctacagatgagcaaatctgtttggaacactggagaaattaagctatgtgtgtttatctgtaatttgactgaggtttatctgtttttagcatttgagcatttaaagcctggaatacagtatgggtttcagaaataaagatgcttccttataaactactaccttggaaactcactcacttgatactgaaaataaaatctgccatgcttgcttctctgctgcttttccaggaaagagtgacgagcagcgtgcggctgcagctgtcgcatctgttctttgtattcagctgggccctggatttgagagtgaagagattttaaagactcttggaccaatcctaaaaaaaataatttgtgatggagcagctagtatccaggctaggcagactgtaagtatgagattaaaatttacaggtcggttcagactcaacacccaagctataagtagtaggatcttactagtaccttactctcctgtcttaaaacagtgaacagtttaagacaagttctcttttgtgctccaaagtcttccatttgaatacatcgtttgcttttgggattaaagaccatacacaggtactagataatgggtcgtcaggatagtttgggaatatgtgagattggagcttaaatgacactggtgtttgttgggttaagtcctcatgaaaagctacatatggatacatgtaggacttttgaggtagcctgtgaagtgttgttaatctgtcttaggctttgagcatgctttcagatctctgactgtgtgatacttgagggagtttgagaatcacttgaactttactagatttctgctttgtgcttcatggaagctgatctgtgcaatattccttctagtttcagcaaagg

SEQ ID NO: 21068 - DNA, 1129 bp, Mus musculus
ggcagctaagagtacagcccaatacaaaaaccataaacttccttaaaacgttatgagatttagaatgcagcccaatacaaaatcataacattccttaaaacattatgaggtgtgtgtgtgtgtgtgtgtgtgttgatatttttgttgttgctattgttgtagtttttggtgtatgtatgcacaaacatgcagacacctgaaattaatgttgaacaccctcctccatcactttccactttatttattgaaactgtttctccctgaacccaggattcactaattacagctagtcttgctagccagctggccccaggaaccccctatgtgggcttcccaagtgctgggattacaggtgactcccatgcctcctggcatttatgcaggctctggggattcaaagtctggttttcacacttatgcagcaagtactttatccacggaggcatttcctctgcatcgagtggtggcagccagcggtggcagtggtggcagctgtggtggttgttaatgtttggagggaggggattgtaacttgatttgtgaggatctcaagtgtgaactcagcagatgagagcatcgtggttgtgcctgccgccaggcagtatttcagagtcttttccaggagttcttcttcaaaaggaaaagaaggtgcatatccttaagtaactctaagatatatatatcaagggtcgataaacagtgatttgattttaagaaagtacggtggtgggtgggaagaaaaacatgattaaaaggctactgctgtttctatagaaacaaatatttttactattttaatttttagcattttaggatttattcacctcaatcacagcaataaatttgtaaacatatcttactcgcactgctgcgaagcccgaggggctgggtttgccttggtgggggtggtacttaggtttggtgcctgttttctcactctttgcacctctcctctttactctgtctgaactctgcattctttctacaaaggaactcgggaagtcatgggaagaggtgcagtcagaagacgaccgcgagctgctggaccttcaggaagagtaaggcaccaaccgctctgctgccggttaattagagtgtcggacggacggagagcaggcagatgagtctt

SEQ ID NO: 21069 - DNA, 1147 bp, Mus musculus
gtgtaactggctgagcccagttagtgttgcttttacttgtgtaaccccttaggattggggtttcatcactaaaacaaacaaacaaacaaaaacaaacaaacaattttacaacaactggttcttattctctcagtaggcattgactgccgtagctctccatctacggctgtgatcttgtgaaatttcccccctacactggcatgtagactggtaaggtgtgtagatcttgtgcaagcagccatattgttaagagctcacggagtatctcatgagagtccagaagacattgtcatatggcactttcccaatcctctggctcctccaagccttttgattctttcccttgatagtcattaagctttaggtataggggttgtgttatagatatttcacttgagactgaagagcccacagcctctctctgtatttggaccagtcctaaatctctggcgggaggtgagagcgtgcttatccttggatataaggatgcatgtttataatgcaggtgggaactctattgctttagtaatatggtggtgctagatttttcctatacggcctatgatctctttagccacaggtttatagtaatcagactgagttccttccacttgaccagcattaggtccaattagataactcctggttgctgcggagatacagatgccgccatggcaccactgaggatgtctttccagtactgtcctgtggttcccaggcttaacagctttctttgcagctcgcctagcaccttcgaacaccatgagaactggctttcagggagaggcttctaggtcagactaccttgatttcccgcccctacaccccccagccctgtgaataaagtatgtggtgtctttagcaataggctcttgctttcacgcagtggtaggcagccaaggtccacgacgatagcctgttttatgttgagggtcctttgtgtgcctttctgcaggctatctcaatgagatcactgtgggactcttcacatcattcctttgcctttgttctccactccctgcatagagacactactaaggtagactgcaggtgagaggtgtgctgtccagttggtcaagttgacacaaactagagtcacctgggaatagggaacctcagttaagcaaatgcctctttctattccatg

SEQ ID NO: 21070 - DNA, 1113 bp, Mus musculus
ggataacaatgtctcacatatcactgaagcaaaatagcagacgttgtacctcacacataagacaggaaagaactttatggcttcttgaaagtattagaataaaaaaaagtctttcaaacagattttgattatattagaaataggcttccaagtaaaagagagaggccctcagtgcaggccgagttgttccgaaggattttacagaacaagtcaaaatgtgacgactttcaagatgtgaaccttggagcatcaaaatgtcaggatgcagggcatgcgaaccttggagcatcaagaggtaagaaaccctgtctcgagaaaaccaaaaaccacacatcaaaacccaaaccaagaaaaaaaaaaaaaaggaatgcaggggatgcaaacctcagagcactaagaggatgcaggggaaggaagagttacctgttgtgctgcgtgtacactcgtgcatatggggcaatctatgagtgtgtggttggactctcaggggccataccatcagaaggtttacagtttttttttttttctgtcttgtagttactactatttttctggtcaccttgagatgcatttcccaccagcaaacatactgtccacttgttcttacaagagtggcgccccagtacgtactctgtttcatagtttacaccttgcaaatgcagaggaaatcttgacgctaaccttatacatagatttatgtgatgcaaggccaggaggtaccctcccatttcttttagtaaaaggcactgtatgtttgccgagtgcaagtgatgattgctagaaaatgtgcctgtggctgataagaaagagagagagttcagagcaagagacaccaaagtttattggagctttggagctcaggagaaaatatctctttccaaaagggaaggaatatacctttaagaaatgtttatttccattaatgagaagcttcagtgacccgtattatggactgttctctttcgcataatgtagtgacagatttactcacatttagaggttgcattaatatttacggaaggcacagctgtaggtttcactttattaaaacacatatggatgttaaaattgctgatggagttgctggctcagtttgctttggctatggatgtg

SEQ ID NO: 21071 - DNA, 1121 bp, Mus musculus
catccagaacagataatagggacagaaagtagggaagaagctgtcagggggtttcagatgcgtggaagtggaacatggtcaggtggctcctagttccttgctgggtatagaatacttacaagcattgattctgatgcttccgtgataagcagttcagagcccattaccttcagggcacccagatttcatacactgttaccacccttagtttctagtattcctgagctttcttccgagatggtactgggctcttcctctgagctgtcagatgtgggtatgcacatgtcgagatctgataacccttgtgaaggagagagagagagaggggaggggggagagggggaggggggagagggaggaggggagaggggaggaggggagaggggagaaaacccaaaatcactcagagttgtgagctgcaatagaaagagacagggaaagcagaagggaggggattagtggcccagtgtaggtaagggttagggcaaggtgttaggatcctgctttggggacacattgccagctgaggtgggcatattgagatatggtatgggaattttgtggtttgaattagtcagcgcctggtctaggaccatgagggtcattccaccatctgctgccagtttgattggatgttgtatctgttctcttcctttgccaagtgatacactcctaagtctggagttcctctaggagcagggagtacttctgactggggtttgttgtcttagtgtctggcacctagtagagaaattagtgttcattgaattcagtatgcatctctgaaggctggtatatttacatttcagatgactaggaagatggggcagggagctgtcctttctattttaggggtgtcggggcaggaggggaaggggggctgtcattcaacagccaacagctttattgaccagagtttcctggaaggagaatgacttctctgaagttccttgctttgacctcagtgttcctgcttggcttccagctttattaagtgaagagagactttgccttccattagcatgtcttgtaacagcagacaagctctgtgtgactaaaacagtcatatgcaaaggagactgtttaccttaaattagattcccaagggaacacttgtagct

SEQ ID NO: 21072 - DNA, 1176 bp, Mus musculus
ttcagctaataaacagattgcattctactgtctcattagcctttcagtaaatggatttcaaaatagtctcattaactttctgataaatatcattttaattaaatatccataagtctggaaagatctattgtaacaatgattaggatataatttatattattgtggaattatatacctatttctcatgcaaaataactacaaatgagagtgttcactgacttgtatttgtagagatcagagtctctcagttgttgccttgaatacatttgcattaacttttaccatagttcagaaagagttgatattatactgtctcatgtggcaaaaactaataagcacaggcttcatagtttttgtgctaatgaacaaaaccactgatttgttgcttacagaatttttgtaaatatcaatttgttaatatgattgaatattacttagtttaattcttcagtaaatcatgaaaatagttatgaaatatagaaacattatttagtagagatgacgtgaaacagggaggcctgacttatgagctccgatttgttgattacaactaccacagtgccttagacgaccatgagagaaatacctcacagaatagctctgaaagtaagtgtaataattaagactaaacattaagtattatcctcgctacaaatgactccctgtctcaaagcattgctgttgctatttctgggtgtatctttaaaaaataggttcatcatgtcaatggaaaaactacagctgtcatcctaaagggaatgagtgataatttattctggaaccatatggaatgaccatggcttaggacacagatttaggtgaccccaagttccatattccaacatgggagcagttttagaaaattctaattattttacaaaacaaagaaagccataaatcaaggacagtttaaaatactttggttggccaccagccttttggttcttagcttttggattggtgaaaactagtagtctgctaagtaatagtttccaaagattttaatgtgtcactcaccagaggttgcttctggcatgttttcagccctcattggtggcatgaacagaggagagcagggaataaaagtgaggcaggctgaagtcccacacaatagcaactttattcagagcatggtgcaatttacactctgagggttaagaagcgtcacctgagtca

SEQ ID NO: 21073 - DNA, 1196 bp, Mus musculus
gaagatataacttcccttaaacaagatactccatagcagtcacacggggcctgccctgtgtatgtaggtatgaaaagggcatattggattcaaaattttgaaaatgcttttgaaattgaattgctcttgtagataagataaactacagaagattcattgtaagaaagaatatttcaattgaaatgtagtactgagaagtccttaatatcaagggcatttcaaaactaagaaatacagctcagcctgaaaaatggatcatatgttattctaaaaccgtctaaagcatttcaaaacatgccattttcttactttagaaataagacgaaattatacaattatatatgattccatttatgacgttaaaattctaacaagaattgtacatttatttaaaaagtacaatggttttggtttccttgaaagcaatgacaaatcttactttataatcatttggtgtatgtcattttagatgctaactttctatgtctctatccagtatctgtcatctgtgtactacctacagtcatcatctattatcaattttcgacctatgtatatatgtatgtatctatttctaacctctgcctctaaatagaaatatataatttctgatattttggagggatcaaattgttcttacttttatgtatgcctttaaataatgaacaagaaaggtcaccaatcccaggatatatttaaagactcttcttgctgtttatatagctctccattcttttaattcttatctaatctcttaaagcattttcttggtgagggaaatttaacttctttccactattactgacataaacagcatttcagtaaacattcttgaaggttttcttcatactcatgtatgagtaagctctagatatagaagtgcaactagaattgtatggaaattttaataggtattaggagagttgctttttgataaattattcttttatgttctgaccaatgttagatgagaatagcactgggtatcaggaagctatttaaatgttgtgggctggggatatatagctcagtagtagagcttttgcctagcatgtgagtaataggttttgtcatcagttaacacacaaacacacacacacacacacacacacacacacacacacacacatacagagagcgggggagagaaagaaagaataaatgaatagattttgtaaattcatttataaaatata

SEQ ID NO: 21074 - DNA, 1182 bp, Mus musculus
agttcctggggaccgccgggttttacagactctggattcccggatttgccacactggcagctcccttgtatccactaaccaaagagaaaggggaattcacctggaccagagaacatcagctagcctttgaaactctcaaaaaggcactgctgcaggctccggcattggccctgccagatttaaacaaacctttcaccctatacattgatgaaagaaatggagtggcaaggggagtccttacccaggttttgggaccatggaagcgcccggtagcctacttatcaaagaaactggacgctgtggccagtggatggccctcctgcctgcgagcgatagcagccacggctgtgctagtaaaagatgctgacaaactgactatgggccagaatgttactatagtggccccacactctcttgagagcatcatcaggcaaccaccggaccgctggatgaccaacgcccgaatgacgcactaccagagcctattgctgacagagcgagtaagttttgcacccccagccattctcaaccccgcctccttactacctgaggctgacgaggcccctgcacataagtgtgaaaaaatactggcagaagagactggaatccggccagacctcacagaccaaccttggccaggggcgatgacttggttcacggacggaagcagctttgtggtagaaggtaagcggaaggctggggtggcagtagtggatggaaaggctgtcatatgggccagcagtctgccggagggtacatcagctcaaaaagcggaactaatcgcattaattcaagccttaaggctggcagaaggaagggctcttaatgtctataccgacagccggtatgcttttgccacggctcatgttcacagagcaatataccgacaccgtggactgctgacgtctgccggcaaagatatcaaaaataaagaagaaattctcagcttattagaagctgttcatttgccccgtagggtggcaattatccattgcccaggacaccagaagggaactgggcccattgaaaagggaaatcaaatggcagaccaagaagctaaaaaagcagcccaagggccaatgactctggtggtgagaacccaacagcccgctgctgaggaaataaataaaagaaccctcacagaagaagaggggcgagattacttagctaacatacaccatc

SEQ ID NO: 21075 - DNA, 1141 bp, Mus musculus
gtactgggtttatgtagcccagagaagtgaagtctgaatagggacttaattacagttttcaaaatcactgaactcagagagacagaggctatgtgtagtgcccaagaggacatcttttgacagcattgagaatgtggctggtttccttttttttttttcaatgttatgagtgatgatgggcaactgttctttcttcatggcatgggagtagcaagcaagggcttgcacggccacaggagagtttttcaaataacattagaagctggtagctcagtagagcttatgcctttatcgattttttacttttcgttgacagtcatagccctgttatttgtgggattcaatctgatgatttgatatatatctgcagggtaactaacaaatccattacacttgcatacatttgtggggtgtgtgtgtggtatttaaaattcagtcttttagttgttttgccatacatggtatatctttattatgttagccattgcaaacaatagtttgttccggcttcttcctcccatctctgtgtttttaccctttgcttagttcctcttttccctgaccttccctgcctatcttctagcctctgatacctattttgtttgatatagggacttgcaaggttcagactacatgctgaatagactttagactgaatacaaggcaagcaatttttagaacacttttctgattaaaagtaaatgctttctagatacctccattctaagctgttaaaggtagggctagattgtaaaagacaaaggatctgggagtttcctgtgaagctgtgtctctactggcgtcaaaagctacatttataagtctcaccaaccaccttagcataaactgaatatggaaaaccaccaaataaacatgccaaagtagatgggggagaccatgggacctcaacgctatacaaagagctacaggcaatgaagaaatactgagagtgagagaaataatctcccccagtatgagcacagcaattagttgtccaaaaccaaatgattagccctgaaaatatacatacaaataacttacgtcaattgggtagtccatattcaggaatgcatgtgtgggtgtgtgtgtatacatgcaataacaattgataaaaggaggccatgaatttgaaaaaaagcaa

SEQ ID NO: 21076 - DNA, 1126 bp, Mus musculus
agtggatactccttctttaaagtgacactggcattcttttgtcaaaaaaaggaagacgttcaaaagcacattccagtttgtttaacaggatgcagtgctggtaggtctatgcttcatccaggcagattgctggtgagctgactcccatctcttcacatggtttagagagtcaggtgtggtaagactcttcattttgggcttgctgcctctcagcatttatggttacaatggcacaattggatgaagatatggtcgacatttcagcaatacacataaatattcatacacataaacataaatgccatgtgttctcatagagaggtatgagtgttactgttttaaaataaagatttatttctaagaattatgaatcacagtttacatttacagctatcttgtcttttccctttaacactcagaaatgtgattttatctgatattgagttgtgatttttttttttttttagttaactattaacttgccttgagtcaaagatatctgatttttttttcatccttcaagcctgcatcctctgggaagcctgcctttcatataacttctccctcttgcttctcagcattttgtgcttccagtcacactccttgggaacatgagatttacttgtcttttgatctgcagttcccgaccttggtaactggaatgtagcacagactcaagaagtgttgagagtataccagcgaatgaatgtgaggaaatggacatttccataatttcacatgcaataaaagcaatccaatttgttcatttttaaagcatcaataaatttaactgctcatattcatatttatcttactacttacacaaactctatagtgactatatttttacataagattgaaatattatttctgaggataaaacaaaggattgttagattctaaaagtcaatctcctgccatccctaatgtcctgacccttcaatacagttcctcatgttacagtgactcataaccataaaattattttgttgccccctcatgaatgtaatttttctacggttacagttaatagcataaatatgcgatatgcaggttctctgatatgcaaaggtgtcaggacccacacgttgagaacctttgatttactgtatttgtggttcattcg

SEQ ID NO: 21077 - DNA, 1099 bp, Mus musculus
ggaagtagatatgatcaaaatacattgtactcatgtatgaatttttaaagaatacatttaaaatatattttttttaaaaattaaaatggaaaataaattggagaatgtttgaaggtgatgcccagtgttgctctctgcccccccccccatgtttgcatacacacacacacacacacacacacacacacacacacacacgggatagggatgggaatggagtgtctaaagaagcagtccagggttatcaaatatgtactatttgaatgtttattatattccccattcctaaaaaagtaaactgttgaagaacaatgaccttacttcaggcattctattggaatttcatagatattagaatttgtgatcttgttccctccagcttccaccatccctacccatatgggatagagtaatcagtcgtcctcacattagtacaaggagagggaatttacttggaaatcattttcagttcacctcacttctatatatttataaatacaaaccgtttgcccactgtgctcgagcaagcatgttgtttcagacccatccttccttatgggagaggcacttccgtcagtacagtctctctaagggtctaactttccagctctgcttcagtccctttatgttctcagattatgctctgaattacaggagtgcttcttgatgacttccacataagtcctacaaaagcagtctaacctgtagctttttcctttctttttaaaattttatttatttgtttgtttgttttttattttagaagttcttgacgaatggtttgttgttgttcacagacttggggtgtaagtgtcacttttatttcctcggatgaagtgatggcatgcgagccatacctaagctgtgcacatactgagcttgggctgaacccagagcatttccttctttgtttccactccccctaggccttgggctggaagcttctagcctctgtgtaatctaattaatctttctagtttactgattcaatctcgcttctctgggcttctgactgaattgctctgcctggcctcatgttctttagcaatatgttctaatctggctccttattctctagctctttctaccttcacctgtg

SEQ ID NO: 21078 - DNA, 1192 bp, Mus musculus
atgacttatttaaagactttaatttttttggtcagaaccaaaacactcggtctaagaagcattttgaaaaccacttccacacacgccaggatggttctagtagacaaaggcatcacttccaggagttttcttttggaggcggattgtttgatgatatgtttgaagacatggagaaaatgttttcttttagtggctttgataccaccaatcgacacacagtacagactgaaaatagatttcatggatctagcaagcactgcaggactgtcactcaacgaagaggaaatatggttactacatacactgattgttcaggacaatagttgaatcttttcctgtttccactaagcccacctagtttattcttccttactatgtctgatgaaaaaagttttctgtgaactattttggtaaatgcatgatttcacttatgttaagctgtttgttataggtattccatatattgaactttttgttttttaaaacaaattaaaatacattcagctagtagacaactgtaattttcctgattaggagaagttcttttgaaagatcatttgcaagatttttttacgttacctgtcctttggctcattttcacaccccccccacccccccggccatattcccaaacaaaactcagcccgacacatacttaacaattaagttttaaaagttaccatagatttacattgtgtgaacttgaataataattgcagtgaaacctctgcaaattcaaaactgcacgccctgtggccctgacttgggttactaaatgtctgaagctgtaattttgagtcatttagtgaagaagaccattgcttttggctgtttgcccctgaaagctttagaaagtgaaggtttgattatcacacaaagatgccttttctaccgtagaattggtgtaatggggaagattgtattgcacgtcattaagctgaaaagtttaaaacttatgacatattgccaagaaattgtgttttagtactgggtgaatgattttgtttgatcaaaatcatagctttgtaaacatctttggaatatttttctatttgttgactttctaggtcttcgtatgaatttatttttggtgtgtgtttgtgtgtagtcactcttttgcacttatctttatctagagattgactaatacctcattctttttgtaaaagcagccagtaatttctgtgtaacc

SEQ ID NO: 21079 - DNA, 1200 bp, Mus musculus
caaaagtgagcattcatatgtcccgtattaaaagtactttgaattcagtttcaaaggctatttttggcagtcaaaatgaaatggttacacggttagctcaatttaagccaagttctcgaatattaagaaaagtatcagataagggatggttaaaacaaaaaaatgttaagcaagccgtcgagtctctgaaaaactatagtgataaatcagcaggaaagaattctttagcagaacagaaaagttactttgcagataaagaagaagattcaggtaaacacagccttttccattacacatacggtataaccaccagatttggagagtcattctccgttttagcaaatcatattaattcctatttcaaaagcaagggaaaaatgtctcaaacaaaggaagataaacagcttcaggacaagccagaccttgaagaaaggaaatccagttctccaggccctgacaccgtggcagacaggccagactcggaatctcccctagaagttaaagacaaactttccagcccgacccagatgcctgaggctcacccagtgtctgcaaaacaaagtattgctaacttcctttctcgtcccactgaaggcgtacaagccttagtcggtggttacattggtggacttgtacccaaattaaagtctgatcccaagagtccgcccgaagaacaggaagtgtctgctaaaacagagcaggctgttaacaaagacaagaaggcagaggagaaaaagcgtgtgctacttcagcaagaaaaggcaagttgtctttcagtgtgggcttaagaaatgttaaccatttgtagagtaactccatcttctaatcatgtttcatatccccttacagattattgcaagagtgagtattgataacagaactcgagccttagttcaggccttaagaagaacagccgacccaaagctctgtattactagggttgaagaactgacttttcatcttctagaatttcctgaaggaaaaggagtggctatcaaggtaatttctaacttatttaatatttgtcttgaaaaaaaatttaaataagcctattaaagtggggaatgcaaagccttttttatttaaaattttttgttcttttaaatcatacaatatatattcaggaattgtcttattttatcatacacattaggctaatgagttccttttgtgctgtgacataaattctgctatgagcat

SEQ ID NO: 21080 - DNA, 1193 bp, Mus musculus
atgattggataaaattaaaaagtgacatgtatgaaggccttccatttttttcaaaattgtgagtagggtacacatgtgttctcataaatgaaggccatcaaaagatccaccagtttagagaggaacggtgtgattcaacatgacacttagtgagttatcctgaatcagataatgctttgaacagctccatcctcatggaagatatgattggtaacacaagttatgtgggaattaggtattaagatgttcataacctttaggcattttattactgtgctagtggttttagtatctattgatcttaagttgtttactgtttgaatgttttaatatatgtgccaaacaagaaatgggggatgttacacttcagcctttgcttttactcgtttcaatcatgtggaatttgtgtgacttgattttctttcatgtctttccatttacactacttagcatttcactaggtgcgcccacaatccatgtgttacttttcactgtaataatcactgaaagagatataggaaatgggattttctttattaaagtacatttatgtttgaaatatgaaaaaactggacagttttctattcaaaaagattgaagaatttccagtgaactaactttttcttgaaatttcaagataatgttcacttttgtagatcaaatgctcttatcatttcctgttacagaattgattattcaattttactgagaaaatattcttatcattaacaaaaataaattattgaagtgaccaattgttcaaggctaatgccattttaacgtttgtattttaattgctcataatggttgcctggtttcttgtagcatttatgaagaaatattagtctagttagatttacaaaagttgaacatggtgccataagtattcactgtattgttcactgtattatttctcttgtaaatctttatattgaattgaaaatttttatgaaaagttaatcaaggtgtatatcctttgcttactacacataactaacagtgctgcttccgttgtcattgtgcttgtgagagctgggagtggttgagaatgtgggaggtagtcggctgaatagtcagcccctgtgcatgaccttgaagacagtggacagcttgtaagattcagctctgattcataaaaggaggaaagctagttgtcaaatttcatttcttctcctttattttttaagaactag

SEQ ID NO: 21081 - DNA, 1159 bp, Mus musculus
gtctgttagaagtcacactgattgctttgttcactataactttcattcaactgatatgaagagtttcagattcatcacaccccacaaatatgcatgaatagtttggttaattggtttgttaaaaatatattattggaccaatgcgatggctcagtgataggcacctgccattaagcctaataatctaatgaattctaaaaccccacaaagaagagaactagctcctacaaattgaccacactggatgcatgcacatgcatacaaatgtgttcatgcatgcacacacagtttaaataataaaccaggtgtgatggtgcagacctgtattcacaacaattagaagcagaggcaggataatcattacctctcaaggctagtctgggctacatagtgagtttaaagccaatctgaactattcgaggctctacctcaggaaaaaaaaagtaaagcaactattgactgtaatgttgatttttcttcattataaaaagctgtacttttacctcattctttacttttagacagtacatactatggtatatgacagttaatattgtcaatagagtctatagttacctaggaggtaattctgtgagcatgcctgtgacggatcatctagattaggttatttgagaaaaagtccatgactgtggtagcaccattctacgacctggtatcctggactcaagtacagaagctgatccctagcagtcacaatcactctgcttcctagcagcagattcactgtgactagctgcttcatgcatctctcttagtgccatcctgtaccatgataaaaatgcattcaaattatgagctaaaataaactcttctttaagttgcctttttctgatagtttgttgcagcaggcaagtcagtaatatagatacattctagagattacaatctgattcaatatgaacaggttaggtggtcaaaaatggttgatagtctaataactgacatttaaaacagtctttacaagaaccttccaaagtttaagtatcaccactatgcttgatctgtggagtatcactgagatgaaaggaatacaaagtagtttttgactgttttctcaatgccattgagaagttaaaaaccctagtatgaatgtatctgtagtagtctttcaaaaattcaatactggccaagcagtggt

SEQ ID NO: 21082 - DNA, 1197 bp, Mus musculus
agggctaaaaaagtagatatttctatattaataaagattggtttttattttgatagacaggcttagtcccttagctgacctctggcttttcacccttgctgttactgcaaggtgtccttaggctgtggaaaaaacagggatgaggagaaacgacttccagctcctattttagccacaaatcgtggtgttactaacgacataattcttgcttaggctttgctaattctgatattgataattctcctttaggagctgcacagcactcagaactgtacatactggtttgtgattgtacaaattcagtatgggcatcgcttggtgcagaggtactgcaagggaaggtccagcttgaccatttctaagtttcctgtgagataaacccggtttgaaagaggttggtaccaaattttggctaaaaatgaaaaatatttttcggctctgccttgcctccccaaaaggtaccgagagccacatgtgtgggttttatcaatacccacgggaggaatcgggtccatgtccacccaagccagggttaaaagcccactcatctacggatgagaaaatcatttgatcacctcagttaagcgttgccttatttaacttaatcaataggggggagagagattggagacgtactattgaaaggacaagcccttcactgcctcccacccaaataaaaaagccaattggccttgtactacaagagccggtcgaactccttctccctgtttcccacctatcatccaaaaaagcggagaaatatcaacttagtgttattatagtgtatttcacatttgttcagtcaaacttagccagagttccaacgccctacttaaaattcaactagaaagttacctaccaagtactaattagcattataaagtcagagcctacagctccaggcttttcagttagttgttcactaagataagaaaggacagtcttagccttatacagtttaccataagaaaagttaaggaatccgatgaaagcaagttttttctttagccctagattccaggcagaactattgagcatagataatttttcccccctcaggccagctttttctttttttaaattttgttaataaaagggaggagatgtagtctcccctcccctagcctgaaacctgcttgctcaggggtggagcttcctgctcattcgttctgccacgcccactgctggaacctgcgg

SEQ ID NO: 21083 - DNA, 1183 bp, Mus musculus
agtcaatgccatatctctgagctcacaattgcttaaattgttcatccctcagatactattaattctcaaatttacaattgcttatgcatatttctagttaataaataaattatgctcatgtaactcttaataactttacaagccttctagttacaactgctccttaagaaaattgattaaaagtgcaattagtcactgcccctttacagccatgtatttaaaatattttgtcaactagttattaattcaaaagtttaggtattgtaaaattttaaaactttaacttcttaaaagacaaaaaagagagaaattgtatccccgtgcatactatttagtgcattcccatgcacactattaaagtcttacctttattttcaaaatctaatattttaatgtcaaagagtttaataaatgctttatagtatcttaaagggatctacttattggcttatagattaatcctaaaacaactaccttattagaaaagggaaaaacaggttttctccacagaacgctgcagaagcatattagtaaattcgtgtgacgagctggtaggtaagttgactcatgtcctgattgaatcgactaaaaaactaaattaaattcatgttttagatccatccttacttgtcatttttccagtttagactagcttctagccttttaactttatggcaatagtacatcagagactgtatattcagacttagtaaaattagtcatttaatagagtcataatgatttttctcctttcttcagtgtgaccagccattctaactcaatcttagactggtcctaatattcagtccaatgttagagattcctatattctaaattacctagcaagttaattcagagcacatcccccacttcccctagatccctaacctcagaaagattgctggccttacagctagtagaaaaagctattaaagagcaattggtcacttaatacattggtaaaatagaaggaccccctgactaacaaatggaagggtccagatccagttctaatttggggtagggactcagtttgtgttttttcacgggatgaagatagagcgcagtggctgccagataaattaatttgttagataaacacagattctaaatcttctaaagtatcaccttgaggactaaaattcctcttttgcttaaaagtcggcttgaggactcaggctcc

SEQ ID NO: 21084 - DNA, 1219 bp, Mus musculus
tggtggtggtggtgtgtgtgtgtgtgtgtgtgtgtgtgtgtgtgtgtgtgtttagctaaaatgtattaactacaaaaagcgggtatagaattctgcttctttcttggtgtgggaaatgtcacatttaggactgtttgctgctgatcgtgttgttaaggaatgttgtcaaggccagtatgtctaaaattagagcatagagccaggaggtcagagagggacagacaatgcaactttcactcataatcaaagaactcggctccctgtggatttccccagccaggttcccaattgagaagggagatctttgtaatgttttcagtgtttattctcaaggcctgttgacctttgaatgatctgagattttttttttccttgtgtattctgttttaatggtttgtattttgtttggttttaagcatgtttaacttttaaaaaagaagaactactatatacgtgttgagaatttttaagtatataaaagaataaatatcaggagataaacataggaaggcaatggagtcatcatgcacataggtgctgatgctcacacttctccgtccctcagggcatttgtaaaaggtgcatttccagtgtgctgacttcacaggactatgttcttgataaaaaaaaaaaaatccaccattttaagaaacgtttgtatcctttaacttctcaaccacaccacaacacacactttgatgcccattttgccaggaacgttctgacttcagcaatgcgggatacttgactagaatgtgaaaacatgaaaaagatttttttggttgtcaagccgagagagaacattagggtttgttgttgttgttgtttttgtcttggtttggtttggttttcgtgctgatttctatttctatccattcgcaattctacagggcatttcaaacacactgtctagacatgactcggtatggaagacatgtagacaagtccaaaggaaagactgttctttgttctgtcctattagaaccgagctgtgtcccagacctcctagactcagagcggggttatgtccactgtacacttactgtgttttgagacatgatacactgtagttaaatgatattaagagcccagatttcacatgtagctatgcttatattactaaatgtaaacaaagaaaaccagataccactagctttccttgtcagtttgtttatttgttttatcgcttgttgttgttgttgttgttgttgttgtttcc

SEQ ID NO: 21085 - DNA, 1134 bp, Mus musculus
tcatctgttacagaatctttctgagttgtggtttgggaataaaactttaattttaaaacctgtttttagcttttcaacaaaattaaggattagtcagaattaatttcaagctatcagtgacttcatcggagagatttgaatttacaggactctcataggttggaatgaaatgagagcatagtacttcggtaggtgtgccttagtaatagttagaagtgaactttatatgccccagtacaggggaacgccagggccaaaaagggggagtgggtaggtaggggagtggggggggtgggtataggggacttttgggatagcattggaaatgtaaatgaggaaaatacctaataaaaaattgaaaaaaaaaaaagaagtgaacttttattagagggtgagggagtcaacctggaaaactattctttgcttcctaaatatggattaggttgaccaattttgggtatgcttagaagacgcttgtgtctctttagctaagcactgaccaaagaagaactaaatcaaaaaccagtgactacatttctctctctctctctctctctctctctctctctctttctccttctctctctctctctctttctctcgatacttgctctttttattttatgtttgtgggagttttcctacatgtatgtctatatgacatgtatgtgtaatggtggtgctgaggagggtgaagcagacctgttggaacttgtgttattgacatctctgagccaccaagtgtgtactggaggcgaatacaggccttgtaaaagaatagacagcgcccttaatcacagacccaagttcttcagctcaaagaagcctttctcggtactagcccaggattttgttgataaaatccatgtcttaattttcatgttttaaaatttggaccccagatgtttttgttttgttttgttgccaacaatgtacaaagtatgtgccaataatcttgttttgtgttttcctgagcacaggcatatgatatgctaatcttttttaaagcttgattcacttcactgctctgagatttcctacagaaacataactgaatgaaaagtgtgtggttcagaaagcagttgaattttgcctggtctctacctgtaagcgaaggacaacaatttttttttg

SEQ ID NO: 21086 - DNA, 1856 bp, Mus musculus
gagaagtaggaaacaatattttgaaaaataagttttcaatttaaaatgatcaaaaagcaatatagttgcataaaagcactgtaaaatatttaaaaggttaaaactgtggaaaattacattggtaagtttacagatcaataaaagcacctgttctccatctgaactagacaatggaaataatgctgcatgctggccagggcccattcttcatcatttgtaagttcaacaaaagttctcacatggagtcccacctcttccgaggtttgtacatttgtttttaagcactgaattcactactgatcccatcgcctggccagtagaacagtcattactccatgaacatcctcactgtttagacacataactgtggtacagtgtattggaaattttataaacaaaagtgaaagtgccaacacattattgatagctgataatgtttcattatctgcaactgctggataagtatgttgcattttaagagcttataattgtgtataatttgttaacactagcaacctattagtattgtgaatgtagagtttactgtgaagctatctgtgacttagctgtctgctccatgacggagttcttgcagcatggcgctagcagccagtgcagtttctaatactcggtaatttgcatgttttgtggagcatttttatgtcaccaaccagacagtatttcctgcatgcttatttagaagaggcagtttatcttgagaggtagtgtgatctacctttgtcaggctttttgacaggtcatttcagagtaagcctttgttcccaagacccaacaactgtcaccctcttctgtacctctcctgagtgccaactgtccaggccatttgacacaccatctgttaacctctgagtttgcccactcaaggccactcataggggcatccatccccagcacctcctcatgctgtgcatgcagtcttaaattcaatggacaaaactaaaatgctggctacctctggatcatctggctgagcaactgaattacaaaagagaattacttccatctcaacttcagcccattggttacgtccatcctagcaagctaaatggcatcccagctgctcctttctgtgcaaccaattaaagaacaatgagtgtgatgctccatgtctgaatttcgtccagcctctctctgaactgtgatctttgtcctcatgaactttcccttttgttcattgaactatatggactcttcatttcatattgatttactgtgcaatttacttttggacattgagaacttgaaattatttcctgatcccttccccttccactattaataattcatttctgtcaaactgtaagagtaggactcatttttttttttttttagtttttaacattggactgttatttcatttagagttctctatctctaaatatttatttagagaatgattttcaaagggaatgatatgcttgtttaaatgaaagagaaaagctgtagtaaactgtgttaattggtaatgactatttatcgtcgatactctgtagctgtgtaagttttgacaaatagtgtatctcgtggaatcagtggttagcattgccgctattatatttactcattttatcattataaatgtgcttagttcatcatgtagcatcacttgtctcccgtctcattttttccttgcatgtcacaagtctcagatcatttataatacattaacagtaaataatatctatgtaaatttctttcaccatgctgtctcagagtcagcagtgaagaaaggcaaagattggggccccactcattggaagaagggaaaggaagcgaactaggatgtgtcttagaagcatttcaaatgtcgggtcttgaaaatgttttgttcagta

SEQ ID NO: 21087 - DNA, 1149 bp, Mus musculus
agtggaaagagaggcccattggtcgtgcaaactttatatgcctcagtatagggggaacaccagggccaagaagtgggagtgcggggggggggggggctgtgggggacttttgggatagcattggaaatgtaaatcaaataaatactttaaaaaaaaaaagaatatgcatgtctccatcatgaagatctggggtttacacatgatactcccttacattcatggtcttttctagttttgctatgattagtatgcgccagtaataccaaagaagttcaatgccatgggacagtgaatactgccacattattacagtgttgccaggatttgcagtggatctagaggtaatgtatagggatgattgcagcacatgtaatttatgctgcaactgtacagctgtaggtttggggcaacatcagctgacagtgcagcatttgtgcctctactaattatttttttcttggtattaaaactgaatttcaaaccaatctttatattacttgtggtattttcttacttttaacatgcaacattgacatagacttttttaaattaaaatttatttgtgtgtatttgtgtgtatttgtgtgtgtgtgtgtgtgtgtgtgtgtgtgtgtgtgtgtgtgtatttactcactgggtaatctctaatatttgcttactctaaatctttccttagagaagtcattgcatcctttttagaagctttttttggccctttgcctctaaattgcctctaacatagattctctaatattttccttctgtactgtttaaccaaggaaaaaaattaatgtacttacaaaaattttgttctagttgtcttcaggggcaaagggttctgcttcaaattgttattgaatggctgtacaatgtttgtacatccatttgtacaaacattgaatggatgattgtacaaagtactttatttgagattctaaaattgaaaatattaaaaagctttcaattttaagatgaaattacttccatttggtagttttcatttatattgcattatatacttgaaatattatataattaaatctttggttttagagcacaaactcagttttacaaactgctttttgtcggtacagagctttgtgcctgtgtgtgattccagttccagaggatcaaggcagcaggctcaga

SEQ ID NO: 21088 - DNA, 1199 bp, Mus musculus
accagcactctcccagcagtatttgggtattgagcactgtcagggtattttcttcattatcaatatagaaaaaactttcctgtaaatatttaagaaagggcaatctttaaattaagaagaaatataattttatctctataccataacattcacctattatgggttaatacctcatccatctaaggagaaataatcataaacagggtcattttctccattagataacttcttatttatattaaaccaaaagataaacacataaagcatttggagatggcaggactgttgcattttcctataataaaagcctaatatgattttcttaccgttagaatataaattagaacagtagatttaagaaaatcttaaaatactttgcaaattgtttcaaataagttgtatgctgaaagaggatactatatctttcgagtcttggctccaagatgaccaaaaatagaagaaacaacggtcgtgccaaaaagggccgcggccatgtgcagcccattcgctgcacgaactgcgcccggtgcgtgcccaaggataaggccatcaagaagtttgtcattcggaacattgtagaagccgctgctgtcagggacatatctgaagcaagcgtcttcgacgcctacgtgcttcccaagctctatgtcaagctgcattattatgtgagctgtgccatccatagcaaggtcgttaggaatcgatcctgagaggcccgtaaggaccgaacacccccaccatgattcagacctgctggcgctgcacctcgacctccaccaaagcccatgtaaagaggccgttttgtaaggacagaaggaaaactaccctggaaaaataaaatggaagttgtactttaaaaaaaaaaaaaaaaaaaaaaaaaacagaaaatgtggtacatctacacaatggagtactactcagctattaaaaagaatgaatttatgaggatactatatcaatgagcaaatagtgaagtaaagttgagcaaagttttaaatattccttacaatagtaaagtgtctttttaacagtaagtttttctagggtatattaagcagattcacacttgaacatcgcttggaattctcctgtcttagtgtgctaagactgatgtgataaaataacatgacaacagaataggataagataggtagttcataattgaaggtatagtccattgtattgggtaattcatgtta

SEQ ID NO: 21089 - DNA, 1121 bp, Mus musculus
ggaaatgtcgctggcgaattctatcagtcagagcagaattaacaatgtgtttttacagaggcttacaaggaacacaagaagaaggaatgtttttattattcattatcttattgtactcttgttatgctgatcaaaatccaggcaaagttatcaagaggaaaaagctttgtaaatattacaagaaaacattctttgtaaatattagaatatgtgcaaatactcttcaaatacaagtgaactaaatctcaccaagtataaagagttatgtatcacagccatgttgaacttatttcagcaatgcaaggttttgttggatctgaaataacatagttaatgcatcatagtaaaatttaaaaacatatttataacaatttcaaaatattcatagaagactgtaatatccagcattattgtaagcttcttgcaccacatgagtagtgaggcctctctctggaggacagccaactgctagtttccacccacaaaatattttaactgccctaactgcctgtcccagcccctgccctatagagtaaaaaacccaaactcaggacttgaaatctcaccaaccttcatactagaaatccccaccctggaaatctccactctggaaagcctccccaccccaaggtaccatatacagatctgtcttcgaataagttctttgctgtttctcatctgagtagaggtagcaccctcctgggttgtttcttcctaataaagctctttattgtgtgaggtttgttacatggtgtgactttgtggtattccttggttcccaactgccggcattcatttcccttcagagttgtaacacttacaattataccatgttgttaaaaataatcaagtttattaactagaaatgtaagatattctcctccacgtagtagaagccagcagtataaaatctacagttaatatcaagcataattgcagaaagctaaactttttacttctgtaccagcatatgctaaagaaatctgctgttctcacttctttttaattttgtacagaaaataatgggtaaggaaattagagaagagaacaaaaggcatctggattttgaataacaataagtgacctttatttgcataggtcttaccttgtatggtgaatct

SEQ ID NO: 21090 - DNA, 1148 bp, Mus musculus
ggcatgcgccaccatgcccggccctctttatttcttccttgaccaagttatcattgactggagcattgttcagtttccatgtgtgctttctgtttttgttgctatttaagaccaacccccaggttctcttacatcgaccgcctaagagtcgcgctgtaagaagcaacagttcttccttgcctctgccatccgcccagcagcagcgaagcagcaaccatgcgtgagtgcatctccatccacgttggccagactggtgtccagatcagcaatgcctgctgggagctctactgcctggaacatggcatccagcctgatggccagatgagaagtgacaagaccattgggggaggagatgactccttcaacaccttcttcaatgagacaggagctggcaagcatgtgccctggtgttcgtagacctggaatccacagtcatcgatgaagttcgcacctaccgccagctcttccaccctgagcagctcatcacaggcaaggaggatgctgccaataactatgtccgtggccactacaccactggcaaggagatcattgatcttgtcctggacaggattcacaagctggctgaccagtgcatgggtctccagggctttttggttttccacagctttggtgggggaactggctctggcttcacctccctgctgatggagcagctctctgtggattacggaaagaagtccaagctagaattctctattgacccagccccccaggtgtccactgctgtggttgagccctacaattccatcctcatcacccacaccaccctggagcactctgattgtgccttcatggtagacaatgaggccatttatgatatctgtcgtagaaacctagacagtgagcgcctaacctacactaacctaaacaggttaataggtcaaattgtgtcttccatcacttcttccctcagatttgatggggccctgaatgttgatctgacagaattccagaccaacctggtaccctaccctcgtatcaacttccctctggccagttatgcccctgtcatctctgctgagaaagcctaccatgagcagctttctgtagcagagatcaccaatgtctgctttgagccagccaaccagatggtgaaatgtgacccctgccatggtaaatacatgtct

SEQ ID NO: 21091 - DNA, 1289 bp, Mus musculus
aacttttgatttatatttctgtgaaacattttatcactcagttcagaaattaaattgccttataaactttgttgagttaaaaaaaaaaatcaaacttactatggcgtaccccctgagtacagcttcaaacaagaagattttgtgaattttggcatttggtaccctgagtatttcttgagttttttgtatttctatttatataatggttaagcaaaatgggatataaaggagccttagagaatacaaaggaaagaagaagattaggaacagtttgtcacttgcatgtgacgtgtcacatgatagatgttaagttcttttaagttaggtgatactgaatacagtagtgtgtgctccctgggtacgagggtaaatagactattagtaattagtccagtagtgtgtgctctgctggagtacaagggtaaaggtcctctgttactaacaaaatactgatactagtcttgagggagtcttacctcccagagtttgtttcaaagcatttggctttccttgagtacaggatgctagactatagggcccacatatgtgaaacagaagagattataaactgagttgtgtttttctcttccttatatattctttacaaatttctacttttaggtcattttgctggaaacatcgacccgttcaagcaattacatctaataaatatagtagttctttaccatgtactatctgtttggaatttgtcgagcctattcctacttataacatactacaaagtccctgttgtaagaatgcttggtttcatagagactgtttacaggtaagatagctttttaatctttgactccataatataaaatctattgcttatcaatttgaattttaatctggtgtcatgaaatatatcataaaataccagtattcctctcttggagcctattacactcttgggagctctcgtctcacttcttaatctgtgtttactctgctcaaacgaagaaacagtatcctaaaaatcagaggtcggctcctcatcgagtgtgtgtgagtccccttggattaatactcactgaaaacagtccggtggactgcattctcaacttgattgaatggctttatttagaacattcttatggtatagaaagtgttgttagtcaaaaccaggccaaataaagatttacttaactttttaacttgctttgtaaagcttagatcttggtttgcttagtaaaataaaatggtttgttattaactgttcagagttatcagatattaagttgccttctatttcaaaaaagactcaatggagcttatctgatttc

SEQ ID NO: 21092 - DNA, 2128 bp, Mus musculus
tttaagatggaaacatttttcctattcaaaggaaactaaaactttaaatatgggtggtcataatagcatagagcagtcctaaagctaatctctgttccatctagttcagcttaaagccaccgaattagtctatatcaactctactcatgataacaagagtatttgttaataaacattacctatattcattttataaaagaaagtttttactttcaagttttcctataaatttttggtttttatcatttagatttttctgcatttattaagctatcatattagtgactacataaaagaagttaacaataaatgggtagaccttgatttttcttttgaatcctacattgatttgcatattggatgtactctttagcacactctgtgtcttagtttgtcctagacgaatgtcagaatctgttacttcagaattctcagtctagttagaaatagtctttgctgatactgtatgtttcatggatttaattatctttcctgtttaattgctaacttttcagatggtaaatctgcaacaacgatggaagatattcttatttttgcaactggctgtagttctgtcccaccaactggatttaaaccctctctgtcagttgaatgtctacatgtggattttcctgttgcagacaaatatagaaaccatttagttctaccagccaccaacacgtatgaagagttccaagaaaatatggatttcaccataagagacactctaagattagaaaaggaagaaaggtctcacatactacctcggacattaaatgtttcttctaatgaagaaatgcttatttaaaggctgctattgatacctatttttattaatcatcacttttgaacattctggccagcttcttggcacaacaaaatttataactttctcataaagggatggtttggcttccgaaccactgaaggtttggttaaggccttctagtcatgtttggtgatagctttctattactgtgttgccttcgtaacaccaatatgaatattttctattactgtgctttcttgataacttcatatatttttagaatggttgtacaaaccgttcaactgtacaggtgctcggctatattagcatgacctatgaaaaactgttttctcgattttttttttttaaattagaaatatttttttaggatgacactctctagttttgtgcagctatcagatttgttttgttttgtttgttctcctttactgtttgtggttttttttgtttgtttgttttttgtttttttgtttgtttttctctacatagtcctgattgtcttggaacctgtctatgtagaacaagctgtcaaattaaagcaataaatagaaaagttggctaagtcatctcataaatcagagatattttttaatgttttgcaattaagtgaccaatatatcaattaaatgactgattgtaaatagtctattaaaagcaaggctttacaaatatctctagaacctatgtgtcctccttaagcttaaaatcatggctgtggggttttcaggtgtgcttgaaaatcccttagaaagcacagactatttatgttctttagtagtcagaatgtctcatgcttgaaaccatctaggtgtctgaagagtctctggaccatcatggtttcgcgccataactgctatttattattactaagattgttgtatgattggtaagatctcaccatagcattctatagttaccttcttttgctttcaaaagatatacattgtataatcaatgaatgaattataatttaaaactacaagttaaaagaaatactctaattttgccacatagagataaataatgtattttgtatattctttataaactatttatttttcaatttttattgtgttatgacagggtctttctatagagctcaactgttctaaatttgcaatcttcctgccttatagtcatttaggtgctgggattatgacgtatatcaatgtgcctagcaatgtttattttttgatatgaatgctgtaaaagagtaacaagaaaccacgtaataaaatcaagatatgtacagtctcatctcaaggcacgacatcactctcttgtaatccgtgccccgagagactaaggcaagaggatcaggagtgataacgcaagttt

SEQ ID NO: 21093 - DNA, 2604 bp, Mus musculus
taaaagggacttagatcccttaaacaacaggattgacttggtattgacaatgcccttcttaatgccaaaggaaaactcagttgtcatcatagtgccattttcttggttgcatcagaaccttccaagttgtacttaagaaaactaatagtttctctttatcttgagcatttctttatcttgtgttacattttgctggatgtttcgaaagtaatgaagtgggccatcataatttaaatcttaaactcaatagacaccttttatttcaagtgtgttgataagttggatctttatgttttaacctgtttaattccagctggggagatggctcagtggttaacagcactgtctgcccttctaaaggtcaggagttcagtcctgagctatgtgcaaaatgtttaattcctacagagttttaaaggctgttaaatccatacaactcctaaatgctattttttcagcttttagtttgaggggtttttgtttgtttgttttttgttttcccctaagataaagcgaacacagccttcataaaacatagggtgggattatggagcctgggactggctggctacaagtgattttattccacttactctaggtaagacaatggccttgttggtgagatggtctaaatattaacaggatacttacttcaagtgaaacatcagatttcaagatgtcttctggttcaaacctgttttgcatggtttctagatcagtctctatacacttgaggcttatcagagaaactgcagtgttactgcgtcatgcttgtaatgttcccattctgttttatagtatagttctcacattaacatacttagcttcaaaattatgaaggaacagttttatgtttggttaagtaaaaacccagaactagcgtggtctctgttgtctgcatttatgcttccccctaattatattggaagcttttggaacttgcacattcagtgtttataaaggggtgtataatgagtttttcctatgactttgctttagtgtttagtcataagaaagtggtaagaactagactctgttgataaaacatggttactattgcatatttgttatgcttcaggtaatgcagtgtaaatcattaaacacatttaatgatgaattatttgaatttatattatctgtaacttgggaaattttgtagtccttaaaagagacccagttttcaagttctatttttgaccaccttcaaatatactccactacccactgtatattagaatctgtgtagaagtagtttataagtcggcctgtttaaaatatatcaaaacaaatactgctggggatttggcctggtagtagaatggtttgcctagctagtatgtggaaggccttgggtttaattttaaagtatgaccaaaacattaaaaaaaaaaaaaagcatgaacatttaacaataacatttctaagtaaatgtttttatgccactaaaatgtgaagttgtgaagtgttcatataaactaaataaatgtgttgggaatcttgagacagaaaggcagaatagcactgttcctcaaggagggaagtcaaggcaggagtctgctggtgggggttgatacaaagtgattgctgcctactgccttgctttccatggcttgctcatttgctttcttacagaagccaaggccactagtccagggtggcactgcacacgggctgggcccttcccattcgccactaattaagaaaatgcctttcagggttgcttacttcctggtttcatggagccattttctcagttgaagtgttctctgcttgcatgtctctagctgtgtcaggcatctaataaggatggggtggtcttttagtgcagatgtgtttcttttcctttttattagtatgtaattgtttaaaacaggctgtcacgacacatgcatacatgtgtgtaatgagctttggtcatactccccttcttgcctcatactgaaccccttccctatttccaggattgtcttaaacaagtagtccatttacgaggctgatgttattaaagtgggtaagatccaaaatctttactcttcttgtctgagagctccttgaactcaagaaacaaactgtttttagcaaattttctaagataaaactatcccttgatgttcaattatttaaaccaaaaaatctggagttaaacagctacaataaatctaactctgaagtcatgatttttattcttataatcaacattaatatcattcttggtcgtagctttgcaggactgttctatatagttactcttctaatgaatatatatatctttatgtttactccccacattacaccattggacagaaacatgcacactgtataaatgtcttagtattttatgataatgtgccttatagtcttggaaggagttagtatggaacttaaatggtcaaatgacaaatttgtacttaaaagtggggattctcaggtgagtaagattaaactcactggaaggtgggaaagccattctgctcaagagtccatggacaccagaattgagatacttcccctagggcacaaactggtagttatagataacctgttgtaactttataaaaataggtatctacatctgtcaaatgtgtttttattgtaaaaaaaatg

SEQ ID NO: 21094 - DNA, 2171 bp, Mus musculus
cattaatcttctgctatgttttataggtaaaatgatccattctatggtagctcatttggatgctgttacaagtttagcagtagatcccaatggaatctatttgatgtctggaagtaagtttgaacttcagtacaccctacaaactttataaaagaattgctccttagtaacaagcttccccccccccccttcttttacaggccatgactgttccattagactatggaatttggacagtaagacatgtgtacaagaaataacagctcataggaagaaattggatgagtcaatttatgatgttgctttccatccatcaaaggcatatatcgccagtgcaggagctgatgctcttgccaaagtatttgtgtgaaccaacatagactcgcatcttagaaaaaaaagatttacttggtcagaaagggggtctgcatcactgccatcatgaaggttcctgacatgacactacatgtgatctgcctggtgattggggcaggcagaaattgggaatcacatcctaatgtcaggtttattagtttaagtgtaattaactgtattttgtgggacagaaagaaaaaggactccagtatctgtgccctatactggatatgaactgagcggtttttgtttttgttttttaaggtgtttaagccaatgtggagtctgctcttagggggaaggactttttgttggactctgtgtgctgccttagggttaggaatgtggtgctctggtggggaagcaagctccaagagtagctttgttcatctcttagtgatcttatgttcatcagtgaatgccacagattcccttttaaagttattttgctttaaaaaaaaaaaaagaaaaaagaaaaaagaaagaaaagaaaatttaacttaaaatattttagcattagttgcacaaaatgtttggataaaattctagtttttataagtctttttatatatttagcctgtcacaacagtgctcaagatcatattgatgttttttctgcattatacaaccctaaaacacagagatctcactaacctgccacctataaccactttctttcctccttttacctaatacagctcagctaagtccttcataaagatgataaaccaatcacctttgtctacatgtcttcatgaaccaaggactattaagtgtattaaaacaaagctgtggagtttagtactccaaaggaactctttaaaaactaatcttgacatcctatcactatgtgatattttgtacatcttactgtatttacaagtttatttatcaaggattatccatcttgctaatagcctattatttattttactttttgttggtctttatatccttttattaatgtgctaaaggaacctgtatatctattttggaactctttgaaaagtctaaaatagactaaaaatggaatattttatagttaagttacaaaccaagatgtttctccccaagattcttgatttaccatgattccaaaacaaatgaactagttagaaaattggagaatattttattaccattacaaataagatattaaaaaaaagttgaatcaggacacagaagtctgctggatttggactcacagtctccctgttttactttttagatgtgcttacttttatggtgtaactgaagattttctttgtgtaatgcatgattaagacaataaagtattttttctagtcttccaaaagccttttctgatcagtttgcgagttttgatgagttttgtaaggtttttgttttacagactatgaatcagcagatttttaagattgtaccccagagcaaacatagagctgttgaaaaataatgtatataaaatacatataataaatattaaattgtgtacctgtatgttgctcttggccacattatttcgtgttgaataataaagtgcaatactctccacaattaaactaggaaatgaaggtgctttcttagtggagtccttcatttttatgctattctttttggtttttcaagacagggtttctctgtatagccctggctgtcctggaactcactctgtagaccaggctagccttgaactcggaaatccgcctgcctctgcctcccaagtgctgggtatgctattcttttcatacgttgttgtacttaatgagattctagtaaggttacagcagaaacactattaagaatacttttcagag

SEQ ID NO: 21095 - DNA, 1209 bp, Mus musculus
tttttactgtttcaaaagtcccttaactttctgccttgaaattttttatgtgctggccaattttgtaaatggaaactattgtgtttactgtacccttgcatatttggtaattttgatattcctattatgctttcttataaattattatggcagtggcaattttctgttctcacgtaacatttgataggagctttggatttagcttgctaattagaagaaaacattaaggaacttttcagttgatctaggtatttgaaagtttaacaaaattacttttctgaattcttacataaagaaatagacttgctctgaagtttttaaggtacatttaaaagcccctggatattttagtgaaacagttctaaatatgtgtttttaaacacacaaaaagaaaacagaaaaagtccacatgcctttgagcttattacttttacctggaaatagtgcaatttttcgttttagttgcctgccaataaagatgcctttcgaaagacttggaaccccaaatacacactacgtagtcattttgatggtgtgagagcattagcttttcatcctgtagagcctgtgctcgttactgcctctgaggaccacaccctgaaactttggaacctgcaaaagacagttcctgccaaaaagcaagtattttcatactaactttttttcttgtacttttgaacactcttttttactatggtttatctttagtacatctgtaatagcaactagtgatttatggtgatttaatatgttcttttttccccattccttttctctcttaggagtgcctctttagatgtagaacctatctacacatttagggcccacatgtaagttttcttgaattagtatttactgagcaacagttgttgtttatagttagcagttttcaaacctaattttcttaacatttgatgttagagaagatacgttagttgaataatgcctcattcgattaattatatttgagtataatctaatagtacttttcagttgtacatttttacctaaaattgcttttagatttacattagtgaatggattgagggggaagggggctttgagtttcttcttagaatttataactaattatcctctttttctgtaatagtggccctgtcctgtcattagctattagttctaatggagaacagtgttttagtggtggcattgatgcaaccattcagtggtggaatatgcctagtccta

SEQ ID NO: 21096 - DNA, 1184 bp, Mus musculus
atgtaatactattttcctaaaactctgaaatacttttgtatataagctttttgtattttatgtgttttaacaaaatataaattttgttattgtttgcatttctgtctctctgtctatctagacatgaagttgggattttacaaaaggtattttaaccataggtttaatttaagcatgaggattaagagaaagggaggtacttagaagtacattaggacatacccaagagtatgtgttgtaggcatctcttaagagagtctatttgtttgaaggcaggacctcaatctagcctaagctaccattgaacttgtattccttgtctctctttctcaatctagtgctaagataatagatgcgttcttctgcatccatccagagtaaaccctctggcttctgaccatgttgagtaggagccttaagttctacacacgcagatgattttctcctggcttacatccttagccttaaccttaggttctcaaatctaaacttccgtgctcttagaatacttctgtgcatttaacttggtctttgttaaactttaaaattgtttctgatttttaaatatttatgcagatatcagctatgtgtatctgtgtaggggaggacttaagaattagttctcgggctggtgagatggctcagtgggtaagagcacctgactgctcttccgaaggtccagagttcaaatcccagcaaccacgtggtggctcacaaccatccgtaatgagatctgacacatctggagtgtctgaagacagctacaatgtacttccatataataaataaataaatcttaaaaaaaaaaaaaaaaagaattaggtctctagctgggcggtggtggcgcacgcctttaatcccagcactcgggtggcagaggcaggcagatttctgagtttgaggccagcctagtccacagagtgagttccaggacagccagggctacacagaataaccctgtctcgaaaaaccaaaaacaaaccaaaacaaaacaaaaaagaattaggtttctaaagaaatgattagaaattatttactttccacatttccttcatgaaattatttataaattaaaaattggtgaattcagagttcagtatgaaaattttaactaaattgttgtgtagatttaatttagggaaaaatggtagtatcctagctaaataaaggatgcttcaagacca

SEQ ID NO: 21097 - DNA, 1176 bp, Mus musculus
cttcccctcctccctcttcctttctcttctcttctcttctctcccctccccttcccctcctccctcttcccttctcttctcttctcttctcttctcttctcttctcttctcttctcttctcttctcttctcttctctcccctccccttcccctccccctccccctccccctccctctcctctcttcaagacaggattctctggctatcctggaacgcctatagattaggctgcctctgcatcctgagtactgggatcaaaggtgtgcaccaccacacctgccttaattcattttttaaaaaagattgttttatgtatatgagttttgtctggatgtatacatgtgcaccacatatatgctgattgcctacataagtcagaggggagggtataggatgtcctggaacttaaagttgacatcattctcttagacctggaattaggctataacgaagctattgagacaaagaaaaagttaatttgtgtgattgtggctttttttctttaatttttaatatgatttgaaggtggcagatgttaacaatatgttgaattttagcatttaattttctcttgataggtatcttcaggaagtaggatacacagatacaatattagatgtacgatctcaacgggtaaggtcattacttggactgtctaattcagagccaaatggatctgtagaagcaaagaatttagaacagatcttgaatggtggtgaatctcctaagcaaaaaggacaagaaatcaaaaggtatgatttgtatttgttgattaacatcatttaacttatggaagtcaaaatcagtgatacaacagtggcttttcattggtagtctcattttctttccttttttttttttttaagatgagccaggtttttttttttttttttaagatttatttatttatttattatatgtaagtacattgtagccgtcctcagacactccagaagagagggtcagatcttgttacggatggttgtgagccaccatgtggttgctgggacttgaactctggaccttcggaagagcagtcgggtgctctaacccactgagccatctcaccagccctatattttctatagttgcatttattgttagatattaaatgaatctatcaaagccacttttttatatatagtagtaaaatagattattgttattagctgtta

SEQ ID NO: 21098 - DNA, 1221 bp, Mus musculus
tcttgagttcctgccctgacttctctgaatgagtgactgtaagctgtaaactgaaataaacctttttctcccaagttgcttttggtcatggtgctttgtcatagcaacagaaatgtaactgagatactgagtaaaacctgtgtttgagccttcttggagaacaaggaacatgcacttattttgctttcttccctatgttttatgatatttaatttgtgttacatcttttgttgcatacttagtaattttatgattcatttgtattgctggagactgaactcagggctttatgcacgatcttcaagcactatatatgcttagttctacatttttttgattcaattaaaataatattttaataacagcaactctgaaagtcagattcacctcctttcttgattgttttctacattttgtatttttgttgtgtgtgtgtggtcactggcttctttgtacagtgcagggaaagtggtaaaaggatagagaaactgagttagtaaaagtttcaaatcttgcatgcctggaatatgtgttctttaccaattcttttttcaaattaattaatcaactaattaattaataattaatgtatgtacattgtgtgtggaggtagagggggagcagagacggacagacaaaagacaatctgtgggagttggttctctcctattgtcatataggttccagggaccaaacttaggtagcaggcttggagctactccctaggccatctttctagccctatagttagtagtatatcctaaaaagatatccaattcagccttcacattcaagaattgaagaagctaagaacaaggctactgggcatttataaagctagttagagggattcaaatatatatctgtttagatgcccaggctagtctagtgtgcttggatcaatatcttatttcttcacctgattttctataatttctaagaaaagattattggagttctaaaactaagtaggtcttttttttttttttttaaatggtgtttggaatcatcttgttcctaggagcaatgttgaacagtatgcagatatttagtaacaagtggtttctggagtgatagcatttggacagatggatctgatgtatttttaactttccaggaagatgatttcacagttaactttggaaacgtctcctaatgactgtgagttaccaggtaatggaaactcttcatttgttggcagaatcagtataaatgagaagt

SEQ ID NO: 21099 - DNA, 1099 bp, Mus musculus
caccagaagagggtgtcagatcccattacagatggttgtgagccaccatgtgtttgctgggagttaaactcaggacctttggaagagcagtcagtgctcttagccatctctccagcccacaactacttctgtttttatatgtagttctgaatgttctacgtttatcaacactttttaaaaaaagatttatttattattatatgtaaatacactgtaccctgtcttcagacccaccagaagagggcgtcacatctcattacagatggttgtcagccaccatatggttgctgggatttgaactcagcacctttggaagagcagtcagtgctctgacacactgagccatctctgcaacccaacacttttttttttttttttgagactatactaggctagaccttaactcctgggtataagtgattctctgcctcagcctcctaggtagcagggactaagatgcaaacacacactttttggctgtgttggaaagtgaactctgagcttatgcatgctatttagtgtctgtggtttgtgatctcccacagcacacagatggaggtcagaagacaacttgtgggagtcagttttcacttttcactatcagagccctgaggatcctactcaggttggcaagcttctttacccctcaaccatttcactatctttacaaaaaattttttttaattctttaattctttcttccctgctatcctcagtttgagtcttgtcccttatgaacattgcataacacaattcccacccttcccccatcatgattgaccttcaaatttccacatcctgtagctttatacactgtattgggtttaaactacattttctgttgtcaactatttcttcccccaaatcttttcctaaagatttagggcttcgatcctagaagtgggaaggcaaaaagcaggtggacttctcttgagttccaggctaactagaggtatatagtgagactgtctcaagcaatggactctttatttggcttccattctattcattccttctttcattttctctgtttcatctccttttgttttttgagacaaggtcttaactatgtattcctggttggtgtggtgctcaactg

SEQ ID NO: 21100 - DNA, 1179 bp, Mus musculus
tttttgattggctttaattttgtatgtctccaaaaggtcttgtctcgcagctagtgtttatagatattatttgtttattgaatcctttgtcagtttcttagagatttggacattctagctttgttttcaatggtgtatatgtgatggaacagttctgggcacacaatatatgctcagcaggtatctggagataaaataaatgacttcaaattgtacttcttgtaatactcagagaatgcaggtgggattgttttgttttgttttaaatatcatcttcatggttgccctttcatagattttgttgactgaaacatactttgagatcatccattttcttctgccatggttgttgttgttacgtgtgttgttagggtaaagaggtggcattattaactgtcacttatgcgggagccttttgaatttacctatggtttgtataaccccagatgcaaagatgaccttgctgtgccgtttgctaattgtattcacaatgcggttgttggctttgttcgtcctagatttcctcgacagctgccgtgccagtactctcttagctgaactagatgatgacgaggatttgcctgagcctgacgaggaagacgatgagaatgaagatgacaatcaggaggaccaagaatacgaggaggttatggtagagagactcttccattcccttcactaatgtagggtagtaaaagccaggcatggtggtatctctggtgatcccagcaattgggaagtagagacagggagattaaaaattcaaggccatcctcagtgcctggggagtctgggctgcataaaacggcgtcttaaataaaatagagccagccaggcgtggtggcgcgcacctgtaatcccagtccttgggtggcagaggcaggcagatttctgagttcaaggccagcctggtctacagagtgagtcccaggacagccatggctacacagagaaaccctgtctcaacaaaacaaaacaaaacaaaacaaaagccaaaagattttagttagtgaaatgaagagctttaaaaaacgctttgtagtatgtatcatttaatggtgtacgcctggggcccataagagtgatgggtgggtaaaaacaattgccactatgcctgctgacttgagttcaataataactgggactcgcatagtgaaaagagagactggatcgatgcag

SEQ ID NO: 21101 - DNA, 1190 bp, Mus musculus
cagtgctcttaactgctgagccatctctccagccccctctttatttatttttattctttggggggtggagtagggtctcagtatggctgtcgtggaacctagtgtgcaggtgtgcttatgcctcccaaccgctaggattaaaggagtgtcccaccactcctggctcatctgagaaagtactttgtaattttacttaaagcatgtatatttaaagtttgaaaattctaacaagttaacttgtttccttataattgatgtctgtcattgaacttttttacaagccacgtagaaacatgtattgttttaattccttatctttgaggccaggttttgcaggtcacccaggctgccctcaaacttgtggcaattctcctgcctcattctcccaactgttgatattgcagatatgccaccacattggttttatcctggtttattgtggctatacattataacaaatctcaattgtttgtgtttatgtttgtgagtaatttttacaatgctaacaaaacaaggtcttctctgaagaatgttgatggtttttgtgtagatacttacaagaagattacgctttcggttggaacgtgcacctggtgaaacttcattaatagaccggacaggcaggatgctgaagatggagcccttagctacagttgaatctctggaacagtatctgctgaaaatggtgagctccgtgtggcagggctttgtgagatacaccttctccattactttgaccctttgtaggaaagtcacataaatgtgtatccagagttatggtaatgctacttttagaaatctgttttagaaaacatgtggtggcacatgcctttaatcccagcacttgggaggcagaggcaggtagatttctgagttcgaggccagcctggtctacagagtgagttccaggacagccagggctacacagaaaaactctgtctcggaaaaaaaaaaaaaaaaaaaaaaaaaaacccaaaaaacaaaacaaaagaaaaaagaaaaaaaaaaaaaaagagaacttgccttaacagcaccctcaacataaagatttttattaatgtcatttaatattgaaatagtagacaaaaatcttagtaccattcaataaaggtatcgctacttacaggtgtaggcaatctttttcaatcaagaaaatattaacattacattgtttggagaccgtgtgttat

SEQ ID NO: 21102 - DNA, 1235 bp, Mus musculus
aaataataagctagatcttaccaaagtaaaataacctagtatttatataacattatttgtaagcttttgtgaattaccatgttagaaaataaaactagaattttcatgcctcttttagtgtagatctacctcacctcacattcatagatgatattggcaagttgcacataatagttactctttccgcgtttctactgctcacgtcctttacatgtcctgcctctcagcagacacagtgattcataggtagcatttccaaactgtttaataaatgagcctttgacaggaagcaaccctctcagattatggagttagcagtgtatggtgctgacattcaagccccatggggcacgttctttatcactttgctctggctgcctttcattggtgtgtgcattgagatgacttgatgctaatcttgggagggaagttttatttacattgttgtacaccgttaggtttccgatggagctctgcggtgttttgcatcactagctgaccggtttactcgtcgtggggtagacccagctccattggccaagcatggattaactgaggagctgttgtctcgaatggcagcggctggtggtactgtatcaggaccatcttcagcatgcaaaccaggtcgcagtaccacaggagccccctctgctgctgcagattccaaattgagtaaccaggtgtcgacaattgtaagtctcctctcaacgctttgcagaggctctccactagtaacacacgtaaggatgcttcttggatcttttgggttttgaccttttggaagaagtgtttttgtatagtggcaaatatattaggtgttttctcccattctctttctaggatcttctgaggtcagagcttccagattcaatcgaaagtgcattacagggtgatgaaagatgtgtgcttgataccatgcgtctggttgacctcctcttggtgctgttatttgaaggacgaaaggctttgcctaagtctagtgctggatctacaggcagaatcccaggactgcggagattggatagttctggggagcgctcccatcggcagcttatagactgtattcgaagtaaagatactgatgctctcatagatgcgattgacacaggaggtcagaactttttctgttaaatataacattcatagccaggttgtacacaccttttgtcccagaggcaggcagatctctgtgagttcaagggcagtctgctctacagaccaagttctaggacagc

SEQ ID NO: 21103 - DNA, 1193 bp, Mus musculus
ttttttgtgactgataggtactctttgacttaagatggggttgtagctcagtaaatctcttcttagttgaaaataacatcagatataaatacatttaacacatctaaacttactggaaataatagttcagcaaagagattgttgggaatgtgaattttttgatgttgaacaaataaacaggtgaacagattgaaagtcactcagcaaggcaatctatttgcaaaaagggtatgctaaacccataccagctagcaagtatgtgtggccaaaaagtttttattcctaacttaggtgacaattgtctcattctattggtggcagcttactttgcattatgatgtaattggtaaattgtcccaaaagcagatcccaggttgggctaactacctttgctagaaaggatcccctgtatggtgtgggttgtttactctcatgatcttgtggctgcctgggagctaatgtggcaggctgcctctgcagatcatgagaggatatttgtagcccaggaaaaggtcagcattcaaacttgcattaggctttcttctgaatatgtattgctttcataccattgtggtcacagtgttttgtttcttgagacagtacagtgtgggccaagattgtctcaaactctgattcttctgcctctacttcctgagtgctgggattacaggtgtgtgtctccattcgaggtttaagtttaaaacttgaatatttagtttctgttcatttctctattaaaaaccttcatgcaaatggaggcccaatgttgatgttgccaatcttcctcagtggctcttctcccccattctttaaggcaggatctcccaatcaaaaccaaagtccgcctattaggctagtctttagagctagctagcttcagggatccagtctccatccatggctgggatcacaggctagccttcatagtcgccagtatttatgtgggttttgatgatccaaactccaacatgtcaagcttaactgccgaaccacctcctcagctctccacagtccactttaaatagtcttttgagacagggtctcttactagccacaacctcacatgaaaccttcttgttctagccattcgaatgctgcattttaggtatgagcctctggagacccagtttagctcccactatctttagtatatttatatgatcagttctcatgcgtggttgccctcttcctct

SEQ ID NO: 21104 - DNA, 1405 bp, Mus musculus
tattcagtggtcgtatcaaactgtgttgcatttctcaagcaacatcaacaattagagcaggggagggtggcactcacctgaggagactgagacaggatgatcatcaaagttccaaccagcctggtctactgagtgagttccagaccagctgtgaccacacgataggacttctctcaaaaaataaattaacaaactaactaacaataataatgccaacaataaataagtgattgcaacactctttaataactagacctaagccaggctcatgcctctaatcccatcactcaggagacaggcaagtggatctctgtgagttcaaggccagcctggtctacagagtgagttccaggacagccagggctacacagagaaacctgtctcaaacaaagaaccaaatctagaattacccaacttataacaggagagacagcttcagccccactgtgtggcttgaggctgtggtctcatgattctgtcttttaagtgagtctatgctgagatcacgcaggatgcttttatgtagaatatagaacgatcaccctcctaccattctcagatggattttctgttacctctgttccttttgttttggttttttatttgtggaaatcattcatattgaaagcttaatatagagtcatgtctatatcgatttggggttatatgaatgtcagatttagtacaacaaatttagaacttcagtgaatacgaatacttttttaacacagaatgtattttaatataaaaatataatgataaagtcatactggtagaaaatattttttggctgtttacgatcattttccctccacttcagtattgttctgtgtgaattgaccactgtgtcagaatgatgcagcttcctgttaaaatttacaaaatgcagggacagaggtgtagccagaattgagaaaaactgattagaccaagagcacgtggtggactctgttttattatgtttgtatgtaaatactcttgtaaagcattcagagtggaaaacatttgacaaactctaacactaaaatcaacttttctacattacataaataaagctaattttctttaatgtttttgtattttgaagtgttcatccaggaaagatgaccagtttttctctcccttcaccttggctttggttctcaggagtgttccccacaggagcgttccccgaaggagcgttccccgcagtggtttggggttgtctacctagagggcttgaatgtatctttgctgctgttctcatctaaaatgcccttctcccgggttctttctgtgaactctgtctcctttcaggccagggctaagtcttgctaacaacacgttatacccttgacctaccaaattctactactgccttactcatctgtgttgctgtagtcactgccacagtgtgatgcctact

SEQ ID NO: 21105 - DNA, 1194 bp, Mus musculus
ttagtgacctcagcgatctccgcagagttcatcagctacttgtctcttccctgacgaagattcaggctggaaaagaagctctcagccagctgtacaatgagagtgcctccaccatggagatcttagctgtgctgagagcctgggcagaggttagtgctccttcatggacagtggggattatgaaaactagtacacaccacaaacactgaaggacatgcaatagaatcataccgtaaatctttttggcggggggagggggtttgtaagcctatatatgtgtttgcctgagtttgaacccagatccttgttacgtaaggcctataacactgaggcacaccctaaccgactttttgttttgttttggggggctttggggggttttgaggcaaggtcctcccatgtagctgagggtggcagtgaaattgtgattctcctcttccacctctcaaatgctgagagcaccagctctgtcaccgcattaaatagcctgtgaatttcaaatgagatttatttaaatattagtttataacttctaacaggtctatataattgctgtacaaagacataaaaatcacaagcaagccttgaagactactgttaattctgaagacagtatgagaaacgggtcctcttcagctgctggtcttcttgacttagtctgcactgacctggccacgctaagcaaactctggcttgctgcacttcaggattttgctctcttaactttgcctgcagaatttgcttcccagcttcctactgaaggtaaggaggtaaaataaattaattcctagagtgacagtaacttctattccaagatttctcctgtagtacatgatgctcagctgaaacatattactcctaaatgacttttattcctgggataggcatctaagagctgcatttttgtagacaaccagattttgtaattccccgtcctcacagtcatctgtcctcacagataggatattaccaaacatgtccccagagcagcttcagtagcctgtgtgcctaccaacatggctgtctcgtctcacccttccaactgaatttagtccttaatttttaccaatctagagggtaaaaaatagtatttttaaatttttatttagagtctttgcttgtgtttataaccatttaaattgcttcttctgtgaatccctgccccttcttggatttctaatttatgtttgtcct

SEQ ID NO: 21106 - DNA, 1174 bp, Mus musculus
ctactgatccatgtccctagctctcactggatttttttttttttatggtatatagttgaaattgtttttatagcagtttcttttgtgaatgagacagtgttaatccaaacctataagattttattttataaaaacaattctattttgttttataatagtagaaacgttgtataatctcaaagttttataaaccagcacagataaaaggaaggaaaatgtcttagggatgaaataggtccaggggcaaatacaacaataaattaatcatgatgagtcactttcgcttcagacaaaagcagtttcccccagcagagtcttttcatgaatggagccatgtttgattctcatggaaagaggtactgaagaccatgctatgttggtgagtttgacagccttcattgattgaactctgtcgggccacattttctcagccagctcatttcctggtctcaattctttccagtatgcatctgtttctactattcccaatgtaatgacagctcagtcattcatttatacctcaacctactctgtcgtagatactgtggaaactgtagaaatggacaagtcactctttgccattggggagctcacacactagcacaccatggtgtgacatccttcctgcttgtgctccagttctttctgtgtatcctgccagttcactcataactgttggaatcacatagctgtcctgctcagatttacactccaaaacctttgctgctattcacgcaaagcattctattatataacctacatttgtacaggaatgtcctgtgcagttttctgcagagttctgtgttttctttccaggctaccaatatgtctatcctggttatattctgtataagggtgtgaatgttggcaggaggcagaattgagtgcttacgaaaatccagctactgtcgtaacgtgcgtcttctggttgcttacagtgcttacaaaaatagtttaccagttagcatttctctgaagtagttcaataaagtgttgtctgacttcccttcaagtaagggtctttccccagtgttgtgaaattcaatggtactgattgtattttattattattgcattcatgttgtcattctagtatttttatagctaacacttacgatgtggagagccgtgagcaattgccatcacgagcctccgctgtgcttaactggtaaac

SEQ ID NO: 21107 - DNA, 2104 bp, Mus musculus
gcagaactcacatttggttactagaggctttaggaattcattttaatgcttgtgagccattagatttataacagttactgttagatttaccttaaaacttgaggccatgtgcatttataaaagtaaattataagttgtttatatgatttctttacatatatgcaacattattagaattattagtttacgtaaactttgttattgacatttttactttgtgtatttccacatgtgtaactcatgtaagttttttgttttttttcccctttctaggaagatgatccatatgatctcgaagaagacctttctttggcaatgagggaactacaaagaaccaaatataattctgaaattcaggatctgtattttgagatggttttattttcagaatgaaaagtatatatggttatctttatgaatgtaaagacatgagaaaagagttatgatggcaaaaaacaaagagcctcgacccccatcttatactgtcagtgtagttggactctctgggactgaaaaagacaaaggaaactgtggagttggaaaatcttgtttgtgcaatagatttgtacgttcaaaagcagatgaatattatccagagcatacttctgtgcttagcaccattgactttggaggccgagtagtaaacaatgatcactttttatactggggtgacataacacaaaatggtgaagatggtgtagaatgcaaaattcatgtcattgaacaaacagagttcattgatgaccagactttcttgcctcatcgaagtacaaatttgcaaccatatataaaacgtgcagctgcctcaaaattgcagtcagcagaaaaactaatgtacatttgtaccgatcagctaggcttggagcaagactttgaacagaagcaaatgcctgaagggaaactcaatgtagatggatttttattgtgtattgatgtgagtcaaggatgtaataggaagtttgatgatcaacttaaatttgtgaataacctttttgtccagctatcaaaatccaaaaagcctgtgataatagcagcaactaaatgtgatgaatgtgtggatcattaccttagagaagttcaagcctttgcctcaaacaaaaagaatcttctagtagtggaaacatcagcacgatttaatgtcaacattgagacatgtttcactgctttggtacaaatgttggataaaactcgtggcaaacctaaaattattccctatctggatgcttataaaacacagagacaacttgttgtcacagcaacagacaagtttgaaaaacttgtacagactgtgagagattatcatgcaacttggaaaactgttagtaataaattaaaaaatcatcctgattatgaagaatatatcaacttagagggaacaagaaaggccagaaatacattctcaaagcatatagagcaactcaaacaggaacatataagaaaaaggagagaagaatatataagtaccttaccaagggcttttaatactctcttgccagatctagaagagattgaacatttgaattggttggaagctttgaagttaatggaaaagagagcagatttccagttatgttttgtggtgctagaaaaaacaccttgggatgaaactgaccatatagacaaaattaatgatagacggatcccattcgaccttctgagcactttagaagcagaaaaagtctatcaaaaccatgtacaacatctgatatcagagaaaagaagaatagaaatgaaggagaaattcaagaagactttagaaaaaattcagttcatttcacctgggcagccatgggaggaagttatgtgttttgtcatggaggatgaagcattcaaatacatcactgaggctgatagcaaagaagtatatggtaggcatcagcgagagatagtagaaaaagccaaagaagagtttcaggaaatgctttttgagcattctgaacttttttatgatttagatcttaatgcaacaccaagttctgataaaatgagtgaaattcataccgttctaagtgaagaacctagatataaagctttacagaaacttgcacctgatagagaatctcttctacttaagcatataggatttgtttatcatcccactaaa

SEQ ID NO: 21108 - DNA, 2395 bp, Mus musculus
tcttttcattttagggaaagatggccttgcccaggaactagcaaatgagataaggactcaatccactgatgatgagtatgccttagatggaaaaatttatgaacttgatcttcggcctgttgatgccaaatcgccttacattttgagtcagctatggactgcagcctttaaaccacatgggtgcttctgtgtattcaattccatcgagtcactgagttttattggagaatttattggaaaaataagaaccgaagcatctcagatcagaaaagataaatatatgactaatcttccatttacattaattcttgctaatcagagggattccattagtaaaaatctaccaattctcaggcaccagggtcagcagttggccaacaaattgcagtgtccttttgtagacgtacctactggtacatatcctcgtaaatttaatgaatcacaaataaagcaagctctaagaggagtattggaatcagttaaacacaatttagatgtggtgagcccagttcctatcaataaggatgtgtcagaagctgacttgagaattgtcatgtgtgccatgtgtggcgatccatttagtgtggatctcattctttcacctttccttgactctcattcttgcagtgctgctcaagctggacagaataattctttaatgcttgacaaaattattggtgaaaaaaggaggcgaatacagatcacaatattgtcataccactcctcaattggagtaagaaaagatgaactggttcatgggtatatattagtttattctgcaaaaaggaaagcatcaatgggaatgcttcgtgcatttctatcagaagttcaagatactattcctgtacaactggtggcagttactgacagtcaagctgatttctttgaaaatgaggctatcaaggagttaatgactgaaggagaacacattgcaactgagataaccgctaaatttacagcattatattctttatctcagtatcataggcaaactgaggttttcactttgtttttcagtgatgttctagagaaaaaaaatatgatagaaaattcctatttgtctgataatacaagggaatccactcatcagagtgaagatgtttttctaccgtctccaagagactgttttccctataacaactaccctgattcagatgatgacacagaagcaccacctccatatagtccaattggagatgatgtacagttgcttccaacacctagtgaccgttccagatacaggttagatttggaaggaaatgagtatcctgttcatagcactccaaattgtcacgatcatgaacgtaaccataaagtgcctccacctattaaacctaaaccagttgtacctaaaacaaatgtgaaaaaactggatccaaaccttttaaaaacaattgaagctggtattggtaaaaatccaagaaaacagacttcccgggtgcctttggcacatcctgaagatatggattcttcagataactatgtggaaccccttgacacaattttcaagcagaagggctattctgatgagatttatgttgtcccagatgatagtcagaatcgaattattaaaattcgaaactcatttgtaaataacactcaaggagatgaagaaaatgggttttctgatagaacctcaaaaggtcatggagagcgtaggccttcaaaatataaatataaatctaaaactttgtttagtaaagccaagtcatactacagaagaacacactcagatgcaagcgatgatgaggctttcactacttccaaaacaaaaagaaaaggaagacatcgtggaagtgaagaagatccactactgtctcctgttgaaacttggaaaggtggtattgataatcctgcaatcacatctgaccaggaggtagatgataagaagataaagaagaaaacccacaaagtaaaggaagataaaaaggtaagtttatatttacatttataaaagttctcacttttgccttaaaaggaaaaaaatatatttaaaataatgagttttgatattaataacaaaaaatcactaagtaaatttggtatctctttaatttttaaaattctaaaatatttggtagggatagatttgtttttgttgttttagtgcattttatttcttgatgctttacttggaatagaaggctgaatttatattcttcagcatgaaaattatgaatggaggtttattttgtcctttacattttcaataactttatctaatggtatcagatttgtattaaagttgtattaatgctttctacatcttttttcacagtagtatttaggaacttatattactgtttgacttgattacacataagccttcatcaaggattttatggttattcagataatattcagtatatatttattccagtgtattgaatgttac

SEQ ID NO: 21109 - DNA, 3566 bp, Mus musculus
gagctaactttcttgaaagttaaaaatattcttggctggatagattatcctaggttttccaaagttggtttaaaagagatggcataccctgatttatttcttaatttcccacagtaggttagaaacttatatgcacataatgtttgtcacttggccttcttaacctagaggaaaaggtttgtttgttttgttttgtttttccttcaaattgaaaagacctctatttgtaaagctttaacacttggcatgcaagtaaatgttacttgaaatatgtattgattgctctcttgttttagaatatagttgaatatagaatgctaagaaaaaaattaaattggaagataaaattagcatgaatggaaaactagctttgagaatctgtaattgcaatgatttctgatttctttttttttttttctcccgttttataatttcagggttagtcagcaaaataaaatcaacctaatgacagcagacaacttatccatctgtttttggccaactttgatgagacctgattttgaaaatcgagagtttctgtctaccactaaaatccatcaatctgtcgttgaaacatttattcaacagtgccagtttttcttttacaatggagaaattgtagaaactgcgaacactgtggctcctccacctacttcaaatccaggacaattggtagaatcaatggtaccacttcagttgccaccaccattgcaacctcagctaattcaaccacaattgcagacagatcctcttggtattatataaatagaatgtgattgcagatggcctgaaattggacaaaaacaaatctagacatgcatgtttcaggggttagtagtatatttcatgtttcatacagataatccacatcaaaataatgagacattttctctttgaactatatggtattccctattcagttacattatgaatctaaaaacatgtggtaagcatgactggagaggtttaatttttataaacaaaaaaaaatagttataaaaatgcaaagctgctgctgcatgcaaccttattgcaatcagtatatcattcccgtggcaatttctgtcacagtatattgtgaatacagtttttctatagaaattaaatgatttaaaaactcatatatgaaatgtttaatgctttcagcctgctttatggctggttttgttatttgattgctaatttggggacctaattccagcagtctgtatagataactaaagcccagttaagtattttttaatttccagttactatgccatgcttgggatgtttgaaagaaagaaaggaaaatacatgtaacatatttcacatttctgcaccttcatcttctaagtaaatttgtggatgatttgatgaggagagagtgaacctgtttcttttactcacgtaccaaggacacacttgtggttaaagtgagttgataatgtgatgtaaagaatagttgtcaccaactcatttctttattatctataatgaaagatacattttgtatacacagttaattctgtaaacagatgcatgttcaaaagatctatgatggtcttgtaatcttaatctaatatattttagatattttaatttttccctcttggggaatacacttagtatagtgtagaaaaatacttcatgacattttcatataaggttatataacttttcatacataaacatgaagtttgttgtagaaagttctttaaaccaaacatttaatctaggatttcaatttaatctgttccttgaatctatttttatgtggcccttgagaatatatcccaaaaaattccattgctaatacagcaataaaaatactttgggtactgacagactccttggagtatgtatatataaaataacaaacttgtattcatattctttcagtgatgtgttgttctacaatccagaatggcttttgcaccattttttaaaccagttttcccccctttgccgttggtaccagagttgctataaatgactgctgctttaagggttaaatattttgttagtgaagatacaaccagaacactaaattatgataaaactttctgactgagtgataggtaaatttagttgggctatattcaaaattattttattatcaaacccataccatttgttttactggaaaaggaaaagtggtttgctttttactgctggatcatattttgtgtagtaaagaaattctttggtcaatgttgtaatctttatatttcaattttaaggtttccttatctgtattatagtaaattcatgattttgagattcaaggctcctaagagtttgatttgctccattttgtcttaaaatattctttctcaattgttatatcttaggtattgtacttccaatttcaacaaagatgtcaacatgaaccaggctactgtttaagtacatgtatattataaattatcttgtgttattatcttttctaagagaacaaagtccctattattcctattgcaaagcacacaggaatttaagaaagtacagtaatttttaaaaaaaaaaatatccggtaaatgtagtattcttacttgttctatattacttatacctattgtctatatagctttaatttatagctgtcagtttaacattggcatgtctggcaaagaaaattaaactttaagagttttataaactgtttctaggttgctaaagaatttatttttctacgataaatggtatagacaaagcatcaactatgtacaggataaaagcctgactatttctattgaaagtaggcttacaagagaattttcagaactgttcatatctttggttcattctgtcctaactttacaattgtaatatgtgagtcccagtttatttaagctattatcttttataatgtgttaatttaacattcatttacatttaaaactatttttgttattaaaattagcatttataagtttccacattaaccaccttacacctcttccaaaactgatattacttttctatgcattctatcattgatttgacacactacatagtgaatcacttaaatattctacatctggttcattttactactaggttacagatattgaaaattaaagtatggtttaaagctcagtctgttacactgacttgtgtttgtttttggccaagggtataggtatgtttttaaacattagaacagtaaatctaagaagtgaataacataattaaatcatttgttgcttgtaagttattgcactgtttagggacacacacgtacacacatgtgtatatagatttaatgggtttaaagaatagtagatagtcttaaaataatgggtcaacatttgacattcacaatatttaaaaagtccatctatacacattgccgttgtttcacttacaattcagtgctttttattccaaaatcagtctcgacagtgtttagataatataaagaagaatagaggggtctctgtttcaggcttttagtagatatttttaggagtcaaattctatttgttatgtacttgccaaggaatacatatatcttaacaaaattccaggtgcaatttatgtgtttaaagtgatatttttagtagtacttccctcccctcccc

SEQ ID NO: 21110 - DNA, 1230 bp, Mus musculus
aagtgtgggatgtggatatttcaagcaggatgttgccacaacaatggctgagttctaaagaagagatggggtctaaagctgtggtgtggaggactgtctctgtgcatcactgagagttagcacatcttgctgagtgccatctgccctgggaccatcttcctgtcttcgtcctatggatgatgccatgctgtagaatccaagggaagtcatttcgttttttcatggcttcaccaccagcaaaacaaagatgacaggcttgccctttttagccactcacatttgaagatgcaatcggaccacgtttgtgagaattccacaatctatataaactgcatcattcaaagaatttcttcaatttttaacaccatgaattttctaataagttttttttttggtcttggcctattatatatttgcacacaagactgcaaatccccctcccctttctatctgagaaataatatattataattcttctctggcctcattagacaataaaataagacacatcaaagaagaatcattgagtctatggccataccaccctgaatgcacctaatcttgtctgatcttggaagctaagtagggtcgggcctggttagtacttggatgggagaccacttgggaataccaggtgctgtaggcttaaaaaaaaaaatcattgaaaaagtaaatattgcatacacattcaattcctttcttgcagaatctacaaggtaaggtataagtattttctctcctcttaggaagggaagaggggacatggtgatattatccagtgctaggaacttcacagaccctaaaaacaaatagtcagcttagcacttctttgggtcttcattctctgcccaagaataatgttaatactccataaagctgctatgactttggatgaactaacgtgtaagatctaaggcctgctatgtaataagcactatccaagtgtttgtgcaaacttgatccaaatgttgcgtgccagcttgcgtgcctgtgcgctcctgttctcacctatttatatgttcctagtgacagtttatatacttgtatacatgacttctcttccaaaagtagaacactgcattatcagtagaaagacaaaagacattgcctgttaataacgtccattgaacgcactggataaacctattgtgaggcattgtgggctctctactcctctctagggtgatttcctggtttgggtgaagttgtagaatcatgtcaagagaatgt

SEQ ID NO: 21111 - DNA, 1201 bp, Mus musculus
tattgatataaaccacaattttaggaaataagccgtggagacctgctctccattccaggattacattttacttgtctgcctcggaatggaagtggacagaagaaatccaaccagtagttactacacttaggacagacaccacaagttgggagaagccagcttgcagcacatggggtctctggtagttaaggatggttttctgtgcaggtatgtactttaaaggattattagcagatttgttagattgaagcatgagtataaatatacaaacaagtgagcctgatgtaggagaatcaaatgtattccagtggctctctagagctgtgttttccccttcccatctgatgatcaactggaaatggtttaacaataaccttgttgctgtaatgtccacattaaaatgaatcaagtattcattttagaccttaaagtttttattcttttctgtgtatgggcattttgccttgtatgtacatctgtgaaccatgtggatgcggtgcctgtgaaggtcagcagaggattttagatcccctggaattagacagttgtgagccatagcgagtactgggaattgaacccgtgtcccctggatgggcagcctgtgctcttcactgctgagccatctcctcagccctcactctgaacttttaagaggacttgctttctgccacagctatccacgtggtcctcagaatgtggttttccttgcagccaggggcttattctgtggaaacatgctatgttggctctgtcctgaacagaatttagaagcgtgggaataatcccctttgcaagtgggcatttaaatggcacaacacggtaatagagttcctaagagatatgaaaatattaaagaggagcttcttgcctgggagggattattcagatcttaccctttatgtgactgtgttttggagtcagaccacaagagcagtctacagtggtgtctaactgcacctcaggtgggggtttcacaatatgaatggcttctctcttccctatgaatggaaactacggatctcattccagtttgaatattaggtctagttcacactggagagacagaggggaaagtccagcccttatatgtgatttactaggccagatggctcccagtgctagtgctgttggggtaacggatgaggggtcatcaccacagtgcagatagaggtgtgtgcctgctcccagtactgtttataaa

SEQ ID NO: 21112 - DNA, 1217 bp, Mus musculus
attttgacgttgagctcagtagcaggtgtcattgaaaataattctctttatatttatttatttattcaggttgtcaggcttgttcgcaagctacttgacacactgaaccagcttgctagtcctattttcttcttcctgagtccccttcctgtctctctctgtctctgcctttctctctctcagtgactttctgaggcaaggtctctctgtatagctctggctgtcctggaactcaccctgtgtagaccatactgatctcaaactctgcctcccgagtgctggattaaaggcgtgcaccaccattgctcggcaagtataatatttctaaataatattttgcgataatcattttagaaatgatctttatctacaagagggatattagaatggaagacacggttttctgcttctgaggtctaatagctgctgattttggtacaaggctccctcggattctaatactaggtaggtaaatgggatggagagggggaaaggaaataaaggtgagcatgtactaaaataacttctggaagacataactcgctcttttaatacacgttctgagatggcttcatattaaatgggattttgtaacaagatgaatggataaaccccaagaactcaagaacctgccgatgcagagtgaatttaccgtgggaggctccatacatatcatcaaatctttaaagagttctacaatgtccaaaggaaataaaaccactgtggaagatcatatgatctcatttatgtcatgggatagctattactaggaactctcagaaactcttagaacaagagagatttgtactttaagagacacttacgtgtgtgtttagggaaggcaaggctttctttagctaaatttcacaccccaatttgctgcttttgctactatacattttaagactagaagtttgtaaaatggaagttatcagcaggcgccataaaccagagagtggttctcaacctgggggtcaggaccacttttggggttgacccactctttcacagttgcatatcagtaatcctgcatgtcagatgtttacattatggttcataacagtagcaaaattatagttacgaagtaacaatgagataattctataattttctagaaaagtctctgtgctaaagggtcccagcatcaggaaggttgagagccactgcagtaagccagtgaattactctcgttcggagtctttataccttaaggagcc

SEQ ID NO: 21113 - DNA, 1444 bp, Mus musculus
tgaactcatttgctaactccagaaatacctgcagacgacatcctagctggccagcggtttaaagatagatttgggaattcggctgttgagcccaggactgcttcttattcgcactttatgtatgcgtcctgatttgaagggaggaggttcgcaaagaaataaagttggtgacagatgccacgaaggggtaccctccaaaccctcacagcaagaaagagaaatatctgaacgatttccagatgttgttaaccagagtctagacagtgacgacgacctaatgacattatcacctctagaaagggctgctgcttagcaatcgatttatagatatcccacggtggatgctccattttcctggtttacgacccgtactttctgaaggtcattgctaagtcaatggctctcttgtggaagatgatcccagcatttattatgcactatgtttacttcttacttggggaacctaattatccagagaataaaattcgccaggtagtttgggttgtttttctggtattgaaatttgaagttaaatcagaggatagaaagcttcctggtaattcagcactggattctgctaactctatgggaagagcaaagcccaacttacatgattcgtccgagcatccccatcccgagcagttcagttcggggagggagatggggttggaagtgcagacagggtcctttcatccgtgtgtgttccctttaacggttcatcgtccataacaaagaacagtgtgctgtactcttaaaagagatggaaataaaaagacctcagagctattggagttcttccacatcatctgctctgccagcctcacttgagtcgtcttgatccttgactgcaactggctggtaggacggccagagttgtgggatttcccagaaccgtgggagggtctcctgctgcagggggcaggtgtcgcttcctcccgaactctgtacgaaacacctattttacgaaagttagccaccctcgtttctgctgctacttccccaactttcaaacctctttaatttcctagctagaatcccacaagcagcatagacctgaaagtgttttatttcgtcatgttcagacagatagacagacagactttccaagacagaagttgatacttttcctctaattgttttggaaagtgtccaggaagaactgtcatcccacccccacccccaacaccccacccccgcccccaacacccccacccgtgccccgtcccgtggctcagttttgttttatttagtatttcccaccttctaacttgcaatgtcatgtccttatttattttgtttattgtctctttagcctgtgatgcctagagtgttaagtacaacgaagacagggattttgtacatttttgacccatgcaatattcccagcgcctaacctaatgcctggcatatagcaagaaagggcttagtaaatacatgctcaata

SEQ ID NO: 21114 - DNA, 1587 bp, Mus musculus
caaatagactaggaaaaataagtttccttaaccatcacgcagattcgatgctggtttccgtggtggggatggccctgtacactggctacgtcttcatgccccagcacatcatggctattctgcattactttgaaattgtacagtgacgaagatgtgaccaggatccagaggttcctggggaagatctgccttgtgaagttggaatgagacctcatcagatgtaagatgtgctacggatgtccacgtgaccaaccttataaatacaaagactttaaaaaaaacttcatgagtagaacaggaaaaatcatcctggctcatgtgttgtgttctttctttttgattttaacagaggctcttatatagtagcttttatctattttaacattgtagtcatttgtactttgatatcagtattttcttaacctttgtgactgtttcaatattatccagtgaaagcttttcttaatgtaactttgagtacatctcaattgccttctatttttaaaacctaaggtcattagttgggctttactgttcttgctatcatatggcatatacatctgcctggatatatttctactcttgaccaaagttttgtaagaaacaatacagaatttggggacgggagggaggatactttgagaactacttacaaaagatttatctgcttgcttgaactcaggagtacggttttagctccctagactcttaacagcttttgctctaaaactattaaagtgtttcttagtaatgaaaaagtaaagatcttgctaacattaatacaaggaacatttcaccttttagatattaaattcttatgtggacttatttccaaccaactttgatgattcctgtgattggtgattggtggccggcttgtatgacatatgctgagatacactgtggagcttttcatagaaggcttatcagatcctctgaggcagtattgaccctgtatacgctcaagagttaatttgatgttgtaacaggcgttgtgaaatgcatttgcacgttgtgataaagacacaatgagatgaattgtgcagaaccataaccaaaagaaatgtaaacttgcttaaaaatcctttcactctttgtattttttttaaaacggtttttattccttagatgtaaaatgactacttttttttttgatgtaaactcattaaattcaaagaaaaatgtagcagtctcttttatggttaaatattgatcaagtagttattttgtggttggttcctggggcttgggtatacagtaatcattttagcatgtttctgaacataaaaattatagtaattagaaaaggtactgtagattttaagatgtcttctagcataagttcttttttgtttgtttgtttttgttttcattttattgaatgtataagagctctgctgcacatacatctgtgggccagaagagggcgccagatccccttacagatggttgtgagccaccatgtggctgctgggaattgaactccggacctctagaagagcagccagtgctcttaacctctgagccagctctccagctccttctggcataagttttgcttttttttttttttttttcttctggttt

SEQ ID NO: 21115 - DNA, 1587 bp, Mus musculus; identical to SEQ ID NO: 21114

SEQ ID NO: 21116 - DNA, 1172 bp, Mus musculus
cggcggagtgctaagaagatgaggtctaatcctgaagatcccgcagagagagaagcggaggaaatctatcaccctgtcatgtgcacagagtgttcaactgaagtggcagtctatgacaaggatgaagtctttcactttttcaatgttttagcgagccattcttgatcaatgtgacaggtaactgcccagctctgtgtataaggcaaacatagactcttgttttcctctttcctattcatatcattcagtgatgttgttattaaaacagtatttcatctttatgaaaaggagtggttatcaacctctatctcttctccctttttgccttttaattttcccatgaggacagattattcattccacttctagtgcatatttgtagacattggagcttcttatttattaagttagctttctagactaaaacagttttggaataagtatttgtttcctagtgtttggtccattttctgttgctgtaacaaattactacagcctgcagtgttttataaagaaatgaggcttagctgttggcaagatgactctgcacttggcatgcaagcctgataacctgagttcaatccctggaatctgcagtggaaggagagaatcaactcttgaaagttttcctatttcttaacataggtgcacgcagacagacagacagacagacagacagacagacacacacacacacacacacacacacacactcactccaaagtttccctgaaggggcctctagtatgccctgaggggaactatttctctctctgattaccttctgggccttctccaagctacaagtcaggagagctgggccagtgagagtttgaatggagttgagacaacaggaaatgaatggttccttttgtcttctgtggatggggaggagcagtgatggagtgcgtgcttgacatgtgcaggttcctggactggatagccaacactacaccagcacacaagtgagcttctaagacattctcagtgcttagggcatggtggcctataattcaagcacttgggaaagacaagaagggaaggaacgggggaaagaagttggtgtcagtgtgttggtggctagcatatttgataatttttataatatggtggtatctatatggaggcaatatgtacttgacatttttagtttcaaattagcacatgggagt

SEQ ID NO: 21117 - DNA, 1277 bp, Mus musculus
tctcatggtttttattaggtttattggctgtgtgcaagtaaataatgtataatagacctactcagaaaaacaccacggaaaaacgatttttcttttactagttaaacttaacaagggtggatctcttagaatcctgtcctccgctagcagaaactgaattgagctaaaaaaaactttttctttgcccagagcctgggcagaagcttaggttttgaattccagattcgattgcccactaccaacaaaccccgcccccgcctcacagccttagtgggcggagtcgcgttgaggggcctacagacgagttcccgcggcgtcaccacaaaggcgtggaatatgtagatgagaatttcacgcaaaggctaccggttctccctaaatagacatttttttccgttattgataatatttacataatataagcgtatatttatggatcaaggttagaaaagagaatataatgtagagaagacgcattgaggaagagaccgtagttataaagtaagtatacaatgatggagagcctgcacacggcactcgcaactcatacttacctggcaggggagataccatgatcacgaaggtggttttcccagggcgaggctcatccattgcactccggatgtgctgacccctgcgatttccccaaatgcgggaaactcgactgcataatttgtggtagtgggggactgcgttcgcgctctcccctggcatttttgttgaaaaaatagaaaacatttactttagcattgcgaaagacttgctttctacctggtgttttagttttttttttttttttttttttaaagatttatttatttattatatataagtacactgtagctgtcttcagacactccagaagagggcatcagatctcattacgggtggttgtgagcctggttgctgggatttgaacttcggaccttcggaagagcagtcgggtgctcttacccactgagccatctcaccagccctaggtttatttttgaatgatgtgtaaggtaattgtcagttgaaataagttttactatctcagttagcaccaacaacttgttttcttttttttctggtgttttcaagacagggtttctctgtcctcgaactcactttgtaaaaaggtcagatactaactgtttaggtgaagcaaacccaaaaggtgttgtatttgctaagctttatgtaaacatgacactaacttcatgaaaactttgagaagattcatattgggaagttggacatcttaatctgtacaggatggaaaggctcattgtggg

SEQ ID NO: 21118 - DNA, 1229 bp, Mus musculus
tcagtagtgatgatgggaaggcccagcccagcgtggggcagtgctacccctgggctggtaagaaaccttggcatgcacaaatccccaagtgtgtggtccccagtatggacgatggcatctacgcaggatcagaaagttaagggtcatctcaggttgcatagtgcgatcaaaagtttagggtcatctcaggctccaggctacacagtgcgctcgaagtcaccttgcccgggtctcgatatcttgcctgctttaaaaaaaaaaaaaaaaaaaaaaaaaaagcaagagagcgagcgcgaaatctagagcgagagctagagcaagagcaagagcaagcggcgcgtgggcggggcgtatgcagatgagaggcgcgcaggggctgccggtcgtgcggagcccgaagggccgtgtctcaggtggagtgtgttgcgtgacacacgtgtgattttcgtgagagaggagcatcgtgacagaggtgtggagggcttgagggcgtgagggcgtggcggtgacgcggaggaggcgaccgtgcgtttgaaaggagtgcgtgttgagggagggcctgttgcgggtgtcaggaactcatacttacctggcaggggagataccgtgatcacgaaggtggttttcccagggcgaggcttatccattgcactccggatgtgctgacccctgcgatttccccaaatgcgggaaactcgactgcataatttgtggtagtgggggactgcgttcgcgctctcccctgtctttgttggtgcaaaagcagagcataccagtttttctcctcaagactcttcttcctcatggttgcagtaccctctgagctactgcaggtcttcttatgggaagtaagatctctgctagtggagagtttctgctgcccattcttgcactcacggactgtcgcgtggaagcgtaaaccagttaaaactttcctccccaagttgtttctattgtctgtggtgtttacaacggagatcctaaattaatatactgtattggggaccaccgccagtactacagaaagcgaggccgacgggggccagaaaaagacgataggttcgtggatgccccaggaattggagctatagaccgctacagccaccgtgtaggtgttgggaatcaaaccccggtttctgcaaagagcagccagtgcttttaacaactgagtcgcttcttcagtacccctcctctaccttcatgtcttactcgtttggtctgcatgggtt

SEQ ID NO: 21119 - DNA, 1194 bp, Mus musculus
ccagggcaaccttcagctccttcagaactgccttgcggttttaaatggagacacataggcttcactctgccttctgtcaaaaagggctgccttcaaatccagtttgttttcctgacgacctccctccggcatctaagctcactgggaacaacagagacagcgggcacagtgcatcagctcttcttctgagagacagtggagcagcagggctcaccggctgcagggcagcggcctgccacctcgcactccaccttccaagaagcccaaagttctaccctctcttttctttgagaagcctgtcttactgtgtttatttcctatgtggcggttctgtggctgcaggccttatttacctaagaatcgcttgtcctgttttaacattctcaaagtactctctgttcacacaagataaaggttgcctttctgaatattttttaagcatcctgttcccttagttctttcatgtatctgtgtaaagcgtcttaacgagacttactttgaattaatgaacgtagaagtttcgggtcagactttatgtaagctttataagtatgatctctgaagaaaagcagatgcgttagtatgtttgccttaaacttgtggactaaaccaatattgtaaacgcccagagacagcagtggcgttttgactccatgctccttgtatggctctggaattcagggtagcgataataaatctactccggcattatgctttacagtgaaggtcttttctttatcttttttttttctttctttcctccctcccccaccccccggccccctttgtttgaaatggccaaaccaggttcactgaatgctttacctcacgtagagtgaccttctgggtgcactgattcaaaatgcaggagtatcatggttccctagatccccgtctacaattccctggattccctgcctatctcagcagataaccgggagacattcgtcagccgagccatttggtggctaccatggctgtctagtgagtggtgtagaggaaaagctatctgctaggaggagggagggggtggtccccaggacgaaaggtggggtgcagacagatgaagagtccctgggtctgtgtcacccacgcctggtctttctgactggcccagactgcttcctgtgcccccagtgtaaactggacttggatgatggacttctcatatatttcttactcctctcctatttg

SEQ ID NO: 21120 - DNA, 1199 bp, Mus musculus
attaagctctgcactggtatttggaattttttttcctttaatctttggtttaaaaacatcttaaaatcacttatatacaatcattaaaagagtggtaattttataaatgcttatttatgttataaaatggagatcagaaaaaaattctttttgcactttggcctatccagtatcttatttattctctagataagctaggatattaatccagagttacattactgagaattgagtagtataagtaggatgtttttattacttggtcataatgaaaataatttgtaaaatgtcattcgaaggttaatgatgattgtgatgtttaggaatgtttgtctcagccacagttccttcatagcttttccaaaatgaattgggaaaaaaaaatcgtatagcagtcttaaagcttagtaatggaacttggctgtggcccagagctttctccttatagagaatttgatctgctccgtgtgcgctctctgctattagccggagctatttatggcaaacacatgcttttgtatcttgtcatagtcatccacagatggcaaaactggacttgattctactggcatgtaagacaggcgtgctagtgagcagtcgtgtgtggctctggactctgaccccagagctctgaagaatgctcttatcagaagataggaaatgaaaatatccttttttaaaatatgtggaagtaatttgggtataattagtttttttctaccttttggaaagttgtttttttgttgtttttttttttttcccagatgagaacattaacatagtggttaaatgtctaggcttccatttaaaactacacaaatgacttgggatctttttagcactaaggaatttgatttcagccttccagctgttgctgtgagttgttccagacctttctgtggctttttggtaaggctgcttagaagcatgagaagcatgagaatggtaatgtgtgctaaacctatgtttaaccaatctttgcaccaaaggactttttcaccaatttattttgttattcttccaaatattaagtgatttctaaaaggtaaagggtgaccttttgtttttatatctaatttctcaatttctttatatgcatttttagaataatttgagagattaaatgctgcttgaaactattatactttgagttttagattggccaaatacattaatgtagttaaattcatctttaaagt

SEQ ID NO: 21121 - DNA, 2300 bp, Mus musculus
cacaagtgaagcaaaagctggaactcggcttcaagcattttttcatattcaagctcaaaagcttggactccacgtctcacccagtactgtggaccaggttagcacgccactagctgcaaagaagtcacggatctaattttgtccttctaaaggcaatacgtgaagaaaaagataaatcgttcatgaaatggaacattaaatcatgctctaaagcagatacgtgtataaagcaataacagctggttgaccacatgcaagtgtggcctgcactatattctcaatttactattaagcactcaggagaatgtaggaaagatttcctttgctacagtttttgttcagtatctactaagttttatagctgtattgggtacagtcctggtttacagaggcttttgtgcattttgaggtcattcatgtgttcaggtatcctgaaaaatatttttcaactatgatttattttgtcattgagctttaggagtttcagtcataaggaggctttgtctccacagtagctcttgtagatcacagcttagagaatgtgtctaaagactgtttcatgagcacatggtttcaacactacacatgaatgaatccaattctctagctctgacgtgctgtagccagtgcctgccgactgaatttattaactagatatttatttagcattcaaagtcatttgtgaatttgttttgtatttataaaatttatacttggaagaatgttctttaattttttaaacattttactatgtttctgttttatttcttgaccagtcttaatgatttaaaaataaaaatgccaccctctctaacagttctgttttacaaacgataagtttctgtgtacaacttttctaagtgtgcaaataaaatgatacattttttcaagttttctgaattctgaagtttttgcaaattaaaatcatgcttttgtctgtttatacatacagatcataaaagccatacagtgtttcattgtctgggtagaagatgcctccagttggtggcagtgatattcttgcacagattcacactaggagagaagcatgttgaatcctgagattgcagacatatatcactgtgcctgattccaaatacatggttgatttcaatggtctttgtggtacaggcctgtaatcttagcattcaataagcctgaggcaagaggatcacaagttcagggccagcctgcctgggctacacagtgagaagctgccgatggtagtttgaatgtaaatggtgcccatgggctctggattggaacactaggaccaagtggcttctgtatggaaaggcttaagaaatgtgacctcagctggacgatggtggcgcacgcctttaatcccagcattccagaggcagaggcaggcagatagatatctgggtttgaggcaagcatcgtctacagtcaattctggacattgagggatacacagagaaaccctttctcaaaaaaaaaaaaaaaaaaaaggaggaggaggaagaaaggaaagaaaatgtggccttggtagaagaagtgaatgaatggaaacagttggaggaatggatgtcttgggacaattttgcagattatgtgttgcttaaaatgtaatgtaactgacacagagcccagaaagctattgtgtttttggaaaagtctctgctgaactgaacttgctaacatgcttcctgttgtggtctggccagtggtaaatgtactgcagtgatgttaaagggctctgtagaactttatacctctctggatgtttatacgcatgcagtttagttttcagatgtggtatgaactgagtgcttctgacagcaaaaggcagaggtactagtgtccaatttttaaaaaaacgttttttttttctttttttatgtgtaagaattttatacttaaagtatctgtagcttttggggtgaaaaaaaacttttctttgccttactcccagtttgctccccctgcttcaaatgctctcagtttcctatgcctgctaccaaagtcatgattgatcccaaataacttcttatataaattgctttggtcatggtgttaaatcacagcaagcattgactttttcattgactactattgcaacaaatgccggatggaaagaagtcaaagtcgatagtctttgtacctaataactgtgaaatgccttttgtattaaataaaccagttctgcaagatttcttggttcatctctccatttttcagaagaggttaaaactcacatcattttttttttaattcagtcaggtaggtaccttcaggaagatgtgaatacagttttatttttgtggagagcataaaag

SEQ ID NO: 21122 - DNA, 1133 bp, Mus musculus
gctggatatgatggcagaggcctttcagagctaaaggcaggtgcatctctgtgtgctccagggcatccgagtctactactactactactataatgggaccctgtctcaaacaatagcaacaaaaacaaagaaataaaataaataaaagagcaataacaatacattttatttcaacgtagggaaagtgggacaaactgcagttaagcaatgtataaagcaagaagagatgaactactgtataaagcaggagcctctgagtgccgacgcagaggaagctttgaggcaggagcagcagcagaaagagaaagaactcctagacaagattcagagtgccatcgcctgtactaacatcttccctctggggcgcgaccgcctgtacaggcgctactggatctttccttccattcctggtctgttcatagaagaggattattcaggtcttactgaagacatgttgctgcctaggccttcatcatttcacaataacgcacagcctcgcgatcctcaggtatctattaaaactgaagagtccttcctgtctgaatctacctccagcctcgaccaaggtccgttcgatgactctgtgctgctgccaaaaccggtgcataagccaaatcggtggtgcttttacagttcttgtgcacagctggaccagctcattgacgctctcaactccagaggacaccgagaaagcgccttgaaagagaccttgctacaggagaagagcagaatatgcgcacagcttgcccacttctctgaagagaaattccatttttcaggtaaatggttttttttttttttttttgagccactgtctgtccctggctgtcctggaattgactgtagaacaggctgatcttgaactcacagagatctgtctgcctctgcctcctaagtgtggggattaaagagatgtgccacaattcctggattaaacctatttcaagctgaacacatatgttaaaatagttagctttcatcctgacctgttcttagtttgcaaattagacagtcatcatatatttctttatacagacgagggtctcaaaatgcctttgtgttgtttgtgtgagcggtcttctcattccttcacaatggactactacttgtgttattcagctttgcattattgt

SEQ ID NO: 21123 - DNA, 1109 bp, Mus musculus
ccaagagcaggttctcactgagcacgcgcagccagacacgcgcgctgcgaccccgccctcctcagatcgtccaatcccgagagccgaaacgccaaaccccgcccctccgggaccccgcctcccgcggcttcagaagccctaggccgcgcgcccttgcggagttctgcactctttcacgtagtcgctttcccctaagtcctgacttttcctcgaggtcgcacccgaggaggtcctgtctcgctgctagcttgccgcggcagtgacgtacagggagaacactaaggtcaaaggtcagctccagcaaagaaacaccccttctatcctttcgggggagccgtagacgcggggctttgtgccccggaagcggaagtgtgttttcacgaagggctgaactccgccgagtgatgacgtctcctcattgggcggaaggttcggtggcagtcgtcggtgttccagctggtgggagttggcttcactgtgttgggcgctgggcccctagtttctggagctgggaagttgggcgacgggctccgtccctgtccttcagcttccagcgttcctgggtttccttcggcggcgtggggcctcgctaagggctcgccggccctgtggggccacggctttagtggcgccttttgcggtgagtgtggggggttttcctcgctccgccctgggaacccctagttagagcgccgcttctgcggaagtcttcccgggtggccacgggcagtgatcgccgaggctgaggtgcactgacacttttattttactcttgccctccactgcaagctttaccaaacgctgcgctgctacccttttaatttgtcttcagatttacccgagccaaataagtaagcattggtaggcttggctcatggaaggcattcccgaacaagaatttagataaagctatttccccaaagccttttgacatatactagggtttattttcctatcttttagtgtttactaacatgttggttagcatattgttcagaacttttagttccgcgacagtgataagatgtgctaaggactttaataagtcgaagctagtgacaatgtattttttgttgttgaaactttcttaatcagcttttcggttacca

SEQ ID NO: 21124 - DNA, 1161 bp, Mus musculus
cagatacagcttaacggggacaatacctagcatatataaaacaataaatatagctgggcgtggtggcgcatgcctttaatcccagcactcgggaggcagaggcaggtggatttctgagttcgaggccagcctggtcttcaaagtgagttccaggacagccaggactacacagagaaaccctgtctcgaaaaacctaaataaataaataaataaataaataaataaataaatacttgctgaatgagcatgttaatcctttggagcacataaattaagactaaatccgccttttgtgactggcggtgaacgagcacgcagtgccatgaaggcttcgggcacacttcgggagtacaaggtggtggggcgctgcttgccaaccccaaaatgccatacaccaccactgtaccgtatgcgaatctttgcgcccaaccatgtggtggccaagtcccgcttcttgtactttgtgtcacagctgaagaagatgaagaagtcatcaggggagattgtgtactgcggacaggtgtttgagaagtcacccctgcgcgtgaagaactttggcatctggctgcgctatgactcccgcagtggcacacacaacatgtaccgggagtaccgggacctgaccactgctggtgcagtcacacagtgctaccgagacatgggtgcccgacaccgtgcccgtgcccactccatccagatcatgaaggtggaagagattgcagctggcaagtagcgcccgccagctgtcaagcagttccactactccaagatcaaattcccactgcctcaccgcgtgttgctgcgccagcacaagccacgcttcaccaccaagaggcccaacaccttcttctagacacagagacccactgaataaaaacttgagactgtcaaaaaaaaaaaaaaaaaaagaaagaaagaaagaaagaaagaaagaaagaaaagaataaatcccttggatctagtgctcagtggctaagagcacttgctcaggctggagagatggctccgcggttaagagcactgactgctcttccgaaggtcctgagttcacatcccagaaaccacatggtggctcacaaccatctgtaatgtgatctgatgccctcttctggtgtgtctgaagacagctacagtgtgttcacatataataaataaataaat

SEQ ID NO: 21125 - DNA, 1167 bp, Mus musculus
ggtttttacaatttatttaattttctcacccctcagtttattcaaatttaagttatgttaacgtttttaaagcattgacactcaaactaaattgaacatattttatgtaacttagcttcatattaattcagttgaaatgctttcaaccttagctacaattaaattctgggtctggtatcaaaaaacactttgatatacatgaaattgactgggagttcctacagtataatcttcagtaagagtcctggatatatagactttcaaaagattggttataaattggtaatggctggagttagttgatccatacttgagagtttgttgtactatcttttgtatgtgaattttttcataaaaaaatttaaagtaggcatttgtggtttttaccctttgccttttaggattcttactgaagcagagattgacgctcaccttgttgctctagcagagagagactgaacactcttatcagcttaccagatccttgatgcctgtgcctatgtgtttggtaacaacaaactgacatcatagaggccctggattgaagatggagactctcccactcctcctgccactgactggttaggactctgtataaataaaacagtgcttttggaaatggcggtgcatcctgtctttcttgagtattaaaccctggtgcagagggcagaaagtgctcgtttacatttgtgtcacagtcgtggtttacacagatgcttcgttgcctttggaacacagatcccagctcagacttaacttagcacaatgagtaaactcagacttggaacctggctttgaaactctgaatgaattgtcatgtgagacaggcttttatttatacctcttattcgagagagaccttcctgtgctcagttctctggagactttctgctaaagatggcgctggctggctgaactcgtgtttactgttgttcctctggattgtgctctgctgagctgcacctccagctagctgtctttgtagtagtttaacaagtatctatttttattttgcataggattttgtttttagtggtttagggttttttgttctcttttgttgtttggcttgttttgttttttgaggctggatctctgaatgccctgaaattcattgtatagatcagcttggcctcaaacagaacttcccttcctctgcctcccgag

SEQ ID NO: 21126 - DNA, 2277 bp, Mus musculus
aattgctgaggcacttctgaaagctggctgtgatcctgagctccgagactttcgaggaaatacccctctacatcttgcctgtgagcagggctgcctggccagtgtagcagtcttgacgcagacctgcacaccccagcatctccactccgtcctgcaggccaccaactacaatggtaggtctgccagtccatccaaggatgcagaggagggagagagatggggccacttgagtcttaaactccgaacgtatacaaagttcagacactgtgatctttttaaaaagttttctcctcgatgcctatatgatattcactcagaacccagattctgagttcttcaaaactgatgatgtttgtggttgtcctcaagacaatagacatgagttgtgtgaggattgaaacacgtagttacagtttttgtcttcctcctccaggccacacgtgtctgcacctagcctctatccacggctacctggccatcgtggagcacttggtgactttgggtgctgatgtcaacgctcaggtgagtacatctcccttccacctaatctctgttgggctggctctgatggtgagcaggtttccagatgcagccgtaaactaacgcctgattgcttttggtttcaggagccctgcaatggccggacagccctccaccttgcggtggacctgcagaatcctgacctggtttcgctcttgttgaaatgtggggctgatgtcaacagggtaacctaccaaggctactccccctaccagcttacctggggccgcccaagtacccggatacagcagcagctgggccagctgaccctggaaaatctccagatgctacccgagagcgaggatgaggagagctatgacacggagtcagaattcacagaggatgaggtgagtgttcctcccctcagcacgctgacggctgttctagggctgctttggatcagagggatttcagttgtttaacttctcagactcggcttgcaaagccaggatcccaagaatttgtctctggtttgttttaagagcttacccttttgggttgaggaatgagggaattctagaaattgaacccaggccttagcacatggtgataagcacacgttcaaccattaagctccaccccctcaatagcttagactttttttttttttaaggaaagaataggtaagggaaactcctacagcctggtgcccttgttctatttgggttaaggagaaaaagagcccaagaataggagttatttcagcagcagctctccccttatcccaatgtcttggtgaagttctaggaatttaatatgtctttttcccctctcttgttttagctgccctatgatgactgtgtgtttggaggccagcgtctgacattataagtggaaagtggcaaaaagaatgtggacttgtatatttgtacaaatagagttttatttttctaaaaaaaaaaaaaaaaagaaaaagaaaaaaaatgagaaagggtatacttagcaccacaccacacagcgcctagacccaggcattttactggggtgattcggctgttgtctttgtgaaatccggggaaacagatcactgaaattcaaagaaaatgtctcttaaggttcatgtttgtgggattttttttgggggggggggaggtgattttccagaacctaatgaaaggaccacgttttatttattgtgcttttgattgaaccaccatagacctagtaagtgagcccagtgtgtcctcccatgtaagagccaggtgttcagtggcatgtgcttaaaagtcgcccccaactaaggtctgtgtcgccttcttgtaaatgttgtatatgttgtattttgttggtaattattttggtacttctaagatgtatatttattaaacagatttttacagacagcattgtcccgctcgtttgctattctgagtggcttgttcctgaagatcgggggctggagggggtggcgtgaatgttttcagccagctaaggaagttcacagagtagcttctcacgtgagagccgagcttcacagcagcctccagcccctgtgtgggagggagcctgttgcaaggtgacaggaaatgccagcctttagctggggtaccaccagcaagccacctggcctgtcactgaaggctctggtaccattttctccttgatttaagctgttccggaacccagtctctgtagaacttagttggaacaagaggaatttgctgagttagcttgatgtagctgggaaaatcctcaagagaggacatgggcttggaaatggtactgtcctgacatacc

SEQ ID NO: 21127 - DNA, 1107 bp, Mus musculus
aggaagtttagtttcacccaggaggattcatgaactatccagtctcatctgccttgacaacatccctttcccacagaggagcttcagtccatagccagtccgggaccattgtggggccatcttgtcatctcttgaggccagcctacactaagttgctacaaggtacaagatattatttttgccttctgctttaaaaggaaaaacaaaagactgaggtgtagtttcgtggtaaactatgtgtttatcatctttgcaagaggccctgaggtcatccccagccctgagctcacaaacaccaagacagggctaggcacagtgtcggacgattgcaatcctagcactcaggaggtcaaggctggctgtgacccaatggtgagaccttgtctccaaaacagtgatgtaaagctttgacagtttaaaagtgttaagcttagataaatgtttgacaatgaggagaaaactgaagcatggaaggatccacaagttcacttgccgcctccaagaagccagaccctttcattgttggacatcttccttcttgtctgtccacacacaatcctgctgagctgtggtgttgttgacttaagctatatggagccgtgcatggaaagaaagcctgttggctcactttagtaagtcaacagtgttcctgagctgcaggtaaacagaaggtaactcctagggaattcccagggagggccaagtcagccggcctcagcaccgcccagattttttcaaagggttctgtgacagcccagaaatgcttgagcctgactcctgccactaggtgtcacactaaacaataccgaagttgatgccaaggcctgaagctgtcgggacagcccaaggaggcataaatatacatactccttcattttatacctgcagccccaagtcaccttctgcagtatcctttatagatggggctttgagtccatactgtggcttttttttttacaaactttaacttcatatatatatattcattacaatagggtacattgcttaaattttatattacttaattttttatgtatatgaatgtttcgcctgcatgtatgtatgtgttccaccctcatgcttggtgcctggcggtgctgaatctcc

SEQ ID NO: 21128 - DNA, 1149 bp, Mus musculus
agtggtgttaccttcaagttcatgatgaatgttgagacaaaatataattggacagatagtcttgtggttatttattgtgcctcattacaactttatgattcaataactacatagtttttactaatttttttggcggtgctgggaatagaagccagtatcccaagcatgctaggcaagcacactgtccttcacagcccagtgctacacatttaaattaatggaagcatttagagagctagagcaaagctgcacatctgtttgtcacataggctgtacacagagtatttgtgttacagagagaaacactcctaatggcagtgcagcagctcagattccaactgaaattacttacatgtggtaacattttcttcccaagttggtatctcatttctgggcagtgcaggtgatagcggcacatactcagtacccaggaagcccaccactgacctttgatttccgtttagcttccagacaactttgttctgcctttttaggtggcatcactgctaaatgctatttctgttttgaggctgtggtcttttattattgaccagtttatcccggtgtgtctgtgtactttcttaagtaccaaaaaaggtgatggagaaaagggggaaaagcttgtttttgctcaaattatgtgtattgttaaaaagcaatggaacatgacccacaagtctaagttaaatataatattttagtactaaacttggctgcaggtgcaggttggtatgcaccccacctccagaagtatttcctgtagtaaataagcagtctccttttgtttaacatgggcatctcctaaggaaatgtagcatgattgataccaactgcatgtgtaaatatatcatcctgacaaaccacagaatataaattatgtatcattcatgtagtgtctacagatttgtaatgggacaaaaagatgacatggtatttaataaaaacaaaataaaaatattcttcacacttcctgtccatgatcgtattctattgtgtgtattttcagacactgggagctgaactatacccctgtggtatcttagctaatcatgaaaagtcaaggagtgagtccattctcagcagcaggaccgtggttctcagcccctcccgcccccggccatgcaagcactcactaaggaccaaaatcaa

SEQ ID NO: 21129 - DNA, 1146 bp, Mus musculus
actgaaagtaacccagtcccaccactggaagaaagccttgcctggctacaaaagatggccagttcttaatccatatccttcatttccaggagtcttcactagatttaccctcaaaagtttgcactgcactaggtttgcacactgcctcccatatcccctgactctagctgtctctccttccacccacccagtcctccaccaccaccaccaccaccaccaccaccaccaccaccaccaccaccaccaccaccaccgctgccgctgcctgatcccttcttgccccagtccacctgcaaaatctattttaaatctccttctcagggaggtgcgtgcattctccctacattaaagggctcattccttaatgtgcagttatataactctaagtttctgctttgtgaattattgggacctttaagatttttttgtattcagtttttcctctatttggaggaaaattttaaatgacaaagcagttaacaggactagtttttttaaaaatccacatgtaagttttatcaggctgttaccactttactggtttttatctttgtgcttataaaattgatatttatgtccaacttgcatttttctgtcacaggctagcaagatggcccagctgataaaagtacttgtagcacaagccccagcacctgcattcaatcccaggacgcacacacacatacacatgaactgattaattagtttctggttttgacagcttcacagtaagtggtagctgaataatattttttttcagtaaatcttaataaaaaccctatgaataagaaatcattatcaacatagaaaattatgaattggtaagttattggatattatcaaaaaacctacatttacatttcttatatctatctctcttgtagatattaaagatgattcacttacattggctcttttaggtactgacactattttgttattttttttccatagaaatcagtgaatttccatctgaatgttgtagcgtgatggcaggaggtactctcactgggtggcatgctgatgttgctactgttatgtggcgcagaatgctgggcattttgggagatgtcaatgctattatggatcctgaaatacatgctcaagtttttgattacctctgtgaactttggcagaatctagcca

SEQ ID NO: 21130 - DNA, 1188 bp, Mus musculus
ctatgtcaaaattcttgttttgttataaatcagtcacaaagattatctttttaaaagacctttttttttaaagatgtatttatttattatatgtaagtacactgtagctatcttcagacaccccagaggagggcatcagatctcattacagttggttgtgagctaccatgtggttgctgggatttgaactcagaaccttcagaacggcagtcagtgctcttaaccgctgagccatctctccaggcctaaaagacctttttaatatttatagatagtatttaaaagatttctcaagtgctatggtttttgccttcattttcctcatttgagataaaatgacttctataacatttaaatattttgataatattgtcatactagaacatattagaacaaacactatatatcttactatcagaattatgtttatttatatttattgttttggggcgtggtcttagtctgtagctcattctgtcctcaaactcatgactattgctttagcatcctgagtattaggattacagacatgagctccttgtgtccaatgtcattttagacagtgtgaattacctcagtgcatttaaaaaacgcacataattctctaaaaccaatttgttcgtaagataactttgccaccaatttttatgcaaatgcacatacacaatgtcaaagcataactaaagttactttcaattagaaattatttttcttgtagaactcatacaagaggcaagcaaatcctcatttccctgaaaactgacttaatatgaagtccccatttgcaagtccccagtcaaagcttagaatactttctaagaaataaaaagaaaataattaaagactcataataattgctgacctactgaaggactgtagaagtctcttaacaaataaaaacttcataatccaatacttttcatgtttatttcagcataaacactttgtctaactttttgacagtttaatttataatagaattaaggtccatagagcacacatttagaagacattgaattaatctttaaataaaaacataacactgtgaaatgagatgattttatcagtttatatttgtaggaatttgagttattgtttgatttttgcatctgcaactcatggaagcagattgaaggcatggaggtatgtggaggagaaagaagagatagttatatgatagagttatga

SEQ ID NO: 21131 - DNA, 1773 bp, Mus musculus
tgctgcctgtgtttcttctgagcttttagaggggcaggtatcctgcctggtgtttatgatgcgcagtgccagagtgacaagtggctggcagtattgtcgtgctttctgcacatctgaacttttgaagattttactaagcattatctagaggcaaaactagatccttattctaattttattgctagagtggaatacatatagatacttcccttaactctaccatcccccaaattagcttttttttttaagtgtttttaacactttaaggccatttggtgcaatttagaaaatgttggcctcccttcccttagccatattcagaatgaacttggaagcctctggaactgtgcaggaaaccggagccctcagcccggaggcacagtgggctacagtgtgtacgcagggtacagccaaatgaagtgctctgctggtctcatgcactttaatttctgttacagtgtatttaagaggatgaggaagactcactcaacactcctcaaaggagtctctgcatgattccgttagttccttatgacttcacctctgcagacattccctgcaggtatactccacagttgccaaattgtaaccatctgactttcgaagttcagtatcagcaacattgtgctgctctgttctgtttctgatcacccttagcggctgtgcagactgtcccaatccagtagcatttggcagtgcttataaatatatatatatatatgatgtttgataagcatttttaatgagatttgtatttttaaatttagtatgtaataaaaagaagtgtttgagcgtcatttgtagtgttgtgtgttacttattcatactcaagttcagttgtttatacccagtcctcttgcttgtgctgacgtcagcaggccctctgtgctggggaagggcttctgctcggcttcccatacgtgcacctctatgaagcatatgtaggtgttcaagaagctaagttatatttaactaaaaacacacatgcagttgtgttatactttaataagtgtactctattttgaaattttaaccagaaaaaaatttaaagatttatttctcacacttaccatgaaaactttaatatctgtatatgtgccaggagccttggaccagcccatgtgtgctcctggttggtgggagctccctggagtctgggttagttgagactgctggttttcctgtgtggtcactttttgcttccgcttctgcttctttaattcttcccctaattcaaccattggaggaacttcaattcaaatggttggctgtaagtgtctgcatctgtctcagtcagttgcagatagtgcctctcagaggacagccatgccaggctcctgtctgtaagcacatcatagcatcagtaatagtgtcaggccttggtgccctccacccaccccctgcccatgagatggagatcaagttgggatggtcattggaccacttttccttcagtctcttctccatttttgtctctgcagttcttttagactggaacaattctgagacaggaattttgactgtgggttagtaacccagtccctctacttgaggccctgtctatctattggaggtgggacttgttgagtgccctctccccaatgttaggcattttgcctaagaccccagaagatggaaagatctcccatgctcatggataggattaacatagtgaaactgtctgccttaccaaaagcaatctacaggttcaatgcaatctccatcaaagttccaacacaactcttcaggcatggaaagagcaattctcaactt

SEQ ID NO: 21132 - DNA, 3138 bp, Mus musculus
tgtcggcggcggaggcaagcggtggcagtgacagcagtgaccactgagcagtaattgcccaagatgtcgaatatcaaaatcttcagcgggagctcgcaccaggacttatcccagaaaatagctgaccgcctgggcttggagctaggcaaggtggtgactaagaaattcagcaaccaggagacctgtgtggaaattggagaaagcgttcgtggagaggatgtctacattgttcagagtggatgtggtgagataaatgacaatctaatggagcttttgatcatgattaatgcttgcaagattgcttcagccagcagggttactgcagtcatcccatgcttcccttatgcccgccaagataagaaggataagagccgggctccaatctcagctaagcttgttgcaaatatgctatctgtagcaggtgcggatcatattatcaccatggatctacatgcatctcaaattcagggtttctttgatatcccggtggacaatttatatgcagagccagctgtcctaaagtggatacgggagaatatatctgagtggagaaactgtactattgtctcacctgatgctggtggagccaagagagtgacctccattgcagaccggttgaatgtggattttgctttgattcacaaggaacggaagaaggccaatgaagtagaccgcatggtactagtaggagatgtgaaggatcgtgtggctatacttgtggatgacatggctgacacttgcggtacaatttgtcatgctgctgacaaacttctctcagctggagctaccagagtttatgctatcttgacgcatggaatcttctctggccctgccatttctcgcatcaacaatgcatgctttgaagcagtagtagttaccaataccatacctcaggaagacaagatgaaacactgctccaaaatacaggtgattgacatctctatgatccttgcagaagccatcaggagaacccacaatggagaatctgtctcctacctgttcagccatgttcctttgtaatataacttctgaagcattttgaaaataaaaccaaacccaccccttgtttttcttggtattggtgagtttagcagaaaacccgacttgcttcagtatagctttttacatctcacattaactatatttgaatttattttaaattggagaaagacagattgttgttaactgctaggatgccctacctgcattgttggatcctggctttcttgtttattttgtgagccttgcagctttaagttgagctcagctcttgaaaggtgttaagagagtaatccacatggtccttaagacatgattgacaaagctcatgctccattgcatgtgaatgctttttttcattcagaataactagcaacaaagctagcccatgagtagtacgttttcagaggtctacagtaagaaccctgagcgtccttacacatagttcagtggttgagcatcctgtaaggcaggggtaggtaactcaatgcagtaattaatttttggaaggaaaaaaaaaagcctaatccattactgtctttttgactgtatagcttagattctctacacctattcctttccagttggctttatttacctttagctatcttgatactttcttggccaaatatcctggactcagtgatcattgtgacacaatgtggtgtaagacaaagtggcttcttgctatgtaactgctagcattcacactaggtaacctcccttagcctcctaccactgaggtggtgggtttagatggtgtcgtagtgcctttgattaacttaagtatttagctttcatcttccttagatctctttgtcctcccaattgaacacatttctgctaaacaatttggtcttatcttgtgtagaaaaaagttaataaaatgtctgtcatgtgtgaaaaaaaagattctgtaaagtttgtttgcttgttttgtcattgttagaataatacccaagaaaaacaaagatttattttgacttcagtgttttgggctccattcttggatggagataaaaccttgtgggagagcatgatagttccagtacagctgctaagttggggacagcaggaacccttcaaagactggcctgagtggcccattcctcagttcaagcccttcctctaagagtcctcaagattcattcacctttagaatggattatgtggcaactgagccttcaggggggacattttaaattcaaatcctggcagtattctaaagccaagtgggcagtaaagttcctagcaatttttattcagaagccattgcagtcgggggaaaaagcaaatgtagagtcaggctttttttccaaataaatcaaggacaaggaaagttagaggtcaggagtaggatcagagtcactggatgaaaacatcatccatgtagagggaatttgtgcttaaatctactgacaatcatggaggcaaaccagggtttatgagatttttcaagatgtgagaacctcaaaactctgtaagcaagattcttgttaaagctgagctaggcagagacaaacacagggctgaaggttgaaacctaatagagtagatgattctaagattaagtttggtttttatcattcatagtattagcttttctataacttgactcatctgggtcttactcttcagtttactaagagatgtggtgaagcgtccagctacagttatgtccttgtttgtcctctaagttgtacatttacaaatactcctgattgtgtgtttatgcacacactcctgtgttaggtgtcctttattgctctctatttttttgtagcagggttcttccctgactctaggcctcctgttggttcaggtaggtgcaggtcaacaaaactaaactgtcatcttgtctccatccaagagacaagaaggcttggattacaggcatgcacctggatgctccactttacgtggatgctggaatccaaactctggattcacgattgtttggcaggtgccctttccagcttcttttcaccagaagtgtttgatgtttataagttacagcttttcatattaggatcgtttatgtctggggagtgggtttgatgcttttatatacttttttagatttagattttatttttcattttactttatcttgtttacatccttttttcctactctgtc

SEQ ID NO: 21133 - DNA, 1129 bp, Mus musculus
gataggaatttttggtgtgaactggaactaatttgttgtggatgttttcttctcttattaaagtaaacaagcaaactttcttattttgagtagctgaaaggcataccacttaacttaggtacaaaataaaataagaagataaataatgatgtgcctcttattcacattctctcatcttagatcagacagtgttgtggtagttggatatgcttccgcagcaaactctcacttgttatcttgatcctaaagttcacagcattaatcttagattacttaaagttctatcacacagagatgttaaagcctattctcttggataattatcttattgaattttattttacctttgtaaaagaaaagtggcctaattaaaacttataccatgcagacatgcctttttattgccttaaatttcataagaaatacagatgtggcctttttgtatttcttttaaaatatgatcttaattaagatataattagattactttcccatttctgttttattccaccaactcctttcatgtattcccactcacactctctcaaacttatggcctctttttctttatagttgtcacacatccccacacaccacacacacacacacacatgtatatatgtgtgtgaagatatgaaatacatgatgaaggtgcttataagcatcttcaagttttgttaagcaggtgaagtgaaccttgatgaaaagaatggcctgagtctgtatccctagaagcagcaaagtttagggcttttatttatatctgtgcattatagagccaggcagctggctggaaaacagtttgaggaaaactgtgcctgcaatgaaaaggtacagaatatctttcaagttattctctgaagaaaggtgactatttgtatagcattatgcattacaatcagccttaaaggactgggaaggtgtggctgtaggttatgtgcactctatgccactttgtttaagaaacttgagtaccttacctacaggctttggtatcgatgggacgtcatagaaccaatatcctctttcatattaaagaagttgtaagtctcttacatatagtaatttggaatagcattatatattcccaagtatttcttacactgatttgagttgttctttcacagaa

SEQ ID NO: 21134 - DNA, 1103 bp, Mus musculus
ttgtgttcttactgggagagcctgaaaagccctgagctgaggtgagagcagtgctcacctgcttacccttgtgtcacgagctatttcagttggcaatatttctacgcagactgttcagtaattgatgttgaaagctataaaagaaattctaccctagtgcttgccgtggactgaattgcagattgcataatttcaatttttttcttttttttttcctggcaagactattttagttcagcaggtgttcaggtgatgaagtgtacactagatgcaatgcagaaacatacaggatcctgaacaaataaacagaactctactggctaactgaagagaaaggtactgcatgtagagaaatgtttgtgactgaaatgtagacgagaatatgttgtcatctggggaactgtttgtttcttgagtttaagtaagactttacttttctctgtgtgttcatattcttaggtggcaccacagagcttagtggaaggaatgtttcctgacatgagagaagacaataggctttgttgggaacctacatactaagaattcattctaccactaagctacactcccagcctaggaaccaatgctctggctgatacttcacacacacacacacacacacacacacacacacacacactattcttttcttgaggaaattaatctcaaggataggtgctatggttagaaagaagttcattaatagacactcactgataatcattgtcagaacacagtacccccacagctcatgtctccagctgcatatatagcagaggttggcctagtcagtcatcaatgggaggagaggcccttggtcttgcaaatatcatatgccccagtagaggggagtgccagggccaggaagcaggagtgggtgggttggggagcagggggagggggaagggtataggggattttcagcgaggaaactaggaaaggggatagcatttgaaatgtaaaggaagaaaatattctaataataatttaaaaaggaaaaatatggagtcctgggaggagttttctcaatgcttgtgagaaaactcgaaagaaagaaagaaagaaagaaagaaagaaagaaagaaagaaagaaagaaagaaag

SEQ ID NO: 21135 - DNA, 1444 bp, Mus musculus
aagtcttgtatgatttaattatgtttaatgagttagaatggtttgctttgtattacagataccacttatttgtatactgcagacagctctagagtggcactgggcatcctccctgacctgttaggggttatttaataagagccaggaacaaatcaatagtgatgatatatggctagtttgctttttttgtgaagtaattttctggttttctttttagcatacattgtatatgccattctgtattttgttaaattggatttattttatggcttaagaattatttgactttatagtagcaattttttgttaaggtaatttaatatttttggttatttaaaaaaattatttagagctaaaaaatttgagtgaggtaataaacccacagcagacattaaatgtgaaattcccacagagagcccaactcacattactaactagagtaattttttaaagaaggacgttctcactactaaccatatctttttttttgttttatcatttattgtttcccttcttagataatttcccattgtgttcttcagtattttaacactattctaggagttttcacttcactctttgtttctgtttccttgtgaatttatgaatttgtggttcttactgagacagtattaatataatgtttaattatgtcatgtggagatggttctgtttgatttattgattagtatcattcacttttaccttttaaagtttacttgtagcaagtgtttacattgctgagcagataagtctgacaatgaaatgtatgtatcaagtgctgcacatgtaagggtgctctggtgggcgcagcagtggggactgactgcacccgcatgaacacaatcagacgacggcgaagcagaaacgtaaattgttattatactcaactatctaaataaattactttgttctgttttatttgaattgaactgtgctaggccaaaatgccaataaaatatacctttctctgttttcttagttattttaaaatctagtaaaagcctgggaaacatcatgtaaaataagagtgctttttttgttttttttgtttttgccagggcttcattacgttactctggctgtcctggagctcattagtagaccagggtgacctcatgctcacagagatctgcatccctccctggtggtgggattaaaggcatgcatcaccacactgggcctacattttttgattggcacacagctgtacaaatgtattagtacaatgtgataattcaatacctgttcatagaaatggtcagattaccttaattagtgttttcatttcttctaaacaacattgctttgtgttggaaactttcagacctttctctcttaattcttataaaaatatgcaataaattgttgtaaactgccatcagtcagctatgctgaagaacactggaactttgttcagttaatctttggtgcctgctatata

SEQ ID NO: 21136 - DNA, 1228 bp, Mus musculus
gatgcagctgtgttctactgtggctggcactagacgttatatatttttatactcaatttatattatgttaggttttttgtttattcgtttgcattgtttttttgagacagggtttctctgtgtagctctggctgtcctggaacttcagatttgccttaaatttagatattcatctgtctctgtctcccaattgtctgggattaaaggtgtgcttccctatgcacagcatagttagatttttgtttgtttgagacagagtttctcagtgtagccctgactgtcctgaaactcactctgtagaccaagttgggcttgaactcacagagatccgcctgcctctgcctcttgagtgctgggatcagaggtgtgcacattcccctcctgctatgttttctataatggtggatattatctaatttgagaggaaattattattttgctttattagattagtgttgggtgtacaagtgcatcataaatttcaaattttgacttaaaacacttggaaggcctattgttaattacatgtatattacaaaaccattggttttgaattttcattaaacatatcttattggcatttcattgatggcttactatgtagtcggcatgatggtaggaaattgtaaagatgtgattgggtctctaaggtggaggtcttgttatagggaaacttaattttgagagattaaattgaaagactccgagaggagcccctctctcaggcctcgggacaatagcggacacccaagaactcaggagagaccaagcttgatgtaaaccacacgaggctttatttggggaaagccagagctctggggacgactcatatcccacgcaggggtagaggagtcgaccacgaggggaaagaggtcccagtttttatagtccctcaggggggaaaggagaagggggagagtaggggatttccagatctaaacaatgtctattctcaagaaatgggtatgggaggggtacaaggaaagagtctggtgcaggtgtagcaactccggattagcccgactgtggttgctggggagattttccgactctttcccagcaaccaatatcacaaacacctggcaatgggcttcatcagtgggcacacacatgggttcaaggaacggtcaaaacattggcagacacacgggttcaaggagtggccagagcattgtgcacctctatttttctaaatcagtaaagctagttctgctaacactgacatcta

SEQ ID NO: 21137 - DNA, 1275 bp, Mus musculus
ttcccagtggtctaccaaagacttctgtgatggatgctaaaaaaaaggcaaggctctgattggtccaaattagtactaaagacacaagatagcaaatgaggccaacacagcttccatggctgtgattgattgctctaaacacacctttctctgactgtataagctgattacataggctcactaagtaaatcaagaggaagactcctgtgatgcctgtaacattgtgtgctgtactgcaagtcagaccaagaaaatgtttctccctaggcggggcgtgcgtagccacgcccctcgaaagagggcgagacatgcaaattaaactggatattagcatgtgggaacgccgggagagctggggtcctggaaattgtagctgaagctgtgggtgctggagagggagtggagtgtggaggacgcagacacggatgggaacaggaaggaaccgcggggaagacaggaaatgagggttgcgtgaggtcaccacaatgtcaatgtgtcgcctggacacaggtcatggctgtgtgggcgagggtggggtatcgcttctcggccttttggctaagatcaagtgtagtatctgttcttatcagtttaatatctgatatgtcctctatctgaggacaatatattaaatggatttttgggaataggagttggaataggagcttgctccgtccactccacgtatcaacctggtattgcagtacttccaggaatggtacaccccctcgggggaaaagtacttgtcaaataaaagacttcgaacttgaaagggagagaagggatacttagtgtgttcttaccaggaaactctccatgactttatcaaatctcaagtgggcttgtaagaccgtgtcaaaaaagagccaaaagtctcagcgaacctgggctgagagtgctagtttatcttacaggctaaggaatctcaagttctaggcctacagaaaagcctgttacttagccctgcctttagtaagcttgtgatgtcagctgcagccaaaaagtgaaaaatcctctatttcaacaaatcagtagcagaaaacaacctggttgaaaacgcctacaaccgcatagatgttcctccaaaggaggaatacaaatgaccaaatgaatatgaaaacatgctcaacactgcacaggaaaatgcaaacaaaagcatagaatatacttcatagcacctaggatggccagtatatgacagatcgacatgtgtgtatatgtatgtgtgtgcacaatatctcaaatagagtcaacgtccccgagacctgcatgggg

SEQ ID NO: 21138 - DNA, 1149 bp, Mus musculus
caatgatgtagaagtagaggaggcaggagaggaagaggagaaggaagcaggtatagttcatagtgatgcagagaaagaacaggaggaggaggaacaaaagcaggaaatggaggttaagactgaggaggaggctgaggtaagagaaggtgagaagcagcaggatagtcagccagaagaagtgatggatgtgctagagatggtggaaagtgtcaaacacgtaattgctgagcaggaagtaatggaaactaaccaagttgaaagtatagagccttcagaaaatgaaactagcaaagaattggagccagagatggaatttgatgttgagccagataaagaatgtaaatctctttctcctggaaaagagaatattaattctcaggaagtggaaaaggagtctgaggagaaagaggaaaaagaagagaaagaacctgagccccaacctgagcctgtggctcagcctcagcccccacctcagcccctgccccagagccagccccattctcagccccactcccagccccagcctgtactccagtcccagcctctctgtcagcctgagactttgccattagctgttttgcagcctccacctcaggttattcaggagcaagggaatctactacctgagcggaaggattttcctctagagtctataaaactccctgaggtgtctgtagagccagtcttgacagtacattcagaaaacaaaagcaagaataagactaggagcaggagcagggggcgagcaaggaataaaacaagcaagagtagaagtcggagcagcagcagcagtagttccagtagcagctctactagtagcagcagcgggagcagctccagcagtggcagcagcagtagtcgaagcagctccagcagcagctccagcacgagtgggagcagcagcagagacagcagcagcagcactagcagtagcagtgagagtaggagtcgcagtaggggccgaggacataaccgagataggaagcacagaaggagcgtggaccggaagcgaagggatacttcaggactagaaagaagtcacaagtcttcaaaaggtggtagtagtagagatacaaaaggatcaaaggataagagttcccgccctgacagaaaaaggtctatatcagagagtagtcgatcaggcaaaag

SEQ ID NO: 21139 - DNA, 1515 bp, Mus musculus
tgcatgttgtaaaaattctttttggagaatacagactgtttgtttaccagacattcttgtactttttgcataattttgtaagagttatttatcaaaattatgtgaggttccaaaatatgtaaaaatgataataataaaaaaagattaacatcctttgtcatcttttttaactaccctattactgttcagtcagaatccgtatattttaataggtaaatctttaaattgttccttatgttctgtatcatacattgcttttgtagaaataaatatgcatctttcattatttttgggatgtccttgttgacacttgtataataaatatctttatatcattttcagtttttgtcacaagatactgaacatgattaggatgtttttgaaggtttcatcactttgatttgcctgaaaacagttgccaggtttttacagctttgacagggaatagttcttttaaaacatttatttcctatcttacagtttttaatctaagcatttttctgtttttcattaaaaccattcagttggtagataacttcaaccgtacgatttggttgtcatttcacgattatagaacaacattctcttgtcctctcagctccttgtgtgataacaacttagagtgtaatctgttatagttatcacctcccgggtggtgggggtcgggtaaaaatctcttctaaacttggtttttgaatctgtggtcttgtcttttctgttggctataactgaaacatgccaatctgtgttttcaagaatttttgtttaaggaagtattgtatggaagtttacacaatgaaggaagttcatctagacttgaatatgtaaacaagataacacacaagtgtaccaagtgattattaactttgttgtttataaatttgtatggacctggagtatctgttgcccattactatatatgtgcaaataaatgtgacttagacttgtgactgtttaaaattagtacttgtattaaagttttgatgcatatgagagcatttaaatgacagtggctattttaacattgtagttttagcctgatattaaatattcagtatattgtctataagtaaatggtttcagtgaaaaatgaacaaatatcttcatttagttttgtgtctgaaccactcatgtgttaaagcaaatgtgaaaaagaattatttttaaaaatccttttcttggattaagtgaaccacttacatccaaaagcatgctgatgccaagacgggcttaaccaacggcttgtacttggcaaaatgctttggccttgtgctatgcaatgagacagattggtaaaggactgactagattagaaatgacaggagccctcccctagcacatagtgggagggggactccaagaaaggagtactcaataacatgttttacttaaatgttttgtctgtgggcgtgtgcaggcaggcaccaaggcagccagaagacattatatccctcagagtgagagtgaggcattgttcattgtggaggctgaggaacaaacaggtcctcctaagat

SEQ ID NO: 21140 - DNA, 1628 bp, Mus musculus
tgcaacacatgggttcttctcttctgattttcacaacagtgtcctgctgctgtgtagttcaggttggcctggaatctgctctcctgcctcacactccagcctgagttgaatagctgccggcctgtgccccatgttcagactgtttgcttgctttgcttgtttatttttaataagaaggcttgtatggcgctggagagatggttcagggttaagagcaggcactgtttttgaacctgtgtcaggcagcttcgtgcctcacaaccacctttaactccagcttcggcaggatccagtttctctggcctctgtaggcacacgtactggagtgcttatacacttccccagccctgttctacacacatgtacacataatcacaaataataagagtgaatcttgcttcttcttcttcgggaaaacaccaaatggcggatgacgccggtgcagcgggagggcccggaggacccgggggcccaggattaggaggccgcggcggcttccgtggaggattcggcagcggtcttaggggccgtggtcgtggccgaggccgtggccgtggtcgaggccgcggggctcgtggaggtaaagctgaagacaaggagtggatccctgtcaccaagctgggccgtctggttaaggacatgaagatcaagtccttggaggagatctacctgttctccctgcccattaaggagtctgagatcattgatttcttcctgggtgcgtccctaaaggatgaggttctgaaaatcatgccagtgcagaagcagactcgggctggccagcggaccaggttcaaggctttagtcgctattggggactacaatggtcacgttggtcttggtgttaagtgctccaaggaggttgccactgccatccgaggggctatcatcttggccaagctttccatcgtccctgtgcggagaggctactgggggaacaagattggcaagccccacactgttccatgcaaggtgacaggccgctgtggctctgtgctggtgcgtctcatccccgcccccagaggcactggcattgtctctgctcctgtgcccaagaagctcctgatgatggccagtatagatgactgctacacttcagccagaggctgcactgccaccctgggcaactttgctaaggccacctcttatgccatctccaagacttacagctacctgacccccgacctctggaaagagactgtcttcaccaagtctccttatcaggaattcacggatcatcttgtgaaaacccacaccagagtctctgttcagaggacccaggctccagctgtggctaccacataagggtttttatatgagaaaaataaaagaattaagtctgctgataaaaaaaaaaaaaagagtgaatctttaaaaaacaaacaccaaaaaaccccagctaggtttgtatgtaataacatagttgactagtgttatcttgtagatagtggtttgcttcagtacttaaataagggcaccctctacttgatccaattaattcccagtaccttctattctcaaagactatgtatgctgagaagccagcaagcacatcttggagccccgcttcagccctcactggagcctatgtgtcctccgttgtttttcttttcttctcttttcttctc

SEQ ID NO: 21141 - DNA, 1232 bp, Mus musculus
tttttttttttttcctttatttcattttgtggttctcttgttgggtaaaatatgacctttatcttaagaatgagctagcttttgcggtcatcctttttcttagtaacagtttttgtcttaaagttttttgttttttttttttaaatcagatatcacagttgtcacgccacttgtttttgaccagttagaatctggggccactgagggaggaagttttttgagctcacccaggaagaggcgaactatgtaatcagctgcaagccttgagctgcatggtgtgcaagagtgtttcaggagcagtgtgaagcggtctccgttatacagtcggttacagtcctagtccgtggggagggatgatggcaatacttgccttctcttgagtatctgtcctcgggatcctagaggcagatgctgttaccattgcttgggggtatgagaccacatttttctgcagtgctgtctgaagtaaagaagagagacagagtaggataaagacttttcaccctttcctgtgcccttttaaggttgacactgtactttaagaggctaacacagaagggtaaaggaactctccatcaaacccagagaagaggctccacacctcctctctggatcctgtctggagtcacagctgaaaaaaagaaggataaagatacagggattaaaaaaagacataatattacatgctttttgtaacattatgttaataaactagatagcaacttggaggaagtctgtgtagacacaatagctaaaaatagattttaaaaagagtaactattagaggggttgtgtgtgtgtgtgtgtgtgtgtgtttgtcaggctcccagaggaagatggctgtggagggtctacctggtctgtgctgacggctgaagagaatcaagcctgatcatttcttgagttctttctcaaagagccttaagtggtatggcgtagaagagcctttcagaaggaatgtagtgaggcctatactgtaaggggctttaagggggtgggggaaagagatggtgggaacagctgtttctactgattatctggccttgtgatcaaacctgcattattttaactcaaggagagataggagggaaggattcaaatctcacagtcaaagctccatccgttgttttatgactactctccctgttcccacccagcaaactgcagagctgtgtgtctccctgtagagaaattttttgtcaaacccaatgtattgcaggatttttttgttt

SEQ ID NO: 21142 - DNA, 1144 bp, Mus musculus
ttctaggcctagatatgattgtacagaggctagaagcttccaggactaggcctatgttagcagacggagggagtaagactcggagatgacagttatatcaggcaaatgaaagccacttttccctccatgcgtatagataaaataggagtttggagtcaagaaacacccgccactcccctcctccggtcactgactgataatcttttcttggcattctccgtatccttgtaccttcctgagttaagctctgagcaacctcttcataattccttgtttcaccacactgttgctcttcacccagtgagagcaattgtaagttgccagaagaaagtggtcagaggcagaaatacctcgtattagatggtagcctgcttcatattcatagagctgacctcagccgcctgtacctgtctttgtaatagtaatagtactgtggaagatacttggttatgggcttatctccctttgtcttgaaggttgtggcagcattgcctgaagatatgagagcagactttaatcccagtggtttttcgttggaattggcagtatgtgtgctttccgttggactgcttgccgtggtcttgtttctgtggcgaggcttccgatcagtaagtaaccactgcatgctaggagagttttcactctgggtgttttcaagctttttttttttaaggtttattttatgtgtatgaatgttttgcctgcatatgtgtatctgtatcacatgtgtgcctggtacacacggaggtgacaagaggccattggatcccctgagactacagttacagatggctgtgactactgtgggtgttgggagttgaaccctggacctctacaagagtaacatgtgctcttaagcaccgaaccatgtctccagccctcattttgtctttagactaaatagcgcattgagaaacttaattgttatttcagagaaataagttagaccatagtgttctgggtaatatgtggttattagaaactgaatatagattcagagaaatgtttttatttgtaaggactcttaaaggattctttgtaggggtagtacacactagtaccaaaaccccacccttcttccttctccttcctcttcctcctcctccccctccccctgctcctccccttcatcaggcagatgtat

SEQ ID NO: 21143 - DNA, 1120 bp, Mus musculus
ctttagaatatttgaaatcaatgaagagcgactcaagggagcaataaaagatgccttgaatgaaaattctcagcttcaggaaagccagaaacaggtgtgtagccttttagatgctgactatagattttgaatgttctgggcaaactcacaactgatcaatggagttacattcacgaggggcattcgctgaagagctcaaggacaggacagggcagtttcccatgcatactttgtatctctggtaaagggttgaaaagtatttctttctgtctttgtcttcccccatgaaagaaataagccaaggcagtgagcattctgataaccgcaggaaacagcagttaacaccaaccctcagtagagaatactagtaagagttaatgtattaccagtttggggcctaaaggaaggaggagttctggggcacataaggtgaaaatttaactttcattcttaccgcccccgccctcaggcactcctacagctatccctctgttctgttctcccaaaaccatttttggcatggaaattttgtcttgtcttgtctgtctgtctccctcacctatctttctctcgctctctgtctccctccctccctccctcccttcctttcttcttatttatttatttatttttattttatgtgcactggtgttttgcctgcatgtatgtctgtgcaagggtccaaaccaatcacttggagctggattacagacagctgttagctgccatgtggttgctgggatttgaactcaggacctctggaagagcagccagtgctcttaactgctgagcatctctcccccagccccctcccttcctttctgtctcttgtttactctttcccttccttcctttctattgatatgcatatggtgtgtatgtgtgtgtgttttgtgagattgtgttatgccttggtgttggtccttgccttcgccttgtttgagacagagtctctgtcctttttcttttgtgtatgtcttggtagctagtctgcaagcttgtagggattcacctgtctgccttccatctctccgtaggaacacgaggattataggtattgagctatccctctggactttatgtgagttctggggaattgaactcaggtctcgatgcttga

SEQ ID NO: 21144 - DNA, 1175 bp, Mus musculus
attctaccagaagttttttttttttttttttttttttaattgatgagaaaagttttcactatcctgggttttttgtcatccccgatgaatttgcaaattgccctttctaactctatgaagaattgagtgggaaaagttttccttttctaaaagatttttgtttgtgtagtatgtgtttgtgtgtggctgcatgtgcacacatgcccatggagtccaagagcaagcatcaggtatcagattgtctggatcaggagttagatcacagctgtgtctgcctgatgtgagtgctaggaaccaggtttaggtcttctggaagagcataaagcactcttaaccactaaaccacatgaacagccctgcaaactacttctttcttcataattctaagggctagagaaagtggtcacaacaaagaattatagtgatgtaatatcatctctcctgttattccttttgaaaacaaagtaggttgagaaatataagtgccaaggctagagtcacatcctgacatggtacttgtcctggtgtgctagagttctcgaggagaatctgctggtcttgatttattggtaggggccttcagtgtcccttctagtgcccagatcagaaacatggcaagaaaattgagaaatataagtttcttgtaaggagatgtgacctcagtgaccttgctattttgttttactgcccaattcatgactgtacatatcaagactgacagcatttgcagggcattcattacttaaaattttcttagcaagaataaaaatttacctagatagtaaatttctccttcttttactgaaaaataatttgttctacaataagagtatatttttaaaattgagtaaggccataaattgcatacaagctttgatcaaagattatatttctctgagttgatgagctaaatggtcatttatagagctagcattattaagctatttaacgtatcaatattatctaaatgaacatgataaaattgctcacgtgctcaaaaccctttagttcacttttttataacattggtaacatttcaatatgtcaagcttatgtcacttataaatgtcagccacgaggtgtttgaataatgctttgaaaatattttgaacagctatgctagagcaaaaccattatatgtatattttatatgaagaataaaaatggcatatgta

SEQ ID NO: 21145 - DNA, 1099 bp, Mus musculus
tatatatatatatatatatatatatatatatatatatatatatttcaaaaagtgagggggaaaaagaataaatatacaatcactaccaagtcctcctttttatttaacattttcttgagaaaaatttcaaaatttggggtcaggaatgtccaataatttctatcatattctcatcactcattcaatattgtgctatctagatgttattcaatattagaaacacgaatgcatacttcaacaaagtgggaaatacgtccacagggctgaatataaaactaataggctttaacttattaaaaagagaagagtagaggggctcatgtctaggtggcagtggatatgccccaactcaactgagtgggctatcactattgctgactttctgcaatccatcattgactgtgtcaaacagatctgtggtggtcatgatggagacccccaaccccgaaagaatgtgaacattcagtactggccaaagccctctagttctccagtaatctttgcaggtggtcaggacaggttcacagaacaagcagtgatagtgagagctttcccaacaccacctctagaggtggtcccttcaggtcagggaccttgaatccagctctccagagttgaaaggctattaggcagatttggatgcatttgctcaaactacttctcataaactcgtcattccaaatgatttgattggctgcataatcaggctttagggagccaaaatcaatgagatctgtcaaatttctagggcacagatcaaaatcgcaaactcaaaggaaggatctactgatcatcaggttaccatcactagatctgctgctagtattagcctggctcagtatgtaatcaatgtcaggctttcctcagacacaggtggcatgaggagcagctagaacagtccggatttatccacagttcctttctgatgctcaccaccaccccatgacccatctgtgtagtttctgaagagtcagcaagtcccagttttaaatagtttgtaaattttcactttctacacactatatcatccaatcatgatttttttaatttaagtgttttaattcctttctatgttcagcagttatgctgatatattcat

SEQ ID NO: 21146 - DNA, 1109 bp, Mus musculus
ggacctgggttcctttcctaactctacccatacccacacaaaatctacttgatgtctgatttattaagaaactaaagctaaaacatctgagtttggaagaaagttgctagctcgatgttaatattttatgtttcttttctttacaaaacagcaatatggcgggctgctgccccaccccctggaagctccacaccttgcctccaaccttgagtcacctttcagagtttcccaggaagaattgaggtgggctgcaagccccgaggctctgcctctcctgggttctgcccattgcccggtcttgtccagaggcaaagaaaatagagaatgccttccagtctcacgatgccccataattccgtgagaagagaggatgaccacctacccggatatggaggcctaggaatcatggttatggaagctgctatagatgatgatgctttgggacaggagttcagtgtccctggaaaaaaaagaagaagtagtacaagctgggtggacataacccaggattttgaagatgcctgtcaagaactgaagttgggagaactgcttcatgacaagctgttttgtctttttgaatccatgtctgctattgaaatgatgaatcccaggatgtttgccgggatgatcagaaaccaagcgaatagaaaggttctcaattttgaacaagctatcaagggtggcgccattaaaattaaagacttcagcttgactgaactgctaggaataatggatacctgtttttgctgtttgatcacatggctcaaaggccattctttgacacagacaatgtttacatgcctttacattcataatctggacttcatagaagaaagatcctgccatgaaagcttttgctctgggaatcttgaagatctccgacattgcaagggaaaaactaaataaagctgctgttttgaagaggaagattttcagtcaatgacatggattaaaaatggtcaagagtgtgacagatcttacagatctgacagagttacaggaatgctaaaagatgtggaagatatatcatcttcagtacttgaagtcaacaaggagaagagagatccagaggttgaactagaaaccttacaattatgatgggctttgat

SEQ ID NO: 21147 - DNA, 1818 bp, Mus musculus
ccttccagattgacggacattggatgcactatgatggcctcagaaatgtgaatttaattttgttaaataaacccccagagtttctcctcttgtcatcattggtttatattcgagcaacagagaaataaatatagactgatgctgaattaaattgttctcccgcctgcccatgctcccagatgaagggcttttgttctgtatatacttggtatccaaggaaacagttgaactatactagtttcagagatgtatttttcattgttttgccccaggtaaatgttttatatggatgatctatgcaaaaaatgtatttttaaagtattttctgggttatttttatacaagcatatgttatgttcaataaaatgtatctcgtggcctttgtactttttatttatataaatacctcaacagttttttacacttctatccttaaatccaagaaaatactttgttatttgaattctagatttccctttttagatacctgagtaacacctagcataaagtcagtattctggttacctgactgtatttctttgccttaccttcaagtgcactgcattggatttagtaggatttgaatggatggcttatggatggcttagtttaccaattgcttagttcgttttaccccttgctaatttccttaaggcaatttttaaaactatatatatattatatatataatatatatatattgtagattaaaccatttttttgtagtagcaagttactatagctgtttgccaaagtgtaaacccaccagcacatttcaggcattagctaagcttcaactttagttaaggtaagcattacaaataaattatgtaaatatctcatcattaaattaatgaaaattctccagtaaattattttgcaaacaaggcaactatcaaaaatattaggccactggatgtttattagtgttggactaacattaaaaaatgtattatatatttaagagggaaatagggtacctagtaatacttccagatcagtgttttagtggggcagagaaaaagatatatttttaaaaatgaataatatctggttcccttgaaacagcttactaatgtcaggaggcttgcgtttgagccacgggtgcaaagtcaaaccatttaaccgaatttcatgttttgttataaataacctaatgtcactcatctttttgcaatttaaagggaaaatatttttagggagaatacttggtgaactctcattagtgttagtgtttacagcgaaataccattgcttatgtttggcgttgagactgggtgcaggatatctgaagactacatgaccacagacttcactgccgaataccaaattgctatggtttcattctaaatcttccaatgctgtggtgcctggagacaacttgctcaaaggatgggcagctgagggtgaaaccttgctaacatctcactttcagtcaatattaggaaaaatatttttatcagaagataagaatggtagtatttttgtaaatcacccagggtttatttaaatagttccccaaatatggttattggaatttgatttatagcaggcttttctagtaacatgtattgcatgaatcaaactatacagaacacaaatattagtgtatccatacaaaatggtatggttatattatagactaagttattcttaatacagattcttcagggagttgcactttatttaggatattagtttattgtaatgacttacctacctcacagggttgttgtgagggttaagatgttaaatttttgactaccttgaacatgctaataaaacatatttctacctcttgtgtatagatagtctccc

SEQ ID NO: 21148 - DNA, 1202 bp, Mus musculus
ctttctttgtaacgtaaagtgacatgaagactcagttttgttgggtactttgaactgactaatagcttgctcttgattatatagtgaattaataattaaacaagggaaaaaaaaaaaggaaagacctaagcaattaaatcgtgcacttttcttcactgagactgggaaagtttttatgttcctacatgtagaaaaaccttgctgcattttagttttattttcaatcattttagctcttctttcttgatctgtatttgatttactgggatgagagaagttcagactctggagtgtatcgtatgactggacaaaatgtggattgtgattgttggatgtaaatttgtatgcttcacatggtgtgtgtgtttgatttttaaaaagggctgcttttacttcgggtacttttaaggattgtaaataacaagtcaatcatcacagtgctctttctgctgaatgattttagggctaatagtatggtaaggttgcaaaacagtggttttcgtatcatatttggggccctgctttaagatattacatatttattgtttatgctttttctgtataagctggttgaactttgttactcatctatgctttggtaagcagggatagaaaactaatcatgtctgactcagttctttagtgctacacagcaggcttctgatagtggatgtaaatatatttgaaagatgtttagtctcaccctcgatgcagtgttttctttgataggttcttaattttagttttttttaaggtcttcattttgttttcagtgttcaaatataaaaatggtgctaactgtaggatgtataacgaagctataaccgatgttatttgggtgtccaatgtgagatgcatgatacactttgattagcgttttcattgttacttgtgcttgtgttaatgattacattagtgttaacatcagaactatctgaatggcttgagttatacttcccatggcttttgaatggtgacttagagatgatgctttttccccttcttgttttagagattacatgtccttcagcacagaaatatatgcaccaaacccagcgtgctaggcaggtgtgcatcactttcttcatctcttaggtaaccgaatacttttaacttattgaggaagactggaacttgatgtttacttgaataaatggttctaaatttggttctgctttgtttaaagaaacaatctttcaaaa

SEQ ID NO: 21149 - DNA, 1848 bp, Mus musculus
ctcttcctctgcagctcggggcttggagaggaactggaaggctgggcttcatccagccctcccaagacggcaatggttccctccagctctcgctacctgacgaccctccatggcggccgcgccttccgagctgctcccgctgccgcctcctgcgacccctggttcctatcgcctcctgagccgctgtcgtccttacgccccagggactgatggtcgtcgatccgggggcaccatgagaggcgagaaaaactattactgccgtggggctgccggggatcatggctcctgccccgcgacgccgtcgcctctggcctcgaccctcctgttaccggcggaggctgtttcaactagctggtccgggcctggaagtgggctctcgggcggagatgaggaggagactcggcttcttcaactcctgcgcaccgcaccggatccttccgaggcgttccaggctttgcaggctgccttgccgcggcgaggcggccggcttggctttccccgccgcaaggaagccttatatcgggcgctgggccgagtgcttgtggaaggcggcagtgaggagaagaggctctgcttgcagcttctctcggacgttcttcggggtcagggcgaggcgggtcagctggaagaggccttcagtttagcgcttttgcctcagctcgttgtctcgttacgagaagataaccctgccctacggaaagatgcgctgcagatcctgcatatttgtcttaggcgtagttctgggcaggtcctgcgaactctcatccaaggcctggaaagtccagatgcccggcttagagcttccactgcgctgttgctccctatcttgttcactcctgaggatttgttgcagggtttggatctcactgaagtaataatatctctggcccgaaagcttggcgatcaggagatggaagaagaatccgagacagccttctcttcacttcaacaaattggagaacgacttggtcaagagaggtttcactcctacatctcgcgtttgccttctgcactgaggaggcactacaatcgccgcctggagtcccagtatggaagtcaggttccttattatttggagctagaagcctccgggttttctgaagatgctgccccgtgtgtagtgaatctttccagtagcaatcttaaatttgagattattccccaggaactccatgcaagactgttggatcaggaagattataaaaacaggactcaggctgttgaagaactaaagcagttgctgggaaaatttaacccaagttcgacccctcatgctagtctcgttggtttcattagcttattgtataacttgctagacgattccaatttcaaagtggtccatggcacacttcaagttctccatttgctggtcattcgcctgggagagcaggtgcaacagttcttgggaccagttatagcggcttctgtgaaagtgctggcagacaacaagttggtgatcaagcaggagtacatgaaaatcttcctaaagctaatgaaagaagtgggtcctcagcgggtgctttctttgctcctggaaaaccttaaacataagcattccagagtacgggaggaagtagtgaacatttgcatctgttccctcctgacctaccccagtgaggattttgacttacccaaactgtcctttgatcttgctccagctcttgtggatagcaaacgcagggtacgccaggcagctttagaggcctttgctgttttggcatcatcaatgggctcaggtaaaaccaatgttctttttaaagctgtagatactgttgaattgcaggataatggcgatggggtgatgaatgccgtgcaggcccgattggccagaaaaactcttccacggct

SEQ ID NO: 21150 - DNA, 1168 bp, Mus musculus
ctgcaattgtggataacaacctgaattccaagaatccaggcatctatgctgcagccacaaatgttgttcacgcactgagtcaacatgtaggtaaggaatcctaaattggtactcacatttttttgatgtcactttcatgctttctgaacccatgtatttttatatgttgaaataagtaatatttttcatttaatagcatttaatagtgtatctgaaactttttcataaattatttaagtgatgaaatatttaaattgattatctttttcattggatgttcgtttttttaacctcatattcatgagattaaaatggattatagatttaaatataaaatattacatgcttttggggcataacatggaaattatgtcatggcattataatgtaataaagctttagaatcattttgaaagaatgatctatgcattcagtaaactggatttctgtaacttaattgttgcatgaacctctttttttttttttccttaagacagggttttttggctgtcctggaatttactctgtagacaatgctggccctgaactcccgactgcctctgcctcctgagtgcaccatactacctgacttgatattttcctataattatatgagatgtaacctttcattgcgaaaggcttgtcagtcctacctttataacttcttgtgaatcttttgaaatgtgagtttggaaggagaaaagtgaagagagaaatgatgtagttataataaaaaaaaatacttttctaaaaatatcattaaatgtaaaaacttctccataaaaacaattttcttgttttattataaagccaccatcatttgaaactaagctgttcagatgccctgcagtagcttcttcagtgtcttatggatacttttgtttcatctttacctgttacagaaaactctaagtagggattaagtatgtgggcttcttaagttattacatctgcagtgttgagattgtttttcctattattgctgttattcagaattattgagatctcgttcttagacatgattcttgttcttttttttttttttattttagacaattacttgcttctacagccattttgcacaaaagctcagtttctaaatggaaaagcaaaacaagatatgacagaaaagcttgctggtaaaatatttttaagtaaactctatttt

SEQ ID NO: 21151 - DNA, 1171 bp, Mus musculus
ttggcaattctataaaagctttattgtttccttgccatatcctaagagcagctgtagacagtacaaaataagtaagcatgggtgtttacaccccatcccacactagatctagactgcaggctaatgtttttcattgcttgatataaagtctatttcaaaaatttaaacaaaagtataaatatgtaattactattttagggaatattaatgaagccaggattatcttgagaacgtttgaagaatgtgttctaggattggcaatggttcgattgcgaagagtaagtttagaacgacggcatggaaatatggaagaagccgaacatttgcttcaggatgctataaagaatgccaaatcaaataatgagtcatcattttatgctatcaaactagcccgacatcttttcaaaatacagaaaaatcttccaaaatcaagaaaggtacttttggaagcaatcgaaaaagataaggtatgtacattttttaacaacatttttcataaaaagctagtactttttccctttggcaactgtgatgaaagatttggtctatacagtaatatatttattactacatgaggacaacagtccctctaaactgatgttgccacttttaatattttttctttctttgtgtttaaagtgtgcgaaagttatggttacttaaagttgtaaatattgtgatctttgtaattaactttcagaaattgtagaaacttgatggttgttaaggatcagtggcctgggagcagcatttgtgaacaaagcataacagtagcaaagcagtatagtgacactcatcttgcaagccgttccttttatgaaacagggaataaaaactagtggaagtgtcttatttttaggattatgttgtttgatttttgttgttttttttttttaaagatttatttattacatgtaagtacactgtagctgtcttcagacacaccagaagagggcgtcagatctcgttacagatggttgtgagccaccatgtggttgactgggatttgaactctggaccttcggaagagcagtcgggtgctcttacccactgagccatctcaccagccctgttgttgttttttaagacagggtttctcaatgtaaccagcgctgcctgtcatgggcttgttttgtagaccaggctgtcctcaaacgcacagggatccact

SEQ ID NO: 21152 - DNA, 1155 bp, Mus musculus
tcagcatagatggagaaaaatattatttatctctacttttgcttcaatcatgttacggttacaaacgatgactgaatgcttgtcctggggtcacgaagttatgtatcttaaccccgtatgtagtatgtcgttagcagtgacagctcatttaaagcacagcaaaaactacattctatttacttatgttaattttgacctggaaactctggacgtcaaggatgacctagacctgattctccagactcctcctcaggccagagccaccgctccaggtttgagattgccttcaagcccgctcgagggatgggaagggtaacaaaacgaaaacaaacaaaacacagcaaaacttgcaaagatgctaaatccagacacccgcccccagcccgtcacacacttcgcgcaatacgcatgcgcttcttctgatttccggaatggcaaccaatcatcttcccgccgcaaaatcggcggcgggttctttaacccgccagtcccgcccccgggacccactgtgtcgctggcgggagactaatgggcgtccgagtcgcggcggttgcgctgccatccaggcgggttcctcagcggagctccgctgctgctgggcaccatgagcggacggcagagaacgctcttccagacgtggggcccgagcctcgtgcggggctccggagactcgggatgcggccagccgcgctcgcccgcgatggcggaggcgctgccggaggaggacgacgaggtgctgctggtggcggcgtacgaggctgagcggcagctggatcccggggatggcggcttctgcgcggctgcgggagccctgtggatctaccccaccaattgccccgtgcgcgactaccagctggacatctcccggagcgcgctgttctgcaacaccctggtgtgcctgcccaccgggctggggaagaccttcattgccgccgtggtcatgtataatttctaccgctggttcccttctggcaaggtggttttcatggcacccacgaagcccctggtaacacagcagatggaagcctgcttccacgtgatgggtattccacagtctcacatggctgaaatgacaggtatcttgagaaaaactgggctccccgggaaaggctggctcttgtggacatagctatgccagcagaattactcaatgca

SEQ ID NO: 21153 - DNA, 1165 bp, Mus musculus
tttaagtagagtaccagagcatgaatgtattaaaaaagtaggccagactatttatttatagtctatagatgacggtctgaagtttctgagtgttctctgtccctgtgtgtgtttcttctgttttgtgttcctgtatggcttggctggcctggaactccccagatagagcgagctagccgtgaacttacagttgtcctacctcaagctccagagtcctggggttacagggaacttttgctacaccctgcttcactgttactttgggggggggggggggaggtgttcgagacagggtttctctgtatagccccggctggcctggaactcactttgtagaccaggctggcctcgaactcagaaatccacctgcctctgcctccctattgctgggattaaaggcgtgcgccaccacgcccggcttcactgttaattttgtttacaggttcaactcaagctgttaacaggaaggagatatggtccagcaggagggttcttttcctgacaccgcaggtcatggtaaatgaccttactagaggggctgttcctgccacccacgtaaagtgtcttgtggtggatgaagctcataaggcacttgggaactatgcttactgccaggtaagctcttttttcaaatgctagtttgtagaggatgcataaattcttaacgggcttgggggaataagtctcagtgatgggaactattgctagtgtgattataaacgcctttcattcactctgtcagaacagagggtgctgggaaatctctcttgtccatttagatctgtatttgctgctttttttcccccttttcttttctcttttcctctttctttctcttttttcttttatgagacagcatctctctatgtagcgttgctggcctggaattcactacgtagaccaggctggtcttgaactctcagagctctgcaggcctctgataggcatatgctaccacactcaactctctgatatcttcttaactttagcaagagtattagtcagggttctctagagtcacagaacttatgggtagtctctatgtagtaagggaatttgttgatgacttacagtctacagtccaactcccaaacaatggcagctgcagctgtgactggaagtccaaggatctagcagttgcttaggtccacaaggcaagcaggca

SEQ ID NO: 21154 - DNA, 2051 bp, Mus musculus
cagcatccctccctccatggcctctgcatcagctcctgcctctaagtgcaagccctgcttgagttcctgtcctcgcttcctccaaagaagagactatagtctggaaatataagccaagtaagccctttcctccacagcttgacttttggttatggtgttgcatcgcagcaatagaaacctaagacaatacagtgctggggacttcagaaaatggaggctatcaggagtttgcaaacgctgtatcaggatggcaaagttggtgagctccatgttcatcggaaaactgtctggccaccacacaaataatgcttgcctgtgtgttcacatcttcattcatacacagaaaagatgagtcatctttgatgacatactcctggaataccaaaacattgtaggccaaggcagtaggcacatgctataaggctagccttggccttaacaagatcctgtctcaaaagagcatagaagcaagatgtattttagaatttttccaagaattaagtactatgatttattattggcaaaaactttataataatttgtgctgtatgtgaattatgtaacattttaagtatactaagtctaggacctgaagagatggcgcagaggttaaaagcacacactgctcttgtatgtccagcagcaaccccatcaggtagcttcagtggatctaaagtctctgccttcttaggcagtgcactgacattgtacagacgtgtgtgtactcaatcatgcatagtgagtaaagtagatgtgaaacacatgatctaataaagtcaaatgtttactaagtatatcattaccaccaaataaaccttccatccaactgtagtccaatatttaacatgaacttttgttttgtctcatgccatatgtattttaagatatgcctctgtttataatgtgcaataaataggagactttccccgtcttcatactttctccagtcccagcagacatacttcatcctacatctgacagaaacttcagaattcatctatttcaatttgtgttgctatcatcataaaaatgaggccttgaaactagcttgttcatatttacactacccagatatattttttactcaattctgaattttatcagctggtgggcagttagcaattacttctcagatccaaaatcacatattctatatctatgcattaaaaaaaaaattgctagctgtaaaggaaatttaatggctttcttctaaaacattacctatcaccctgaacacagcatcatgttatatattgacaactcaaactacattctgtttagggtgactctaaaacctttcttttgttctacagctagcaataactactggttacctgggagagaggtattgctggggattgaacctggtactttctgcatggcagacaagtgttctaacagctgtctccagcctcctccctccacttgttaagaacttttttttttgtattttaaaacatttattcatgttttctttgtgattgtgtgtgtgtgtgtcctctataagagcagcaagtactccttaatgttgtttttgagacagggtcttagttgcccaggttgccctcaaacttgaacctcctcctgcctcagtttcctgagtagctggtattacatggctaaaacacctagcctaggaactggcttaattaaaaaccttgttctacatagcgagccccaaggcagcccagctacacagtaagaccctgactagagagagacacagagtgtcaaataggaatgaatgagttacttttgactatatgttacagtgtgttgttaggaagtagtaacaaaatgcattattttcaaaaaacaacaaacccagaaacaaatatttcacaaatgtacatttttatttgcgcagtctaactagatttaaagggtggatgaatactactatagcagaggacaaataacttaggggaaatgttaaaacaacggcagaaggcaagttaccttttgaagcggtaagaaagggaaaccctgctcattatggcattgtaagtccttgtaagggtggatctatcagatagatatagcagggctga

SEQ ID NO: 21155 - DNA, 1229 bp, Mus musculus
tgtataactgtctctgccctccaggaacttacaaactaatctaatcctaatatgaagctagtagtgaagaaagtgtatatagcactgtaggattatagacgacagctcctagactggaggaactgaaccaagatatacatgggtgaaaattctcctttgaaatctgactggaaaataccagtccagaagggacattttaagcaatatatgaaaacactgtacctactcaacaactgattccagactgatttatggcttttatagctttgaatcagtttcagactctttatttatctatgtatatgagaacactgtagctgtactcatggttgtgcgccatcatgtggttgctgggaatgaaggttgctcgctctggtcagccctgctcactccagtctacagatttgcactgtagctgacttcagatgcaccagaagagggagtcagatctcatcacggatggttgtgagccaccatgtgattgctgggatttgaactcaggaccttcgaaagagcagtcagtgctcttaatcactgagccatctctccagcccttcagattctcttagatttagtgagtatttaaaatccaaacataggggccgggcggtggtggcacacgcctttaatcccagcactcaggaggcatggcaggcggatttctgagttctaggccagcctggtctacaaagtgagttccaggacaaccagggttacacagagaaaccctgtctcgaaaaaccaaaaaaaaatccaaacataggaaaactttaattgaaggttgttttaataatgaatagagcctggacaaaagacacatctgtttggattggtgagaacatgacttagtagtagagcatttctctggtatgcacatagactctgagtctaatccccagtactatctcaaaaacaaatactttagagctgggactccactggaacagactagtaattccaacacttagagggtcaggagatgaagtccaattagagctacaggagtctgcagtgtcaaaagacaagtttttatgaaaattcttttattttctgagattataattacattattcccccttctcgttcttccctccaaaccttctctacccacttgccccttttcaaattcatggtttatttattttcttagctcttagtcctttgaattatcttttaaatttttagttttctactttcaactttaggtactcttaaagaataatttatgt

SEQ ID NO: 21156 - DNA, 1201 bp, Mus musculus
ccaatcaaaagttactgcatctgacttgtccctcttaagttactcctgtgttttcacactaaattaccattttaagcaatgccaatacactcctaggtaactctcgacaagtaacaacgtgagttcattccaaaggctcttcaccataagtatttacctgattcacttgatcctctgagaactctaggaagttaggtcatgtgcagttaggtaaagtttaaccagatattttgactccaatgtgcattcctttttaaattttgacacaatgtctaaaaccccaaattgtttaaaaatacaaaaaaaaaaaaacataatgaagctcttgtttagctatatattagtatatccataaaaattttctgtcactgctgttcacccttctttttagtttcaaaactcaaatatggaagatttgaaaagaatcaaggctctgtctggattggatccctaacacaaaagaaatctaaaatactagtagatagaaaaaacaaatataagatgttacatgttaaatactggtgggtagcaaatggctggaactagaaaatctagagtaaggtgacacagattccaaaggacatgcatggttatgtactcactggtaagtggatattagcaaaaaagtgcagaatacctaggatacaattttaatcccacttagaagggggaacaaaataaatcacaggaggtagaggaaaggagggaactgggtgggagaggagaggggaaggggatcaggtatgggcaaaggggatgggaaaagcccagaaggccaggagaatgaatgaaaatatgcaacctttaggggtgggagttggtagggcactctagaaagtaccagagaccttggagttatgagactcaggactcaatgggggtgaccttagccaaaatgcccaacagtggggagagggaactgaaagactacatctccagtaggggagtggggggagggtatgggggactttggggatagcattggaaatgtaaatgaggaaaatacctaattaaaaaaatatatacatataaaaattttgtgctgcttacaaactgtttatggagccatgctgttacttttaaaaaatgttttggttttttttttttttttagattttatgtgtgtgggagtttgagctgcatgtatgtatgtgtaccacatatgtgcctgttaccatgtaacccatggaggttagaagac

SEQ ID NO: 21157 - DNA, 1878 bp, Mus musculus
tttcccccactttggctttttgagacagggtttctctgtgcagccctggttgtcctggaactcaccctgtagaccaggttggcctcgaactcagaaattcgcctgcctctgcctcccaagggctgggattaaaggtgtgcgccaccaccgcccagctgtaaacttttgtttttaagcctactacaaagcttaaggtcaaagttccaaattcggtgggcagtggtgggctttcttcggcctgaaagaaacctttcagtatttaccactgaggcctgcgcaggcgtagagtgacccggagattgagtggaaaggtctatcttcaagtcttcctcagtctctatgattcccgcaaggcttgatgggtaacagaaatttggcctccattttgcggctggcggtgggcacgcacggctgaggttcctgctgtcgccatgggtcgtcgtccggctcgctgttaccggtactgtaagaacaagccgtacccaaagtcccgtttctgccgaggcgtccccgatgcgaagatccgcatctttgacctgggtcggaagaaggcgaaggtggatgagtttccactctgcggccacatggtgtcggacgagtatgagcagctctcctcggaagccctggaggccgcacgcatctgcgccaacaagtacatggtgaagagctgtggcaaggacggcttccacatccgcgtgcggctgcaccccttccatgtcatccgcatcaacaagatgctgtcgtgcgcaggtgccgacaggctccagaccggcatgcgaggcgccttcgggaaaccacaaggtacggtggcgagagtccacatcggccaggtcatcatgtccatccgcaccaagctgcagaacaaggagcacgtgatcgaggccctacgccgagccaaattcaagttccccggccgccagaagatccacatctccaagaagtggggctttaccaagttcaacgcagatgaatttgaagacaaggtggcggccaagcgcctcatccctgatggctgtggagtcaaatacatccctgaacgaggtcctctggacaagtggcgagccctgcattcctgaggactttgctggcagaaaagaagtacagatgaggttatagtttgaaaaacgttaattccgtttattgactttagaatgttactttgcatagtatagaccattacaatggaaagtacctgccttaagaaacaagaaaactgcagtttatagagaaagaattttcaattttgacccatgtacttaaaatttttggtgtatactgcagtgtagcaaatgttttgtggtgacggtataaatggtactgtttgttatcttggattaagagtggctagagaagttggaagacgtgtgagaagttctttatagagaattaaacatgaaaattacatctcaactgtagctttggttgttttgctttaaacttgtcaatactatttttaaaattacccatagcctcaggttatcaatcttagaacagttgggtgtactgaaaaaggattttctagacaaaccttacattgtcctacactcaggagacagtgatccaatctttttttcatcacagaaaggttataggtgacaaccgagtttatattgcttgtatttggatcccagtggaatcaacaaagaagagaaaatgacactaaatcagccatctgttctgcgggggccttggagagtgtaatctgttgcttttgccctgtacaattacattgatgaagcaggtactttctatcttattttagaaatgatataacctaaaactgctgggttgtactgtttagttttgttgttaccttacctgctttttaacttaaacttctgaatcttagtcctggaatcagagcctttggattacctc

SEQ ID NO: 21158 - DNA, 1099 bp, Mus musculus
caaagctcaagtctaagtggattaagtacctccacataaaaccagatacaacgagtctaatagaagagaaattgggaaagaacctcgaactcattggcacgggggggggggggtgggggagggggaattcataaacagaactccaatggctcatgttctaagatcaagaattgacaaatgggacttcatgaaactgaaaagcttctgcaaggcaaaggacgtagtcaataggacaaacttggaaacctaagggttgggacaaacatcttcattcaccctacttttgatagagggctatccaaaatatacaaagaagacaagaagctaaccttcgaaaaaccaaacaaccaataaaaaaattgtgatatagagttaaacagaattcatgacaggtgaatgtcaaatggtcagaaaccacttcaagaaatgttataagtccttagtcactagggaaaaacaaatcaaaatgactctgaaattccaccttacaccaatcagaatggctaagatcagaaacccaggtgatagcataagttggaaaggatgtggagaaagaggaacatgactctattgctgatgtgattgtaaattggtaaaaccacactgtgtggagagagagagagagagagagagagagagagagagagagagagagggagagagagagagagagagagaacaagaatacaaaatatctatttcaggtggatgttctttcacaatccaaaagaaaattcaaacaacctcaggctaagtcactcaatgtatgataggaagtgttattctagaacgccacatctaaaatcctttgctctcaatgtacttttagaaatcgggtattctcaataattttcaataatgggtaacactattggagtaatatacttcttgattatgtaagtattaatgattccacaatgaaacctatgactactcaaaagatgcttgcaaagtctgttatatgcattattattcatgcatcatattttgctaatttagtaaattttaggtaaaaaattttaatttaagatttcttatctttaaaactcattttgcatatccaattaactttataaatatccaatatatatcaattaca

SEQ ID NO: 21159 - DNA, 1232 bp, Mus musculus
gctggcaaggatttggagaaagaggaacactcatccattgctggtgaattacaagttggtacaactactctggcaatcattttggcagttcctcagaaaattggacatagtactacctgagaacccaactataccactcctgggcatatacccagaagatgctccaacatgtagtaagaaaacttgctccactatgttcatagcagccttatttataatagccagaagctggaaaggacccagatgccctcaacagaggaatggatacataaattgtggtacatttacacaatagagtactactcagatattaaaaacaaggcaaatggatggacctagaaaatatcattctgagtgagataacccaatcacaaaagaacacacatggcatgttctcattgataagtggatattagcccagaagctgggaatacccaagatacaatttgcagaccacgtgaagctcaagaagaaggaagaccacagtgtggatacttcggtccttcttagaaaggggatcaagtatacagccttactaccctgaacgaaccccatctcgtctgacctccgaagctaagcaagttcgggcctggttagtacttgcatgggagaccacctgggaataccaggtgctgtaggtttaaaaaacaaacaaacaaacaaacaaaaaagaaagggtatcaaaatacccatgggagggaggagatacagagacaaagtttggagcataaactgaagaaaggccatctagagactatcccacctgggaattgatcccatatatagttctcaaacccagacactactgtggtgccaacaagtgcttgctgacaggagcctgatacagatgtctcctgagaggctctgccagtgcctgataaatacagaagtggatactcacagccatcctttggactgagcacagggtctccaatggaggagctagagaaaggactcaaggagctgaaagggtttgcagccccataggaggaaaacagtctgaaccaactattacccccagagctcccaaggattaaatcaccaaccaaagtgtacacaaggagggactcaaggcttcagtggtatatattacagaggatggccttgtggaatattaacaagaggagaggccctcggtgttatgaaggctcaatgccccagtgtagtggaatgctaggacagggaagtgggtgggttagtgagcagaagggtagggggtgagatagggaggt

SEQ ID NO: 21160 - DNA, 1194 bp, Mus musculus
tagggttacgtggggaagagaatgccccgctgaaaaagggagtcctccattttacactaaactcagggagctttcaggcatggtgggtcccccaacacagaaaaagccacatgggaaccatctttcagtttaagttagactgaccaggaaagctaagcaccccacccccacagagaatcaggtttagctcgttacttgttgaacctcaccagagctgcttttatgaagcattccagatgcttttaatgcatagccagggttgaagttcactgtaagaacagtttgttatggtttaaatataatatggaagaagggagatttggatgaggctggagtctagccttgagatgctgtaggaagagaaccattattttctagtctggtgttatgaagtagattgcggagagagagagtacttttgggcaggcccaggccaaggtgtacctgtgagtgattacaccatgcaactgacttaaagtaagagaagttttttgagggtctgggggaagggatagaggcaggcaagtggacttgtagagatagaaagacagatgggtacagagccatgagggcagagaaaagggggtcatagagggtgagagaggagttgcatgccaagaacgagagggacgatgccaaggacacagagagagcactggagtggctgatgggtcctttttattctcagcagacacctatcacacctgacagtgacagcaggtcatgagtcaagcaattattagcttcctgaggacaggccagtgaaattgccagcacacaaacactctgtccatatgtagtaaattagtcttctgaaccttagccagcctcatttagctgtaccagacagactacatgtaccagactacagcaaaaacaacccatcctttccagggctggctggctggtgcttttcttgatccacacccccacaaaaaaattccctgatgaggaaaaggacagagtacacattaacatgcccagagtctgcttttatttgtgccttatgttttctgaggctatagtgctaattttttattaggtattcatttcatttacatttcaaatgctattccaaaagtcccacacacactctcccacccactcccccacccacccacttccactttttggccctggcattcccctgtactgaggcatataaagtttgctcgaccaatgggcctctctttc

SEQ ID NO: 21161 - DNA, 1384 bp, Mus musculus
gagatggccttaatggagccgccacagtaaggtacagcactcctcagcttccccaccacccgcagcagggcccgcccggcccggcctagctaagcccgtaatggcgacggcagcaccgaacgccctgcgcgccgcccgcgggccttgaatttccgacacccagtcaccaacaatggcccttccctctaaccgcggtctccacaacccgctcctcaccaagagcgggaaccctggccgaacttccgtgggtgactccagtagagctgctggtgacccatcttgccttcagacgcccaacgaggagaaaggaacgagtcggctcgcgcaggcgctcttcaaagttttttggagctacacgctacccagaatacaacgctaagacgtgacgcgtacgccgtgcgacaacattggtccgcgtgctctgagtgacatttctaaggctggctgggcgggcacagtgagtgacgtcacggcccgccgcagctctagtatctccccgtcgctctcagcgctcgccgggcgcggtggcgcacgcctgtagtcccagctactcgggaggctgagacaggaggatcgcttgagtccaggagttctgggctgtagtgcgctatgccgatcgggtgtccgcactaagttcggcatcaatatggtgacctcccgggagcgggggaccaccaggttgcctaaggaggggtgaaccggcccaggtcggaaacggagcaggtcaaaactcccgtgctgatcagtagtgggatcgcgcctgtgaatagccactgcactccagcctgggcaacatagcgagaccccgtctctttttggacacttaataatattaacattattctcactttctttttaattcacccttttctcatataatacatttcaaccttaattttttacattgtcttaacacaaacgttcgcttacaaacgtgattttttttttcctttactcactactgacacctactggcgtgaaattatatgacaacttaaatcaagtgtaatgagtaagagtcaacgataggggcctcttattaaatcttttgacctcatatactccaaaaagaaatccacatcattccatggatggaaaatagggtcttacgtatatgtgagtataccacccttgatacctaaatataatcgcctacatttacttttcatttgtttttgtgtagacaagactggcccaagactctcattttgcccataatagactcacactccctatcctaatgtctcagcctctaataatgggcttgcttgtgccaccaaacgcaggctaagtggatgaatatgaagaaaagtaatataaaataaaagttgttttcatcagataatttaatagcaaaacaagtaacgacaaacttcaaaagaca

SEQ ID NO: 21162 - DNA, 1231 bp, Mus musculus
tgacgtggctggggggaaggaacgagcccggttgttgcagaaacgactatatttcgttgtaagccattcgtagctagaaaacggagggaattgctgtggggtagtccgagcaaaacttctctacccggacgccactgcgttgtccttgcagtgagacctaagaaattggacgctggtttggggagaactgtaatggccactccaagtgtcagttcctttggacgctaaggcagacctcaactagcaatcctctgcctcagcctcccaggacacactccatcaggtctgagtttttaactgttaatgcctcgttttagtttaaaaaaacaaaaaacagtttttctataggcttgaagtggtaaggattgaaccccggtgtttaagccagtgctcatccactcagctgcgtgttggccttttattcacgtgggaaatgagtacttggtgggttcacaaattttcgaacattactgttttttttttatatgttcctacaaattatacctgtttaaaactttcgagtttgaagatctttaatgtctgaaactttcttacagttctcatcgcagacacttctactgcaaacatggtcaacgtaccaaaaacccgaaggactttctgtaagaaatgtggcaagcatcagcctcacaaagtgacccagtataagaagggcaaggattccctgtatgcccaaggaaagcggcgctacgatcgcaagcagagtggctacggtgggcagacaaagccaatctttcgaaagaaggccaaaaccacaaagaagattgtgctcaggcttgagtgtgttgagcccaactgcagatccaagaggatgctggccattaagagatgcaagcattttgaactgggaggcgacaagaagaggaagggccaagtgatccagttctaaaacttgtgttctctgagaggaaaatactgaagcagtagagaaatgacctgctagagaataaagttactgttaatgataccaagccttgtgttttgattctcagtaggattgcatatttagggggttttgttttcaaacataatttgagtctgggtctacctctgcctcctaaatactagaagtacagaattgcaccatatcctatttctaaggtgctgtgttgggttgaacccagtgctttctgcatgctaggcaaagtgtgtactaagtgccctacaagaagtcatacagataagcagtagctacagaataatgggcacagaa

SEQ ID NO: 21163 - DNA, 1153 bp, Mus musculus
tagtgtgcagattattagagaccacacgactcattgtgcattcagttttcagaatcccttgctatatgatttagactgatgtatatgattttgaaatttaaaaattgagtaaaaaaaattgggacctaagacaggttgtttgtgtttttaaattgatgtaaaaccaaacatttacagttaattttggtgaggaagctggcagcaatcccaatgcctagctagcactgggaacctgatggtcagtcagtttaggtcaggctcagctacaaaattaggggccagcctaggctacgtgagaccatgcctttttaaaaacaaaaacccctggagatacttttcttgaatagtttccttaataagagaaaatatttatgatttttttcaaagtattctttttttgtttttggttttttttgagacagggtttttctgtgtagccttggctgtcctgaacctcactttgtagaccaggctggtctcgaactcagaaatctgcctgcctctgcctccccagtgctgagattaaaggccaaagtatcttaaaaaacatttatttggggtcaaggagatgtggagatgtgggtcatcacatgcatatggaaggcagaagactgtgtctctgggattaagcccaggtcatcggccttggtgggaagccatctgtctggtcccgtagtttgtgagacctgggttggttctgtattccctatgtagcctggcctaccctcaaagtcttcctgcctgagtttctgaggctgggactaaggcatgcatcagcatgctgggttaaagatacttagttggactacaagtagatcctgggtttgtgttcaatttgatttttatattaaagtttcaaaataaaaattcattgagttaacgtttgttacctacattctcaagaatgcagttaactggaatatgatggaggaatacaatcctaaaatttgttcacatttttaagaagggaaagaactctcctaacagataatgatctaaaccagtagaaatgaaacttagctacttttgcaccagttttcataaaagtctgtcacatatataatttaagataatttggggtgtagttggatagctcagcaaatagagggtacctgctggcaggcctgacgacctgagttcaatccctgtactt

SEQ ID NO: 21164 - DNA, 1178 bp, Mus musculus
tagtgtcagtgagtctcgggtaagtgagtgagtagtctgaggttgccagtaaataagcagaaaagtgtggactaggaattactcatatctgcaggtccacttctctctaatgtatcctgttgtcagactaggtagtatgttaataatttataatagtattcattttttaatacaaatgtgagcatatttcatttaattctgttttaggggaagtttttcctggaagatcctactggaacagtacaactggaccttagtaaagctatatcctttaaaaaaaaaaaattcgccaggcgtggtggcgcacgcctttaatcccagcactcgggaggcagagggaggcagatttctgagttcgaggccagcctggtctacagagtgagttccaggacagccagagctacacagagaaaccttgtctcgaaaaaacaaacaaagaaacaaacaaagaaacaaacaaacaaacaaacaaaattctgtccaggcatgggggtgcacactttgaatcccagcactcgggaggcagaggcagggagatctcttaagtttaaggtcagtcttgtctgcatagcaagactctgtctccaacaaaaggggtgagatggggctggagaggtggctcaacagttaagagcattggctgctgtaggatctgggttaaattcccagcacccacatggcagctcacagcactgcggtttattattaaatctccttttaaggccaggcgtggtggtgcatacttgtaatcctagcacgtgggaagcagaggcaggagttttaggagttttaaggccagccttggctacatgtctcaacttttccctacagtaaataagacttcctcctaataccaccacaacccactacgaggaatttaaaacaacccgaaagctaaaagtcccttggggttcagactgtctactgacctattagtgttccgagcatatccttgagttcttcctcagctgctctgtaccagttccacagtggcttatacaccgaggcctgcttcgtcctggcagaaggtaagcgtgcgcgcccttttcatgtccttgcttgacagtaaaactgttcccacttggggaagacaccttacgatgtcgttccagagggtattcaccgtgaggatgtcaccttgtgagacggtgatgcttaagaaacagcctattagaaaa

SEQ ID NO: 21165 - DNA, 1133 bp, Mus musculus
agccaactcgtggagctgccttccaaaacacttacttcacagcgttaatcagaggtttggtagtaacaacacttctggatcataaagctttgtagataatacttcttctggtccacttgcatggagaacagccccgtacttgtcacacagtgtcatcctttgtataattatatgcatcgttgtagtttgcagcttcctgggttttatgtgcatgtgaatggcctagagaacctatttttgtgtctaaagtttacaataaatgtatttaacaccagtacctgtctattgttaaagttaaaaaaaattactgtgttggctttttttttttttaacgatttatttatgtatactgaatggtgttttcctgcatgcctgagggtgttggattccctggaacaggagttacaagctgcaatgtgggtgctggcaactgtacgtgggccctgtggaagaacagccagtgctcttaacccctgagccatctctccaacccctgcattgactttttatcccacgtctgggtataacaattttaacatttatcttttgataatgtggatgtaatgtaactgtagaaatgtgaagatgctccatctgtatgtagcctttaaccttatgtagctaaggctggtcttgaatcagtaaccctctatcttccgccccctcaagcactgcaactcaaagtgtgctgccaccctgggtgtgtatgctggggcggcagtgagccttagacagcccaagctgcaattaatgcactgctccaaccttcaagtgttggtgtagtcctgggacatgtgatggtcatggctactacccagttaactaaaaagtggcagcttatacctcatgaacagagaaatcatgtatggcttcattctctattctgataggagccagaagaatactggtccaggaatctttagtgataagcctaaaagccaaaaagcatctttgacctttcccagactccagacagtttctctctgtagctttggctgtcctgagctcaaactcacagagatctacctgcctctgcctccccaatgctgccagcaccacccagcaagaaaatgcacttctgttattacaggtcaagatacttgagcccagtggtggtgatgcacgcctttaat

SEQ ID NO: 21166 - DNA, 1334 bp, Mus musculus
ctaaaagcaagacaacacaactgtaaggaacccccgcccacccctacctacccacggactagctttcctccacaataggagaccaacaccaggaacagacagatattctaagtttcgttccttccagctagcttcaacaccttttcggacccctaacctctgccacgaggggtcatgctatacactgtatggtatacagtatttagaacagatggttcgctcatatttttccaatgcagagatatagcggagactgcaggcctagaaagcaacgcgatgcagaggaaccgtttgaggccctctcctttccccttcgcgaccagtttttgagagaatacgaacgatttgtaataaaacacaaggctccaggctccagcggaagaaggcggacccaggtgacatcacagtctctggaccgcccgagctgggcgtgtcagggcgtgtcagcgaaggctttgccctgcctccggtgacgtcacggcccgccgaagctctagtatctccccgcagctctcagcgatcgccgggcgcggtggcgcacgcctgtagtcccagctactcgggaggctgagacaggaggatcgcttgagtccaggagttctgggctgtagtgcgctatgccgatcgggtgtccgcactaagttcggcatcaatatggtgacctcccgggagcgggggaccaccaggttgcctaaggaggggtgaaccggcccaggtcggaaacggagcaggtcaaaactcccgtgctgatcagtagtgggatcgcgcctgtgaatagccactgcactccagcctgggcaacatagcgagaccccgtctcttttggctctctatccctcactctttaaattactaccattattatagtgttttttcctcttaaacattaaaaaaggtaaagtatatttttagggtttaaaagatttagtcatacaataaaaatatacctatctaattatcttaatctccgtatttttatttaaatctttttcattccctctttctctctcacacacaccccaaacccccccccccccccagttttatctttccttcgttgttaaaacaacaaatttgttcaagatattcatggactggtggccgcctcactactgactcctatcggagtatagtcagaatgtgtttataaaaagatgttattgtcaaaagaaccagcaggggctgctagttcatttaaaagtggttggtaaagaacagccgcctgacaaaaaagcattttctctaacagagtactaacagtgtacgcttagtggtaaattataaatttacctatgtctatgttcctgagttatggaaatttttctttaatgtct

SEQ ID NO: 21167 - DNA, 1917 bp, Mus musculus
cttataaagaacgagtttaaactttcaaaggcagggcttaggggcagacccaactcgagtacaaaaagtgcgggctactttggcggattctatggaacactggcctcccacgtgtcttccaggaaactgaaggaaggctggggagagcgggaggggcttcgcgcagggggtccgggagcgagcctgggaagcgtggctggggcgccggtcctaagggccgacgaagcccgccctcggtggatccgtgccccgccttcgagtggcggagaaggagacccgcggagaccccgggtagagcgacaggtgggcacacggccagccccacgccagcaggttccgcgaggcgccggcgttgagccccgggagccgccgtagccccgccccccggcgcgtggcgctcgtgacgtcgagagcgcgggccactctcctttcagaggtcgcgctcttccgaacggtcgggccgaggcgcgcgtgcgcagttgggaggggaagtgaggcggtttcctcggcgccttttccggcagcggcggcggcggcagcagagctaggaggaggaggtggaggccggagggaacccgcgctcggggcggcggctggaggtaacctcaagggccgagcccgaaaggcgggccgcgtcggtctgggcgccccctcggaggcccggcggtaactcccttctccctctctgtgtccctgcaggcgagcacccgcgagttcccgcgaggatccatgacctgaccgggcgccgagccgcgctcgtcgtcggggtggtgaccggggtcggtgccgagtccggtgctcgcaggccggcaggccggccgcagttggagccggcgcgtgccgaggcggcggaggagctgtcggcggcgcttgctcgctcgctcgttcgcgcggcgcctgcgggggggaagggcagttccgggccggccgcgcctcgcctcgcctcgcttgagcagggcggcggctctcccggcgcagacgcagggccccggcggcgggcgatgcccgagtgagcgcaggccgggcccctgctcccctagccggcagcttcgcgcaggccgcagggcgtcctcgcagcggggcggcgacgtttcgggctcgcggcggcgttgtaggcttgaggggacccgggacacctgaatgcccccggccccggctcttccgacgcgatggggaaggtgctatccaagatcttcgggaacaaggaaatgcggatcctcatgctgggcctggacgcagccggcaagacaacgatcctgtacaagttgaagctgggccaatcggtgaccaccatccccacggtgggcttcaacgtggagacggtgacttacaaaaacgtcaagttcaacgtgtgggatgtgggcggccaggacaagatccggccgctctggcggcattactacaccgggacccagggtctgatcttcgtggtagactgcgccgaccgcgaccgcatcgacgaggcccgccaggagctgcaccgcattatcaatgaccgggagatgagggacgccatcatcctcatcttcgccaacaagcaggacctgcccgatgccatgaaaccccatgagatccaggagaaactgggcctgacccggattcgggacaggaactggtatgtgcagccctcctgtgccacctccggggacggactctatgaggggctcacatggttaacctctaactacaaatcctaatgagcgtcctccacccagcccccggaaggagagaaatccaaaacccattcctaggattatcgccacctccatcacctctttgaattgccactctctttttgaatctgaactctggagttactgttctacagtttagtggggttgggggttttctttgtttccttttttttttttttttccctcttggctttgcgttaggatgctctgatctgacatttga

SEQ ID NO: 21168 - DNA, 2664 bp, Mus musculus
tgccgtttgtcttttatatttaaggcctccccccccttcctccttagcgctaactttagcagtttcaaatgtgaccttttatagccaagaccagtatggtgaactaagcccacagtggcaagataatgagtaatagcagtgtaatgttccagttgcacatgagtgtgtcagacaggtaatgtcaggagcccctggcagtgtcagccattaacgtgcatgaggaggagtacagctcgagctcccttcaccctagctaactgccgcctagaacaagcagcgcagcctgtaaagcctacaggtctcttccactgcaaagttagcaacttcgctgtttccctcttcttacctttaaaaatactctttccagaaaatggagcaataatggtgtatgcctcacacagatgaaatatttgtagatattttaaagtgacttttggacaaaactggaatgttaccttgtttcaaatgtcttaagaccagtagttttaaaattactaaacatttgctcactaataaaacatttaaaaagtcaaattatatgcccctttaacgtagctggaaagaaaatacacattcctgttttcacgttacagcagctgactagaccgaagataatgacattttttaaatagatgagtgatctacatctccattaagacactggaaaagatgttttattttaaaaaggtatttagttttgcttgattgtagggtttactcctgcagatatcctgttggttcggtagtatatctatctcctgtaaggaaggaaatgtgctgaatgaatggcttagatgtggatgacaaaggggaagtaggctggacgggaagaacctacagatgacaatgaatgtaaattaactttaagggtaagcattgtgctggttgtatccggatcttaagatgatctggctaggacctgtaactagatggagaccactatagtaactttttgaaccaaatgttaatgtcattccgaattgtgaagcagcttctggtttctctgtagccttaaggattaatttagcgatcctcaaggaattaaacttagggaatttgggaaatgtagactgcacaggcagtgtactggaaaaggtggaatttttttttttttttaatgagggtgtctgaaaattaaaatcaagccggatatcatggtaaagttggacagtattggtccttcatgttttggccatattgtataatggagcttttaccaaagatgtaggagaagcaggaggctatacaaaaatgagctgtaagtaaaacatttaacctaaagcagatgagaaaaggtgctatgttgtaggctcctattggtgcagagggatttttgattcaagacgcaactaaagcctaacggcctcagtttcacattaatagaagcatctctaggaatgaggcggactcacttaagaacattttagttgcttttacagttcccaaagctccaccgtaaatgtaattcttagtgttttaaatgattacattctaaggtacataaatatggttatacaaatatcaatgctatagtaacatcctgaaacaaaataagcacaaaggtataaatgcctaaactggaggaaacttgaaaccctcatgttgattcttaaatgtagtgttctacttgtgacagacagattggtagacagccatttttttgtgtcttaaaataattgggggcatagttaaaattttatacaagtgattgctgttactgaatgttgcaggtgagatgggttatttttagcttatttgagatatctgaagaggtgggagggggggagacatatttgaaatttgaaaaccctaaaccttttggaaagaaattgtaattttcacttacatttctttaagactttaagagatttataattgatgtagttaagtcaaaccataaccattggtgattatgaagcaaaaattagagcctgcagaaaaagttataatggaaggattaaaaaaaatctaaagattttgttttaattgcatcaatttctgtatttgtgtgaatttataaacatgcagtaagttttgaatgaggtaaatcttgtctaatataagtaaatgagtctgtagactgtgatcccctcccccagctaaaaaaagtgcagtacttggaaattgttctttatggttgtagtgttgctgaagcactaacatgcagaaaataaaggaattacacagtgcagtttcttggttatgttacttggagtagataagtgggatgtattggtatcttgggccatgttattctccagggatatatggtataaaagtgaatttcagtctggctcttacgataaaagataaaaagatttttttctcccctaaatagtgactgtttaaggtgttccctgttttagtttcaccgggcttttgacaactgagggtacagtagcagttgaagatatttaggtcccccgccctccatcacacagtgaatccctgaccccttttgctttgctttttgagatagggacttgataagttgttccagtgcactttgcacttgtgctccttgcttgcttcatcctgcaagcctgtgctaccaactccacctcaggcctcaggaatctttttttgttgttgccctcccccaacccccacccaaattacagttttagcattttgaaagtacagaagtgagtttagaaggaattg

SEQ ID NO: 21169 - DNA, 1594 bp, Mus musculus
gttttctaagctgagaaatgaaagtccctaaaaggactgatttttataagtgcagtttaaaatcctgaccctgggtgcgtcactgtgtaattttatgtgtctcacacctcagtcccttggtcacactaaggtacccaagatgttggccaggattactagagattcctatctatttgggttttcagaattcctataagctttgtgaggacatttctccatttttggttaatatctaacttggaggcattcacttttgtaaaccgcgaaagtgccttatatccttcctatttacttcattaacgtggtaagtcagtgccaagtgccatactgtgtgtgcacgtgcgcatgtgtgggtagtaccacattgttactgtgtatactatatgtgtgtgtgcatgtgtgtatgtgtgtgtgtgaagtaccatattatattactgtgtatgtgtatgtatgtgtgtgcgtgcgtgtgtgtgctcgcgtgtgtgtgctcgcgtgtgtgtcttagctagtgaagtgtgtcttacaactcagaaagttagaaaatagaaatataagtggagaactggcagcctggccatggaaacaggcagcacttcgggagaccctttgtctgtcctcccgagcgttctctcaggttgatcttggttttcctcgtcaacactgtgatggatgtatgagagggggtgcatgttgatagggaacccttttcctgccacttgtttctcttcacttcagcccttactggtacatttattaagctatctaatccattaatttaaaaggatacatattgtgggcttcagttggagaggcagcatatcccaggtaaatagatgaggcagttactcaacccttgggctgggcatattgaaacactcagaaatcatttacagaaaaaccaagccctcgtggtcctccatagcagctgattccagaagaagcactgcagagcacgtctctgttctaagacgtcagtgacacaagcgtcatagtaaggttgtgttactttatgaataagatgagagtcttctccttttagctgtggtgagagaagtgtgcatgttctgtttcatcagctgtgagacctgtgcacatacactaagctgtgaaaaaataaagttacaaaataactatcatgatagaagcaatccttactccatttgggtctgtattgtatatcccagaataatagtgaaaatttgttgaaatatgtcagttaatctgtttgtaaaatatttgatatttatgtcaataggaattttttgttaaatactgatatataagaatttttgtgtctttctgagaaaataaaaatgtatattagtattaaaatattttaatgtttcttggtgttatgatcatattttattcccattaaaacctcgacagaggagctggagaaatgacttagtggctgagagcactgactgctctttcaaaggacccaaaatcaattcacagcacccacatggcagctcactgttgcaggatatttgatcacactgaaccctgagattgtgttgttcactggaaaaacacaattttgttatggcttagccttagcatacacctttaatctcaaacaatgaacata

SEQ ID NO: 21170 - DNA, 1269 bp, Mus musculus
gtgtgcttgtatgtggaggccagggtcagtatggagtgtcttctccagtcactttctgttgtgtagtattcaccagaaaagactactccgacatgggtttaggccaatagaaagtctttattagccagccggtgattacactgggtgtttgggatcccagtgttaccctgagcctttctcagagtgaaattttcagcacaaaacccatgttctgagttgatgtgcttcgggtaaaaggagagttagccagcagcagaactacagaagccagaaaacaaggttagcacatttagagactttcccagaactaaggactttgatggattaggtctttgtttttcttttggcaggtgatactgtttacatgttgaattttatggcctgaatggtacttccatcaaggagtcagttttgctaaggggccctgttacatttccaccttatttttcgagggtctcacactgatcctggagctcaccaattagggtagactggctggccagcaagggctccttcagtctctactcccccactactgctgttacaggtgcatgctgccaagtaggctttttacatgaaagccagggatctgaactcaggtcttcttgtttgttggcaaacactttacccactgacccatcctcttgatactggcttctgataatgacatcaccatttcaccagtgggccaggaccaaagcttagtcatcttcaagtcctctacttcttgtctctgtatgtcccctactgagtcatatggagtcttaactctaatgtcattccatccttctgtaactaagtcctatccttgtagccttttctttgtagcccttgctgactatttctgggccattctgtatttacttatttgcctattttgaaacagactgtagctatattgttttcaggctagcctcaaattcctgtgctcaattgattctcctgcctcagcctctgaaatagctaggatcacaggaccatgtcaccatacctgacttgacctttggttttgatgttgctgtctgggtaaatttcctggagcacacagctttaaccatgccagtactcttattctgatatcccagtgactccctgctgtttgcagaatatagtccagatatccggctgcaaggccttctgtgacctggcattaagtgtctgactctccttgtcatgaccaccatgtacaaaccaaaccgatgtatagcatgccttaatttcctgccttggcttaaaaacctagcctaactgcctgggttttctgttgaa

SEQ ID NO: 21171 - DNA, 1535 bp, Mus musculus
aaacagaagccgcagtactgaatcatccttctctttgccctagctgaggcttcaagacttgctctatcagaaactggaataccttccagaactcaccctcgccctgggggtgctgtttgtttgtttgtttgcattatttctagtattttacatataaagagatctgttttgtatgtgtatggaaataaaacaaaactaaaaaaaaaatcaatgaaataaggaaaaattataatattaaagtctcacacgagtttcatttaatgtgaccctcaagactgttgctctgagaagccattgtaaatatcttctgcatgttattttttctaaaatcatgtaaattgaattcatgtttaaagccataaaagggcacagtgaagtgattgtttcttctctatttgcaggaacctcaagtatttgttcttaagtgatcttcctggagtaaaagataaagaataccttgcccaagtctttaagacagcactgccttctctggaactaaaattaaacctgaagtaaaataagtgtctggtgtcactattaaggatcatttgaaattgctgatactagacagctacaaatattacatagtcaccaatagaactgtgaaaatgattcagaaatggagaatggatgtcaggaagagaataactcatcaaaagtgactcactaaagttacttagttaaaagtgagaaattatgtacattgaatcattttttttaaaatacaacatagcattttaattctaatgtatttctcattgagatatatatatatatatatatatatgttgatgtagagttctttaaactgcaatgcaaatattcttccttacaataatttacaccacattgaagcatgttactgtaactctacagttctgaaacctgaaagcacaggtactgactcactgctggaatccactgtaccgagctgtcgtggcattgagagctgcgggctgtatggcttcccgggatttgcatacttgctcaagctcctgcattgctgcattcctagtcatacatacttttaaaaataccctttctcagaaacagagctgctggctactctgtcctactttaaagcctgggctacttcctgctggttaaaacagaacgcaatacttatctacacccaactagttttgctggtaaaacaaacagaggaaacaggctaccctactccccatctgcttcaaacaagaatgtgtgtttgttagattctaattttgctatctctcaaatacctttggattctaccttctatgaactcaaggcatataaaaatataaatacaaaaatgaattttatatctagaaaacactaataaagaatgccataagtaagtgaaggctagtctttactttcttgaaatagctgcaattccatcattgttagttgtgtgctgtgtgctgtgtaggtttctggatgtatatgtgggtgccaggttgctgaatctaaatctaactagggctggccttggacagtgcagcattcaggcagaaaaatgaatgttagctgtattcagaactatgctt

SEQ ID NO: 21172 - DNA, 1704 bp, Mus musculus
ggaaacagctagtcaatctcttgccactgtgtggtggttatatcaagtttgcttaataaaagctatgagacaaatagtcctctagttccaagaaacacagtcctttttaaaaaacaatgtttgtaacaaggtgccatggtgtttttaaataactcatgattctctggagagggagtttactgagcattatatcattttataccatgtcttactccttcttagtgaacataatttgataagacgttatcgaacaagcctttcactttgacattggccgttctgtatgtttttgtaagatagaatatttaatccttatttattaatctcttgctggagtggtgtaatgtttctaacttttagcaaaggaaggttgcagagcagctgaaattttttataatgtgtgaaaatgttgtttaccttctcagagtagtgctttgggggttcctggcggcgtgttggaggtctagcacatacagcttcccttaacagaatattttacgacagtttcatacagggttgccttaacgggaattggtttccaactccagatggttgtaagggctcgtgcagaaatactgatggtggacacaaagcctcagcagggacgtgtagtgtccaggtgtgactaccggagttttgacaagcagtataatatacctgtgattttgttttttacattagggataatgcataagaaattaatctttatatatatcatgacccctaatgtttgggaaaaaagtatttaactgcccatattatgtattttacttatgttatgccaagggagaaagtaattacacgtgtaatcttggggttttcacatacatagatattcattgtgagtaggcttaaggaaaaaaaaaactttaagtgaaattggaatttctgatgggatagtatagataaatgatgttgttttatattttttaaaaaaccagtatactaaaattaaaaaaggatagggttgtcttttagtttgtttttattttacaattcttagtattcagaattgatgtgttttattggtaccagctgtcttaatgcatttattaagaacagttagcattgaggtaatgaacacaggggctaagagtagcaaacgatagacgtagtctgaccggatacttgaggaaaacaatgtacctatctcatctttacagttttataaagtccatgttatcatctccaccttccaaatgaggaggtaagagtttaaccaagttaaacaacttacacgttacatactggttagttctttgagccagaccaagagtcctccgactctgctcttttcactatgcaatatacaagtaataaaatgttacgcaaatgaactataaagtatttgttctttaaagtgcacatattggggttgggcagcaagatgctcactggatagaggttcttgccatgcaaacctgactttggtccccagaagccacccatgtgaaggtggagggagaaagaattgactccacagtgttgtcacctgaccccaatgagtgtgtgcctgcacacacacccccaatagtcaaatagaatgcacattggctgtttacatgggatgtgttaaatgggctcctcaggaggagtgccacacacaacagacaagcctctaactcgggaaagtgaaaagacctaagaaagggcctggccaaggcctcctgctcacaagctgcatggctagaaaacattacagta

SEQ ID NO: 21173 - DNA, 1940 bp, Mus musculus
gccccagctcaagaaaaatatatctaagtagcaagttttactaacgcaaatactttaacatgaagctgagttttatgtataataaaaatatctataaaaaatagaccagtttattgttgtaaatgcacatttctgtcttatcttattaacatgttttcctacagatatgaccacattctgaagtgggagctcttccagctggctgacctggacacgtaccagggaatgctgaagttgctcttcatgaaggaactggagcagattgtgaagttgtacgaggcctacagacaggctcttctcactgagttggaaaaccgcaagcagaggcagcagtggtatgcccagcagcatggcaagacgttcttaagttaacttatcacaagccaagtttataagagctttaaaatattttcagataaatgactgcaaacaagttctttggttaataaaggtaacttactatttggaagtataaaattctagttttacatatattttgttatcaattttttttcttttattgaaccaagaaagttttatcatttaaaaagccaatatggcatatgctaccaaatgctgtattaggaaactgctggagactctggacaaaaagtagtacaggaagagattatcagcataaacaggcattaaataggaaaccgtcactctctgactttttatggacacacccttcttgtttaggaaacagaagaggatgagagtacatctgtgatcagttgctacgtgtggtgtcaagtgttttctggaatgagatggtttgactattaccataggtatagttcaaaatacaaaacaggacttggaacctttattgtaacaagcttgtacgtgtgtggtcatctcccccccgccccctcagtcccccgacccccaatgtaaggaacacctttgaaggagaaagatgaagtctttgaggaatacattcagaaatacaggactataataaatacatgcctcttagtgcgcaactgttgctaatacggcttccttcctttgaggcagagcacataagtacagttagcatggctctgagacacagcacaggcttcctgaccacatagaatactgccttccatcagggtgggctaagttgccaaaaacgacaatcagggatccaataagcaatcttggtcacttaagtaaattttatattgccttttttatctttgagaagtatttgtcataaaggtgtagaaacaggctgtcattccttcctatttttcttgctttgggtttaatagttgttcataattagtgctgaacacttgattacagataaacttatggaacttccagctgtaaatctagaattcttgagcttcatagctcttcagttgtgcttacaaatgttgtgaatatgtatatatattagttcttttcctaagtataagcactccatgttagaagtgactttgaattattgataaaatttcgcatttgattttatataacaagttattaaatatatttttgtggaaactgtctggtccttgaatgcatgttttggtatatttagtctaatgtttgatgctttatacttgttatgctttatcattctgttcagaaggcccacaagcctataatgaaaagagaagctgaagctaaaatatggctactgggacattatcaggggaagagaattagtgcgcatacggccagctgtctgtaaagaagtgtaaacttctgttcagcttgtaagcttacacacattcttctgtctctcttactttctgttcaccatttctgagacagttaaaaatgtctgcttgggctcccgggtagatgaggcattaccattcttccattactagtctctcctctgatttattttcctctaaagggtttagtttcgttaacaaaattccactaaagatttcagttattagaaatatattatagccaggtggtggtggtagtac

SEQ ID NO: 21174 - DNA, 1153 bp, Mus musculus
tggaggtttaataaagaaaaccgtaacactgcaaagcatgcttgagacgagaccctgtgcacctccaaacccaacattacttcatgaacttgtcctgctggtcagccagaatcttggcagaggacttggtgtcatagaagagctcgatggtctcttccacatgctccttctcagtgcttgtccctccagttgatctttgccaacaggttggctggggtcagcagctgcactgaatatgtcggagtggtcttggtgccaatctccccaaggtggctcagtgcctcctcactgatgttgatgccttctgtctgggcttggatctcagtgatctgcttcatctcctgtggtgtatacagcatggtcctgatgatcatcacccggtccagctaagctgtatggtcatcataattactggcctaggtaaagggcttctgttttttaataaatgtcaattctttgttctcagtgtacctcggtatgatcagcctccacccatcacgtatcagccacaacaaactgaaagaaatcagtctctcctggtccctgcaaatccctaccatactgcagaaattcctgactggcttcaggtttatgcccgagcccctgtgaagtaagtgagcacacggcacgagtatctttggggtctctaaccagcttaagtaccatgcatagtcagtatggattaggtggtggcagcacatctttaatcccagctctggcagggtggaggggatgggggtggggataggacccagatggggatgacaacatacaccagaggcaggcagccctgtgagctagaggccagccagggctacagagagaaccccaccccaccccccaccccccactccccacccccaaaaagtattgtggttttcttacactattgggcttctatgtgacatttaagaaaggatatcagaggttataaattttgattctttgattagaagtaaaaattcttcaaagatgtttgaatcctaattactttgtgtacaaacctctggtaatggatacataagaataccaaatatgacatttaatttttgttttcttttttatatgacattaacatgtaacatgatatagtacttacaaccaaggtacccagttaagagcttggtactgtggtgacacacagcagaacact

SEQ ID NO: 21175 - DNA, 1451 bp, Mus musculus
aatctttctactcagtacttgtattagctttagcagaaaactgtgtcgaggcctagactcaggtcagaggtaaactgtgtcgtatgaagtagtcctgtggaagcttcaggttctgaaggttaatttcactggaactaaacagcaagcacatttctccaacagctgcctgccatggggccttctgtgtgtgcttcttaattttattttatattataaaaagtataggttggtgtttcttataaatttgtattcatgtgtacataaagagttgtacaatgactgtaaatatgattttttgaaaagttttagagttcatttagaattgtttcacccaaaatcaaaatgctactttagtaaaatgttaatttcttgctttaccccacttactaaatagggaggagggaagatcaatatgagaaatgtctatagatatcttaaacttatacattcatgcagcagtttatattttagaaatcttttagcaagggagtttaactgccatgtagaatatagcttaaagctttaaaaacatcaaatgtaaaatcatacaatcatgtgttgatttaactctcagactttcttcccagtggcgctctccaaaatcacaagttatgtgttttatggccatagctactttttctttttcttttcctttttctttttcaagcactgggtttagactctaagacattgctgggaagcgctccattgccctgtctgctgtcttctcatttttaaaagccttactctgttgtttcccctaaggggagaaaggatttattttatccaaaggccttttctcttaaagtgagtttgtgaggggagagaagtctgtgtgctttaggatgaagaacagtattttcatttgttttcaaaagctctaatttcagctaagccgttttaaatgtgaatccctccttgaaactgcaatgtgctatttgtatatttgactatcagcatgttttatataaacagattatgaaagacatcttacaggtctagagtttcagtaataaatcaatattcagggcaggtattgagaaactttaaaaaaaaaaaagaaataactaaggcttcttggcaaactttttttaacatgtggaaaataaatgtgtgattccccccttttacttcgctgagtaaagaaaaagagagcactgctattgtcagcatctcttaaaggcattccctgtcacaaaagtctgagtccagtgttagtcgagtcctgttctgaatgggttgcctgcaatgctatagcattccagtgagtcattagccaagccaaaagctgggtcgaagcctgaggagcaaagcactcgctggaaaggcagtcaggagagcgtggctgcccctacttgaacatcttagcactgtgaagatggagtttcaggcagctggacagctatttaatagcaaattaaagttgtgccttttcattttgtttttttgga

SEQ ID NO: 21176 - DNA, 2372 bp, Mus musculus
agttttagtatacttatagaccgaaaattaacttcaagttgtaacaagatgggtctgtttaatgcagtatattttatctcagcttctacgttcactgcattgatattgattcattaatgttgggttaggtgatttgaatgtgataaatgaatctttgtataatacctgctttattctctttgaaaatctaaacataactgtcagggctttcgagtccttctgtcgtaattttactctaaagcaaattcagtacattaactaaagtgcatttctgatctttaagaaaaaacatcaccagaattttctcaacctctgaaaaaagtggaggaagagcaggaggctgatgaagaagatgtttcagaagaggaggcagaagatagagagggagcaagcaaagccacttctcagagcagcataagacaacgctgtgtgggcctcccatctgccacggacacatcctaagttttacatatatcttaatactatgactttggcaaaactgaagctgggtgatcatttctattgcgagctgaactatgacttgctgtgtatacagtgtaggtcctttaggttggacagtttccattcaggaaataaaaacagacataagagtttgaaaatatgacttaagaatattatgatggtttaaagttatttaatttcagaagatcctggtgccaagcagtaagatttgtgtttatatttaataatctattttgtgtgagattcgaaactgcctttcccaagatttgcattactggagtatttaagaaaattaccttagagagaaggatttctcatttcacatcatttttctcagtttcactgtgtgaaaaaggatcatatttcccataagtgggaacattgcccattatttcaagacatatacttcattgatagtactgcacttaggtagagtccaaaatttcctcatagattttggattatgcagctaacaaaactaccttactttatagctttcatttctacacattacatttaggctatgttgctgacttaagaagtttttataagtctatatggcattggattaattcttaaggctgacgcctattttggtgtcttgttcactgtatgatttttgttatttgccatgtgttacatttctaagttggaaaaaattaccagtatcactgttgtgtttgctatgggtaaacagaacttttctatccttttaggatgaagtttactgagagaaccatcaaatcgaactgtttacttgaaaatgtacaaatttggctatacattccagattttaaattattattctgaagttttctcttttttaatgtgaagatgaaattttctgatttttaaaatttgatgtggaaaagctttggtattttatattttggaaattcagaatttaattgatgtagaatgaagtctgcattctactcaagaaacatctactactatgtgtttttagtgtaattctgtcctccacggggtcttgatgaattttataatcaggatattgctttgtgtttgaatattgtaacactattgtgttttaaagacaaattatatattgtattgttgttgactgctagtactgtgtatctcacaaatggaaacaagatcggcaaaaggactacatggatttcatcttacaaagtgggaagggtatcatgggggcagggactgtcttgatgtctggagggggaaagcagactgaattcttgatgagtcagtcaccagcctttatggaatagatggtgtctgtgacactccctccccttatgttctctgtgtgacttccttagacttgcagtactgtgatgggcaacagcttcttttaggcctctcctttatagtttaaatgttctgctgtcagagtttggatatgtagtttgtggtggcttagaaaaacattctaagcacaaaataaatgtttctaagcacttcagtgatgttgaagagaagtttgatttctgttagtttcttttcagagtctcgtgtatcccaggctgacctccactactgtctcgccaagcgtgacggaagcaatgggagcacgccatcaccaggggccctcctgcatgcccagcaagccgagctcagtctccggcccaggagtgatcgctgggttcctgttgaaattgtgcttaatcatttgccactcggtggtgctcgggggcgtgaatggatgtgtcactgcatgtgtgcttcctgtagacccagacactagtcttctcgatcatgtcaggagaataatgctctgtaggcaacattttttttagtgtttccgttgtatctctaacattgtcgggtctttcattagaaaatgctttattacagaaaattaaaagtatcctgaattaaggtgttggtgttctcataagcacatt

SEQ ID NO: 21177 - DNA, 1118 bp, Mus musculus
atttatgtttatcacgtgaaagatgttataggcttatctgtttgcttatgggtttttcagccacttcctcatgaggcacggtttgagggggaggacaaaggggagttctctcttcttttctggagagccattcttagtacatagccattgttgcctcacagaggttggtccgaaatgaacactgaagttggtgggagtcttatgttctagccaaagatgtgtatgtgatggaagatggaagccccactcagagtccagaaggcgtgtgccgggacactgggctccttcacaaatggacagtgctctgtccgctgttttgttcttccatgaccttcccaggaagctctgggattggcctgtgcttgtgacatggtacattttgcagtttacaaagctggtgtatgttaacaaccattgggaatgtctcagaagacatttgtttggttgtatttcctttgttggtttttaatggtggccaacagatggtgatgctagtttctgctttaacaagatacccttactgtatgtatatgttatacgtatctagatacgtgggactctgtgtgtttatgtgtttgaagcttagtgactcttcatttggacttcagtatatgtcttgcacacatagaatttcttgtttaatgtcaaggatgcttagacacagacaatcagttgataaatgtagagttaagagtgacttttccatgtgtgcctttggccaagattctcaaccctgattgcataatagacttgtccagagagcttttaaaacatgcccgggtcccaccaggccagtttaaaccagtctcctgtggctgggagattgatttaaagtgtaccaggttgagacagtaatgcacagtaggattggagatccaagagtgtctttctattcattttgaagtaaaagtatacagaaaatattagtgatagagaatgggccacttttaagacagggcctgctactgttacagtgtataatgaagccaggagaatgagtttggtcaacttgatatccattgaagacgttgctcgcccttcaggagagaacttcatagcacaatgtctttctaggagatgtttttaatgatttagtattttacaacatttgtttacca

SEQ ID NO: 21178 - DNA, 1113 bp, Mus musculus
ctcatatttttgtacaaacttatgtttccaagtaaggaagaaatagatgtagggtcaggcagaacatagcagtgtttccccctggctaggtcagtgtcccagagcccgtggtggccacagacatgcccggtcaccatgctgccctcctgtgctggcacggcctcagcagggtcacatccagtaactctcacctgacactaaagaaggaaaaagaagttctgtgctcatgactttattttgcttttgttgaatgcttttagaagaaccaaagtttcagatgccagaatgtataagtgtctcagtgtccacagataggcaaagggcaaaggggtccgtcacctgatggcttcttttgcttccgagtcattgcatagtctcatcattgctcacagatgcttaggggccacaccctggtgaagtacgcgatctccagagcacagatggccgtgtattcccacagccctcggcatctcttgcagatgcagagatggaaaggttgcttgcttggctgtgtgctttataccttttttctctctgctccagaatccagtcttcagggttctgcccaggctgtcgatcgccatttgccctcttccaggcagacttggaaatagtcttaaagggttttcaaagacaagatcagccaggaaacagtttctcatttctgacccacgggagaatcatagacatatatgtatgtggagctccactttgaagaattgacattcttgtattgggcagtcgttttccaaagtaaaaggaggaaagtataaagccgtcactcacgctgcacttgctagcgtgtccatggctggcagacgcaccagtgcatctgtcacctccctgcgtcacctgcatctgtatttgcaacggtgagctttgtatctaagtaagctgtaaacagtcctttctgtgaaaggatcatcgtgtcgggatgatactgaaagtatgtttaaaaaaaaaaaaaaaagctacggcgttattttgtaattatttcttagaggtgtttcatggtatgcgcgaccatcaataaagttaacttttttgcctttaaggtgtctcttgttattatacgtctcaaacaggaaccagaaagaattcattgtatgcttt

SEQ ID NO: 21179 - DNA, 1180 bp, Mus musculus
ctcttccaggggacataggttcaattcccagcacctacaatggcagctcacacctgtctgtaactccagttccaggcttctgacacctacaaactgaggtacatgcaggcaaaacaccaatgaatataaaataaaaataaatgatatctacttacacatataataaatgcaaaaatacaaatatgtatatatacagacacacatgtgtatatacatttaaattcttggtgctattctcgtgtggtagtacatgcctttaatcctagtactcagaggcaggtggacctcttgagttcaaggctagtattcaaaaaaaaaaaaaaaaaaaaaaaaagcagtgcccagagttaaggccgaaagattgagcccacaagttaatttatccattttgttttaactagaattaaaataataatttttagatttatttttgtgggtttttttttttttttttttgcatgtttatattacaatgtccatgcctggtatccacgaaggtcagaagagctttaatctagaactaaagttatggatggctgtgaatcatgggtgctcggaactgaacccaggtcttgtgcaagagcaacatgtcctcttaaccactgagccgtctctccagccttctttaactagaatgatcatattattctgtggttcttgtaataatgttgtgtttaatgtagggacattctgtaaccactactgagaacagcgagctttttgtggaaaatgtgacagcatttatttttcagattgcatagatatcttatgactggaaattatcacctgtcttagtcagggtttctattcctgcacaatcatcatgaccaagaagcaagctggggaggaaagggtttattcagcttacactttccattctgctgttcatcaccaaaggaagtcaggactggaactcaaacaggtcagaaagcaggaactgatgcagaggccatggagggatgttctttactggctcgcttcccctggcttgctcagcttactttcttacagaacccaggactactagtccaggggtggcaccgcccacaagggaccctccccacttgatcactaattgagaaaatgctttacagttgggtctcaatggaggcccttccctaactaagctcctcctctgtgataactccagctgtgtcaagttaatacacaaaccatccag

SEQ ID NO: 21180 - DNA, 1139 bp, Mus musculus
tggcttttcctagactagtgcattagcacataactgctggcctgcccctccccctcccccaggctggtctctgcactagatctgaagctagttttttcaaaccagaaactacatgtgatccctttgggaataaataattttaggacacaaaagaggtgttttttttttttaactttttacttaaaatatttctaaagcatgttatgtaatatctctttttcaaagcagtgtacttggcattacttaatgtcacattattccagatttatttattcaggaaattcactgctgtcaggacctttggaccttacacaaatactgcctacttaatttttaaaacttatttctcttttgctttatagttagttatttatgtacattttatttgggtagaggaggctcaccagccatgctagtcaggggcttgaactctggctgtgaggcttggtagcaacccgccaccattatccactgagccatctccccacccctgtgtatttaaggcaggagctctagaagcctaagcagaagatgaccttgaattccccctacctttacctcccaagctctgggatggcaactgtatcctatttcctgctctactatctggttttgtatttgaaactttgtacatagttgggtttttgtttgttttttgttttgttttgtttttactttgtagattgttcattagcgtctatgttaagttctccctccctcgccctccctcaccttttctgggatgtagtgttgctctgctgcccaggctgaccttgaattcctgcgctcttgaattctcttggctctgcctcctgagtagctgcgactacaggtgcaggtcattgtaccaagccttttctttttcatttttttagatttatttcattttatatgtatgagtgtgttgcctgaatgtatgtttgtgcactgtgtgcatgcttggcgtctagggaagtccgaataaggcatcagatctgctggaacaggacttagggacacctgggagacactgtgtggactctgagagtcaaatacttctgcaggagcagcaagagttcttaactgttgaactgtctctccagccacttaaaaagtattcttagggctaaagagatggctcagtggttaagagcactgac

SEQ ID NO: 21181 - DNA, 1235 bp, Mus musculus
cacccggacacgaatggaagagcaccagagcactcccgttccggtcgggggggggggggttggatctttgcgcgcatgcgtgctgacgctcaagggcgggttttcggggaagacggtattgacccgcgaacaaccgaagctgttattctatcaaaatcaagacggcgtgtgtgccggactctgtggagactctgaagactaagttgaggtgtccgaaattgcgtcctgactcgtagaaagaaatctactaagctcttatgagggtggtgttttaaaaaacacgattttaacgttgcctgctcgtctgggtctccttaacaaatcctaaccccgcctccacgtctgttggggttttcagctgcagctctgggtttggaggagtgcgtttttattacggttcccgtggcttctcttttgctcttggcataattcctttgaaatttatttcttcgatgcattaacagactcagtgggatcaagactttttgttttgttttgttttttgtttttgtcgtatttagccctggattaaatgtcaaaatcgaaatttacagctttatggatattttgcctatagactttctaagttaatgactgcttcataattatttttggaactcaggtgtttttcaaattcacttccaccattacttcttttcctggtactcaaggagaaactgcgtccttaagttttgagaagctagaattccctctgttaagaacggcgggacttgatttgtgactaaccagatgaaaaacgttgagtttagcctggaaagggggcaaaggcttaaaatgccagcgaggaaactgcgagagattgtttctccaaaccaagggaataaattggctgtggtggaagatgagctgccccgtgttcctccagccctggctgcaaataaacgtcttgctgttgaaacgaggactagttctaatggaacgttatgtggtatgtgattccaaatgtttcagtttcccacccagtttacgttttctctctctctctctctctctctctctctctctctccctctctctctctctctctcttccgagacagggtttctctgtgcagctctggctgtcctggaactcactctgtagactaggctgtcctcgaactcagaaatccacctgcctctgcctcccaagtgctgggattaaaggcgtgcgccaccactgcccagccagtttcctttttttataagtcattagtctttatcactattttgagt

SEQ ID NO: 21182 - DNA, 1140 bp, Mus musculus
ctcgggaggcagaggcaggtggatttctgtgagtcagtccagcctggtctacagcgtgagtcccaagacagccagagctacattgaaagaccctgtctggggtgggggaaaaaaaagtgttgatttacttcatataaattgcttttaggttttgcattccttagtcttataaacccagcagccgagagtggaaaatatgaattttcagtattttaaagcaaaagtttggtattttgaatgttttaaaagtatcttaagttatgtgtctggaagtgtcagatctagcgtctgactccggcatctccaccgtaagtgcatgccaggcttaatgacatactgcaacccctgggatcaaggagtcatcttgtgttcagaccccaaaccagctgttgaaacaatgacatcatagtgtaatgacacaactggaaattctaaagttgaactttaaagcatcaagctacatttaatataggcagaaaaatatatattgctctaatggtgatttattaagatgtcctgttctttatgttttttttttcttttgctctgacagctgtaactgggtgtgaaggtattagcctttttgtctgttaacagtaatcaagtggtactttttaaaataacccgtctaaaattttttcttttaaagttctaaagctgtggttatttaaaaaatattttcatgaacttaaaaaaaaatcttcctagagtatatattagcaaatagcattttataagatggtaccttttattggtataatttttatttaaaatcatggtacaactatttggaggccttccagagtacaaggtcatatgtagcccaggctgagggtctcattagcccaggcagagggtctcacatagcctgggctaaggatgtcattagccctggctaactctaaccccactacggaccctcctgagtgctgctgtgtggtagcgcatgtggcttatgctggaggtgtctgtgttaaacaggcactacaaactaagccacgcccatccccatccctcctttgttctcttgctagtttccatgcagtctcattctcagtgccatttgtagccctcccccagggccgatacctgttgggatggctcctgttcagtacctaggagtaagagctaacttacttg

SEQ ID NO: 21183 - DNA, 1097 bp, Mus musculus
ggtagagcacctgcccagcatgcacaaagctctgggttctaatcctatctatctatctatctatctatctatctatctatctatctatctatctactgggcatggtgacacaagtctataattctggtattcaggaggtgcaggcagaaggatcagacattcaaggtcatcttgaatgcagtgagtttgaggtcagcctaggttatgtgaggttctgtcttaaaataagcagtttgataagcagtgacatttttatcatatcaattttgagttttacctagaaatttatcacacatataatgcagtggtttgaatgagaataactcccatatatgtgagtgcttggtccacagttagtggaactgtttgggaaggactaggaggtgtggtcttgttgaaggaggtgtgttactgtggggtgggctttgaggtttaaaaagcccagggctgtggggcaagtggaccatgccaccaaacagaagaacttgtaagatcgagtaagctcagaccctgagagtctcagagagttgagattggcagaagtccagccgcttcctacccatttctgtacctgctctggaacaggaaaccatgacaccccactgagggggccatgacaatcagtaaggaaaacacccggagtccttcccccatacaagcagagtatcactaacatctgcaactgagccaataggaagtacccaccccactcctcaatgtttataaagttcctgtccacatggaataaagtgcacattacttcactgaggatcttctgagagcggctgttttttactgagctgtaacacttgaggaagagttctctctcccgaggaattcatcactgaactttgaatcagcctggctgaccaggttcacactgctaccacagccaccgtcaccgtcaccaccactgtggctgacaaagcctgggaccccggcttcctgccccatgcaggctgcccagacctccttgtttctcttccaaggcctgtaacacttcggcatttccggctggaccagagccccgtggaacctatttgttcaggtccctcctttccccttgggtggttagtagatgacacaggtcattccca

SEQ ID NO: 21184 - DNA, 1143 bp, Mus musculus
agagctagggagcctaagacagtatcagcattatttatgggtaggagaaagcagctgagatgtcttcagccccattggttttccatgtaccccacgtggccccaataagtggaattaagctacttcaaaggaaagcttaaagtatggcctttcccacccctgcggtgctggctcttagtctctctgttgtgggtgtcctgctgcacaacattttgccttcctgtttactgctgtttagttaacacagagttgtatgaggagatcataggtgttcagctaaaacgaagtgggcaggaatcgtggctcgggactcggggagtgtctgtctagctttggaaatgacaagtaggtgcatgcaacagctggaggtaaataattggctggctaagaaccctccgttgtatttgagctcccggccttctctggagaattcggtttgactatgaactctattctcttggaacactgactttttttttttaaactttttcaccagttcactaaagcagtgaagcactttggggaagaggctggcaagatccagccagatgagttcttcgggatctttgatcagtttcttcaggccgtggccgaagcgaaacaggaaaatgagaacatgagaaaaaggaaggaggaggaggaacggcgggctcgcctggaagctcaggtgagaggggctccctcagcgggccctcctggcagcctgtggccacagccctcgcgtttcagtgggttggcctttcccctttgtggtgccacatgacgacagatactccagcacccagctatgaccagacccaggccctgtgttcccaaagcactgtcaaggagggaagagcatgtgttctagagtgctgcaggtagctgagagctgtgccaccgttcccttgagcagtttggctgcctcttcccaaaggctgaaaaggtggagtcacatcctgcgagtttatctccttagaaactgccttcaagaagtgaccataaatttgcaaaaggactttagcatcccttaaaatagctgtaaattatctacttactgcctcaaatggtttttttttttttttttttttaagaaaagactatggcggaacttacctagccactgggaagcgttggttttcactgtccgttgcttttgcagtg

SEQ ID NO: 21185 - DNA, 1883 bp, Mus musculus
agcacaatactttctcctaaaacagatgacagacattccttcaaagggggtgggggggtggagaaaagaggaaattttaaaaaaaaaaggcttgtcttgtgaagtattttatggttcccaaggttggtgtagtgagacgattttcactggtagaaatggagttggaaaacagacgggtgagctcaacggttgtgggccaggcaccgccacccgcatcagtgactgacatagcggaacagctccaaggttccgatgctgctgttggggtacacgcttgtctagggtacaaacgtctgttgagaacatcttgcacacattcatatcatgtagaatgtcaatcacacttcgtttatatatttaaaacttgaacaccgtttcccccctaatttcatcaatttttctgccaagtgctcttgatgacttctttcattggttttttggtttttttgttttttgaaatcacactttcccagtgatgcctcctggatcctggttaagaaccagaattgccagagcttcctcattgacctaacaatacagatctatagacctgacaaataagatttcccatccaagacttagtggaagaactccctgaagattcttcttaaaggcataggggtgcttctggggcgtcttcagttttcctcacaggccgtgctgcatgtcccaggataaaggacactcagatggacacgaaacgtcaacagtatctacagggatgctcaaatctatttatctcaaagaatatttgaagtgatcgctgttacgtgttgtcattttaaattgtgtgtcagtgacgctacctgtacaatttcagtccaaaaaataaagctctcagggagataaaacacaatgagcagtagagaataaaaatggacgcttaccactgacctgccagctcctagtatccttaaattatatggtatgtaaagaggactgttactattgttttcttttgctttatttatttgtactagggtgtggggagggactagcattttctcttgttttccatctttccttttgtggttgggtttcctgtggagagagtagtttttcctattgcactacaatattatttactcgctaaattgagttttcttttcagtcaagtatcacatatttattaagcacttactatgtaccaggcatagtagagctgtagtggtaagcaagacagagtccctgcccaccaaggagttcacattctccacggtgttttcagggacggtagaataccaatgtgcatagtagacaggaaccgtactatttaaaaactaatctgtatgaactataatgtttagtgcagatggcgaggaatctgtgctgtgtaaaagctgtgaagcagcgctctaagaattgtcaagagctgtgctttttactttttttttgtctttcttcatcacaaacttagcgaccttctacccattatgtggaagcaaatggctcttcactaaggcagtcacagggacaaagcagagctgactctcccagccccgcgctaaccacaggctgcaagcatcctggctgcggtgctgatggagacgtggcgaggaggagtggggtggggtgatggatttcattgttctgatctaaagtgcctctttgtatattcttttctattgatagcaggaaaagtttggtccagctcagttttggaactgtggagagagactcacaacagagagcaagtctgtgtcgcatgtccccttgcccctcttagaatcatcctcacatccatgtaggcctcccagtaggccacctttgccatccccagcttctgggtttattttcctaaagactgtgtgcaggaaacttcatgtgccattgttacaaacaaacaaaaatcgactttttagactggtgctggtgtaagtagc

SEQ ID NO: 21186 - DNA, 1325 bp, Mus musculus
cctgtggacggtgtgatggctagacctggggctctcaagtccgttttagctcaagctttcagagtcccagccatgagtgtataaggagcagtggtttagctgggtttgctaatctgtttctcttttcctttccaatgatcccatagaactgctatgatctcctggtcaggaagaaaagacttatcgttctcttcagccactggctactgcacgcctatggcatagtctccatctccagagtggacaggctggaacacgacctaccgcttttggctttggtacctacaccagctctgttttacttgtttactgcaaaatttaccgaaccatcacggatactctcagaaggggccaatggacattgaatataaaatgccaaaaaaaaaaaaaaaaaaaaaaaaaaatcccgaaaagtattcttcattaaaaaaaagtaaagaagaattaaaatgtattaatagcattctttcatacatgggaagaagattgtccagatattataatgcttgtgctttatctttggatttattggaccttgtggttacacttggagactacagggcctcctgttactgtgctctgcctatcttagctatcacaccggaagcccaaacaggcaggggtaattgctctttggagcacggccatgtttttgtacacctgtgctgatggtgtctccctgctttttgtgaagaacctttaacaagtgtattctgaactcaattgctgtggcatcattatgccttctgttgtctatacattaccttcgaggaattacaaaggcagatgtgcttgtggagtgtgatggcaaaaacagaaacaaaggatgtctttgtcaatggctatttattttcaccaatacagtgtttagtaatatttcaaaaataaagcataatttatataacgaactttctgtttagagacagtttggttgaagacatgttcagattattgttcctgtaaagaagaaaacaataaagaatttaattgtaaaataactccatgttctgataattcttttttgctacagtgattatggaagtaattaaaaatgttaagcattacgactcatatttcttctgtctactgaataaatatgctcactcccattctctcatattcaatttcttaaaacaagatatataggccacactgtattgatcctgagacttttttccagtcatgacatttctgagtcaggatcttataactggaagtctctgagatagagtgaaatatgacatacatagaaggtccccgtggctggttttggatgggtaagtggccatgttcgtatctgaaggctttgagagactcatgttcta

SEQ ID NO: 21187 - DNA, 1247 bp, Mus musculus
ctcgttactgcaaattgattgtttccctttcctggtaccataatcttagaggcaaactttgagacaggtgttttgaggctcttcctgtactcttaggatatatgagccgccccctccccacccccgtgtcaagcactaaagtatagagtgtgttagatgtggtttttgatttcgtgttgctaaaaaaaaaaaaagaaaagaaaagaaaaaaagtgcatgatggtgagagcccacgttctccctcctccctcgatgtcctcccctctgcaacgcttctgtagcttctactgtccctgtggctaggcctttcttgccaagtgcgctgacacatagtggatcgcttatcatgtccttgggttgctggatggattcatctctaataacactatatagaattgtaggccaatgttttagcatttccccacacacagagaacataaaaattaatataaaacagttgaccgtacatatggtgatccattttgtataacttagaatgatcgaattaaagaataaatccaaaatgaacgcacagtacttttctcctatgggatgcctgggctgatttacatgtatggtaactaaaggtgccagcatgttgactttattacaatttgtattacttcctctgtagttcctaatggactcaatcacagactctggatatttgcacttatgtacttgatactgaatgcatcaataaatgtgactaaatgtagacatttctctctgtctttaatgatcttactggaaaatgaaaaaaacagaaaagtcttaaagaggaagtcacttgaggaggagccacaaggactgaggtcaagtgttcaacgtgctcccatctccagaaccgcagggtccagccccagcctgggttacagcttcattgtgttaatactagaaatcaccacagaaaggctatttcatattgtactctgatggatcagcgtggatattttgcagtttctaaaagtggtatgagtccttatgtaaacatttatcatcttataaaatactggcataaaaccattgcaggcatcacgaactcttcccgttgacaagtaccctttgagatcctgctgtgtacagaacagaataaatagggcactgggtcaaagtccacagagttcctgtacccaccatgctaaatttccctgtgatagacctcttgtaaaaaaattatttgcacttttgagggagtgggggtagggttccatgtagtccaggctatcatcactctattatgtagc

SEQ ID NO: 21188 - DNA, 1189 bp, Mus musculus
ccttgtaactccagtttcaagggatccaataaactcttttaaactccacaggcaatgctttcctgtgcataaacccatgcgtgtgcacacgcacgtgtgtgcgcgcgcacactcacacacaaataaaacattgaaaattcatttatttatatataatgtatatgtaatgataagaatttttccaactttattgactcataggaatctttagtattcaggagattacaaagacctcaagaatctgtgagagaagaactgtctgtccttctgttccatagatttatatttagtacctgttagatctcaggtgaaagaaacagaaaatgtctcagccggtacctgagttcaattcctggaacctacataataagagagtacatgcacacagagacacatacagagagacacacagacacacagagtcacacacactcactcacagagacacaaacacacacacagagagagagagagagagagagagagagagagagagagagagagagaccagacacacacacagcagaggcattgctaaattattgtgttcttttctagtgtctttatagctttgtttatgtttctttttccattctatagcccagtgatgtgcagttcagtatgtaaacttgggctaaatcatgtaaggatcctgcctctggctcttaagcgctgggattataagtgtcattacagagcattaggattaataaacgttacattggaaatttgttaaggtcatatttattaaaattatcttttttcatatttaggcaccatcctcattgcgaaggtttttcttggccagagtattcaggctcgtgaccaggagcccatcaataaagccaactatcccatggttaactcggtgtttgttcctcagagacatgtgctaagtatgtctgccaaagagaaagacgggcgacttcatcactctcagtacaaaccattcctacctaatacaacagtctataacttatagcatggtctaatctgaacctaacaaggcctataaacttttctctgaaaacctacttctggatattaataattttctgttattcatattaataatatgtgttgaaatttatttcaataatttatgtgtgataggtatgtgtgtatgtgtgtgtatactcacctatacattaaaatctcagtatctgttctagagtacatacaatacaca

SEQ ID NO: 21189 - DNA, 1088 bp, Mus musculus
acctacccacccccattcccctacccacccactccccctttttggccctggcgttcccctgtactggggcatataaagtttgcctgtccgatgggcctctctttccagtgatggccgactaggccatcttttgatttattcatttctttctcctgtttgtattttcctacatttctttaagggattcatttgtttcctctttaaaggctcctgcctgtttgcctgtgttttcctctatttctttaagggaattatttatatcctccttaaaggcctctattgtcttcatgagctgggattcaagatcatagtcttgctcttcaggtattttaggataccaggggcatgcggtagtaggagagctgggttctgattgtgccatattgtgttggcttctgttgattaaatcttgctcttgcctttcgccatctggttttctctggtgttggttggcctgggtatctgggttggagcagacttcccaggaggcagttggagccatgtgtctttggtttgagcaggcctcctgggaggcagttggatctgtgggctggggtacagtgtgctgatcggccacttctgctgatgtaggtgtggaccaggaagaagatggagcttcccaagtcttctaggcttgctagggtcccagcaggtgaagggggaatctggggcagggggatgtgtctcacttgtatgtgtgtcaggctagagctggcctcctgggaggaaggcacagctgtgggatgtgttgagatgctctgatctatgactgttagtgtggactagaagttaaatcaagattattaaaaaaaaaaatatgatataggctgggtaaaaccttgggaaagaagtagaactttctagcgaggtaatttttaatcaggtataattcaatatgtatacacttactattatataaaaggcaaatttaatgaatagaaaagtcataattttgtaatactaaaaatgtagacagaatgatggtttttaaattagttgtagaagaaaaatggaaaatcttctaaacaggcattttgcaaaactacttgtttgtctttttaatatctagtttctgtttctctttgtat

SEQ ID NO: 21190 - DNA, 1219 bp, Mus musculus
gtgcgcctcgtggggtcgaaggggcaggctgagtcccctgtgccgggcgctaaccgagactgcacctggagaccggcgtccgtaggcaggtgtaagagtcgggtgcggacgacgacgacagccgggtttggagaggccctctgcgccctagcgcgaaggccgcgcgcctggctcgcacccaggacgtccacgctccctagggatcggcccgcggcagcgacctgaggagcagcgcagggcagtgacgtcaccgccgcccctcccccgcccaagccgcagttccggccctcccacatccgggtctctccagcccatgggccgcgccgcagctgcagggccgggggtgggggaaacggcggcgcggggcggggcggggccgggcgaggggcagcggtgtcgagagcgcgcgtgcgcggggccgcgctagaggcggcggcggtggcggcgctaggggcgggagcgcgcgcaggagctagaacgccgtggtctccgcgccggccgggtccgcagctcgggatcgggtggctggggcggggggaggggggcccaggcaggtggggcggaaagcgatgagtcctcggcgcctcctccgcctcccgcgggccccgctctctgcctcccgctccgacgcccggatgatctgagccgcgagggctccgagagccgggggcccggacccagcccggctcctcccctcctccgcccgggcccggccgccgtcgcgggaccccgtgcccggccgccgtcgccaccgccgccccggccgaccgagggacccgcccgcccgcggctgctccgggtaagcgcggcgcgagggcgaggaagagggcgagggcgggcgggcggagggcctgtgcggcggcggccaggcctggggcctgtaaacaagccgggcgtctgcccgggcgatcccgggaggagacgcgacaactccaccccctgggcggcctcctccccgagcccgcgccgggtggcgaggggttaacacgcggcgggggcggaggcggggtgtgtgcggcggctgggagggggcgcgaccctcggccgggcggggcggacactggcggccgcggaactttcggggagcctgcagcggggtctccccttgaagcagatcagcccgtgagttcactggatttggagactcacccgctgggttgaaagtgaggcccccaactcagtagtgatgcctccatttcattcattattccggcttgga

SEQ ID NO: 21191 - DNA, 2860 bp, Mus musculus
cgcatgtgggtaggtagcacaagtggccaccaaagaatacctccacattggatgtaacctggaacggattcctctggggtgctggtgatagttaaatggaggcacctgacctcccacatacctgcctattctccttacaaataaacaaagtagttatgattggcaagttataaaaataatcaaggttttaaaaaaatagaaggaaaatcaaatactttcttgaccttttctttccagggaagtcgagacaacatgagtgtgattttgatctgttttccaagtgcacccaaagtctcggcagaggcggtgaagaaggaggcggagctggacaagtacctggagagcagagtagaaggtggatcattaacaaaaataaataagtagctttctttcaaaacaaaaccttccacacaaagtctaaccttttagaaaggttttagtccattacatgcctttagcatgtagtactagtgtggaaaggacgttctgtagtaaccatttgtttagctgtgttccctgggccctgtgcactatggttaggaaacttccaagtgactgaagcatggctctaagattcttgctaaacccactggcatgtgtaatgtcatgccaggcaagcctgagtatcctcctctgaaaagacgtactgcaagtctctggaatatttttaattacctgtgtttggttggttggattttgggtggttttgttttgttggttttggttttgagaacgtgaaggtcaaatgtttagcaacaactgtcgggtcccacagctttgaaactctgctttcagctggttcacggctttcctcctgagccatgagcagtttgagcttacaacacagacctggcaggaattcccagatgaatcaagaaagtagcttgcaaccccaggagtgtgaatctgatgtctctgcagatcactttagagtagaacaaatggaaagtgtttgtacctcaaaaaaaaaaaaaaaaaaaaagcaatgcatttaagtatttggagaaattaatcttttgttggtggggtttggttacttggttgtggaacttgggaccaaatctaaggttttttgcacagaagggaagtatttccctctgtggcacacctcggcccttacgtgatctttgataatgctgttcaccacgcataaaataagcattgtctcccctgtgcgtacacacaatgcatatggatcatgtaggccctataagcagaaacacttccatgtaaaaagtgtgtttgactcttctgataccataattggcatgcaagcttcaatctgccatgtccttgcatctcattgtgtcttcattattaaaattagtgtgcatcttaattttattttctccatttcagttgcttgatttcatttgtaatctgcctattagcatcatgtttggttttggttgtcagtgtttctagagaccggagacggtcttgttcttcttaccccctccctccttgtatggtaatgtctgtgtttgtactgtttagtatttcattcattgagtgtactagtcagtgcattttttctcactattttaaggttcttgtaactttttatatcttaagtaatttcaatatgttatttgtagataaaacagtaaagttaaaaatacttagaatgttacagggtgagtggtctaaattgctgatcggtagaaaaatatgcagccaaaaaatatgtatagggttaagttcctattgatgtcttggcactttaacctgggcatatgttttattggtataaagaattaataaataccttagtatttttactgtgaagtgatatccagtttttggaatgaattgctatttttctctttaagcgtgctttattttaaagtaaatttttggtggaattatcaaacattcactacatacatataactttataagttttatatttcatactatcaagtgagagttgccatctgggcagagtttacattagtagtcaatatttttgctatattcaagtgttttaacatgcagttggaggtaatgtcataaattaagatgcaactagagagaaaatgatgttcggtaaagctgctgctatttaaaggcatagaatgtgactttgcactgtaaatgatgtatgtcttaaatgaagatacacagcttctaaagcaggcaccaaatacctttttaaatacatgccttgactaagttgttgtggccctactaagcctcattgatttgctgtcgaccgttttggcctgtgtgactccaccattgggaaggataatgcttccctcctgctgctgtgtccgccttcactgaaggctgcttgtccttatgaaggcggagtgctgctgtgctgcggtccttgggccctttaaggtcatgcttacctgcgtgaccttcccaccactgctactcacctggctccctgaaaagttgctaatgtgagggagcactttattaaggaaggtgtggggggggattatgtttgtgtctgtgttcatgaaacataagagaatttcgtggcatacatattctttatgaaggtatcaagtcttttacagtctgttaaattgtatagtccaagaacaattaaaagaatttccttctcattcaatattttctagaagccaaaggaagagggagggatagtgtaattgttcagtttaaatgattgtcccacatcaaataagagattctaattgtttctaaagcttttattattcataaaatatttttcctgtattcttcacaattaaaatatcctaacattttcgtgaagatgtaagctacatcagatacagtggggtttttacttaggactgaaaccatcattggttaaatttatcatcagtgttcatttctcttgtatctagagctctaatcaaat

SEQ ID NO: 21192 - DNA, 1595 bp, Mus musculus
taattctcttggtttaatgatatatttatccatcctcacagtgtttttctaaatcaacgggtttatttgtttgcttatggaaaatgttggtgggtggggccaggccaaaacaagttttaatttttttttagtcaaacagattaaatattagtatttcatatatgtataaacataaactttaaaaaccaagtaagttctggagatgagtgttatagagcttgtctttctgcattagtgtctttctgaagtgtacattttagcatctggaagatttcctttaatgccttgttttgtttgttttcctatgtgaaggattctgcgtcaaccgatgatatgtggtaaagccgctcacccagccgtggactcaccttcgcctgcaaaggggaagccagctcatccttgccgagcctttaccatccatcaccgacttcacaggagggtctgacacgggtgaggactgcagcttcagcgatggaacagctagcccagaatggattttctttttttattgtaaatttgagacttatgtaagcgtgatttcaaaccgtaattcatgttgtaaatcagactccagcaatttttgttgtatgattttggtttttgtaaagtgtaattgtccttgtacaaagtgctcatatttaattatgaactgctttaaaatcactatcagtgaatgataaaggaaatttggcttgttgtgtgacacaacagacatagtcatgctgtgtctggactcggttgggatagggaaagcggcagccacatagctgcatgctacgtgcacacgattaggaagaattccaaaagcttacacagctgtcacccaggctcatggaaactgtctctgttccggcgaggactggctcactgatacagccatcgctctcacctgtctctaggatgtcctctcctcgtagccaagatattgcagctgatcctgtatattcatgagagtatctatcaattttgggctaacatgccttgattctcttgcacctctttatgagttcttacatttaattactaattggtaagcagcagcttcctacacagtaggagactgccacatttttttcctatcatgactggctgggcctgctgctgttcctagtaagatattccgaattccattttatcaataaagcttggtttaacaaacaagacatgtaatcatgtatgcgtgattcctcggtcaccccggcttcagaccccactcggggagagaaagatgtcatgtttccttaaactggatgatggtgttagcatccaggtgcaggtggatcggaagattgacgtctgctgtctcctaatctgttttaattgcgtttcttccaggctgcttacttctcattaagatgtgtgtcagcttgactttacctactgttaattaaagtaattgtcaaagtttgacaaccctaaccctgtgatagatgtgtgtgtgttgaatgtgtgtttgcctgtaacttttaattgacccacgtctttagaatctaagaggttaagatacatttgtgatttgaaataaaagcatgttgataatatttagctgttggcctttaaaaatacatttcacagcttgaggaattgtagatata

SEQ ID NO: 21193 - DNA, 1126 bp, Mus musculus
tggaaattcatagcagccagaatacagaaccaatcccaaacttacaataaatgcttgatgtctaaacctgtgatagagttgggagtatggtaatattctaagctgtggctttgcagagctgtaaacgtgcattgtatgaaaccctgtgcttctggtacagactggccgcttggctgacagccgaagctgagatcctaacaggccttcgttctactgggaaaccttcagtttttgagattgaagctttcatgatggaaagctgtgtatcacactatagcagcttggttagagccttgatatcagagagtctcaacaacaacaacaaaaaggaagttagaatattcctctggtgtcattgacaccaaaggttggagtaaggaccatgtgacctgatgtgactagatctttccacaagagttggcgtcatagaactacaggaaggaggtgtgcatcataaaagcaggtatgctggaaagatgccatcctctttcctgataattaccatctcaggacacaaatgcctcaaatgttttggaagtttggcttttttgggggctttgctttttttttttttttttgggagggaaaaagaagttcttgtgtggtggtaatgtaatattcagagtatactttaatgttagtgagaaattcagttctgcatagcaggcttttgctaacttacctcttgaaagttttgtgtctctgggcagtggtggcgaacgcctttaatcccagcatccgcaggcagaggcaggcggatctgttgagttggatgccagccagggctccagagacactgtttgatctcttcacttcagagcacttctcagacatcattacttactgtgcattcacttgaccctaggccgttatgtggctgtccctgctgaacttcttaggccatgtagtagtagaagtaggggtggggcagccaggtgtgggggtgtgcctgtggtcctagcacccgagaggctgcagcaggaggatcatgggcttaagaataaactgggccacaaagtgacaccctgtttggaaggatttttttttaaaagaaattgacaatgagttatgttgatacaaattgtttgaattagctacttacaatgtaagtttgagcaggtaaacc

SEQ ID NO: 21194 - DNA, 1934 bp, Mus musculus
gttatttaccttaaacacagttacctgaaataacttatgaagaaagatttattacagttcatagtctgagggttcttggttggttccattgctttgggccaattgtagcacacatcataaaagaagttcataatggagtcaaacacctctgtaggcttagatttttcaaggtccactttagggttctttaatgctctaacctcccttctagcccactgaccaaatgtagggaaaaaaatggttactaggacaaggggttgtggacctatttagaagtagttatttggggagactccaccattcattatcaggatactagcagtccagttcaatagcaaacaccaaacatgaatcagtagtggttgcacaatccagcagaaacagtgaggctttgccttagcacaagtcagcagaaatggcaagaaacagctgaaataccataagaagttctttggtgcatttctctttacgaagtcatgacaagcaaagatcagcgaagaccagcaaatcatttcaaggcataccaatgcaagagcatcctctcatgcctatcgggttccatttacattctctccaaacatcaggagccctctcactagtctgcctcagcaaaacatcctttcatgtgtctgcttcaacaaaatatcctctcacaagacagcttccagaaaaacatcacatgacacaactgagtttccaaggaaacgagaaatttctacttcatagcttatctatgaccaggaatttttttttcaaagaagagatcctacagtccctttcagagcatgctacctaccatgatttaaaggactcttataccctatctcctaaaattttactacctcctagtaacgacaagctggggattaaacctgtgacacagatccagattatagcataaagcgatattaaacaaattgcttaatttcctttttaagaagttaacagagtatactgtgaaatttttaaaagaaaaaccactcctcaatattttccttcaatttcagcatttttggttatcatttaatttttttttcatgtagtgttaagcaaaatggagctgggaataagagaagaattcagttacaaaataactacttttctattcctttgaggatatgtatatatctcactttatcagttctagtttcacttctctgtgaagtgataacagaataatatggtgcattctaccttatgcagtatatgtgtgtgcttttaagtaacagtcactgttaacatttttctgttactttccatttacaggccctatacattgaacactttggaaagtccatagaaaataatagtgttgaagaggaaagagatgagaattttcctcaaactcctgaaactccttcatttctaagaactcctgaagcgctgaagacacctgaatctatggagaaaatgcagttccctaaaagccccttctttgaaatgtatgatttttattaataattctaatttatttatatattgagcaatatacgtaatttatagtaataattactaaagattctactccctgttttttgtttgtttgcttgtttgtttgtctttctgatggttggggtttgttattaaagtgaagatgataaagagcctgagtttccagtgagacaatatggaggcttaagattttttttcctccatttcttatttattcgttgaaccaatggccagtaagtacctcctgtatactaggtattatgctccatctatctaaccttctattttgccctttttttattagatattttctttatttacatttcaaatgttatcccctttcctagtttcccctcccccctccccctgctccccaacccacccactcccatcctggtcctggcattcccctatactggggcataagaggcttaagattttacaaaggataaaagatgtggaaaaattaaagtcaagctcaa

SEQ ID NO: 21195 - DNA, 1172 bp, Mus musculus
gaggaggcagcgggtctgaggagaaggcggcgggtctgaggagaaggcggcgggtctgaggaggaggcagcgggtctgaggagagggcggcgggtctgaggagagggcggcgggtctgaggaggaggcagcgggtctgaggaggaggcagcgggtctgaggagagggcagcgggtctgaggagaaggcagcaggtctgaagaggccgccgcgctccacagagccacgtgccagggcctggcgccagggaccagggcctccgctgaggggagcatctgcggaaggggccatgcccttgggcggattcctggcatgaatgcaggagtggggatgcgaaaccagcctggggcgggcggggctaggactgagagctgtggaaaaccttaaaaagcaaaagaaaacaaaacacatggcggtcactcgtcaacttacaccatttctctagagccccttccacgaagggcgctaagagttcccctacagttgacgcataagttttggaatagatcataagaaatctagatgtctgggttctagtcgttcaaaaactcaacagcagtcacgaaggaaaacttctagaactttccgtcttgcggagccctttgggtatccactcagttgtttatctgggctctggaagcgctggctgggaattcagcagctaattggaagagactcccttctcaccatgtcttaatccacttacattttccttttaagaatgctatactagaaaggttcttactttatgtatgctcttttatatatggcttctgaaagttttattatttattttacacagtgtccaagatgaatgataatctgtttgtcagtttggacaggcttttgttggaatttggtaggtataaaatgaaaataaagaagaaatagtaatttgtattaacatttgacatttaaccatgaagaaaaatctcaaatgtttatttttagttttccagtatgagcaagacataagtattaaagaagatacgattcaaagaattaatagtaagtagttttgcatgaaataaatattttagtcttttggttttatcttatatagcatagtgcataattaaactgcttagggcaacttgtatgtatgagaggggggtctttcttttgagtaatgatgagctatttattttaggagtgaataattgaaacagtatt

SEQ ID NO: 21196 - DNA, 1543 bp, Mus musculus
ctagtctattctttcagtaaaataagggccagttgatatgcagcccatgtatgtgtgaatggaatatggtaaaccccgtgatctccttgcacagaattgcaaatgacttttttccccaacaccaagggcccagcctcggagcccttggagttcacgtggcagaatatccttcttacataaaccaatgcttgaagatgctgcaaaggatcctctagtgattcctgatgaggaatcagaatagaggtaaataaccccctttaaatcccacccctgctgctggctgtggggttttctggtgccagcctatctatgcactctatagccagaattggcactcagctcttagttacgtctagtagagagaatggtctctagcattcaaaggaggttcattccctccccccccaaaacaaacaaaggcccctgtgttgtactgtataaatatctcatgtagatttatagtgaagacttaatacatgtctggtgcctttcttgtgttgtgaaaggcaagtagatgttgtagccataggtctgttttttaaatccatagttgaattgcacactgaccttaactctctgtatgtacccttgttattctgcatgttaaagctggaattcttgggcgtgtatggcagactaccctgctacatcctcaatatgtgaacattagtgcataaactcgagtcctcttttctcaagtgtttttgacagatcatctcataaaaataattcaggaagtctggggaaaagtcactatgttttacaagagcagtttcaaagtcttcctaaaacttggatgatagaccctaatggttattttgtgtctaatcgagacatttcgatttaattagatattaccaccatatgttttattaatccaaattatatcgcatgtgactctttgggttttcagggtttctcaaaaaaaaaaaaaagtgtatcattttgttgcatgtactgtatgttcagaggcaatcagttgtatactcaatatggttttactgtgccttacctgaagagaaactctacacagaatgtatgacacggggtggggaacagagcctctctactgcactgttaggtgatagcacacggcatggcccagagcatttctgtgcttaattacccaaccaaagagatctaaagtctgtatgttgtactgtaatgggggttatgcctggacaatttaagtgttttatttgttttctgaaatgatgtgaacttatttttctaaacactatgctaaataaactttatatttatacatactttgtgttgaagaaagattatttggggaaatgctactttttaaaatgagagtaacccatttcattagacaagaaacaggagttttatgtttgcctagaagagaaaagagtaagaagctgggcggtggtggcgcacgcctttaagcactcgggaggcagaggcaggtggatttctgagttcgaggccagcctggtctacaaagtgagttccaggacagccagggctacagagaaaccctgtcttgaaaaaccaaaaaaaaaaaaaaaaaaaaaga

SEQ ID NO: 21197 - DNA, 1432 bp, Mus musculus
accttgtggcctttttattactagtcaggtacagaagtgtcaacagcagtgttgatggttcttttgtaccgtcaaacagggttaagtttaccacagaacccctgcataaggcaggacttccgtttcactaaatatcatgtggaaggtttgccatgcacatggatagacagatatagtcgatgcttttcattataatgaaagtagaaaagtatagaaagaccatgaaacagcagttctgcaggctatgactatgaaaacaacctttttttttttaattctgttttggttttagttttcttgagacagggtttctctgttaaacagagaaactgttactgaccatcctggaactcactctgtagaccaggctggccttgaactcacagagattcacctgcctctgccttccaagtaccgggattcaaggcatgggccaccactacccagcttgacaacaaccacttaaaataaaaaatatatatgtaaattgtactaaaaatctgttcaactgaagctcatttccagtgttttgaattggtcggtatacatgactgttgcctgtcgtatttaatgaagtaaatccttccggtttctgtgggaaattttgtttaaaagttttagtaggactctgcatctatgatataacaatgcaatgcctttatgctgttagtccagggcatctctgatttcagaaagaaggcgactttttctaaggtgacttctcagttgctaagcacaaagatagtaccactccttggttttgttaaggtggtggaagggtttctaactaacacactcatcagctgagcctgcagagtaacggtcactggggacttaacatttgttgttacacaagggaactttcagtcaagattaagagccctatgaagaattctgtgcccatcattttgatcaagaacctaaatcccatttttgtgaaattggtgaatgtccctcaattgctgaaatatgcaatttgggccagaggttgttgtttgtttgttttggatgttcttgttttattttcatgaagccagttgcttcagtgtggttttccactctgacactacttacacagcttggctgcccccgtctcccagttatttactgatcatattaatgtgattagcatcctggtcttgtagtatagtttacatttttaaaaaatgttattttttactagattgctgcagatatcaagaggacattattttaaaatacctgtctggtaagggaagtgggaaagtcaaaacgttctataaggcgggtgtgtgtgggtgtctgcgtgcgtgtgatggaaaactcccatatatctgacaaaagtatcttttttattccgagttcttcctccttttctccttatgagaaagaaaagatagcacaaaactaagtacttacctaggaaatgtcttcatattccaacatgatgagc

SEQ ID NO: 21198 - DNA, 1445 bp, Mus musculus
gtggggcagtggtggtgcacacctttaatcccagcacttgggaggcagagacaggtggatttctgagttccaggccagcctggtctacagagtgagttccaggacagccagggctacacagagaaaccttgtctggaaaaaccgaaacaaaacaaaacaaaacaacaacaaaaaaagctttcgtagaaatgttagtagcataatagtgtgcgtgctggaaaggacagtattcgctggatgtctaaatagcttccaaaaaaacgaatcagtactggaaatggtgaaagagtggatattttaacatttcatccaaatgtacaggttataaggactattcttagaattcattgtcctttgtaacttagtagtagttgggcaatccatatatatgtgtgtgtgaacctgaacatttcaatcttggaattcctttccaaatgtagaatcagttttacacttgctttgcagaatgtcactggcttacggtcttcaaatcaatggtgtactttttgttttctttcaggtatttaaaccacgtccgggctgcatctccacaggatcttgctggcggctatacttcttctcttgcttgtcacagagcgctacaggatgcgttcagtgggctcttctggcagcccagataacctgtattttctcatgtataagatctggattgtggagccaaaccaaggggtttgaaagtatagaggtttgtaaagttccagccccgcagctgcacagcacaccaccactgctgctgtgctcaggtgtttattgcagtctggaccaagctgagaaatgtgttgcatatagattcatggaagaggtttattttttacttctgttctttagacagggatgaagaacattaaacctcatctgacagaaaagaaataaatgatttgcctatgtttggagttgacttacacattttataaaaaataaagcctgactttatggtacatttttgtgggatttttttttcttcctcctcctccttgtgtttttctggaacatatttccaaatgcctttttgattataacattcagtgctattatccaagtctatattttccctataaaaacttctttttccccttaatgtcgtattgatagtggtacagacaagtggagatgtttcatcttagcagcaggccgtgtcaagaaagcacaactgtgatgtggctcttcctcagcagtaagagtctgggggactgttttgagccatgcaaagtgaggcaaacctaatgtggttcccagctgtgagccacagaaatgataaaccagagcaggccattaacctgctttaatggcagattcaaagatgtgagctaataaaacttaatacatcaatggcacctttcactgctaatgtgagctcattttatgatgagatgttgagactggaaaaggtaccatgtaagtgaaatttctctgcataaattata

SEQ ID NO: 21199 - DNA, 1119 bp, Mus musculus
ttattcataaaacgagggacttgatatgtctaatttatagacatgaaatgggcaagattttagtaattgtctcaaaacattgagtatctcaaattctaatgatgcttcaattatgtctcccttttgcaacctgaatgctgtggagagccacttgcttgatgtgtggaagggttctgtttttcctgttgtttgctttctctacatggtgacataaagccagttagttggcctttctgcaaaattccttatgtgaattggaatcagttttaagaccctttagaatgtgaacaactgttttactttggagagctgacttttctcatgaaaaagggttgaatacaagatacatactggtcccagaaatggtataaagaccaggattctaatcaaaatgtttttaagtgaagttatttgctcctatgatacatgtatgctctcatgcgtacataacctatccagtttcagtggacagactttaaatctagtacgattaactaaaaacatgaaaccctttttaggttcgagaaaacaactacacgtatgagtttgatttctctaaagtctactggaatcctcgtctctctactgaacatggccggatcactgaacttctcaaccctggagatgtcttgtttgatgtttttgctggggttgggccctttgccattccagcagcaaggaaaaactgcacagtgtttgccaatgatctcaatcctgagtcccataaatggctgttgcacaattgtaaactgaataaagttgaccagaaagtgaaagtctttaacatggatggaaaagacttcatccaagggccagtcagagaagagttaatgcttcggctaggattgtcagctgaagctaaaccctctgtccacattgtcatgaacttgccagctaaggccatagagtttctcagtgttttcagatcacttttggatgggcagccttgcagcacggagctcctccccacagtgcactgttactgcttctccaaagatagcgatcctgctaaggatgttcgtcagcaggcggaagctgtgctgggcgtttccttggagaccagtagttcagttcatctcgtaaggaatgtggcccctaacaaggagatgctgtgcatca

SEQ ID NO: 21200 - DNA, 1195 bp, Mus musculus
atgctttaacttctaaggatgttttcaataacttgagactgtaattggaaggatgatgttgtgttggaccacatgtggttgtacacacctttaatcctagcacttaggaggcagatataggcagatctcttgatttccaggccagcctggtttatgtaactagtttcaagccaggtaaggctacagagtgagaccctgtctcaaaaagagaagtaagagaagggctgaagagatggctcagtggttagggccactgactgttcttcgggaggggggaccccacttcaaattcacatcctcatggcagctcacaatggtctgttactccaagatctgacacactcccatagacatgcaagcaaaattctgcacataaaataaaagtaaatttttttaaaaagttgcaagagagttctgtgaagtacttgttgaattacagagacttaacagttaatttttttaaaatagtaatttataaacagagtatactggtctctctttcttaattccctctgtcaggacctagtctctgttctttgaaagcagtcttattaagtcttgactactttgcattgtattgctattgaccctactgtattatgtattacatgcttaatagcattgcatctaattattgatctctgcatcactctaagtatacacactcggttctaaataatggatattttgtgtttgtttgttttttccctaatacttccattttatataccttaaaatgtatccatttgataaatgtccatgatttttttagatattcatagaaatggcctaaccaccatcatacctctaattttattttttaaaattgtcttgttttattgtatgtttgtttgttttgagacagggtttcactatgtaaccctggctggcttaggactccaagtagaccaagttgttcttgaactcatagagggctacctacctctgcctcccaaatgctgggattagaggcatgtaccattacactcagccattttagaaaatgtcattgcctcaaaaaagaagttctatatctatctaatccactttctctgagcatttcaaataagtaaaacatttgttttgaaccagactaagcaataaaaaaggaaatcaagatgttgtttcagagtcatctaaatgtaatctaattttttagttatgaggtttgacattaagattaaattagacgtga

SEQ ID NO: 21201 - DNA, 2125 bp, Mus musculus
gttgtttgttgggtttttgtttctgttggttatttttggacactggtggctcagcagtctatttatattttctatatctaattttagaagcctggctacaatactgcacaaactcagatagtttagttttcatcccctttctacttaattttcattaatgctctttttaatatgttcttttaatgccagatcacagcacattcacagctcctcagcatttcaccattgcattgctgtagtgtcatttaaaatgcacctttttatttatttatttttggtgagggagtttgtcccttattgaattatttttaatgaaatgccaatataattttttaagaaagcagtaaattctcatcatgatcataggcagttgaaaactttttactcatttttttcatgttttacatgaaaataatgctttgtcagcagtacatggtagccacaattgcacaatatattttctttaaaaaaccagcagttactcatgcaatatattctgcatttataaaactagtttttaagaaattttttttggcctatggaattgttaagcctggatcatgaagctgttgatcttataatgattcttaaactgtatggtttctttatatgggtaaagccatttacatgatataaagaaatatgcttatatctggaaggtatgtggcatttatttggataaaattctcaattcagagaagttatctggtgtttcttgactttaccaactcaaaacagtccctctgtagttgtggaagcttatgctaatattgtgtaattgattatgaaacataaatgttctgcccaccctgttggtataaagacattttgagcatactgtaaacaaacaaacaaaaaatcatgctttgttagtaaaattgcctagtatgttgatttgttgaaaatatgatgtttggttttatgcactttgtcgctattaacatccttttttcatatagatttcaataagtgagtaattttagaagcattattttaggaatatagagttgtcatagtaaacatcttgttttttctatgtatactgtataaatttttcgttcccttgctctttgtggttgggtctaacactaactgtactgttttgttatatcaaataaacatcttctgtggaccaggccccctgggtcagcgcttacgtttaaataacatttgtctcaacatttctagctcataaaacgatttctcaaaaatttaagttctttataaaaattagattgtacatttctacattcattttattgccattttctaatgtatgatgtgtccctaaatgtcatgttaaataatgacatcataatattgcattgtaaagagaatttttttttagaattttgccattataaatgtatgagtctattaaaatataaagtacaaaccttcagtatttgcagtatgaatggagtaagtgaaacagttcatgaaacatgatcatactgttttgagggctcaggctcctgcgtgcatgtctaatctgttcccattagcaggtgaaggaagctagggctgaaacaagagttttccgcgctctcagggagctatgtggcatgtcagaatcttaggtctcagaacataccttgtttggttttgatattggtttggtttgattctggtacatggcacattaatatgcagatacattatatagataatcatatattacctgatgtttctttactttgccagctttaaaaaagtatcttatgcaattgtgaattttagaaacttccaaataaacaccacaaaccttccagcttatatgcatatctttctagttcatgtatcactttgttttagtattttaaaaactttgtttttagatacttgattctttttctctgtttttctagtaatatatctgttctgctttcatagtctaagtttaaaaaaatcagtctagaaagatataaaggtaaaatgtggaatttgggtgtgcacttaggaagcagagctagggtaatcaggaattccagcccagctttggcgacaaagtgggtccaggccgctgggggctgcatgcgtgttttgtgtaaaagaagagatggagaaggaggttagtgtgtccctacacctagagataacagtcttttagaacccattggtgtga

SEQ ID NO: 21202 - DNA, 1177 bp, Mus musculus
tgttttaaatatatgcaggtaaaatgtgtattattatataaacctttcatttagatgtcagtattttaatccatggagttcttaaccttgtatccacagagttcactgcgcccaagaggaagagaaaatgctgaaccgggaggctggtggagttttaaattttgagctttccaacagaagaaaggtgtcatgtgttctaagcaggaagtagccagtgaagactggatctgagaacaagctcatttctgtgagatggaagagcatgccataggccaagagttgagtaaaggtttactctgaagattaattttaacatttttgttaatattgcaattttaacaaattacattgtagtttgttacagaatagattgtaaatgtgttaaacttgttagacttgttaggggtctgtatgagtggagatagagtttctattgccttcagaatgtaatagaaagaattacatatttgtgagttagtactctttcctgaaagtttttgtgctgtactaatgcatttatatataaatgattcatacctgtcacctagcaacggatttggctggggtttttgttgaatattttgtgtgttatggttaagtgcaataaaaattttgcccccttgttttatcttctagtgtgtgaaattttcatggccaataacttgactgataccttagtaagttacggctgccttcgtgcttacgatgtacccttacttcctcattgatttggacagggtctgcctgtgtatgctaggctggccttgaactctccatgcgagtactgccttgctcggcctccccactgctgggattatagataatgcaccgccgggcctcactccttaccctctgtagtatttgctttaaagttcccattggtctactgtatatgaatgcataggtacctgtgtgtgtgtccttgtctacacataagattaattaatacactgtttaatgcttatgtactgtctaataggcccataggagcagtcatgtagattctgaaacgtgtctttgacacagaacttttgtaaatcacagaaaagatgtctctagtcacgtgtgtgctgctgttttaatttcacacccctggagttttaagtggagatggctttagctgtgcttgaaagctgccaacacacggcctctgtgttgtgaggctaatgcagcctga

SEQ ID NO: 21203 - DNA, 1121 bp, Mus musculus
ttgttctcttgttttttaaaggtatgcgtaccaccaagtccaagatggttcagtggaataaataggactcttaaagagcgttaaggagggttccatctgaggacctggaaagtgtgagcagagctgcatgttcacatattgatgctaagaagcaaaccatagcacatctcccttagctgtcttagccgtttccatcttcattacacatatctttgatagtgtagaccttgcttgctgtggtccctctggggatgacatgtgctcatttgacatgaggaaggtcaggacctctttctgcaccgtgtcctgtcctcagagctaagggtcagtgttgtctgttggtcattcccaactgagaggaatgaagctaagctttagactatttaaagatgtgatgagagctgaatgtcagaactcacagggcaatctctgagaagaaacactcatttcccttttaaccaaaagtgacaatgtgacctctgtcatgttgtgtgtggtgaggagaagctagcccaggtgacttgattgttgcactatgtgacatatttaaggacatacttgctgcatttgcagcagcccccctgtctgacctccctgggcaatcctgctgtcactcaatgtgagttaactgtgacaaactcagctctgtgttatattttgtttgcttcatagtttccagaactatatataaatatattttttcaatagcaaatattgtagttagtgagtggtgaccacttcaaccttatccctaccatattggtttcagggatgggactaagaatgtccttggaataaaaaaattaaaatataaccctgtgatttagaatgatgccgaggttgcaggttgcagcctgcagcagctgtgtgagcgaagtgaccgtctcctctggatcaagcgtccactcctcattgtgcccaggccccagtgctccttcatcactgtttagttattgtccgctgtggttttgattatattttgctcttcctgacattgactgtttttttttaataaaagaaaataaaaagtaaatgaataacccctgaatgtgactggatgcagggataagcccctccctcctccttgggctctttccctaagtggcaggatcgcgctggct

SEQ ID NO: 21204 - DNA, 1508 bp, Mus musculus
agcgagaagaactgtggaaaaaattggaggatctggagttaaagagaggtcttagacgcgatgggataattccaacttaacaacagcctgacagcgacacactaacccgtgggtcacacgcttatgtagtagaaggatggagcaacagttttctgtattgtgcaactttacagtagatttcacatttgtctcattattacagcagcactgtatatacctgtctctaagtaaaggaaaacataaggacttcaaagtgtggacagtagatggactctcagaactttgcaaacataatcattgttctaaccctctttaaaaacaaacaaacaaacaaaaggtctacagagatctgtcggggaaattgctatgttaaaattccattatcaggagttccttatttatcactagcagagagtatgatacaattttcaaatgtgaacaatcttaaatttagcttgtctttctgctaagctgttaaatgtatttatagtaaaggaagaaaagattgtcatttctttataagtttgtatagcgccctcctctggacatgactgtaacgtgatatcctttccttttgcacatcttcatgagtcaagtgtccacatggaccggggctgtgagtcagaggtctctgaggaaaggttgtctgctggatgaacatcttcccagctgccaggtcctggtactcctttagttttcagattaggagtaaaaagaagaggtgataagcatggtagcgaagggaatgttggacttcatatcagatatggtgagtccaaatcagtgtcttgaatcctttgaaaacaggcagtgggacgcgcaggcttcagcacctgcagcattagctgcagacataagtgtgcatccagaccagagacaacttagaaatgtcagagaacatcctttcggatcctgtggagtaagagagagagcactaagcgatagaaccgtgaagccgagcaccaggaccgcgcatccacttgggaaccgagttgagcaaacagcatgaactgtttgcagttgatgccttacttcctaatgtgtacttacaaagtatttcagcagaagaggatgcagggtgcagcctctgggaggaacatcctccttctctagctcaccacagcgccagccctgtttttagccagaaaggattcaggatcaacattatgcgttctgaattggatgcatattcctaactactgtatttgttaccaaaagtggttctacaaatgctactgaaaaaaatctggaaattcctaatgtcctgagtattaataataaagtttaaaaaatgcttttatatcaaaggtgcatcgtgaccaaattgtttaagttaaaaacaaaacaaaaccaaaccaacccgagggctgtgctctagctgggcttactgtctctgtactgggtccccctgggtaggtaagttgctgatgtacaggtgtgcagtatgtattcacccgatgtgttgcatcgctgtgtattggcaagtgtgtgttgtggggtttgtttcc

SEQ ID NO: 21205 - DNA, 1161 bp, Mus musculus
attttcttaccacatagattgcaggctagtagtaggcaaactagacacaacccaagtgctttgtttatttggaagtatggatcacagagttcttgccttcaatgtaaaacacattgtcgatgcttctgactcagtgtcttaagtcacaagtaggcgtcttctgtaatgacttgctgtacaggtcacttgctggttctatctgggagcctcattgctattcgatgctcaccctctcagacccttttcatctcaccatgtctgcttggtcctaatattaattaaaagatcttcatcctttggagtactcttctagtgctgtgagtttaaccacaggccttgtataggcaaagcatatgtttcactgctaaactgtattcctagtttttaaacaaaatttaagcatatgtgaaatttaacagtaaaattttacagagcattgaatgaatgttagaatgcaatatattgctagattaaagtaaattatccatcataaatatattcatataatgtgagttcatttgtatgtttggtatagttctttgttttgttttccccctttgagacagtgttttctctgtgtagttttggttgtcctagaactcactctgtagaccagaatggcctctaactcaaagaggcctgcctcttacttcctgagtgctgggactaaaatcatacaccatgatgcccagctagtatatagttctaattaaaattctgattttttaaaaaaaaattagaatctttataattcatgggatacgttttttgaggaagatatttaatagggtactttacatagttaaatagttctcagtactgcaagaaaaaaaagaatatttaggtacattaaactgtggggttgggacaggagaagggatataacagaagtttgggtggaggggactcttctgagaaagtaaaaaaaggccatcagaagatctgtacctgtgagtgacagacaagtacacatggcatctgttccttaaagtggtcatttctgaagagaaaatctcatagtgttctgtcaaatgttgacccagcagtttcatgtaacacaaccaaatgtgcctacagagataccaaaggcttcagtgttgatgattacaggattagaaaaaacttaatacatcttcgtcagaagttgatggagaaactata

SEQ ID NO: 21206 - DNA, 1349 bp, Mus musculus
gaaatcgaagcgttctagtgagtctgagcagaagtttacttttttaggaataaagtataatattttcctaaaatgagaaaaatatatttgataattacttgtatctgtactttttttttaattaatcaggagctatatttatactatatttacatttggttagccagcacccaggtactttgctgatgaaaaaagaaattaccttactagattcattttgagacttaacataagacaggcaaaagaaaatacaacagcacggctatttttttcaaaatggcctttcaggggctggtgagatggctcagtgggtaagagcacccaactgctcttccgaaggtccagagttcaaatcccacaaccacatggtggctcacaaccatctgtaacaagatctgatgccctcttctggagtgtctgaagacagcgctacagtgtacttacatataataaataaatcttaaaaaaaaaaaaaaaagagcttttcgccgccggacgctgccgaggtcgcacgcgtgaggtctgtcccccgcagccgacatgcgctacgtcgcctcttacctgctggccgccctcgggggcaactcctctcctagcgccaaagacatcaagaaaatactaggcagcgtgggcatcgaagcggacgatgatcggctcaacaaggtcatcagtgagctgaatggaaagaacattgaggatgtcattgctcagggtgttggcaagctggccagtgtgcctgctggtggggctgtggctgtttctgctgcccctggctctgcagcacctgctgctggttctgcccccgctgcagcagaggagaagaaagatgagaagaaggaggagtccgaggagtcggatgacgacatgggatttggcttgtttgattaaattcctgctcccctgcaaataaagtctttttatgtatcttgaaaaaaaaaaaagaaatgtttgttcttttaaaaaaaaatggcctttcaaaaatattatatgattaaatattctttcttatctcccccatcattttacccttgaagccttgtttactgcctctgtgtgtgtgtgtgtgtgtgtgtgtgtgtgtgtgtgtgtgtgtgtgtgtgtgtgtctgttttctcttactcccctgtgggacccaggaatcacagtccagtccttagactgcacagcagcctctacctaccaagccacatttactgttaattttgtcatttttcttaaaaaactgttttgtaaagtgccttaataaaagaagttgatacttttaagtttgggtatcttgtcttatgtgtaaaggtaagaatatctttttatagataccagaaatacagtcatgaaaaagatgttttatt

SEQ ID NO: 21207 - DNA, 1349 bp, Mus musculus; identical to SEQ ID NO: 21206

SEQ ID NO: 21208 - DNA, 1149 bp, Mus musculus
acacgttctgatttttaaagcctttcctagaattgattgttaactttagtttattccaaagaagacagttttggggtgccatattctggtccccttggctctcacgtatataccacgataagacaacctcctctggaaaaggttacttttcctcgtttttctctgtgtaagggacacagcgacagacagtggatcccatgcagctcctgccagtgtttgtgtggaagtaagcaatgggctttgggatgcctccagtggtgccggccagaaggaaggcacacgacactgcctctgccgggtgtaagagagtgatatctaagtgcaaggctatgcttgcagctgtcattaaaacgggcaaatatttttctaacaagatagcgtatgtgaggaatgagttcctcattttaacatccaacatatttctggctgctgtttgatgtcaaacatttcggttttagaaatatttcttttaaatgtcttggagagactagtgtttggaattttgaagataataaatcctcaccagcagggaaaggagacacaacggaagtgtgtaaaaatgcttgtgtgtggggggtggggactcagctgtaaagtgcttgatgtgcaaaacctgaagatctgggttccaccccagcatccaccgagaaactggggatgcgtgtgcgagaagctgggaatgcgtgcgcctctaattccagggctgggaggcggagttagtcagccaggctaccaaatcagcatgatctccgtctgtctctcacacatacatacgaacacaagacacacacctttacccgagaaaaggttagtgagcatctaagaggggtaagaatggaatggggaagctataatcaaaataaattatgtacacatagacaattttccaagaatatattttttaaagtatgttggattgtaattgaggaagacacccgatattagccaagcccatgagtgtgcgctcaacacacacacacacacacacacaagtctgcagctatgttccttgtactggtgtagttgtgttacttggacatttggggaaaatattgttttaaccacagtgaagggctctacatctttctaagtatttccgtcatttctctagaactggaccagttgtgcatgcagccattttacattaaa

SEQ ID NO: 21209 - DNA, 1224 bp, Mus musculus
tagtgaccgctctgactgctctaggctgcggaaaagcaggaagtagaagacgaagagtcagccggacaattgaaagtgaacgaagaagttgaaggactcatcaagcaggtgacaatctgggagtcacaaaccaaatccatcttggatctcctccaacatggagaccatgccgatggctcctcagcagacaccttgcaggtatgaatgtgaccatgtttaagagggaacactcatgattggaaactcatgtgggcttgtgttttaagataaacaaaaaatgtcaaagagtaatgagcctgcatttaattttccgtattgggaaattttaagatggcaccaatctaatcactgattgctttccacgtaatatgcttggaatgccttatatgcataaggtcttgactcattttcctgcctataaggtggggattgtaacattctgcatgagaggcactaagatgaaatgcattaggtctctggtggctagttacaatgggaacatactgattatgtaatctgtgccttgaagattctcccatttaaccagttatgtccccaactcactgatggaggggtgactaggctgtttgaactccattctgcatccatcctccagaaattgcctcgagtaagaagcaacaaggtgcaagtgtatcccacttgggataactgaggatttttcccaagttccagcacagttgtgacatcaggggagcatgtcgcaactgggccaagataggaagtttacgcaataaagggccacccgtggacttttctacatctgtgttgctggaaaggcctatagctcaacctgcagtattttcattgtttatgatggtggtaacttagtagcttgaaaagtattcttacaaaatagcattaaaagcactttattcgctagttttttaaatttcctttttaaaaaaatatagatcatctgcagtttgtcttagtgaaataaatgaaatagggatacaatattaaacagatttttttaaagcataattttaaggtttttttttctttaattacatttatttacttcgtgtgggggcaccatgccacactgcacatgaagggtatcagagtaaccttcaggaatcgaatctcttcttaaaccatgtgggtcccagggattaaactcagatcaataggcctggtggcacacccttactaacagagccatcttgtggaccctagagtataattttcttgtttccattt

SEQ ID NO: 21210 - DNA, 1103 bp, Mus musculus
caagtgccaagtgggaggtgagcacctcggggccttgggcttggggttctggtcctgtgcctggtcatctttcagagcctcctctgtcaccctggtgatacatttgccttagaggtaggggtcccaggctcttagcctcagccagtgagaacaccttgtagatctgtgggctgctggaagaagcggaatatgcctacattgtttctttctccgcctctccacagtgtctcagcagcagctgccttctccagcattggagactcatgactctgtcttccctaggctttaggaaggcgtcaagcccaggggcggagacgtttttctcctgctgctttttgatagactgccttttccttcttagtttgactggtctgaactttcatgcctggagccttttaatatccccagaataaaaaattgagcgtgtttctaatttcctggatggatcctgattgagataatgagataatgagatctagactgaatgggctgtatccctgcagatttctctagtcaagcaggggaggcttttgttgaggtaaaactgtgaccctgggaaggttactaaacttcagaaacctcgatggtaaaacgagactaacacaatataattggcaggttattacaaagatttacgtaagtcatagaggatatgttcaataaatgataattatattatggatatctgtgtatgtgtctggtgagtatagtcagttctccatatctttgggctctgtgtccatgcagtcaaccaactgggggacgaaaacatttgaaaaaaagacttgtgtctactctgaaggtgtatggccttgccccgcccccatccatgatttattaaacaatatagtatagcagctaattgcatagcattacattatgttaagcattaaatataatctagagatgatttgcagtatattggagattgtatgtagataatatggcacttttcaaaaaggactagagtgtcctcagattttagtatctccagtggggaaggagttctggatcaagggagatctatgtaattagaataaaatctattaatggtttttctggacaaacttatttttgttttgttttttagacagggtctcatc

SEQ ID NO: 21211 - DNA, 1195 bp, Mus musculus
gaagaggggagcgaagggcaaacaggctgacgtggctgaccagcaaaccacagagctgcctgcagaaaatggagagacggaaaaccagagtccagcctctgaagaagagaaagaagctaagtccgactaagcatccttcacgtctgtcagtgggcccgcctcccttcttgtacaatccagaggaatatttttatcaactattttgtaaatgggagtttttttagtagctctagaaacatttttaaaaggtgaggggatcccacctcattccattttttaagtgtaaatggtttttttttaagaggttaaatcatttgctggttgtttattttttggtacaaccagaaaatagcaggatactgaatcaggagaggctgtgactgtctcgggggtcaccataacattccgtagatggggctagttttatatcctttaatacaaagcatactaaatggcaatctggcatcccagtagtgcatttgtgtctggaatattttcagttctatctggtctcgtgtttctagtagaaccattttgtaagaaagccagtccttggcctttgccctgtcagaactgtgatgtctgtggccatggcagtccatcttcctataataataatagtgataatgtgctgtgaaagatggaagtcctgagtctgttctgtgtgtggcgtaacattgtgaattggtgggctgaggattacaggcatttggttgttatgagaggtcttaggggaacttgcagagtcaatggaacaagttcaaagaaaaacaatacgtagctcttcatttgtgtacatgaacacaatgtgacttcagagtttgggtacgtgaacacagtatatggctctttttgggtacgtgtaataagaattggaatgtctgtactctgctccttgactgataaaatctgttgtgaaaaaaaaaaaaggatagacatttagaatgcagttaggactgtatagactactgctctaggaaagcggggcagtggtacagtctcctctaagatctataacctctctagcctcaggcggatgggtgggtcttctttccaatcttgaaggacctggaattctgcattcacccaagatcaatcttactgcacttacttcctttttgatttatgaatcatatctcttaccttaattatttttgttatttctgatcctgccctttggcggaagtatttagat

SEQ ID NO: 21212 - DNA, 1150 bp, Mus musculus
gtgtgccacagcatgcatgtagaagttgtcagtggacaacgtcgtggagtcgggttttctcctggtacttttacttgggctttggaatttgaactcaggtctctaagcttgcaaggcaatctcctttatccagtgagccatcttgctatcccatagaaaccttttctactgttcatatctttccttactttccttcttactgtagctgaggtgagggggtgtaactgaaataaaatagatgcctttggggctggagatgtaggtcagtggctgagaatttacttggcatgctaaaggccctggatttaattcccggcactgctgtggaaagggggtggtaatttttggagattttcctcccagaaggtcccccccccccccaaattccagctaaatcctagccctttggctcctgtggctccattatgaagccaggttggcatttgctcatgacgtcatggtctccacagggcacgccagtgtttgtccatgccgggcctttcgccaacattgcacacgggaattcctccatcattgcagaccggattgcactcaagctggtaggccctgagggcttcgtaggtgagttctcctgcatcctcagtgggcggccatgatgagtttatcttatatcacagagtggccctggtggtttacagttgctcctctcccttgcagtaacggaagctggattcggagcagacataggaatggaaaagttcttcaacatcaagtgccggtattctggtctccagccacacgtggtggttctggttgccactgtcagggcccttaagatgcacgggggtggccccacggtgaggaccagggactgggagagtggctattaggaaccttccaggtgcttgaaggaaatttcatgacatatctctgggtctgcctgctttccactgctcttatttatcctcatgctggatagggtgccaaaagccagggggtggccatacacaggctccgtcaccttcagggacagatcctcttgcagcattttgaggagacccaaactgtctttatgactgcctatctaaccccctccacaggcttgtgcttggccctattgatattaaaaaacaacaacaacaacaaaaccaacaaaaaaaaccagtgtcaaccagttatttataaatcc

SEQ ID NO: 21213 - DNA, 1163 bp, Mus musculus
tttttttaatatcaattagggccaagcacaagcctgtggaaggggttagataggcagtcataaaaaaagggggggcttttttttttaactcttgagtgtgaactgtataggagacaatattatgttgcaaagtcaaaaggttggacctgccagggagtctgagcccctaccctggcagtcctgaaaggaggctttgcctgtccagcgctgccctggagccagacgtgtgggaagttacgtggacggacactgcttcctgtttctcttccacgtggcccttcaagagtcacaaccccatagactggacatgcagacctcagtcttcctggagagtagaagacccagctagacgctttttaatcaccatgttgcctacagtgaccactaagtcaaccttgagccatttggtgtaccatacagtagggttgagccagctccctagatcaggacccaggcccttcctcctagcgacacaatgggctaactgctttagagtttatatacctctgagtctgctctacctcagaggaagaaagtctgccgttgtgcccccagccccttttcttgggctcaggctgccctctaactgctacgttgatgaggagcttgtagtgattcctgcttccatcttctgagtggtagggggtccaggcacacactggctcttgttttccccctcttcattattccgacatcacagcccacccaccaccccaccttctgccaaggcacgagcaaccacgctccttacaggcctgaccttagacatcagtagtgactttcagggttggtggctgtcttttttcccccccatgctcacccttacttccattccactggtgtgtgcttcattccctgggatcagtgttctgccacagcatatttctgtctaccttggcattcatccatctgtgccataccctacccccacccaatctcgcatcacaaagaaacacctgactgctcgaagctctacagtctcacattccaagcctgttgagcaggaaacagcttcacactgctgcccattactctttggggagtgcagccacttgcctgtcagtgtactgagcaccactttagtgccaacagtgagtaggaaacgtggctgactttctatcctatcttctaggtcaccgctggactgcctcttcccaaggctt

SEQ ID NO: 21214 - DNA, 2255 bp, Mus musculus
ctctctcaaaaacctgaggcatcagaacctggagaactcatgtgggtgctggaaccaaaccaggtcctctgcaggagcagcaagtacccttaagcaccgaatcagcctctcctgctcattctgcctttttgaggttatgtcttactatatggcccacaatggcctgggacttgaaacaaccctgcatccacctcctaagtgcctggggtagcatgcactataacgcctacagcctggggagttttggttttggtttttaagacataagtcttcatttgggggaaaaagtattcatattttaaaagattttccaggaacaacctttagtttttgtcacatctgcaatatggagctcccttgccctcccctctcctcccctcccctcccctcccctccccgtcctcccccaccccaccccccaagcagtgtggtttgtgtaatggttgcctagttgagcctggagtcaccatatgtactttgttgccagatgttgccctcttgtgttgaagtgagcagcctgccgggtaacatttggaggccttgcgaaacaagcttagttcttttttttgtgtgtttttgttttttgagacagggtttctctgtagctctggctgtcctggaactcactctgtagaccaggctggccttgaactcagagatccacctgcctctgcctcgggctaggcagatcctatatagagcttttctgtgtgggccagctttaagtcttcccttctttatagagcctgcatgtaggtgttttgcatttgttgttggtaggagcgctcagtgagtgcagtctgcctgacaagcagtgttgttgctctttaatgtatagaatgtttgaagtggttacttacctcttccaagtaaagcggaggtgtccacagcacctacctcgcagggctggtgtgaggctttgctctaaaatggttagtgtgctgatggaaaccaacagcaggaagcggttccacggctagcccggttcagtattccatctggtagattctagaacatgcttgcagccctacttaatagataattagttgagaaaattagtttttatgaaaatgcgccagaaatgggagtgctacttgagttcttactcttctgaactgtttgtatcgttcatcaaggaagataggatttagcattagtggaagtaaaatacacctatttcagcattaaggaaacttccctccaaatacattattttctttttttttttttttttttaaagatttatttatttatttattatatgtaagtacactgtagctgtcctcagacactccagaagagggcgtcagatctcgttacggatggttgtgagccaccatgtggttgctgggatttgaacttcggaccttcggaagagcagtcgggtgctcttacccactgagccatctcaccagccccattattttcatataagaaaaggaacaaagaaaataaatatcccattgcttcttggatgaagaccatctaagtaataaatagggacgggagatggaataaggattatccgtaggaactcactaatgttctttggaagtaaaactggaccgctttctctgaccactgaagggaataactgctatcatgggaggaaaacaagctgcgaagcggacagcgaataaagcctgtttgcaccggctaattcttgatactgaaccttggattcctgtgaatacttgacagggatctttgtggtatctgtgctaaaaatagttcatgtgggaaatttttacaatgtaacttgtgtcttttagtgtacttaaactaaatatgtctgtggcgtttcattaagaagttgttatgttccaaggagtgaactctgtaaacatttctatgctcaaccatgcttgtgtaaccgctctctctttaatctggtatgtcacagtcctgaatgtgatgtcttaaatgcaagtgtcccacactggctctccttctagattggatgaaaccctggtgtgtgtgtgtgtgtgtgtgtgtgtgtgtgtgtgttcccccaattccttaggttgtccttcagcacagctgccatcggctccttgcagtcactgcaacagagaaggtcagaggacagccctcggccagcattcaggaagctgatacagtacgattgagtttaaggccacgcttaactgagtcttaaaaaaataaaacaagagtctggaaagatggctcagtggttaagagcactggctgctcttctacaacctcagatttgttctcagcccctctgtcaggca

SEQ ID NO: 21215 - DNA, 1142 bp, Mus musculus
cagaccccaaaacctatgtaaaaaccaaacaccatagtacacacctgtcatcccagtgggaggtgcgggaagacagatacaggaggatgtccggggcctgctgggcagcgaatcagtgagagcctttcttccaaaataaggaagaaccctgtggctgagaggggtacattatgttgtgttatgaaatgtaataatgtaatgcattttaacatctaagcgtttgctgaggggcagtgttctcttttatggcttcttctccacctctccccttttttttctattttaagacagggtctctttattatgtacctctggctgacctagaactctctatgtagaccaggctggcctggaactcacaaagatgcctctgcccacagttgggattaaggcatgcactgtcacaacccactcctgttataggttcttggtcttgtaggaatttggggacagaattcataaggaccttggggacaatataatttgaaagaagggcaaagcagcagcctcaggaatcttcacccagctacacacaggaacggaggggtcttcagaggatgaacaaaaatgcccagtgtcgggacagatacatttgagatcttgatcagaatctgtggagatagaactgcttgcaccaacccttcccgggagtaactaaaagccgggaggctttgcagaactggttgtgatgcaccttagcctgacactggatgtgatcaagccctgtctcctccctgtgttctgtttataccccatctcgggcacagccatattttacctcaagctgaggtgctataaattaagagctgggacaaggacccagcctgtctggcaggaatggcggttttctaaagagaatgtgcccccttatctgtctttcagactgctgaaagaatgggtccctccaaattagtatttcctcgggaatctcttactgggaaaggaagtggcagaatcctgggggcttgcaaaggagctacaaagacttgcaggttgtcagctgaccttgcaggagacaccgacattgcctgagagacttcgagttgagacagtggtggccaggggatcacacttggtggcacagcttaagtatacacacctcctgctttcagcttaaaccctacccacaatggggtgtgttg

SEQ ID NO: 21216 - DNA, 1221 bp, Mus musculus
aaacttgaggggtagcctcgctctcccgggagcgggctggttcggcagcctgtaaccagagtgacatcataagatgccatctgtcacctgttctttttgctattgagactgtttatgtttctaggcccttgtcataaataagagtgttcattacttcctgggaatctgtaactgagctttttaaaatctcatgtcatgttatgcatttctacaagaactgactcaactttcaatctccctcatttctgaagtgtggtgggagccagttataaagaatccgtgctgtcctttgagtaactgagaatccatggctccagtcccacagctccttgaagggttagagacatagctcagtggtcgagcatttgcctaccacacacaaggtcgccaagaccatgaaaaatggaagtttgacattgtgtggtcctgatctgaaatttgcctataaataaatcccttctttgccttcctcctcctattcctccagggtatcaaccttgtgacccccaggtcatccaggaccgtgtcagccacctagagcagtgcttcagtgaactgagcaacatggcagctggacggaaggctcagctggagcagtctaagcgactctggaagttcttctgggagatggatgaggccgaaagctggatcaaggagaaggagcagatctactcctccctggactacggcaaggacctgaccagcgtgctcatcttacagcgcaagcacaaggcctttgaggatgagctccgtgggctggacgcccatctgaaacagatcttccaggaggctgacgacatggttgcacaaaagcagtttggacacccacagatcgagacccgtgtcaaagaagtgtcagctcagtgggaccacctgaaggagctggctgcctttcgtaagaaagacctgcaggatgcggaaaacttcttccagttccagggtgatgcagacgacctgaaggcttggctgcaagacgctcaccggctgctctctggtgaagatgtagggcaagatgaaggagccacgagggccctgggaaagaagcacaaggagttcctggaggagctggaggagagccgaggggtgatggagcacttggagcaccaagcccagggcttccccgaggagtttcgagattccccagatgtaacaaaccgactccaggcactcaggaagctctaccagcaggtactgacccaggcagaattgcgtggacacaag

SEQ ID NO: 21217 - DNA, 2208 bp, Mus musculus
atctcgtgggctctctgctttttctcttctttcttctctttctccactccctcccctcccttgtaattcgcatcccctatcatcccagtctctcctcccttgtctgtgtgtcctgccaagcgctgctactgcagttccttccttttttccttcctgattctgcctaagggaatggacccaggctctgccccagggaggactgttcaccctgctccggggtgggctgaaggctaagggtgcttcttcctccttgtgccgtgggctgcctccccagtggcctgggaaggtagagcactgaggtaggaaggaaacactactaggtggccctcaagcctggactggcctcttctgcctttgccttctgctgacgttctggccttgcctggctgcctctgtgcctctgtgaggaactgagtccagaggcaggcacagcagagaaggaaaacgaaagaaacgatggggtggcagggattaagtcacctctgttctctacctcccatgcctctctcctcacctggattcacaaatttaaagatggggatcgaggtctgaggacaccaaagggcaaggggagccctggggtcagatactgtatagtcagctgtgaactccagatagaggcaagagcggatgcgaagggcgggctcctagaaccagggttagagcaagagcagagggagcttcgcagaacagcgagtgctgtggcgactacagggcatcagaggtgacaagtaatcaaccactcctctttcactgaacccagccttagggagttagggtttccccagagtctggacaacaggccttaagacaagggaagagaagggtgggtatgatggaaatacttggtgctgttctgccttccaggactccctccccctggttcccttatttctaagtcggctttgccaactgctgtgtggctaccaagggagggaaagagacaccctcctccagagttctatgctcaggaagtttctttaaccctgtggttcaagagtagcttgaaggaggcccctgaaaaacaaacaaacaaacaaacaaacaaagccaaccctggtagggttcatccttacattcccaaggtgggaggagctcaggtaagagaagagtcccaagatgcacttcaagcctggggctggagccaaagcagaggaagaactaggcactgaccgagcattcaaggaccaaggtcctttcaaatccagggcacagctgtgatgacagagagccccacacctctttagtcctctaaaaagggagatgggggtgaaatcaatggggatttctccctgacttagcaaacaaggaagcaggcagaagagaacagctcaggatttactggtggagggaaaaggagccgggaacaatagtccattgttcgctaaagagaaacagtgttgtgaagactggaccatgactggctgaggtggcttccttggggactgactcctgggtagtagtaagccttcggtagcagacctgccttcagccagggacctgaggggagcttctacagggcacaggctgtcccaagtgtcactgtcttgtcccagcctcttaagaaaggacttgattttttttattaccttgaggattctgggagggaattcggggctgtgactctgtaccgtggtcaccctgaagtatagcaacagaaggaggctgggctatgaagaacacctgtgcttgctctgttctggagtttgcctcaccctaactgccagtctgggatgtggcttgggctgtgtcattggccttgactgttcagcaggctttcctggcctgtctgcccatgacctgagatcaactcaccctggtacaccacctgagtcccactatctccctgtgatgggtgacctttgtgtactgtgtcttgggtccattatatgaattgtgagcagggttcatctattttaaacacaaatgtttacaaaataaagaatatttcaaaccataggtgtgtgggtctgtatgaatctctgtgagggacaaagtattatcaggacattgatggtgacatgggagacagtgaaactgagagaagaggtcctagaatcctaaagcccagaatgacaagggacctggtgagctttatctgtcttccttagtgacatctgcagaagagcccaaagcaacccaccccccacccccactgcccacctgtgagctcacaggagcaaggggaggactaggagaaaggtgggc

SEQ ID NO: 21218 - DNA, 1189 bp, Mus musculus
ggtcttgaacttgttatgtagctgaagctggagtcaaatgcccagcctccctagtgccaccactgccagccacaaatagaagtttattcacatgtgtgaacatactggagtagcccagtggggtggttagagcctgaggtaaacagaggaagagcagtttgggcagacaggaggcaaggtgtggggagatagtactatggcactcaggtctacacatgtgttgcctcagtttccctgtattgcagagaaacaaggaaacaaattagtaaagggaaatggatttatttacaatttggccagaactggggcgagaaaagttctttaaattctttctgcctttgatgcagctttgtggaaaagatgaaaggagagttaaggtggctgaaccaaccagtctctcttcaggggcaaggcctcctcctcctcctcctcctcctcctcctcctcctcctcctcctcttcctccacccctccccctccctccccctccccctcctccccctcctgctcttattccttacccttcctctccccctccccctcctcctgtacttcctcctcccactctggccccaggcagcctgttctctcccagcaagggattcccacagaaactaattctttagagtccattgtctcagggttcctgtttcagggcaatccccccttctccttgttcattcttcaatcttgaggatttggggtgctctgttatctgttggtggcttggtgttacacattcttgaaatatgactttgcatgtgcctgaaagaaagatctacagcaggatgcagcagccagttagaagacccactaatgtgtcaggtcacattcataagaacccttctctgcaacctctggccttagtggctctcagaagggcaggcactggggactccattttgactgacagtacgcctcttgccttggaacagtttttctctgaagacattgctgctgaagtcttgtggtttgcctttaattctccctccttggtgtgatgaggcttttgccctttgatctgatctatgctggggctgggggtggggggaagtatggcaggcaggtagggagacagtgtcaaaggcctctgtttgggtcaagcataagcaactgtttggaaggaagggctcttaggccgagttttcctggagtctcctgaatttttgtgaatgttgggtccctcttc

SEQ ID NO: 21219 - DNA, 1755 bp, Mus musculus
ggtgacgaacctgcctctattctcttcacagcagcccacacaccctgtgtacaacattggacctgagaaggtgatccaggccaccacacactttctgcagaagccagtcccaggctttgaggaatgtgaagatgaggtgacctcagatcctgccaccgactagaggaccccgtggctctcccagctcccccgtcagacaaggtttctccatttgggtgtgtagcacgctctgtgctacttgagcctcgaccactgtggagttgtggtttctttgtcctttcctgtcaaacaaaacaaagccatcagctctgggttggaatacacggtggtgtgatttttaaaattattttcatacctgtcaagccaaaactctgggagccgatgtagcaagccaggttgggagcagtgtatgctgggaagcagcagcgcacccccttctcccccccccccccccaatgctgaaatggaagatatctgtgagtatctgcatcccagccactgctgtgactccacccacacacaccattcagtcaccagaccggcatcctctctggtataaatcttagctctgtgcaagggtggggctgtgggtccagccaatacgagctctggaagagagcactgggctccagtaggccatatttatgcttgtctctttcaccccagtcatctgcaaaggacaggggtcgggaatgaagaaggctcttagattgagccctccccataacctggggaaaaccgagtcacatcctctccgaggccacgtttggtatgagtgagacttattttgtccttggtatgatgactacacccaggtaatcaattatgagtggaaaaccaacctctaggtcaactctgtgccagaggaagcagcttccccatgcccagcccctgcctctccccatcatgtaccaggagaggccctcctccagctatgctgcggcccaggttccttctccccacccacccctccaagacagtgctgtcttttctcatccagagtgttaacactactaaggctttcaccttaattgatcactcaggatttgttcccgccctgtccactccaggcaggctggctgctgccgggacagcagcctcaggtagtagggctggcagtaatcctggaactgccctgcaccggcctggcacggtctgtagggtgctgagtttgctcgtccatccactgctacagtcacagcgagctcgcctcactgtcccagcctgtgagcaggcagacgggagcttggagatgcagcatgaggctcttcccctaaccactggccatttgctgcctctgattccctgttgctttggtgtactgggctatgtattacctccttgaaataataaaagagtaacattttctatgctgtcttttttttttccagaaaaaaatttaaatctctctctctctctttctctctttctctctttctttctctctttctttctctctttgtgtgtgtgtgtgtgtgtgtgtgtgtgtgtgtgtgtgtgtgtgtgtgtgtgtgtgtgtgtgtgtagatgtctgtggagaccaaaaaagggcatcaaatcccctggtctgaagttacaggtggttgttacttggctcagtatgggtgctgggaaccaaatttgtatccttctaagaacagcaagtgctctagccactgagccttccttccagcccactgtgctatctcctgtctaatcccagaaaattccttcaggatgcccctttgctctggggacttcctgtctcctgcatat

SEQ ID NO: 21220 - DNA, 1057 bp, Mus musculus
actgggttggctggtgggacatcttaggtacagggccctggctccaagatgggtatgggacaagggttgagtttaggcttctgtgaaatccatacactagttggatgtaaagaggtgcagtgtctagccgggctgtcttcaatctatactacctgatacgacaggtggtggaggactgaaggtgctgtgggcagtattgactgggcaggaagagacccgggcagagggtggtctgcagaaaaggacaagcaaaggaagcaaaaggcacagctcggtctcctttggcatgagtgtctaggacacgtggtgtggcccagtgatgcggatctttgtttctgttattacagcgggtcctgcccagagcccagcttacctgttggtttcctgtttgcttggtcactgcagcaggtaacttcccttagggacctgttgaaactcacagcttccttgcagcagcgagtttgggatgacaacttttgcaatcgccccaagcacggggtgtttaaaaatggcctggttcctcctctgtgcgtgcttttctgacatgccagtcccctcgaagagtgtcaaacatctgctaggctcacagagctgtcaggttttgtttggttttgttacatgctcttactatgtaggccatgctagcttggaactcactaggtagccaaaattgaatttgagattcctccagcctcagtctccctcttgctgggattttacgtgtgtgccaccacacccgagagctgtcagctgggacaggtttaagaaacaaaactgagtggggtggcaagagttaagagaactaggactcaagcagaattctgtttgcaaaaatgaggttttttaatgcctagactctggagtcagactgcctagatttcatagctttcatgaagtcatttcccttagcttcagcatcctcatctctagaatgaggttcataatggccatagctatataaggcggctgtgtgtatacgtgaggtaatgtgaccagtgacaggtgcaagatgggcagtgctagcaagtcccacacaagccccaaagtgagagttgtc

SEQ ID NO: 21221 - DNA, 2131 bp, Mus musculus
aggtatctgaacagagctttgaggtccttgctgtagaatgtgccatgtaagtaccagattctccaggagttcagggacagtgagccctccccattgtcaatagtagtccaatcagggcagcctatgggccaggcccctgctgttctccaatgctcacacccgccttttcctacaaccacaggggaaagcgagagctgatcaagttctttgttcctggggaattcacttctcttcctccctcatggaagatgcaagtaaaaggaaatgcaagtaaccgcctgggttagaacatctcacataaaataacatgaagggtgaccctccaggctcgagccgagctcaaccaagggatgggcagtgggcggcggcagcgggttggatgatgggccaagcagcctgcatgtaggggtgtctgttgaaaggcccaggtattttgtgtgtattggtgacttgcttccaagtgtccagcttgtcattccaagtggattttgttcatgagagccaaccaaaagttttctttgacccaatctattgtgtcatcctttcctgctatcattgggccttcacaccgtcatggagcctagctttgctaggctagcttcttctctgtcattgcattgctcagtccaacagggaactcttgctctggtctctatgctgggtccatggcaggacggtgtctcatcacaagccttctcttcagggtggtatggctgtggctggccatgtctgctgggcccccaagcccatctgggaaaggaaaagggggacggaagtgtgcaggtggagcagccaccggaagggaatgacttctgagccaccctgtgccttggggtccagcaagcaaacccttaggaagaacaggctggaccctgagtctgagacttggttgctccggatctccagaaggtggtaacatgctcccttggttgccttttagtccgtgcactggagaaggcaagatcaagtgcccaactgcagaccaactacccctcctcagacaacagcctctacaccaacgccaagggcggcaccatctctgccttcgatgggggttcagactccagctcagaatccgagcctgaagagccccagagcaggaagaaactccggatggaggccagctaagccatgcggggcaggccagcaataaaactgtcgactctctcgtcgcatcctccttctgttcatcattagaaccctcagaaccattgagaagactctttattttccttttctctttattaattgttatttttgcatagaagctcttggacaacagctctcatccccttccctgtgtccactatttttaaatgtattcccttcaggggttcctgtccccaccagaaattttaaaccaaaacaccccaacttggcagctctttctgtggaggacagacggccggccagacctctgagtacacggtgtcctgcccaccctaccagctcctccagccctcagagcacgtgcctggaggacgcctgctctaccaggctctcctcccagtcctccctcacctctgtttggtggactttgtgactctgaacttttctgctttggcaagaagacctgattggagtaatcagaactcactccctcctttgtaaggattatttttttggaaaagctgtctctcctgttgaaagacgggattcttgaagaagtttgtgtggtagaaaaggaaagtggggacagatttgcagcacccatggcacagtctgtaacttcggctgtttaagcctgaagacccagccttccagaaggccacgggacgctggtatgtatgtataggagacggcggcagtgaaacgaacggctctcaggagtgggggtggctatgtgggtggggctgggagggagtcttaggtggggtagaggttttgtattaagggccagtgatgatgttttgatatttatttcctgctactgaaatttgaatctgaatgaaatgccccctatttctgatgatgtcgatattgtaaagcgacagattcataaagtaatgatcaaatcttcatttctttctgtgtgtatttctaagaaatagagccaactattttgtatgtaaataccaagagcgacttacctggtactaaacccacagcccagtccagcctcccgccctgc

SEQ ID NO: 21222 - DNA, 1084 bp, Mus musculus
ggaagtcaccctgaacactggttactaaacttaataattgcagaatctcactagtactttttggggggtggagtgggggagtaagttgtattttaaaactaagtttctgaggcagttactttatgcaaggggttccttttgctttatttctgtttggataatttctctgggaaagagtgaaagtgtatgtgaaatgtaggattcctgagctggtcaagaaacccgaggcctttctctatgtactgtcctttgccgcgtctgctgaatccaacatgttgcacctgctctgctggctggaggtgtaaagtagggttgcactcttccacttctagttctttctggtttacagtatttttaactcctcagctttttgcttctttggagattgaagtgtatttgggaggaagggagtttgaccactctggaggttcaggaaacttgtgacagaagtgctgcaagggctgtagtgcttgtagtgcttctgctcagcgcttgctctgatgatgtaaaagccgcgttcctccctgcgcgtgttgtgagagagaagacggtgctaagtttttaagggttgtgtgttgctttgtcaaaaggctgacagaataaaagagttgatctaggaaccctatttgatctcttttggggacaagggagggttatgacagggttttgctatgtagcctggcctccccctctccctgcaggaattctcctgcctcagcctcctgtggggcttacaggtgttatgttatcaggcctgccttccgtgtcctaaccaagaattccttccgctaaacagctagtgtaatggcacgtgtgggttgtagtgttcccaggttcttttagactccaaaagatggtagaaacctcaaaagcaaatatattgacagaaatgtgtatcagctgtaggcttcaaacagaagagctaggaacctggagttaatatctgcctactaaagacactagtgagattatctcatctcaggtgcctgttgtttcatgttgcaatttttaggttacttttgagttgcttaggaattgttttatttaattcaccaaacagaagtaatacgtgtactgcgtgaga

SEQ ID NO: 21223 - DNA, 1192 bp, Mus musculus
agattcaagtcagcttgagaatttatcctaaaaacgacaatttgcgtgttgaatagtgaaatgacagcagagtattgagatgaagggatatgagggtttgtagcactggattcactcatactgagaacttggctttgttttagatgatgaacacattagtttgaaatacatagttgaattgattttggttgattattcagatctgtaatatttcaacctatataagagttattacagaacatctcaatgaagaagagttaatggtacttagaattccaggtttagggtggactaatttgctatcaggtagaatcctattgtgtggttgacttaatatacatttaaagctttcacaaaattgtctttcagctttgtaaccaatcaataccacaaggttttttggaactccatgaatatcaattttttgttgttttatatatctttaaaaactcaagtgcattttttcactctttccacagcatgtaggatccatgaagcacaggacattcaagcctcccgcccgcgtcaccaggaagatctctttgtaagaataaccacaggattgatttccagagagattagcctgtctgaagcattatgtgttgaagcaaaagaaacctattttcttgtgtggctaactagaaccagagtacaatgtttccagttctttgagctccaggaagatagaggacagagttgaaactctgaaaatgcgggcatggactggttcctggcgttggattatgctcattctttttgcctgggggaccttgttattttatataggtggtcatttggttcgagataatgaccaccctgatcactccagcagagaactctccaagattcttgcaaagcttgaacgcttaaaacagcaaaatgaagacttgaggcgaatggctgagtctctccggtaggtttgaaatactgaaggatttgatgaaatactgggcttggcttttaggtatacaaactcattccatagttgaaaaattcttaaaatttctacaaactgtctgcaaaaatctgttttagcagtcctttaaaaagtgtcatgatacatctatatagtcaatctagataaggtctacatagttgtaaatcatattttgcatatgaattaatatataaaagctgtggtatttatgcttatattttatttacaaattatgtttagactatattgaacaca

SEQ ID NO: 21224 - DNA, 1387 bp, Mus musculus
ggttaaagattgctgtgcagtggggtgtttacactgtgtaccaacatacttgttttctcctcttttccaaggtctgtcgggttgcttatgaaatcatgcaaaccctgcatcctgatgcctctgcgaacttccattctttggatgacatctactattttggaggccaaaatgcccacaatcagattgctgtttatcctcacaaacctcgaactgaagaggaaattccaatggaacctggagatatcattggtgtggctggaaaccattgggatggttattctaaaggtatcaacagaaaacttggaaaaacaggcttatatccctcctacaaagtccgagagaagatagaaacagtcaagtatcccacatatcctgaagctgaaaaatagagatgaagtagaagagattaacaacagaactcacttcagaccatctcggccaagcagaagacgcagactaacacgtggttcattgatagacacgctccacaccaagagcaagcgggaaccctcagatgctgcactggtggaacgcctctttatgaagggctgtggtgccctcaagcccatacacagtacaataatgtactcacacataacacgcaaagggattattttctactttgcccctttaaatattatgtccccattgaacaaacactgccacattgtgtaatttaagtgacacagacattttgtgtgagacttaaaacatggtgcctatatctgagagacctctgtgacttaccgagaagatgtgaacagctcccttctctggggaagctggtggtggtgtggccactgaattcactccagtcaacagattcaaaatgagaatggatgtttttcctttatatggttgtctggatttttttttaagtaatttcatcagttcagtttatccacctcatcattaataaatgaaggatgcatcaataaaataaaatgaaatattcactctccattaggaagttttgtaaaacaatgccatgaacaaattctttagtactcaatgtttctggacattctctttgataacaaaaaaataaatttcaaaaaggaattttgtgaagtttctggaattttgtatcactagattatatagttacaagctttacagtagaaatatggtaaaaatgggcttatagtttttaaaatttgttttctacttttattctacttttttcagcttctgatagagtaatcatattttaactaagagaagaatcggtccctctaatactagtaactggcttcagctggtgcatattttgaagttgctaagaacatgctttggtggtgtttattatcttactttgtatattgttgctttgttttaattgaatgaagtagttattttcttgcttccagagaaactagtgcttgct

SEQ ID NO: 21225 - DNA, 1202 bp, Mus musculus
ctaggcacccttagactgccacagtgctgtctctcacgattaattccactcaagcaaaacaaatgaaggtttttattatttataatatgtaaaaacaaaatggaacaaaacaaaccccattgtctgaccttcctttgcttcaatgccagcatctagaaaacttaattcatgtgaactttctaatgtatggctagaacttcccatgaatccattgaacttggcaggaactaagtcaaatgacccatatctcttgcatggcagctttgtgtaccattgacctgcccaggggcaagaatttcaagtcttttctcatccttaaacaaatttcaaagaaacaaagtcaataaatatatcaaacacgaacaagcatggagggtaatataacagccaccaagctcttactgcacggctttgaccagtcttaacatgttgctacccattcttcaactatatttcttcataaataaagcattataggaaaatttatgtagacatctccaacccattcttcttttctccttccccaaagaaaccgctgtgctgaattcagccattttattcccaaacatatttatatttattgtaggatacgtgcatacacaatttgcttagatgtggttttggacttatagaaatggtattgtatagtatgcatttttctctcctttttcccattctaccattttttttataatgccatgagaccacttttttttttattattttatttctttacattccaattgtagcttcccttttcttccccctaccccactgagcccttctccccttttgatcagaaaaagggaggcctcccatggatgccaaacagcctttgcatatcatgttgcaggaagattaggcctatcttctgttgaggctggatgaggcagcttagttaggggaaagggatccaaaggcaggcagtgtagtcaaagacagctcctgcctgtgctttaggagtcccacatgaagatccagctgcataactgtcacattgcgcagaggacctaggtctatcccatgatgctctctggctagcagctcggtcattttgcgtccccaggagcctaggttagttgattctgcaggttttcttgggacatcctgggacctttttggctccttgaatcctttattttcctcttccacaggattcttcaagcttcccttaatgtttggctgagggtttatgcatcagg

SEQ ID NO: 21226 - DNA, 1201 bp, Mus musculus
tgggactgagaggaagagacgtcggaaacctggccagaggcaagtggatgggctgctgggcaggtgctgctgccaaggagtaggagggactgtcccagcaaaattcagcatccacaccggcagtgctaaacctggtgacctgtgtggaatgttctcgctctgactgagttctatctcttaatatcaaacaaaaatcctttcatatgattgtaacttgattatgagttgatatcatctaatataccttaaaatatttcagtacgtgttaaaactgcatttggggcctttttaatttctcacagagattggatagagtaaaaagactaaggctaggttctgtagaaacagcggtacaacatatagaactatggattaatatagtctttcattgatgaccagttcagtaaataattgtattttgcctgtgttttattttcatgctattacttatatagccaggaattacagatttataatatttgtataaactttgggaatgaacctgatgacttcattttcattcttgtaaaatgtatttgttagtatttcatacatctgagttgtttatcttgggatggggggcaaattttgggaaagaaactataatggaagtccatagaaaataagggctaggtagtaaggtttgtatgacagaatacctgacaaaagcagcttgaagaagaaaggtttatttttgatgcaaagttgaaggctacagtagtgcaccatggccaggaagtcatggcctcaggattctgaggtggctgcttacactctatctgcagttgggaaggagagaaagataaatgaatactggtattcagcttctcccatgggatgttgctgctcatactctggattaatcttttcctctttagccaagtcttttggaatatctctctctctctctctctctctctctctctctcacacacacacacatacacacacacacacacaccctcacacacccacacacctgttttcatgatgattctaaatccagtcaagctaacaatgaaaattaatcatcccaacttgttgtttctaataattaaaaatatttaagaattatcttgctctttctagtagagaggggaaaggtggaaagattgtatatgcttgtctccatttttttcatcagtttgtcttaaactcaaaataattctgatatcaaagtagtacatattaagatggtgta

SEQ ID NO: 21227 - DNA, 1243 bp, Mus musculus
tatatatatatatatatatatatatatggactatactaatgaagttgaaaatataattaggcttctcacaaaaaaaaacttatgctccaaatattagaaaacaatatgggaagaatttagtcttaattacataaatttgggcttgttgtcgttgttgttttgttgacaccactagaacacatttaggaaagtgttttcaccaaacattcctacccaaacaagcccccaaataaacccagagtttagaagctatgctttccttgtaaatttaagtcttttagatttaaatctctcaaatggattgttattttggcatcattatatgtgctttcaaaattagatagctggtagatgagatttaacagcaactagtgactgagacatgacttcatatcatagactaacagtgatcctttgtcttttattacagattattgtttttccttgaaaaggagaccttgatttatttacaaataagtaaaaaaaaattactttacatatatatgcttttctgcaggatatgctggctcgtgcctataatcccagcactggggaggaagacacaggtagaacttgaattccagtgtaccctggtgtacatagacttctgggcaagccaggatgacttagtaagacgatgaggatgataaaataagactgagtctgaattaatgaatgaattaactaattcatgaataaatgaatgagtaaataaatagtgttcatcttttaaaacaatggctgtatggttccagcttctatgcaatcagggcccatctacatacaatgaggcttcagactagccccaatttatgttaccaggttagaattcaatatttcaggcttcaaactgacacctaaaattacagcccttggaaccagggtccaggctataggagacatggtatgcaaggctgcctagtagataccagcactagtcttggttcaacaagctcaggctctaggaactcccagatggatccaggtttcagactgacttcctcagacccaagatttaaaagcctatgcctgcagactaaagttttaagaccacttacagtggtctgaatgtgttctccaatttcaaaagttaaaaatataatccctgatacatcagtatcgtgaggtagtatcagatgagtttacctcttctctgacaactagctttcatggtcctaggtagcaccatgtagacttacaaaggaggaaagcagtcatcagttgaacccacctgttacacctg

SEQ ID NO: 21228 - DNA, 1353 bp, Mus musculus
ttagacaaatacttgtatttctctgtatatatctcttaaacgtgaaaaatggtgtttgcttatatattcatgagttttaccaattttggtggtaagtttgttcttttggtatttctagaacactgccttgtccccctgagtatacttgtcatctcactgtagcctcactgattaaatgatattttggtcccttggatcatgacattaaatatgaaggaaaagacaggattgctttctgggaagcaatcatctctaaatatatactgtgcttatgtgctgatattaagacgggttgctatggtgaattgaatttcttaaaactgtcagtcagcagagggtaaacagtggcttctgaagtagtgattccccatgaagctggacattctcacactgtattttcataaaggttaaaatctagttaccatgtttaatgaattatttaggaaatttcaaagtatctttaaagtgtttattatatgaaatagaagagttttgtttgctccagggacagtgccaggtggggagtttgactggggcggtacacctgtcaaaaggtaatgcaggtgtcctaaggcgagctcagggaggacagaaacctcccgtggagcagaagggcaaaagctcgcttgatcttgattttcagtacgaatacagaccgtgaaagcggggcctcacgatccttccgaccttttgggttttaagcaggaggtgtcagaaaagttaccacagggataactggcttgtggcggccaagtgttcatagcgacgtcgctttttgatccttcgatgtcggctcttcctatttttcactttgctacccacagttttgttaattctgaaaacttactacagctgtcttgctcttggtcattttttaaaattcttttataatttggtttgatttgcatgagtgtttgtttgcattgtacatgtatgtgccatatatatgtgtgctgttcatggaaaccagaagaggatgttggttcccttgttgctggagttgtagttggctatgggctattttgtgggatctggggctcaaacttgaattagcaaacaagtgctctacttttttaaaaatcaatataagtaggtaaactggtttatttatttttttatttgtataactagtcataaagccttgctcaaactttatttctgcccataactacgtttaaaaaagattatttgtttgtttttctcttataattacatatttttattggctattttatttatttacatttcaaatgttaccccctttcctggtttcccctctggaaaacccctacctgatcttcctcccctgcttctatgagagtgctcccctactcacccacccactcccacctc

SEQ ID NO: 21229 - DNA, 1291 bp, Mus musculus
taggttttcctagagggctagaaaagtaaatatttctatattaataaagattggtttttattttgatagacaggcttagtcccttagctgacctctggcttttcacccttgctgttactacaaggtgtccttagctgtaaaaaaaacagggatgaggaggaacgacttccagctcctattttagccacaagtcgtggtgttactaatgacataattcttgcctaggtcttgctaaatctgaggttgataattctcctttaggagctgcacagcactcagaactgtgcatactggtttgtgatcatacaaattcagtatgggcatcgcttggtgcagagaacactgcaaaaaaaggtccagcttgaccatttctgagtttcctgtgagataaacccggtttgaaagaggttggtatcatattttggctaaaaatcaaaaatatttttcggctctgcctcacctccccaaaaggtaccgagagccacaggtgtgggtcttaacagtacccacgagaggaatcgggtcaatgtccacccaagccaaggttaaaggcccactcatctacggatgagaaaatcatttgatcacctcagttaagcgttgccttatttaacttaattaataggggggagagagattggagacttaagcgttgccttatttaacttaattaataggggggagagagattggagacgtactattgaaagggcaagcccttcactgcctcccacccaaataaaagagctggtcgaacgccttctccctgtttccctcctatcatccaaaaatgcggaggaatatcaacttagtgttattcttattatagtgtatttcacatttgttcagtcaaacttagccagagttccaacgccctacttaaaattcaactagaaagttacctaccaagtactaattaacattataaagtcagagcctacagctccaggcttttcagttagttgtttactaagataagaaaggacagtcttagccttatacagtttaccataagaaaagttaaggaatcccacgaaagcaagttttttctttagccctagattccaggcagaactattgagcatagataatttttcccccctcaggccagctttttctttttttaaattttgttaataaaagggaggagatgtagtctcccctcccccagcctgaaacctgcttgctcaggggtggagcttcctgctcattcgttctgccacgcccactgctggaacctgaggagccacacacgtgcacctttctactggacccgagattattaggcggg

SEQ ID NO: 21230 - DNA, 1186 bp, Mus musculus
gtgcctgagaaagttttttccctgtgttcaagagaatttctttttaacagtgttgcagatctattcagatgtttaaaataatgcttaaattcaaagagttttgcttctagtgaactggtaatcactagaaaattttgcctctaggtatagataatgtaactttacattatgtaagaaaaatttttattgtttctgcttctatacaaaaagccaagagttttaatctttcagtgtatattgtttcctaagtaaaaaatattttattaactaatgcttcttgaagtttaccttaaatccttgctctcacccaaaagattcagagacaatatccttttattacttagggttttagtttactacaaaagtttctacaaaaaataaagaaagcttttataattgttattaattggtaattaaaaattggttgtgcccaaaacaattctttggccaaaaagaaaacattattataaagtcatttttctcatcctcccagccgattgttggcccacgtgggcccaactagcttctgtggggcggagtcttaagacacagttgcccctgttccagcacaaataatctggttgtgtgctgtagatggtgttttaaaatgctgaacaatcaaaccttaatttgtatattaatagtcaatgccatatctctgagctcgcaattacttaaattgttcatccctcagatactattaattctcaaatttacaattgcttatgcatatttctagttaacaaataaattatgcgcatgtgactcttaataactttgcaagccttctagttacaactgctccttaaaaaaattgattgaaagtgcaattagtcactgcccctttacagccaagtatttaaaacatttggtcaactagttattaattcaaaagtttaggtattgtaaaattttaaaactttaacttcttaaaagacaaaaaagagagaaattgtatccccgtgcatactatttagtgcattctcatgcacactattaaagtcttacctttattttcaaaatttaatattttaatgtataataaatgctttatagtatcttaaagggatctacttattggcttatagattgatcctaaaacagctaccttattaaaaaagagaaaaacaggttttctccacagaatgctgcaaaagcatattagtaaattcgtgtgacgagctgg

SEQ ID NO: 21231 - DNA, 1193 bp, Mus musculus
agagatcataaggaagtaagtcattgagcattttagaaaaggacatcaggagttttattaagcgtgtacagacaagtttttatcctaacagtcttccttgtgagtgaaatacagcagcttgctaaatcttaaatgttcatgctaacgggatttttgtactgtctctttagctatagctttaaaattgtctacaaatccacaaagaaagttaccttgtagtcgtctcaagcctttaaggagaatgttctgtgtgacaaccaacctcaaatgtgaatgtcttgattttatgtagctacagaatttcatgttcccaaaactaaacactggaatgacactgatgtgtcacttagcacaagcagttggtgttgatgtcttgtcagtgctgtttgtgtctgatttctcttctggataatcttattggaacaaatgtagagtgtttgtgatgtctttttatgttcagttttgcatggcttttgtagttggctggcaagtgtgtctattagaaatactttcaaaataattttccttaggaataagcacattcttgggttgagggaaggaatgctatgctatacggtctgaagtctgaacactcccagtttacagcaggaaaagttaacgccttgtcagcactgacggtcaggtcacttagcacgtaagggattaaatctgtccaggttttcactggttttcccctcaggaatgaaaggtagtctatggtcagtagagctttgtgatctgcgtgccgaccaaaaatactgcctggtgagacttggtgaatacctgtaaccctataggaagatctaaagtttaaggctggtctaagttacatcagactatctcaaaataaataaataaatatctttttttaatgagaaagaaaagcatggatgaaaggatgaatattggatttaagtaaagttttaagttagtgtcagtggggctatgtgctatcaagactctcacacagacctttacagcagagcctatacccaggcacttgccatgccaccatgtagtttttgactgagattctccaggtcagcgagatcctatactttacttgtaagtcatgataggatagtgtacatcctgagcttttgtaaatcctaatggttatgaatgtactaatgctcaacatagtcctaaacagtgaaaagttagcctctgctttaaaaaaaagccttgtttta

SEQ ID NO: 21232 - DNA, 1307 bp, Mus musculus
tatagggctactgcaatcagatattagtgtttattctcaaatattttgagaatgagttttaaattactgaaaatgaaagtcagaatctagttttccatgctcattgcctagttaaagaaactgaagacattgagtttctatgcactgaaacagcattcagaaagtccccttcttgcaggttaaagaaaatacaggagaagaaaaagattatcaaggaaaaatttgagaaggacttggagcggcggagagcagctggagaggtgatggagcctgccaacctgctggctgaagagaaggatgaagacctgctgttcgaatagctgccctcgtctgctcccttcagactgagcatcagctccatgttaactcagtgtgtaggttcggtatgtgtggatatttattttggcatatgaatttctctggctgtaagatttatcagaatgccttgtaagactttttcctgcatcataattcagcaacccgagatttgcaaaacctgcccagcaacctacagaatttcctctgtgaaaagtgtcatattattctatttacaattgtttgaccgatctgtttaaaactttaggaaatatgtactataaacattcatggtcgcaggcaaaggctgtgagcaaccttccttcctacccacttggaaaccttgccgctgttgtccgaggctgtacagccattgtgttcctatggctcaattcttcacctatttttctttgcacgatatgtgtttgtaatggaagcagttctgcccatttaaatgtgacctatgaacagagtaaaatgattttaaaaacatgttgtttctttttctttttgagaattagctaagaatagtgattgtgtccttatgctcagatcactgaccttcctgccaatctagtgtgctactagatttgagatagtttattgcatattgggctactaataagtgaccactagtactatgtaggcttcttaatacttccttcctaacctaagaacaatattcattcctattttggactaatcagatagcttttgcttaggagcaatagcattttgctgtttttttttttttatgaagataatatgccagtggacagaccaaatggtgtttgaggttcagtattgcttaatttggcctgattatctgtgagtactcagactttagtgtaaccagttctgtgtgttctgggcttgcctgggcaagacagttcttggttatgagagtgacaccagcattaacggagtctgaccaactgctaccacagtaaagatactaaatgattctgcaaacatttaggactatttgccag

SEQ ID NO: 21233 - DNA, 1255 bp, Mus musculus
gaagattaacgttttggcaaacagtccaatttaaggagtacgaagcagcccttcctggctgtcaaccctagacttgagagttttccagtattgaaaacttcaaagctgaatatttttatttccaagtatttaagtattcaacaagccagaatctaaatgccctccttcatgtcagctgtttccacatagtggctctaacacctcaagcatttttcaagggagtggcttgatttgaccagagacaaatcttaaacagcagtcctaatattgggcctacagtttccatttctcatgtctctggaatggcacccttatggttcagagatttaccagggactccaaacacaaacaatcccaatctttctatataaaatgtattcaagcaaacatcaaataaatttctgggatatttaattgtaggcttcttccttcttgtcacaagttaaagccaatctgaatgctcagatcctaattatcttcatatggtagaactcaatgggcaagtaactaaatgacttatgcaggaacagactctccaaaggaatgttagagaagaaattaggaatttgacccctggtagagaaaaaccttgaaatcaattaaagatttatgtgcctgttaacttacttgaaagcagtgataacttgtgtgagaagtcatcacactcagtccctttggtttattctaagctacttaccttgaattcataattcaaggggtattttaatgtgctgctgctttgatggagttattttgagcagcatcacccatctgaaggggacagtttcctctatctggtaggtgctacctaattcttgagttgtgtgtatgtgtgtgtgtgtgtgtatatatacatacatggttttatatatatataaaccacacatgatgtgatttaacaaaatttttaatcccatttttaccttctcaaactagctactttaaaggttaatgtgcaaaataattttttcaaataacacaaagttacagctacaatatcacatgtagaaagtcttcatttagtttggcatgcttatcttaggatatgtatactatttattatctgtaagcaaacttgaaactaagtcagtccaggactagacatcatgggaagagttctagagttgggtacagaagcacatgctgatggctccagtacttggaaagttgaggagggaaaattccttgagccaagagttgctgatcagcctggacaaccactgcaagactctgtatcaaaaggattggaaattag

SEQ ID NO: 21234 - DNA, 1168 bp, Mus musculus
gaaggagaagaagggggaagaggtggggcaagataaggttagaggaaggagagagaaggaagaatgggttggggggggagacctttctcatgtccgcttcagcagcttctccttcatgagctgacttctcaagtcctcagtacattcctgggccagcccagtgtccactttttgcaaccacacctttctaaacactcaccagttccctatgctgtcaagatttttcatcccctggacagctttcctctctagttggtcctggccttgggcattctcctccctcccgcctcacagggtcccagtgtcttttcctcagcatgctcctgctttcctatgccttcctctggctcctcctcaaggcctatcctctgccggcctcagatgtcaccctcctccccaggatgctcctccactgctgtgctccatcctgacgtgttcattaggtaatcactcagttacctgtttgtcccgtcaggtgtgtaaatgcaaagaccccagaatcagaggaatccaggccatgtccagccttgagctggctatcctatctgtacttcaaacacaaagaacatctgaaacaaagctactgtgggttcctagacctgcacctcttcctggatcctcttctctcagggaatgacaccaccatagccaggggcagaagtctgggtggcatcctcaacccttccttccagataatcactcaggagtcctgccctttgtcttccatgatgactctgcgttaacctgggtcagatttcctaatcgttttagctaattgtgttggttgctcattcctcattaggatttaggattgcaatacctaatttactattgggctggtttaagagttttgcaagtcttcagaatggatatcgggtctctttcttgaccctctcttatgctgggaataaatcctagccttcaaacatgctggacaattttctgccgctgagcctgccccaatcccactctttaaatacttttctctgatgtcctatgcatgtaggagtgtgcccaataaagtgtcaagatgcttggcctgggccagggtctcagattctgtggtctttgcatgtacacatctgatggagcaaataggtactgagtgattgtttaatgaacatgtcagtgaatgcatagataataagattgacataaaagatcctgt

SEQ ID NO: 21235 - DNA, 1355 bp, Mus musculus
cagtgaagaaggcagcattcaggataaggctagtttaatcctttgcttctctaacctccttagattacagaaactaccttaatgatggccagctacatgaaccactgttctgcaactgtgaacctatcagccaagctccctgcagcccgccagccccgagacctggatggacagttctttgcttctgtttcctgcactaaggggtcagctttgctgtgaacatttctcctccccatacccttgccaccactcgtgcctctgggatcagattgataccctggagcatacactactgtgatgggtctaatggcccctcctcaaactgttctgtgaattgtgaattccagggtctctgaaacctttgtgctctttaggtgccttacctttcaaggcccaatgttctaagattcagacccaacatcaaaaccactattttacaagaatactgactctggatgctacctgattctagatagagacagggatggcccacagttaccagggcaatggtactgtatttggggcttctgcactgatactcagggaagctcatctttttatattatacatggtctttacgtggggacttatacttgaagttttctgaacatccctgaataaaaataggactaaaattcctaatttacctaaactctggcaaatgcctacaaatctctaaaactggacttctttcccaaatgggaaaaaccctggccaagctggagaaggaaagaatgacgagccctcccctattggtgaggaggcatttgccatgcccttttgggctctaatcttttcaggactgtacagtattcctgttaagattaaagcttttcctctcacactggactagcacaggcagggacagagccagtctgcacccttcctgtgtcattttaaggcccaacaaggctcagtgaagcctgtgctcactactgaaggacgaggtggtcatcatctcctattctctccaagaccaagcacataaattttgcttgttgctgctctaagaggccaccagagaaacaagatatcaggaacactaaagacccttccattcttggaaggcctggattgctcactaagacttttggtagagggcttctcgaaattagttggaagcacagggcatgtacatatctgtggaagtagaaagtttctttcaactttgccttcctgagaatattatcatccctctcaacgcaaaccttttagttgattttgatgaagatgatctttctttccatctttccccacaaaataataataataaaaaaacaagtccatactttggttttccaacatataaaaaataagctttattgtgtagctttaaggcagttttattatttttc

SEQ ID NO: 21236 - DNA, 1259 bp, Mus musculus
gaaagcaacattcacagagtggactaagactctacaagggtcagccaggaagaaggtgaaaatctacaagaatttacgtatgcctttctggttctttataaacatgcaaacacttgccaaaaaaaaaaaaaaaaaaggtgaacatatgatatggcaaatcaactacctgaatgctggtcagcagccggagcagacctctttctactaagctttaggcatcaccactaaaatctccagaggcaccattaaaattctgagggatgtgcagctgataaaaactggagacaaggtaggagccagagagccacattgctgaacacgctgggcggatcatccagcaggtgtttgacaaaggcagcatttttaaccaggaagtgctgggcatcacagagcaggccctgcactctcgcgtcctcgaggatgtccgtggccagcgtctgtctgcagattgggtacctgactgttgcctcggtgccgcactccatcatcaatgggtacaagtgcatcctggctttgtctgtggagactgagtacaccttcccacttgctgaaaaggtcaaggccctcctggctgatccatctgcatttgtggaggccaccactgtggctgcggccaccattgttgctcctgctgctgctgctgcagcccctaggaatcagaagaggatatgggattcggtctctttgactaatcccgtgaaagcaaccaagccagcctgcttaatttgagaaagatggaaataaaggcttacttctcttaaaactctgtctgggtttattccgtgtgttcacttaagcagggttaaaaagcaaaaacatttagggagatactttgtgttggcatctttctaaaaataaagctcctagtggtttaaaaaaattgggggtcccttttaaatgaaatcagatgaatgagtctgtcatttagaatctcttgactaggaatgaatatgaaaaatatttaaaaataaataaaagtttaggaaagaagacaggaaatatgcaaaagtgtgaggagccgccctcacatttgccattataagatggcgctgacagctgtgttctaagtagtaaacataatctgcacacgtgcaggggcagttttcccgccatgtgttctgcctttctcgtgatgacaactgggccgatgggctgcagtcaatcagggagtaatacgtcctaggtggaggataattctccttaaaagggacggggttttgccattctttctctctctcttgttcttgctttttctctct

SEQ ID NO: 21237 - DNA, 1686 bp, Mus musculus
gggggacccgtgagctctagattgttttcctggcatattctttatattaggcaaagagaaaatgccattattgaccctgtgtttcaagtctctctgtttcccttccagtgattgccagttggcatgggtctcttaccaaggtcgcaatgagataatagccaggcggctgtgggatgtcagctgtgacctgctgggcctcccagtggattggtaagtggtggtttggactcaaaagaagattggaggagatgatgattatccttcaaagtggccaaaaccttgaacctgaagagcgaagaacttcaagcctttcctgcttggcatccagttaaatcctagtacactgccaggttcctcgaaaccccttgagtttgtattgacttattttgttcctgctcctgccagcgtttctagtggtatcactaagacagaggaccttcatgtgacctacacagctcctattttcctttggaaactccccctaaccaggagcatgaaagccctatgaagattggtacatgacaatgtggattagatggagctcctccgagccgaccatcctctccttgaagaactccattgtaacctcagctgaacctcaggagtcccggagcctggctcaagggcaggcagggctttgtggtcccaacatctggatacttaagaaaagtttttactaaatctggcagtctgaagctttggcttctgagacacttttctatgtccagaccactgaagagcttccttctctaagaaatttgtgggatttgaagggcagagataaaaataaagccaaactgtcattttctcccgctgtttctcagcctagtaaggaggtaatgaaaggaacggtatgagacgataggtcactggggtcagttactgaccccagacccacagaggcctcttttttgtgccttagtttctcttaggaaactagaaaaggaaaggccttctcattgtcattgtgtcgattttgtgtgtcttcttgtgcattcatgcagttgaatgtgtttccacaaaattcacaatagccacaaaggaaaagttcttaatcagactgtagtgtagacaaattaccagagatgggacaaatcactgtggagtctttgagtacagttgcaaagcaagggagacactatctgtgttgtaatcggtcactgagaagcacagatgccgcagggaagaagtttaaaagaaaaatcctaggaggggacacatgataatgaaggggtcagctgaggatctaaaaccataacggaaaggcagtaatagacagctacagaaaggcacactgtcttaatcaccagtcagtcagagtgataggaaaatgtccaaagcacaagagtgaaatatttctctattcagaaatgttatcctaaggattggtaattatagtcagttcataatcttttagagcattttcttacattagcttaacaagatgtccatttcaggaatgtgtatggagagatgggatggcttagtaatgcctgctgttccagaggaccctggttcaattactaggacccacttggcaaccacaaccatctataacctcagttatagatgatctagaggatcagacagcctcatctacctccacaggccctgcaggaatgtggtgcatagatatatatgcaggcacacatacaaataattttgtaaaaaaaaaagaaatcaatt

SEQ ID NO: 21238 - DNA, 2049 bp, Mus musculus
gcctgggaactatggcgacaggcacaataccacacaatgccctccctctccgtcttcctgtggagtgggactttatgcgcctgacccaggtcggagtgagcaagttggaccgttcttgcctgagtgggcaggaataggtcctttcacacaagtgccatgtaaaattgtagactctgtgtttgtctggagatagccacttctttctacctcagagtgactgtgcgtgcgcatgtgtgcacatccgtgtgcatgctcctgtgcacttgtgtttacgcccaagcattttctgaacaaatgagactcctccattgaagagaggcgctttacttcctgctttgtgctggtctgaagaccttcggtatgtttggttcttgtcctaggtcggcctgttcgtgcacagtttcccctctatgcagacatacatggtcctcctaacaggaggggtcaacagaattacagagcaatgccaaaaaggttgcttctgcccaaaattcagagagaatgttagaagcatggctgtggaagatggcagccttccccgtcacacctctcgcaagcacaaggttttcaagtgcagacatctgaaagctctggcagtggtataaagtcagatctgggaaggtgaggccaggccccttcacattcattcagaaggaaggaaaaggcagacctctctgagcacaaagctggctcttgccagtatccctgctgcaggattgatgtgtaaggacacatggctttttctttcagaggctggggagagaaatggtagccaggatcattgggactgagtgaatgctagtctctacctgtttgcattccattcccgtttgtacctcttgaattagttaagaaaccatttctccatctctcgtgctccctgtctggtctcctcagggacacagggtggatacctaaggtgagctggtgctgagagagagggtctgcattttagtgactgatttgcaaatgagagccctaaagaaaggcctgtggccccaagtctcccaccagccagagctcagcctattgtctcccctttgctgccaaggcaacaggaactggaaactgaagtcagtgtctctggtgcttagaaaccctcttcgtttcttctgaaccaagattttcttaattaacagctgttaatggacatctgtcagattccaggctttggtcctaatagagaagaaaggctgaagcagaaacctagctcacttaaggctgaggtctgacagtgcctttccttcctgacgcatagaacacaccacagctcacaggaacccccattgcctgaggtctgcttacactcaaggctgtgtatgtttgcactgaacataagcactttacacaactgggttggaagtcttgcagccctcgatttaggatgtcattaccagatttccctgactatcttctaacttgaattgtaaaataggtggaccattgaccaggttaacagagaaaagactgcagacctaagacattatactgtggtctcctgaaaagcaacaataatatcaaagcagttgtacatgttgaggggttgtttgtcctcctacaaccaagccacaataaactgcctatcccacctacgtcttagcttcatcagctttttaaattttattatttactgttatgtgcattggtgttttgcctgcatgtatgtctctgtgggtgtcaggtctcctggaactggaatacagacagttatgagctcccatgtggttgctggaagagcagacagtgctcttagcctccaagccatctctccagccccatggctttatttatataaacacacgttttaaattttttcatgagtacctgcgtgcgcgcactcgtgtgtgtgtgtgtgtgtgtgtgtgtgtgtgtgtgtgtgtgtgtgtgtgtgttgtgtgttgtgtgtgtgttgtgtgtatcacatgcatgcctggcacctgtggaggccagaagagggtatccaatcccctgggactgaagttacaagtagttgcgagcttcctaatagggtttctgggaactgaattcaagtcctgcctaagaacaaat

SEQ ID NO: 21239 - DNA, 1198 bp, Mus musculus
aagaattttttcctcaattaaaagtgaaaatatgaagcttaaaggttttcaagaagaaggaagtcaccatctgtcagaagccactgatcccattgggaatgacaaaccagtcttctagcatgtgagaggtgctttggttgtccccacagcaccaagaaccgattctgacagaattagcagtgtggagctccttgttagctagctgcagttcctgatagcatttggggggcagaagtaatgttagagggatctgaggtaaaaccctgggagaggaagaagagcccatgggtgtagagagccgtcaaggaagggccgagtggagcatctatcgagtgtgttctcagaggaacctgtgacacaaaggatgcgaggtagtgttcagggaagaccaaagctcaaagcaaatcctagagcctgccagaaccagctctcccactgctgacttcctaccgtatcctgctgtttccaggaaagtcctccagaagtcttcatagaaggcattttccagccgagctataaaagcgggaagctacacactttggagaacttgctggaatccatcgatccgaccttggagagctggggagcccacctgatcgccgcctgccaacatctgcagaagaacagctactaccacatcctgtacgagctgcagcagtttatgaaggtgatgacaccccagcctccctgcctctcctgtccctggtgctctgtcatgcaggagaagctgtgcaagatgagggaacagggcagtcatttgaccctaaagcaaatccactgggctctctaacattgttaaatatttagacttttatcctacatttagagccaaactttagtcttgtccataacattcttcagaattcaaaaaatggggggctggacagatggatcagcagtaaagagaactgcctgctcttccacagtatccaggttcaattctcagcacccacatggtggctcataaccatctgacctccgtgggcaccaggcacacatgtggtacacagacatacgtgcaggcagaatacacacataaaataaaataaaactcatttaaaaataaaattcaaggactataaaggtcaaaaaaaaaaaaaagatataaaatccataaggaatgatgttccagaaagctgggatctttaaaagaaaacatatacaagtagaaaggccaagtttcccctaactgtctgag

SEQ ID NO: 21240 - DNA, 1197 bp, Mus musculus
agtggcatctatgcctttaatcccagcacgtgggaggcagagagaggtggactgaggctaccctggtctagaaagtgagttccatgacaaccagggcttcacagaaaagccctgtctcaaaaagaaaaaaataaaatccaatgctctctagtcctgtaaaatagccatcttaggtccatagtctaatgaattggcccagcatcctatctctggatctcccagagtctgtggaccccaccactgccacactccttccctccccatgacaggtggtactcatgttcaacctgaagtcctcacctatcgccggggagctgatgttcgtagagcgataccaagaggtaatccaggagctggcccgcgtagaacataagattgaaaaccagaattcagatgggggtaacaacaccatccggcgcactggcagtgggcgctcaactctccaggccatcggcagtgccgcggcagcaggtttgtcttccttgctgacatcaaagttggagggctagctggggtggcagcttaagggaagaaaccacccaggtcttcatgagaagtcgacagaaacgggaagcagtttacctgtcctaaaccagctgacacattcccagtctcccgctgcacgcagcctcctgacacagtcccagtctcccgctgcacgcagcctccctgaggagacgtttcacacacctgcctcttacgccacccctgcttatcttcccagcttaagagaaagcgcaggagggctgccccagtgcatcttgtaatccctctcgggggctttagagggttgttaggagccgttctccttcctctagttgttctgcagtaaatggtatcacatgactgttcctaaagttggaggaaaaaaaacccgcttgttaacatttgcagcctgggggccacagcctggttcccagcagtggcagctgggtaccccaacagctaccttcccttctttctcaaagcggaagctcatcccgcattctcagctctcctgtctgtccccagactccatatatcaggttaccatcctgtggttggcctttacagacgcttccagaaacttttcagtgccttttttttttaaagatttatttattattatatgtaagtacactgtatctgtcttcagacacaccagaagagggagtcagctctcgttagggatggttgtgagccaccatgtggttggtg

SEQ ID NO: 21241 - DNA, 1196 bp, Mus musculus
attgatgggatccaaagtgatgttgtggtagttttaatggtaactgcttaagcctggcaagatttagccaatagtgttcccatgggctcagttcattagttttgatgattgtgctgtcatgtactgagtaagatagtaggaggagctgggagaagagaactctgcattctcttgcaactttatggtgaatctaaaattactgcaaaataaacagtttttaaaacggaggtaaagtgggtgattgcctttgccatagtcggtcgacagactcatgaagacgttgtactggttgtgtctggagaaggggacgtgcatttgagatactggctcgactccctttggccatctgcttctatagatcttatctactacctcattatttttaacactctttttcatctttcaacgaattctcctggttccatcttcgtaataatctcagcgtctggttacttccaccatctcagtcctgtctccctgggctatgggagcgcagcgctggctttggatttagatgttggcttgacagatagtccactcttgctaaaatttatcctggctctgaccttagttatcctgtccaaaaaatgggtataatctgactttcctggctgtagggagtaagtggggctgtctgtagtgttctttacacaatgtgtggtaaagcactctgtgaaaggcagcctttagttgttaattttagcagttacctcattcccaatgttttgtatattttctaccttaatatttttgcagtattagaaccacaagaacagatcatgctgtcctcttcattgtcccttcctcagtgttgttgatagatactaatgctgcctgaagcctcttttgccccataactcctatttttttgtatctgagactttcttcctctttccccttttatttaattcaatataaacttaaaatttttcccaactatactttaaataaataaaggcttttaaatgctttagcctcccttctagcctaccacccaccagaggtagtggaaaagaaaggttattgggatacggggaaagtggacttgtttagaaatggttctttggaatcccttctgcattgccagcagttcagttcacaggattctccagagatagctcgatccactcgaaaatacttcatgaatacaccagcagtccagttcagtactgttgggatagcagacacgaatcagc

SEQ ID NO: 21242 - DNA, 1180 bp, Mus musculus
acacagttcctcagttgaggctcttagatgactctaggttgtggaaagttgatggttaaaaacgagctggccccagtggcacaagcctttaatttctgctttggaggcagagatgagcagatctctgtgagttcaaggctgtccggtggtctacatagcaagttccaggatagctagggctacatagagagactctatctccaaaaagaaaagaaagaaaaaacacctagccatcacaatcctctaacaatctagaccgccttcctctgagggggtgctgcccttcccatgcatgccgtaaagaagcagggaggcactatttcttctgccatagaaacatcatttattgaatcattatataaacatacttttattgtactctgaattaccgttggctttaaatttgttaatcgttattttcggttgaaacataaaactagagtctttacaactgtggtcaaaaggactttaatgttgtttttggcaggtcaggctatgagcatagccccactggttacaagacagcttagagagtcacattttacctccctaaggattgctcctatccgtgtctcccagctctgctcctccttcaggtagacagggttctgaactgcacttctcttgtagaatcatgactctctagggaccaactctggtgactagaaaagctgctgacttgggcatctctgttacagactttcagccccctgctgtgtctttgtccactaacagcaggggcaaattaagtctacctgcagtctaggaatggtagctagcttttcttcttttctttactacgtaaatgccatagttcaaaagcaaactgtgtttaaaagttttcttgcttgtgtatccacttggagatcttgacagtgctaggtaggctgatgcaagtatcgagttcacagagtagactgttaggttgtaattaatagatggcaaaccgtgtctgtgttgttttgcagtgagaattcactcaagtgtaagctttaaaggcaatacttgtaaagaacgggagactctgccgattgatttttattcttgtaatttgctagttttcctgtgtgctagacttttccatggaggctgtgaaaatgaagctctcctgcccacgttagacgagataaaattgagactgggaagatgaagtaacacagaacaccctactcaggaacct

SEQ ID NO: 21243 - DNA, 1190 bp, Mus musculus
aaatattgaaacaaaagtgatcatttggaaaactcacactgaaaaacatttctgatgagactggtaataattgacctgtgaacattaggaagctctgcatggctaatctttcacatgattggtgtgtgaactgtaaaacatattggtaaagatctttttttttggaatacaaagtagaatagaagattttaaaatagtagaacaaaagaaattcatttctctgccgagtttgtatggtaacttctttttaaaatttagcgcttcttatgggttggtatattttcaagtgaacatttctccagttatatgaaaaaaaccactaaaacacattttccaattgtagacagtcatattatcttcagagacattagccaaagcaagaccacgtgacaggctgcagacataaacatggaagcatagttagttgttgtctgctatggtttgcagacatttctattaaaaatgtattttgtggcctgaagaaatggctcagtagttaagagtgtgggctgctcttctagcgaaactgagtttagttcctagcacctacatcacgtggcatataatcacctgtaactccggctgcagggatctgataccgtctgtcctccaaggcacctgcatgtccatgtttgtacacagacacagataaacacacatacacaacaataaaattcaagaaacaactttgcattagatgtatcattgtctagtgaggttttaagtagaatcataaaataaataatgaattataatataaataaaaaagaccccaggctgggcctagcacacaagcctatagttctctggggaggtggagacaggaggatctgaaattcaaggatgtttgaagctgtaaaggaagtgtgggaccaggctgggatatataagactatgtctttaaaaaagtatgtagatacttaatggaaatttgttttatttcaaatgtggtaaataccagtgtgtagttcatatgtctgaaagttccttgtgaaccttagcaattttgagaagtagaaagcggtctttgtggatgaagacagttttcactgcttatcagcgaaagctccaacttttcagttgcttttaagaccatcaataaagtggtcctaacatactttttccaagttgtcttttttagagatttttaaaaaaattttatgtgtgtgggtattttgtaggcatgtatg

SEQ ID NO: 21244 - DNA, 1106 bp, Mus musculus
tggacgtggtgaactttttcagctgtgtggttcactggtggcctgagtagattggtggactataaattacccgacaccctcccatgcagtccgtgtgctgctagacatgaagtctaaacgtctttggcaaatttggttctttaaggggagtgttttgacttgattttgtatggggcaagataggcaaactgagttctgctcacggctgccctgcctgctaatccactgcaccttatgagactttttagggtctctcattgatcttctgctcctccctcagttcatgcatccagaactacagtgaccccgagaccatctcaggctgtgtgtgagggttgagggcgatggaggtgatggtggtgtccgtcgtgtctgctgactttatcctttttatgatctcacacaggaggttgtcatttaaaacagggtaaatgtgatgtggttgctccagtgccaggttttgggtaggggtctgctagaatagggcaggtgagaagagcgtatagaatgttgctgctctgagtgagattgcatacggacagtggatagggttgcttctttgtccctcagcctggtttcctttagtatctgcatgaattctgtaatgcagatgcaagctgggaaggcagagtaaagcttcaaatggactggcccttgaatgaaagagggcaatgtgttgtccatcatttgggtggaaagctgtttggatctttactttctatataagggctgtttgcttttcccttctttcaatgtattaaagagaagaaaaatctaataaagtaattggacctactggttataattcatacagaattttcaagtgtgtttaatagtggtctctcatacaactttaaagaaatgaataattggagaggaagggtcacagttgtgttgtagtttgggacccagcagagtccgaggaggtttgagtgattgggtgaactgctcatctgggagctgtttcttttggctgccttttgtgcctctccttggggacagccctcctttactcttataatgtattttgcaactttcagtgagaaaatagccatcaaaaatgaaccgttagtaaataaacacattctggttctatgatgggaatc

SEQ ID NO: 21245 - DNA, 1153 bp, Mus musculus
ccttatgcttgtgtagccagtatgccaagtgtgccatcttcctagcctcctgcatacttactagttttatgatcataaagttataaaggagctaatcacatgagggaattaacattgtattaatttctccaggtcgcttctgtggcatacatgatgcacagtgcatatgttctgacagtattcagatatggagagagggctttgcctctaaacatctcataacctacaagattacagtggtgtataaactcattctgattgagtttataatataaagactccaaatagagccacagtgacattgtatgaagatcatggacattgaaatgagataatcttcattcaaatctgtgtcactggagttctctaacctctcttagtttccatcatgtatcgaaataataataatttgtggaccttaaatcaacaagattaagatgattgtttttgtaaaccttggcaggtagtagagattcactaactactggtttctttatccttaaagtacatttaagatatagaatcagttaattttattactgcaacaattttcagggtagaattgacatttaaattgtgccttggatgtcgggtaggatattgatatacaattgtaaacccctccacatgggtgctgggaactgaactcaggttctctgcaagaacagtgctgctgagccatctctccaaccgcattcactccacttcagtgaacttccattaacctcagtgaacaagtgttagaacatgtaactagtgggaagcctgcatatgtgcttatggagtcatagtctagaacttaagaaaagcaatttagtttagcaatatagtcgtggtttatgcctctattcccagtgctggtgagactgaggcaagagcattgtcaggagttccaaagtattttgggctacaaagtgagactatcttaatgggcaaacaaatgaatgaagaaataagaaaaagaaaacaaaatcaaagtggtgggtaaataaagatgaaaggcagtatcaacctaggccattcctgtttactgccattactaatacattggggaggcttgtgggagatgtgtgagctgatgtttcgtaagccactgttccaggctgctttacacaggtgagctgagctgatcaattcattgacttgcaactgc

SEQ ID NO: 21246 - DNA, 1163 bp, Mus musculus
ccttaagtaataagtcaatgtggggttgcataaatgtctttctagtcaaaatgataaaccacatggacttttgctcttattctattaatgtataaagtttattaatagatttttctagcattgaaccacttatattctcagataaaatggttcatcagtagatttctattgtcattagtttctaggaatgaacgacctgtagattttctctccagcagtgaacctttagagatcataggataagttggtagctgtgatgggtgatgccagttctcagcttggtaggatctggagtcacctgggagtagggtctcagtgagggtttaatgaggctgggttcgtctgtgggcacttgctttgagggctgtagttgatctgggaaggttcatcttgcatgtgagcaggattccaagctgtcgatggagggcaagcgggctgagcatagcatgcacttattctggtcttctgactggggacagaatgggaccagtcctgctaagctcctgcttctatgacctccttccctgccccgatggacaataacctggagccctgagctaaataagctctttctcctttgcgtttcttttgttcggggcattttatcacaccaaggggaaaagaaactgatacaggagcttttccttattttctcttctctgaaaaatcccagacaacagaatttatctcttcgtgaaacctttaagcacatgcctggtggagtacttaggtgagtgttgcttttcttcttagaagaagttttagttgactctgattcacatctaagaagcatatgcaagccatggctgtgcaggtctacacgttttcaggataaaccaaacaattctaggtaatcagaatcacatcaacaaagtgaaaattgctgggcgtggtctcacgcctttaatcccagcacttgggaggcagaggcaggcggatttctgagttcgaggccagcccggtctacagagtgagctccaggacagccagggctatacagcgaaatcctgtcttgaaaaacaaacaaacaaacaaacaaacaaacagacagacagacagaaagacaaacaaacaaaaaaccaaagtgaaaattatgcagaagcccctgtcatatgtgcctttagcccctcccgtccctcagagtgaccgctgtcccccagtgt

SEQ ID NO: 21247 - DNA, 1111 bp, Mus musculus
ccggaagagctatagtctcgtccttgagggagccacggcttcaaagagagaaagttctgtcagtctatacttgccagggcaggaaatgcccccactggctcctcttatgtgtaaagtcttgaaaaaaaatcagttatgcaaatagtgattattaaagaaagtcatttgcatggtgggaaacttgaaaagaataaggaaaaacaaagaacaactacctgttcccaaggtgagtgctgactcccatggcacttcattccctctgttctctctatttttgctacttgaatatgcacatgtaaatatgtaactacaatttacgaggtcaataagtgctcttttctttctaatttgtgttattgatcaaattttcagacttaggggctctgtgcatatatagaaaaataggaatttttactatgtttaaaaggtgattatgataaacacatactcaggaaaggggctcctgggacctaggaaagcatgaagaagtttaggctcacaacagcagagtgtggggtggtggcacggacagaggtgagcctgtgttgcccacatcctggaacccaaagtggtggcttttttgtcctctacactgtgctgtgaggctgtcaggatacagctctggttagagtttagctgttagttgccctagcactgctctacagagcaccagaaggactgtggtctgacttggtgcggcttccctaggaacaggctgatggttgatttggagcccactggaagccaacatttcaaaccaacaaacacctcactcaaaccctgatatggcactagggtggctatgctcatgtgaagatggcacagctgctactgctcatccacggggacataggacacatactcaactcccattggcctgatccacataggtcttggagtctattgataccacctctgactccactggttaaacctctacccgaatgtgtttacttacagtaaaaaccagggtctgtgccggactggctgtttcactgatgggctttcaccaaggtacctagatgggcaaggcctctctgcatccttggcgactctctcaggcagggacctggaagagccattcttctcttggtgtatttatttctaatgt

SEQ ID NO: 21248 - DNA, 1150 bp, Mus musculus
ttttgatgccagaaatgattaaaacacacatgtaatcccaacacttgggaggtagttgtcagaggatccagcgttcaaggtcagtctcagctatatagtgagtacaaggcctacctgaacaatatgtatcaaaacaacaatatgagttgggctttttttgagatttacttatttattttatttatatgagtacactgtaactgtcttcagaagagggcaccagatcctataacagatgaatgtgagccaccaccatgaggttgctgggaattgaactcaggacctttggagcaatagtcttcttaaccacttagtcagaagcaaactttccatagggctcctccttaggatttcagaggtagtatagaaatgaccatagcaaaacagaagagtcagtgacagaagcttcatattttatcttaaattgacaattagaaagtgaattaatttcagaattacaataatatgtacttcttctcccacacacccttcaaacatttagataacagatttgcttgtacaccactgaccacactaatgaaatgtgcttaagctactagaatgggaaggatcatgggctgtgttacagaagaagaaatgattaaaggaccagtgttggtgtcatagttcagagttcatgaccttcaaacagtaaatggctctgagatgtttggttttgttcatttcgttttgttattttgggttttctttgagaaaacaaatgggttttggagggacacattaaaagaggggcagaaaaaataaagtaatgctaattatctttttcttgttcttacatccccttgtaatgtcagctgaaccagtgtctgtaaaatccaaccttttatctctttataaatagtttcaaaagcagacacatttgtaagtagcagtgactagttgcaaagtataaacccagattttttgcagtttgcaagtgtgagtttgggtttgactaagtcctcagctcagagccatctaaacttgattagtaatgcaggaaggtttggattttactgtgcccacttatgtgactaattagcactctgtgttttagaagccagcgaagtaagaacaagatgcatgggagagtccttttcctgtcatgtgctgcttaaaagagggacatggagtgttgaagtgcagtgaa

SEQ ID NO: 21249 - DNA, 1109 bp, Mus musculus
caggcatttctcaaccactttcccttctccttttttttttttttaaatggaaaaataaattaggaaaagacagaagatcctacactaagacattgtcttggccttgctgaggatacactctggattcccagttgtccattttccatggtgtcattgcatctggagaacaacaaacccctgagcccagccattgttcccgtggttacggttcatgctttgctgcttcctggctgagaggaggcttaactgacaaagccgatttctatagctgtgctgatatcacccataattcagacccatgctgaaaaaaaagtgacaattaacctcagccacatttcttgttattgtttttattgaaaccacccaatcacggacaaagaaattcatgtttgccaagtaagaccaaggaatcctgctgtagaatgaagagaaagtttgtgaacctacggagagtaagtaagcttatttaaagtggcaaaggcaaatggctgtttccttttgtttctgcaccgcttgggtttgaatcactcactcactcactcactcactcactcactcactcactcacccactcagtgtcgcccttctcataccttcttctgctagctgtgttcccatccagatgttatcctgaactgatctgactcttgcaggactcgggtgattctcaagaacacagttggataaagtatcataaagacagcctttcttcaaggtccagtttcccacattctcagtcacttcctttgtcaacgtcgtgttggttggctcacaagacgccaccctgcctgcctctgctcaggttcctctcctatctatgtcttcccttagcttgagcaccaatcagaattccttagtctccagcttccatattacctctgctgaaaagcctttcaagtttgcatcagcctctctgctcatagaagatccagctctctgagcacctagtatgtacagcacgtactcaggatttttaagttgatgttcaagatcaggttcaaaacattgtccctaacacccatggaaggagttacagagacaaagtttggagctgtgacgaaaggatggaccatctagagactgccatatccggggatccatcccataat

SEQ ID NO: 21250 - DNA, 1148 bp, Mus musculus
gacaaacctcccttgaccacctatcaaatgcaccacggtgcctctaagatgtattcttcaggattacctacagtcctaaagctgggatgatttattccagacattttaaggctaatcagtactgtttgccttctagtcactcagggctttgagtcatatgataatggcgtttcttcttttttgatgtcgcccattgtcttgatgttataaattttaatattcttattttcggtatgataagctatagtttgagaaaatagaaagatgcccagagttctcatacctgttttctgtctggaattctatcttcaaggtgattaaaactttagctttgaaaagttctaaggaaactagtttctttttcttctcctttctttccataaagcactgtccatacttttcctggtatgagcttccttgtattatgtagactctgcgtaaaccagctttctgcattgttttgttgtctacgcttatctttttccttaggtcatctagtttgtaaaactcacggcccaacatcactattaaattgtcatggctcatgctttttgccgtggctttgtattttgtggggtctgaagcaaactgaattttttctttttgatctgggcccctttcttcctggggaagttgggtctctcgttattcccttatttattgctctgctgtgggtatggtttagaggcttggtttttattgctctatggcaatcaacacactatacacattccaggttcctggtccctttacatatggacacacactattccatgactcagacagactataatgaatcgcctttatccctgggtatctgaaatcctgggttgctgtgttggtctgttcttcctaaacacagagccaaccacaatgcctgttgtaaaccagcactgtttgatttcttctggcgtttcctcaccatgggtgcctctcagcctaattacatgttgatttgtaatcaacagaagctccctctcatttgatttcatgctgactctgtatcccacaggtccctccacacacaccatttggaaacctccaggattattgtctcaacttcagtttcactaaacaggtctcctttcatgatggcctgcttttaatctgttgcttttctgttcagttactctgtcaacccaaaggta

SEQ ID NO: 21251 - DNA, 1132 bp, Mus musculus
acaaaatgatatcagccttggagttgctatatgtttataagagtgtaatcaatagacacatctggtaaaatctccttcctgggtatttcacaaatattcaaaatgttactgaaaaaaatcagaaaattaagaggcaaataaaaaaaatattatttcctagtatcctgatcagaaagccaaaagtttttgagcttggtatagtaaagcgataacattttatccatgggaatatgattgttagaaatcaaagaagaacggtttgtggtaagacataacttacccacacagttaaacaagaagcaacttgacgcgtgctagtgatggctcagatcagaccctgtctcaattgcctgtcttaaaaaagaagaaccaagaatttctagaccacactagttagctaagggtccagagagcaagggattctgggtgtaatctgaagtcgacccatcagctgctcaccttgggcagtcttgggaatgacttcaatctgttcaggctcagtttctgcagacgcagtgaaaggaaataaaactgtaattcatgtaatgtatgttaaatagcccaaagagttgtttctgagccttgaaacctggggctgagaacatagcagaacagaccaggacatgcccgggcaagcccatcgcctccctatctcccacccctctgacctaagttaaatgttacaggctgctgatgtttaaatggaccaatcatgtgaaaccgcgccaattcctcccccagccccactccttttctataaaaacccctagcttccaagcctcgtggtcgaatccactgtctcctgttatgtgagatacgtttcgacccggagctccgccattaaaaaacctcttgttgttacatcaaggtgttgtgttctattcgtgattcttgggtgcacgccgaattgggagctgagtgggggtttccccactgagttctttcagcagtaccaagatggcatagcatgccctgcactcacctgtgcaggttccacagccacactatgctccatgagaaggtctgaaacactggacagaataccctaagatggatggacagctctttcttcctgagtagggctatcagagtgtgggcatctttccttaacacacagctggatcaggacctg

SEQ ID NO: 21252 - DNA, 1450 bp, Mus musculus
ccttggtatgttaccctccccccacataaggacaagtcaatttgttggtagcttctggcttgaaaccctctccctccatttcatagcccacttaaccacgcataacagagttccatcttttgtcagtagatgcctttttttacccccccccaccccccccggcttaagccttaagtgccaaatcacaaaagaaaaaaagcagtaaccgtttacagaagcaacttagtgccttgtaatctaactttgtcactgtgactacattacctcttcaacgccagggggcacccgtgggcctcccagagcctctgcccgtggggttgggggtgggggtggggtgacccgcaaccagcagctcccccagctggccacacaagtgcacctttctttcggtctcccgcacactcttcctcttccttatagttactcacctccctcagagagttgttgctggacttggggtttttttggggggaggggtctattttgactttcaaaaccttttacttcccagcccgaacccctgttgactaatcttgcctgggtttgtgtaggtctccagggacaaaggttgaacaagttggacgaaggttttgacataagtgggacttcgtgatttaatttctttctttcttttcttttttttttaagtggggaggaaggggaaactagatggactatgagagacttgattttggtgctaaagttccccaattcatatgtgacatcttaaaaatgacaacaaatgagagaaaagctaaaaacaacaaaaaaaaacatgtaaggggtgagcagttaatggtctgcattccacatacaatatctgtgtaaaacgatttcctgtagaagtagctttaatggattttgctctagaataccttaggtctaccttagagcccccacacaatgcttttttccctgggtttaaacttcatctaactttcagaaattggagagcaaaaatgttgcttatcactgcacatcaatataaaaaagcttatttaacttatcaaaacgtatttattgccaaactatgctttttttgttaattttgttcatatttatcgggatgacaaatccatagaatatattcttttatgttaaattatgatcttcatattaatcttaaaattttgtgacgtgtctttccttttttccacagttttaatatattattcttcaacaacatttttgtaactttacactttttttggttattttattttaaaaaaatgaaaaattaatttaaaaaaatgcaaaaaactgttggattatttattttagaaattctcccctttgtgttggactgcaaattgagtttctttctccttaggcctttcacaggtaggactgagaatgtatgtataagttctgtgacagtacagaaggaaaaccaccattttatgtatagcttctaaaagggaaaacaaaaaaagagaaaaaccctttgaat

SEQ ID NO: 21253 - DNA, 1242 bp, Mus musculus
aaatctaccagctcatacataggagacaagacaaaaaaaatcaactatatttctaaaagctagtaataaatggttggaaacaagtatttaattacaagagttcaaaaaatgggaaatattaggtacaaagcttaaaaacaacaacaacaacaacaaaagcatctatataccagaagccattgtcatagggtacaggcttacaatcctagaactcagaaagtgttagaggaacattgagttccagaccaggctggcctacagagaaagaaacacactatctcaagaaaactccaaccagccaatcataaaagcactgattaaacaaaacaagtgtgtgtgaggtgtagctcagcagtagcacacgtttggcttgctgggttcaatgcccagcagcctcttactctgtctcccaccaataaataaatacatttgccatactatgccaatatttatggctagcagaatcttagaaatgataatatttttaaatgggtgctattctgcgggttagccccaggaccctgtgtactgaaaatgctgtggtttgaatgggaaatgttcccccacggactcacatatatgagcacctgctctcaggttagtggtgctgtttgggaggttgtggggctcttaggctgtagtgctttgctagagaaagtatgcactgggggtgagctttgagagtctgtagcctcacccctttcaatttgctgtcccagcttcatgtgggaggaagggtgaccagccagtttcacgctccagctgcctgctaccatgcctccccacgtcatggactctccttctgtaaccataagccaaaataaacacttttccccctctgtaagttgctttttggttttgttttgtttttttaaaatcacagcaacagagtcacagtaactaagtcggaatacagacagacactccatccctgattcctcaggagggctattttgcagcgataaatctataaatctataatcttctgaaatctatataagaaggcaaaagaatgagaatagataaaatcattcaaaaagtacgaaaacgttgggaggaaaaatagcctttgattttaagacttccaattcagctactataattgccagtggttggaactgatgatacaagtgaatggtctgacttggggagagagatgaagacaattactaggaggaattggagtctttcaacagtgctaggattggacaatctcaggcaaaacaaaacaaaacaaaacat

SEQ ID NO: 21254 - DNA, 1589 bp, Mus musculus
tgctttagactacatgtccttctccacggcactgtatggcgagagcgacctctaacccgcccctgcctccctccaccacccccccacccccggccttctgcgcgtgcgccccaccctgctcctcctcctcctccgcccagtctggctggctgggttcattattttcagctcagccaccaagggggcagagctccgacccaggcggcatcaagcctccctgcccacaaagtgacagtttacaaaattattttctgcaaaaaaggataaaaaaaaagttacgttaaaaaaaaattttaaaaagaaaaaaaaaaacaaacaaaaaactacatattttattataaaaaaaaaagtatttttttctccaccagtcttaaatggaaaagaggaaaaattaactatttgcaccgaaatgtttttgttgtgacataggaaaataaccaagcacaaagttatattccattctttttactgaagttttttcctcctacctgttctgtctgctgtattcatttctctaatttcatgcccacttgggggtggggtaggtgggtactctcatcagaggcacattggtgcatgtgtgtttgctagctcacttgtccatgagaatattttatgatattaaagaaaaccttttgaaatggctgcttttcaaagaagataattcatggcttctcatttttcagtctcttcaaaagtgtggctggcctgttttatgactgcagagttgttatgttttttaattttgaatattgcctattaaagataggacaaacttggagattatgatgttgcttggcacagactgtattaaaacaacactcccgtgacattactttgcttgttcctttggctgacttccagaagtgggggtgggttgtgtcaagaatggtgtggggtacctgtcctcacccacctctagatttctgagcctggtttggtacattctcacttctttaagaggagaagatggcctcctctatgtacaggggaaagctaacaagcgcatgaaagagcccctgacgaaaacccccagctttcttggttctctgtggctgtctgtgacttctctgtgaccccgaccattttgtttttgctgcaggggacagcttggattgtgtcagggttgtagtcctctttcctactctaagtgttccatagagtactggggcttggtggcagggtgtacaaccagcctatgccaggccctgaattcaatcccttgagaccccaaaatgtgccacagatagtagctgttggtcattgcagggactcaatgacaatgcagattgccagcattccccccatatccaaacatatatgatgataagctccaatttatcatttgttgtctaagaatatatggtggtggtgggagcctgttgttagaatttccaagactacagagcagagcaagagcgatcatggttaaaataactttgcaagtagagatatgtcgagttggggagttctgcctgggggcggttttaaaatccctggctgtgcctcctgaaaatggtgggctggctctttgccaggttcccattcattaagtggtgctgttataaagtgatggtaaatgggtatgg

SEQ ID NO: 21255 - DNA, 1128 bp, Mus musculus
ttttaacaggactgagccgaatgaacaaaactgccttcaccaagaaccacttaaatgagtgagtggctggcagaagtatgcattaggcctggcacccggggacgaatggggatcagtaggaattggacatccatcctaggaggcaaaacagcagggttatagagaagacccatcaggggaactgagaaataagaggggccctgctcaacatagatagatgggagatggttgggtataagtataggatgcagcttccctatcaaggaacgtccacgctaaatagctttccctgctctgtattgccagtgctaacctctttagggcttggaagatagctaggagaggtgactagggactggtccctgccccaggagtgcagagtaggctggtatgacaagacatctccttctgatgagcaggagattgggaggatttccattgagatgcacggcaccctggaggaccaactcagccacctgcggcagtatgagaagagcatcgtcaattacaagccaaagattgaccagctggagtgcgaccaccagctcatccaggaggcacttatctttgacaataagcacaccaactacaacatggaggtaaataggcctggcctcttcctagcctccatttggggtagcatctcccaatgaatcaggctggaggaggagaaggagggttatgctctctgcccctgaaactctgcaccttcaatctgctgtaccttctggatgccagacaacttgttgcaagtatgcacatctggtccctagctggaactgaatgagccttggtttgtaacaagcactccccagtgattatgatgctatgggctcaagacatcactggcttaggtacttcctaaatgatgtgagctcttcatcccttaataacaggatatgttctgaggtttgcctcgttaagtggtctcctctttgttcaaatatcagagtgtgctttcattggctgcagtgttaccatgcagccacttgagaccaccgtggtgtatttgacttgtcactgatcagaaggccattatgtggtgccagctgtgtgggtttccctcaaaggtttatttgtggatgtatatgtctgtatgtgtggctgcggggtaggtcttgctgggat

SEQ ID NO: 21256 - DNA, 1127 bp, Mus musculus
agcacaggtccttggagatgcttcgcagcagatcctgaagactccaggcacagtctgtgtggtgccccagcttggagtccacaggttttctgaggcctttactatgagaagaactgtttgctttgcatgctgggtatcagagcttctattttgttatgaccatgagaacatggccactctacctttgcagcacactgagaggaggccagagctgtctcttgcaggccattttgcatctgcttgggtccacaggtgctgctggcttcggcctcctcacacaccagggtagaggtacttcagggaagcaaccatgtgatcacttgggctgggcatgtcatctttgcctgccatctagggtcccagctgacactgtccaataatgccaccatgatggcatttttttttctttgctgcttttgattgttatagacagtgacttttctttttcttggtattctcagaactgtgtaaattgatgggaagcaatgggtgtgtgtgtctgtctgtctgtctgtctgtgtctcgtgtagttaatgatggtcttgaatttcaatcctgtcttgggctcctgaatgctggtaggaacctaaaggcaggaagtgaagcagagaacatggaggaacagtagcttgcctctaggctcacagttttaacaaccaaggcctactttcccagggaatgctatcaccctcagtgggctgggccctcccacatcagttagtaatgaagaaatcccccatagacgtgcccacggaccagtctgatggaagcagttcctcagtggaagttccatcttcccaagtatgtcaagttgacaaccaacgttagccatcacagtctggaaacaagacaaaaaaaagggtcatcatagttctaccatcccaagagcattggtgaacttactgcctttggcaggcagacctttgaacttgggacaaccctattgccaggagctaggggcacatttttcaagacagggtttctctgtgtagccttggatgtcctagaactcactctgtagatcatgctggcctggaactcagagatccaccactgcctagcatcttaaactatctcatccacgaaccttgggcttatatcggcaggtcctgaaggccatggtcctt

SEQ ID NO: 21257 - DNA, 1206 bp, Mus musculus
cctccattctctggagctgctgtggtcatggtgaccctctgttgcagagtctattatgactcctgccaatatactgtcttgtttttatccccataacaaagtagggggcacttggctctctggacaggtgccaaaatcaactctttgagagctcaccgaggctgtcagagcagccagccagccacactaggtctctaagactaacacccccagcacctcacacccagagtgaacataaaatggtaggtggtgcagaaaccgcaacacactgtctaagctggcccgcagcatcctgggcctgtgagggtctccctaggctgtgtgtgaagcagtcaccaggcgtctgggaacgtctccatttgttgcgtatagctgggctgggggctgggccattcattgcagaaaatcccaggcaggtgaacatagtgatgtagagagagccagaagccagactgagactggccctctaatggccttatcttagcgattccttcttttcaagtaaagttttcggtactcaccgtcatccagacttgttgagaggggctatgggaatctgatgggttgcatgtgtcagggtgactgaggacctgatggtcctaataagattatgaagttgaaaacttgctgctgctgacgacaaggatgaagacgatctcgttgcctctgccacctcctttcttcccagttttccttctctttcgcttcctcttccgaagcccatgctggcctccggtgcactgtgtggcagaagatgactttgaatttctgattctccagcctccaccaagtgctagggtcacaggcatggaacgtcacacctggtttaagcagtgctggggatgaaacctgaggctttgtgcatgtcaggcgagcatactagcagctgagctacagtgtcagctcgtgctgggttcctcctccacctctgcattgctgctgtgttccacttgcctaccacagtcagtacagtgctcccgtctgggagcactaggctacagtatctaatctaggtgcacaggaggccagaccgcttagctttgtgtgagtgtaagcgcaggtctgtttacatggtgacaaaaacctcccaacggcgtaggctcagaggcatccccattgccgtgtgatgcagagcaataatggtgattttaatagtaatgttgggtggtgtgggtgcaaacccatctcatagcgtgtggctggaac

SEQ ID NO: 21258 - DNA, 1176 bp, Mus musculus
cggcccactggtccagccaagtccaccaacacctacattggagaggacaattacgactacccacagatcaaggtggatgacctctccccctccccagactcctcccctgagcggagcgcttccactctggatgttcagccaagccgggcaccaccagccgccaacatggaatcagttgagcgtaagatttacaaagcttacaaatggctccgctgctcctatatctcttactcgaataacaaagatggggaaacctccttaatggcagaggaggcagatgaaggaagagcaggaaccagccacaaagacaacccaaccccttcttccagtaaggaagcctgtctaacagccacagcccagagggaccaggacctgccctctgaaggctgcagcagtgatgcttgtaaagaagggacttccgccggaaatcccaacagcggtgcaggccatgagcatagtagccatccttgggcagaggtgccagagggcacctctcaggacactaacaacagtggcccactagaacactcttttgaaaccaagaagctcaatggaaaggctctgagcaaggccctgagcagtcgggctgaggagccacccgcctctcctggccccaaggcatcgggctctactctcaacagtgcatctggcaactgtcccaggacccagtctgatgacagtgaggagaggagccttgacactgtctgtgccaaccacaacaatggacgcttgcaccccaggcccctgcacccccacaacaatgggcagagctctggggagctggagacagtggcctgctcttccccaggacacctagacactgaccatgatagcccatccctgacagggacatttctacacaaagattgttgtgggtcggaaatggcctgtgagaccccaagtgctggaatgagagaggacccccctgacccttcaggcctggacagcagcaaggttgttcatggccaaagcggcctcaaaaggcaccgaattgaattggaagatacagagtcagagaattcctcctcagagaagaaattaaaaacatgataaatacaaagggaaaacaaaagctacaaaaagtagccttacagaataatttttcttgtttagtgaacacagaggaaaggaaaaagtattaaaggcacataaaaccagggcctgaaacgtgtctgc

SEQ ID NO: 21259 - DNA, 1237 bp, Mus musculus
gtagggaggagaaacttgcatataattgactaaaagagagaacttcacacccacaagtatattttatatattcagacaagatgtcattgatttcatttagatagtttctggtgtattctcgtagccatccttctttgtcagtgccgacatcccacgtatgccatgctcggacgcctgcagtagccttggaacagtctttagaactgaggtcctctactgtgtagagaatggagagaaagcaattgtccccctttcctgctctgcccatctgattccttcattgcctgttttagctgtctactcacccaccatctcctcccctttccatctttttggtttctgtcaggagctgttagttttatgtcaggtagccatctctagctttgacaaggataataggggaggtggttctttctctcctaataataaaaccaggcaagtcaggaatccccataaagatttaacctcatgagatggtatcttaggtgttgtgtaaataacatgtgaggaagtgggcaagtacaaattcctaatggtgtggttggattttgttagcttgacacaaacctagatttctgagaataaggaatctcagttaaggagtcgcctccatctgattgggatgttggcatgcctgtgggacattttcttgattgctgattgttattggagctagcttactggggtggtgccaccatgtggtgggtgtcctgagaagaggtataagaaaggtatcctggtgactaaggatgtgtagcatctctttaggtggttctcaaccattcgggtttcctcagttgagaattctttgtttaactctgtaccccattttttaaatagggttatttgattctctggagtctaatctcatgagttctttgtatatattggatattagccctctatcagatatagggttggtaaagatcttttcccaatctgttggttgccattttgtcctattgacagtatcctttgccttacagaagttttacaattttatgaggacccatttgtcaatttttgatcttagagcataagccatttgtgttctgttcaggaatttttcccttgtgcccataagttagaggctcttccccactttcttctctataagtttcagtgtaactggttttatgtggcgatccttgattcacttggacctgagctttgtacaggagataagaatgaatccatttgtgttcttctgcatgctgaccgacagttgagccagcac

SEQ ID NO: 21260 - DNA, 1140 bp, Mus musculus
tgtagtattttagctttgtcattttcaagactgaatttcattgttttctggtttccattgttgctgttgaagataattgccactctattttattgattctttgtagataatctgattttttttttttataactgtgagaatgtgctaagttgagtctggattcagcttgggattcataaagctgtctggatataagaatttttttatcggggctggtgagatggctcagtgggcaagagcacccgactgctcttccgaaggtcaggagttcaaatcccagcaaccacatggtggctcacaaccatctgtaacaagatctgactccctcttctggagtgtctgaagacagctacagtgtacttacattaataaaataaataaatcttaaaaaaaaaaaaaaaaaagaatttttttatcattttgaaatttttattttcttttttggtttttgagacacggtttctctgtatagccctggctgtcctggaactcactttgtaatccaggctgtcctcgaactcagaaatccacctgcctctgcctccctagtgctgggattaaaggcgtgcaccaccactacctggagaaattttcttttaagatgttttatgctatttattttcttttgtgctctcttgctcgctatgtagatcgggttgtcctcatactcacagagatccacctgcctacacctcctaagtgtaggggaatcaaaggtatgttaccacacatggcaccagctttctcctgaggagatatacaaatgacccacttggtaaaacagtgcctagaaagaaattctcaggctttggtgagttaagtcaccaaatttaactgtgctatgctgaatagaaaggtagaacttagggcaaagactcttacattttgtctttagtagcaattctttgtggtgttgactgctttctcttggtaatcttgattgtctcaagtataatatagttcttctccaggaacttatgacacttaaggtatttatcatgccattttctgtatgtgagagcttggtctgtatgtctcttcttcctgaaaggttctaacgttcctgaggctaagggctgtgccatccataattctgtatgcattgtgtgatgtgagcctcaaacaaggtcagagcaggca

SEQ ID NO: 21261 - DNA, 1607 bp, Mus musculus
cgtgtgtgaagaggctgaaagcaaggcagctagagaagaggaagggttgagaagctccggccactgggtgagcgagggagggatgcagcctgggagcagaggatggagattcacagaagaacgtggatagagaagcagccaactgtgaagtgccagaaaaccaaggtctcttttcaggacatcatcaccctgttgctgctttgccagccccaggtcccaagcccaacatatgtctgcagcccctaggtgaccacagtcttagcaagaaactggagagggatctggggtataatttattaagtagaataatttccacttccgcttagccatatgtcacgccaagacctcacacttgggcgtgtccccactaactggtcatacaccctgaaatacccttatctttgctaactgttttggactcctactttttcaggttctttgcctctgtaaacattgcattgtggggcaaggtggctagtcagaattggacccctttcctggagtataaccattcctagtcagtagagactgagtcacccaggtcaaaacaccgcgctaaatcccttcaccaaaggccagtggttgtagtgggtttcgaagctggctagtggctcctgtctgtgtacagaataacctgctctctcctctcccgatactgagaacacggagactataggttggtatcatcctggaatcccgtccttttcctcaccattggcttacacaatggctcttgggtaaaagagcccaaaattcttggggtctctatcccaaagcaagtctgcctaagaaggccagtcctatcccaggagcacccagtctttcataaaccaggcagccagatattcacagggaatcaacacacttgagaaggttgagaaatctctagtaaattgcatgtgtatgtacatgtgcaattacataggtgggggttgagcctggattttccctgcttcgtggtttttcaaagcctctgatcctttgcgctggattagcactaccagctagctatctggggctctgccccgaatctccctctctgctgggcccagcctgtacatcaccaggtgttagaaaccaagtcctgggtttgtagtgcccactctggcgggtactccagcagtttccctgcacctctggctctcaccagcatcctctcagctgttctgtgccaaatacgtctgcacccctgggttcagcccaggggcccctcacctcggtgactaagcttcgcccaccttgttacgatgtcttatatatatacacactgctatttacagacctggccttggatcctgtgaccctctgggaagagtcctgccaaagtccaggacagcattggggctaaggcagaggcttttctctagaggcttgggccctgtcccaacgtggactttggggctaggaacctgggcttctctctgtgaatgtaaggacagctactcagagagccttgatgggggcctctccccatttcctgtggtcagacccggctcagcacttggcagctgtcccgtgcggggactcagtccaactctgtgtttgcttttcttcttggccaaagcatgtgccactaagctgtcctggaggacattgtctttatgaaa

SEQ ID NO: 21262 - DNA, 1238 bp, Mus musculus
ttagctattgctattaatcactaaaggaattataaaaaatagatcaataaaaaatgaagctatgtagtaggaaaaaacacaaggtttttggttagaaagtgtgttaactgagtgcttcagagttctgggccttggcttttatcaccatcagatcatactaggtgatacagatctgtttgttaaaacagcagcattgggttagagacatggctcagtggtaaagactgctcttccagaggttctgtgagttcaattcccagcaaccacatggtggctcacaaccatctgtaatgggatgccctcttctggtgcgtctgaaagagagcagctgtgctcatatacctaaaataaataaacctttaaaaacaaaacaaaaaacccacagcagcattgtccacttttggttctcttcatgtgtaaaaatgtgcaggttgaagccaccctgggcagttctaactgaccgctgtaactttctgttctcagttaccgagctgatacacagacataccagccgtataacaaagactggatcaaagagaagatctacgtgctcctccgtcggcaggcccaacaggctgggaagtaattgagtcggaagcattggggctgggggtggacttggaacaggtacatacagcgtgctgtagtgaaccttttgtatgatagcgatcctgtttcaacgttgttacactcaagccaagattgaatgtctgacatgaaccgtgaatgatcttgtcactctgaagccaccgtggccctttgctcctttactttcatttttttacttaaacatttttatgataatacaaatagaaaacatttttgccatttaaggttggttccggtccttgaaactgtcgagtctgcttttaagcagtgagcgcactaaccctttgtgggggtggggtggggacaaggttagtcatatagcctctgggaaagtctcagtgaaaaataaagaaatgttctgtagttgtattttctcactgagtggttttcttatttatttgggttttttgtctctatatatcgaattgtctgacagaccatttcagttttagaatcagcaggctgctacacaaagaacttgagttcacatttggacacattttgctgtgatttctatgacattaagcctttacctcatttttccagcaatcagtaaatctcaattgtgccaatatttgtatctattgtagatacaaatattagatgcttctatactcaatagtaggaca

SEQ ID NO: 21263 - DNA, 1145 bp, Mus musculus
atattaaataaataaatctttcttaaaaattagctatttataaaacaaacaagtggactgggatgtagttcagctgatagaatgtgggaagccttcaggttggtccccagcactgcataaagccaggtgtggatctcatgtctgtaatctcagcactcaggagaggggcaggaggaaatgcaaggtcattcctaattgctgtcaactctgaggccagcctacgctacacaaaaccctgcctccaaatgaagaagcaaagagtcatgatcttgtgctgcccaggatccctcaaacctctgggcccaagcagtcttcctgtgccagcctcctcagaagcctgtacccagcttctgtctttactggcattacttacgaagccaaccatttttcatgcttactagccattgcagctgttggtttcatgaatagaaaatgttcccttatcatcagtcggcctttctaatggtttcttctgttgtttttctaggagcggctgaagctggtgacggtgctgggtgctggtcttctctgtggaactgcactggcggtcatcgtcccggaaggagtgcacgcactttatgaagaggttctggagggtgagagacaagcctcacttgagacgtgttggcagaagaatttatggaatttctcctagatatagcttatgtttgtcctgagagcgtgcttaagagatgcctttggacatcttagatattgtgcacatccttagcagttttgtgaatgccatagcttgtgaacactacctaatatttgcttacattaatgagtaatttcagtctttttaagtgtaacagttgttgtgagtgtgtgatgcatgcacatatatgtgtgtgagtgtgagtacatgttactatgtgtgcacatgagtatggaagccggattgatatccggtctcttgctctagttctccgccccttttcttcttcctgttgtgtttacggttttgtatgagggtggtgcacacatgccatgctgcatgtgcagaggtcaaaggacagtttgtgggagtcacttctcctcttctaccatgtggtccttgggattgaaccgggcttggttgcatttatgtttagcctttcggccgatatactcaaccttattctttgagacaaggtccctgacaa

SEQ ID NO: 21264 - DNA, 4125 bp, Mus musculus
cccataaatgacagaatttccaatctcaagacgtatccatgtaccaagcagcacaaggtattaatattcagatttagttgggacatcttcctgtctctaactttgaggtggcttgttttaattctaattctaatctcttctaattcacagagcagtaaagaagccctttcagaggtcaatgccactggagtggccatgcttttctctgctgggacatttctttatgttgccaccgtccatgtcctccctgaagtgggtggaatggggcacagccacaaacctgataccactggagggagaggcctcagccgccttgaggtggcagccctggttctgggttgcctcatcccgctcatcctatcaataggacaccagcattaaccattcaggttccagcctcagtccacggccattgccatctgggaagaagagcaagtgtgtgacgctcctcacttcctcagtgtcttgtctcgcctcgcccatctccacccgtgttcctagagtccgagggagatgagagtcaatcgtggagaagtggaacagcgtacagcaggaacatcagaattagacaaagactttgtgttgtcttttaaagggactttgatatattgagttttgatgtttctcttaaccctattctcagggaagatggaatttagttttaaagaaaagtggagaacttcatacagtgaaatagtaattatgaaactgcagtgttctgtaaagctaaagtttttccccttagtttagaggctctgccactttacccattggtttttaacatggttctcaccatgtaagactggtgctttagcatctgtgccacatgccatgagagaaggtgggaacacacatcccttagatgctaaagacgatggcaactaatttgaggttagaataaggaaaataagggcaggagacataagctgaactgaacccaaaaaagaaacatccatcaaaaggggtgtttagagtcttcaacaactcctttgcacgtgcctccctaaacaaagcctgcccttccttctaaggggctggctttggaagaggggtctgttatcatatagcatttttttttttaaagtgtcctttgcagaatacttgtctacagcacactcttagtagccagattctgttcaggcccagggtttccatcaagaacagtatgttcacaatgaaattaaggggtgttaatttttctgggaatttggatagttactgacatcttgtagtaacctttttaaaaagtaacactattacaaagtatgttgtccttttcttctaagtcggtggttggtggttctcaaccctctgaaggctgcattcctttaatacagtttctcatgttctggtgccctcccagccatgaaattattttgttgctacttcataactgtaattttgctactgttatgaatcataatgtaaatgtctgataacaggatatcgatatgccacccctttgggtgtcgtgactcacaggttgagaactgctgttctaagtatttcttttagcagtcagcagtccctctgactgagcccttgcccagggtggagagcatttcttccttctccctagctcctgtgcaggagacggtagggctgtatcagaggggagtatccgctgctggctggtctcaatctccttgcaatcatgtctgcatcccactcttccctgcgctctccctgcccccattgtgtagtactactgctcctggtgatgtcagtcctgtgtgaggtggattctcactacttgaaccatgatgatgaagacagcactgtctattcttcatttcctgtaactaagttacctttgtgtcaagtacaaccttattacaccctcaaaaatgtcacctcctggtgggagttgacacagtcactagtactctgataatttaagcaattgagacagcaaaagtatccaacagaggtaattcttccatgtttgccaaaatctgaataaatcctagtcagataagtgtataatactgtatttatattttctgtaccatttcaaaaacactttacataaagagggagccaagactagtttcttcagatcagtgagtgcagtcatttgtatttttctatgacacctatgccagcatgcctgtagttttctttctttctctcctaaattgtcactaggtcagccagcagttatgggattaaacatgtgtgccctctgctggctgcagtgaagaaagcagaaatgggatgcagttctgtgtggagctggtgcccattgcatcccatgctaaagtgttaatgtgtgcagtgtggggtgtgggtgactctcttgattaggcacaaacaggtgactcggaaaggtttgggctcatctagtccttccaaagtacagatgtcttgatctctctagaagttccctgtgtctggtttgatttgggtagatgtagcttctgtcatctcgctccatgcagtggtcagagatgttgtcctggccagagcctctttcgttcagcagtgccttgccatctcactctaagtttggccagaatatcatgttgggtagggccttggactctggcaaggactgaaccatcaaacttccaaatctgccttcccctccgggcctcagtcatagtgaactttccaaagctggggcctttccaggcctggaactatttattgcctgtggacagtgcatcccttccctgcccagcaggctcagatagccatgtgactctaaatagggctcaaatgcattagaggcagcaggaaccatgcagaggcctctgttagtggggggaggttgctcatgtggcaggcagtgcccccagagcagccaccttggtcactttacaacacatttcagttccattttcttcctccttaagactccctctggaggtgtggatgccttaatgcgcaaacacatttgaacacattggtgatacttaagctgctgccacaattacaagtggaattatgggctaccaaagaagcaactgatgaaaagcatgggccctccttcctcatgaccaaagcagtcttaattgggcttggagtccctttctcccagaatctagatggtcttcagattcggagcaccctcccctccccagttcccagtgttgccagtctctaagtcagcagggcagtgatgtcccatttgactctgctttctgtgtgcactgtcgccagcttgcatccttacaagcagacttcccggcctggacatgtcagcagttggaacggtactacccactgagacagtgtcctctcccctgcttcacctcagtcctcagattctcagttcagaagagccagttctactgacctgggggttggatcattagaagaaaaggagggtctgttcttatagaaagggaaatagaactggctggttctgttttcaaggattagagataggagggacagagcagtgacagtgttgtttgccctgctcctcatgctagtgaagttctgaacatgggactgtatgtcaatagcacaagcctctaagaccctcctgtcttttttgggtcagagccccagaccattgcatcacagtcattcggcaagagggtccttgcggcagacttctgttcattgcagagtgggactcacccctgaagaacactggtcgaaatattatacaactgcaacccttttctacttgagacattgaagttcagctcaggagacctgaagatggggactggtgggaaaggaccagcagacatgtaggacttctttacatgtgttcagtcccccacagtagctaagcacagagactggctttgctctctgtctcgtgtgtcttcctgtaaactgggactctaatgggatggtaacaccacgattcccctggtttggtggcctaaacagtgatttttttaaaatgtccccttttctggatcctttgtacacataaactcattccatggatggctgccttataattttgtgtctttccactttaattgtgaatggtttaaaatcgctgttttctgatttgttttatgatattaaatttttattagcgcataccttatgtgagtggctctttacttacacatcggcagcgtttgtgtttggcaaccacacttgatgcacaaaaatggtggccatcaggatatcttagctggtaaaggcacctgc

SEQ ID NO: 21265 - DNA, 1186 bp, Mus musculus
tccagaagagaaggtaggtacctgttactattttctcatgagctcttcgtgccacactggcgctcctaatgagttccttatctggtagagcggcctcagcaagtgcccttccaggagtgtttagaatatacctaacccagggagagcagacctgtggctgatatgtgtccttgaagatttagttagcagtcacattctgattgggaaacacctgagaaaactgttgagtgagagaactgggctctggtttaggcactcaggcctgtgtccctaggcaagttgcagctcatgctgaggttatagtttctattaaattgaatagataggacatgataagatggccttatagttcattttaggtagtaatggttagggtctcatgctagcagcaaaggtgggagtgattcccaattctcttttgcctcttaagttgtttctttttggaatgatccttatgtttttctctacctctttcatgtctgtttaggtaacatctataaagccagggtctgtttggatcactgcattctgggtgtctctggcctaccttactgtttttgccctggactcagcacttccccactgtactgccatctgtttacttgtttgcccttacattttagagaacttcctgagagcaccacctttgtcactgtgacaaacttccttttgtccccacctctgtcatcactgtttccctagttgctggtacactgcttagattgtggtgtgtatgaccactcctgggccagtttgagagttgtactgggtctttccctaactaaactctttacccagtctctttatgagctctgtgggtgctggagaaccttggatgctgctgctgattttgagctgtgccaacccccaggcacttttgtaatcagggatgggccttagttttgtcctgttcatattcagccatctgcctagggctagggccatctgctgcctgtgagtgacctgagcaagggaagcggttgtgaatcagtgtgggtgagcagcagcctattttttaagggactaattatatggatgagtctagggctgcctccccaactctgacttctgtgtaatgcatgttatgtctcattttatccaggtcttagttttgttctagatgctgccttctaactactctactagagagcctttgctgagtttttgtttactttgtgagtgcttt

SEQ ID NO: 21266 - DNA, 2466 bp, Mus musculus
gtagtaaggcactcaaagcaggaatagctcatgctgggtccagaatgtgggtccctgagcttgccctgtgtgttgacactgatggcggcatcttccttaactgaggacagaggtttgggaagtcatgccaaagccacccagcactcgctgaccagctctcgtgcaggttcctggctcttttgagagtttctaagaagcacccagaagacctgtgggaaggaggaaaggtgtcagataatgattgtcttcctaatactcaagttctcacttcctgcttccagcactggctgccttggccttggtttctgttcctggataaggggaagttgcatgctgtttcctggactttgtcctaggtagctctggcttccttgcagcccacagaatcctgagatttgctgagatgccaacaaaagctcatctggcttttggcagtctgggcaagttgcccctttttaggtttgtggtgatggaggggaggctgataggtacagaccaagtccccggtggctgcaggcagctccggcaggtcctgaggatcctcctcaccacggtcatgtgccttagtaactgtgcccaggaagtggcctgctgtgccactgctcccactctgttctctcctccctgcctttccacacgtcatcgttgaaaagccactccttattttccctgccagctgatagagatggtgggcacccagaaacctgagatacaggtcctgggagtgggaacgtactagcctagaagaaatgctccagccatttccagcctcctattgccctgtactgaatgctgacaagtctgggtaactgagccccaccaggcttctaccatcttgagaagacagatgtggtatcaaggaatgtgtgtgttttttttttttcttctcatctttcttcctttcttccttttcttcctcttcttcttcttcttctttctcctcctcaagccttggggctgggaaactcttcagagccagtcctggactgaacctgtgatgagcctctctggggtggtaaaaataataaaagcccagtatatttatagttcctgacacaacagggttagctccaggcatctgtggcctcaaaaataggggaataacttctcctagccaactgcctccattcacaatgcactttagtccctgtcatgcctggcttcctgacaccctcatctcctctcagggtaagggcagtgtctgctgtccctgctggccactcccacactaacccaggaggccagtccagtgtgcccagtgtccagacaagtatggttggctgaggaatgagctggaaaaggtgcttagactagacgactagaacacccctagcaggtgctgccataggcttacctgggggtgggttccaaggccccaagccacctcaccatggcgcttcttcagcttcagtggtgtccacccccctcaagggagaactgggcaaggaacacgagtcttctgaatgggcctgcctcttttgcttactgctcttctaaaatctgagttctgttttagttctgtgtcgttaccctgggcttttgccccttacagattgcacttctttggcttattatttagccttgtaggtgcctggctttggccttgggaaaaagaacctcctggtgcctcgttttctctcagcattcattagcctgctgtggggaaatcacaggcccaggcttgcctaactgaaggataaagggcacccgtgttccccatcctcttgtcacaggcttttagaaggtctgttcttgaggtctcacacctgttgctggcatctgtggcttcttcctgcattgttttcttctacagcaatttcttaaccattagccatgtgctgtggtttctggggcatctgggctttgtccattacagacggactggggacttaattgccttgaagtggagcctgctagaaacagggtcagtggcaggtggcaggcggatgggcaggaagaagcttcgagcaagtgggaagaaactaagcagcctactttactgggctcacctccagggacatcctgagacttgtccaaaagaggcagtcagcaccaaaggacttttacacagggttttttggtttgggagatgtttttgctttttcatacttacactgactcaatgcaggttttatatcctggtgacttgctgtcacattctatcagttttcaagggccagaatgatgaaataaataaatagaaaattccgtccttccatgccttagtttaacaggtgagctctacctgcccagttctgtgttttgtgtgagaactgtgaaatgggcggagtcctgaccactttgtgggttcgtttggttttataaggcatttcaatgtacattcttcaagcactccatttgcaaagagaacttaaagtcatactgtcttccccattcatcctgccctccttgcacccccagctttacagttctgtaaagaagccaggctacaagacagacaaaggt

SEQ ID NO: 21267 - DNA, 1176 bp, Mus musculus
ccgctcgggtcgcaagtggccggggcttcgctctttgcggaggacggcgactcagagagcgcagttgatttgaggtgggcgctggggcacgtctccctgtgggtgttgcgtgagggggacacgaggcggaagggcgggcgtggggagggcgtttgtgtcgggaagcagcgcgcccctccctgccgcccttaatggctctcatcgaggcccggacgccggggagccggcctggcccagggcagcttagggtttccccccgtgggccggcgcaggcgcagcgctctgggccccgggcttgcccgtgtctcgggggcacgcagctcggctcgctacgctcctcccccccccacaccccgccgcatacttcggccgtcgccattttgtgctgcgaacgcgccccgtcgcccactgcgcaggctcggtggtggcgtcgcgagattccggcttgtgacgcgcggggaggccgcgacgcgggcgcggccggctgctattggaccaggcctggcagagggcgggctcggctccgcccgcatttctcggcctggccttaactgcggcagatgggaggggaaccccgggatccggggacagcgtgtgcggctgcgcagtctagaaaggtggctactggcgttgtggtgggctgccgtgtggaacctgggaagggggtcttttggagagttaagttttaacttggaatttgaatgtggtggtcgtgaacgacttaaaaggtacatggcgaccttgttagtagagttggtaaacgtggggtgtgtttgactgcttgactgaacatcccccacccccatggtgtcaatcgttgatattgtctcgattcaattactgcctaacaggaaacactagccgggcatcatgagtggctgtcgagtgttcattgggagactaaatccagcagcgagggagaaagatgtggaaagattcttcaagggttacggacggatccgagatattgacttgaaaagaggttttggttttgtggtaagtacttgaaactgagttgaattatctgtcgagaagttaggtaactttgtggtggtgacacatgcctttggtctctggcccttgggaggcaggggcaagccaatccacagagaaaccctgtctccaaaaaaagaaaaaaaaaaaaaacaaagtgggtagagctcttgtgatgagcat

SEQ ID NO: 21268 - DNA, 1247 bp, Mus musculus
taagtctagttagtccacatgctgagaacccagaaacttgatggaatcactatcttggcttaaacttgtcacatagcatttgacattgtgacataacatctgacactgaatgcttatttttctttcttcagaaatgctccacctgtaagaacagaaaatcgacttatagttgagaatttatcctcaagagtcagctggcaggtttgttgaaatacagttttgagatattttttaatgtggcatttaaaagtgttaatgggtagttaatgttttattaatatatatcttattaaatgctttatcttaaattaatttaattgaactataattttaaactttagttaaatgtaactgggggatgtttcagattttaatattagtgatcaaatgtaaatgttttgaggttattttttcatgttttttaaaatcaattttaaccaaatattaaaccctttatttgccagcctatctgtgtcgttggccttatgacgaggagtgcctgtgggttatcctaatcgttgtcttggtcactcttggttgggcctggttgactttgccagtcagctcctacagtgatcagttggccacctctagatctgtgtttgccggtctagacgtaatcggtgcacttacttgaagtgccgggttgcagcgatcccagaaccgttgataacgtgatctgatccctaagttgagagctgtcttcctgtaacgcttccgaataagaggtcctggtcgaaagagttgaaagatacgaaattagttggtcgttggaatcctgatcgcagtaaagtggtccttggtaactgcacaagagtaaaacatgtctgcatcgccagtagtctgctaatagggagggctgtgcgattaaaggcttccatcgattgggtagtatccttcaagtgggtggcgaagagccagtcgggcctatgtcatgaaggtttctccgaccgcttaatggtttgctgcttgactagcctagggaaatgttaataaaggtaaagtaaaattttttaatgacatatggggcacaaaataactggtgtctttgtaaatgttgttttatttttttattttttattttttttaaatataaaactagtctttaaaggatgtactgttcctttttgtttttttttgttgtttgttttgttttttgttttttcccccttttgtactgagctcagttagactaatactataatgttaaaaaattggaatgccctctagcattttgcttaaaagca

SEQ ID NO: 21269 - DNA, 1265 bp, Mus musculus
gaccagaagttcctctaggtcccgtagccgatcccgttcacgaaggagcaagtcttacagccgatcaaggagcaggagccggagccggagcaagtcccgttctggtagtaggtctcctgtgcctgagaagagccagaaacgtggttcttcgagtagatctaaatctccagcatctgtggatcgccagaggtcccgatcccggtccaggtccagatcagttgacagtggcaattaaactgtaaataacttgccctgggggcctttttttaaaaaacaaaacaaattcccaaaccatacttgctaaaagttctggtaagtatgtgcttttctgtggggtgggatttggagggggttgggctggatttctttgtagatgtggaccaccaaggggttgttgaaaactaattgtattaaatgtcttttgataagccttctgctcacacttttgtgactgtctgaagtatatagtttgtgtatattgatagagctcttttataactaaagcatttaattttttgtactagaaaaacttttgaatattttagttcattgttcagatatgttaactcaagattagtttaattaaactaacgaatagttttggacactttaaaagagctctaaatttgcttgtatataaaggcttaatatgagttttacttgttagggtcaagggtgtcttgcccattaacagctgtagatagacattaaagtaaagcagctgtttgttattgataataaaatactaagtattataaaactgcttttggtctgtttctctcaagttctgtattatttattctatcacatttgtgtattttaagttaaaaactacacatgtagaaccctgaagtgtaagctttttaaagtattttattattttgctatttgaagctagtgaaggagcctgcaaatggattgaaaactacagctaagttgagtgacagttccttgtattccttcaattctttcctgttgccactggacttgaattaccatcaggttactaaccctaaacagaaagggcagtggtttggtaaacacataagatccagtgcaagttttcttgtcagatgtaacagttgggatggtcataaatgtaatttctcaatgattgaaggcatgagagatctttacatgctggttttagttctgagatacgtgaccatatgttttatttaggtttttaaaggtgtgtgtgtgtagagtcctggaactcaatttgtagaacagggtggctttttcttccagttgctgagataaag

SEQ ID NO: 21270 - DNA, 1222 bp, Mus musculus
accttcccagcattgagattataagcaggcactagcacgcttataatcttaactttttttgttagttgttgttgtttttgtttttaacttttaaaaaatgtttgtctttcatgtgcgagtcacaggaatttggcttgggtgtttgtttttgcaaggtgaacacctcactgagctctgagccttgcatcttttcatttcttaactgtgtccttgcacaggctgtggtttatagttattcttcagtacatctgactgctttctgcttagggcgatttcttgggttttgctcattccgttaggaaatatctagacctgcgtgcttccagtaaaaacccaatttgaagaagcctgctaatttaagttcacgtgaaaattgggagcatcaacttagaaagatggagagggagggttaaaagctggcaggtgtagacactgattgggaagagtcatgagcaaactggctggaaactcaaggccacctagtgtggggacacaaagtgccatgctattctaaagtctctgacatcttaattatgaaggtttggcttggtgcctatatctcaggaacatggtgggattccccagccatatcccatgctgtagtctgtagacatgtgtgttgtgaactcttgacagtctctttgaaagaccaaactaagcaaactgtgaatgcgcgttcagacccttgtattaggggtgttggagaaagcatagggcacttagttaaattagaatttcaggtggattttttttttttagtgtaaacatatcatagattgtacgtggaacacactaatgctcaaaaatatcaattgcttatttgaaatttagattgactagccattgtgtattttcatttgctaaactggccaaccttggaggatgaggtcctaacacagctactacatcagaatctttttaactgaaccagtcttgcttgatacaatggttagaaacacctaaaagtgtaacccatgatgctcttctaagcaaagaaaacttccccttccacaactgttgataagccaactcagtgaatcctttcttggggactgaaggaccccgtgacttgtatgttcccaaatcttcttggcacatcccttgctcacctggtctatctttagattctatctaagtatatatctcatgtctgtgtctgcctttcatcctggagttaggatgtgcaagttcatgttcgccagagtcatgaatgcaatgctct

SEQ ID NO: 21271 - DNA, 1149 bp, Mus musculus
ggaaacaaaaataaatgctttcttctgtgaataaaaggtcagatgcccttttggtgcacagagaaggtgaaaacccagagggagttgaagctgtgagtctgctcacccaataaaaggcaggctaatagcatccccacaactgcgaagtattgtccacgaggcagcagacccttccctgcagatagctgctttgtctctagagcctgtaggaccgagccccagtcattacctgctgtggcgaggctgcagttcttggaggtggctgtggcttcaggtttgccatgcttgtctgtgacacccagtcatgtcgttagtctaaacacgctccctatcttcatttctccctttcccatcaccaacctccttgctttttgccccatctctgctggatatttctagaactcagatctgatcttgtcctttatttccatcttgcaaccgccaattgtttaaaaggcgaaatagaaagacaccgttacgtttttaggaccctgcacggtgtcatattcaacatggtcctagagccttacttcttctgtacaaggctatttatgacctgtaggttgaaataagtttgctctccacttccttgtatccattaatgtagtttttgggcaaccctgtctacacgtagaacctcttcatgacctagatagcaatctcctctctgagaagttcttccagatcgttccagtttgattcatctctgactgaggattctctggagcccaggtggctgctttgtccccagcgctcagcacacacagccccaggatgtcagagatgccctgggattctgtgctgacaggatgccatctttcatttcctcttcttccctctcctgtctcttctcctttagaagagttagctgggcttgtagtcttcagctttccacttcacacatcgtgtccttttgtctgctagagacgcagaaagcacagttcctgtggagttggctgcaccctcgtcggtctttgcaagtagaattgctttggggcatagtgcctgtgttcttgttgtttattttcataaaccccaatgtgcctagcgtggtgccttgtgactaaaggatgtggattgagaggtctctagaaacttctctgagtggcagtagtgtgatgggggctcggatggacccttcaaagacaa

SEQ ID NO: 21272 - DNA, 1131 bp, Mus musculus
cagcttgtattttgctagagagcaatgggcagaacagatagatttggggtttaatgctattgatttggcgataggtttggggttcaatgatattacctattacataaaacttcccccacagaacttagagactgtttttttctggagttgagcatttgtaagcagcagttgtggtagccatccgtgtgtggagagagggtgcatggttttcaggttaaagctttgattttctccccatggatttaggctgtgaggagatcctcacgccacacagtgtgacagtggtcccgtcaggggttccgtctcacagggtggttgtggagattgacaggatcctacatttggagcatcttgtggtcagttaacaggaccttactatctttgggatgcatacgggaggccttccttggttaaacatctatcaggctccctcatctctagggttttataacttcagatctatttgagatttactaactaaggggaagccaagactataagtcatgggtctctccctatttttcttgcaaaaataacctctgtgttatttcactttttttcttccttcccaacgtagttcctaataagtgaccgtgaccctccgtgcaacccacactgtcccaggactcagcccaagcccatctgcgcctctgacggcaggtcctacgagtccatgtgtgagtaccagagagccaagtgccgagacccagccctggccgtggtccatcgaggtcgatgcaaaggtgagtgtgtacgctcaggcgggcagaggctgctgggactacagcgccacaaggtgaaatcatcactggggcttgaatgcctttgctcttctgctcttctgtctctctccgcctcccatcagggtgtgagggaaggaagaatggtaaggaacacttccctgatcttcagacactgccaccagtgaggagcgaggggctgaggggcagtgtcttgtatgcttgtggtgttttgttttttttttctcaaaacagagacacagtacattactgctggccccgggatagggattccaaactgttggttcacagaagtgttttgtttgacctgctttaaagcgcgcaaagtatttgagataacatttaaaaactgggagattcaacaataaca

SEQ ID NO: 21273 - DNA, 1197 bp, Mus musculus
tctgttttcatttttaagatagggatgaaaaaacctattgcaatggaagaggtgtctttataaaatctgtgcaaattctgtttctgagtccccacttctatactggtttgaacaaagagagggtaactttattctgttagtagatggctttttgccttttccctgcactggtctctcctctgggcctctccttttcttagcagatagcctgtcttttgttctgaagggagctaggagcagtggctctgtggactctccctctctgtggggctctcaaggccacacagatgactccaagatgacacacaaaatggagagctgggaattgcctttggccaagtggccctcactgacagaggtgatggaaaacccaatggtgaaaggttctcggaaaattatcctgggggggggggggcggcacttagcccctcttgaaaaaaaattgcaaagtccacagtaagaaaaacaacctattcatataaatgacttgaagccataggtgccaagactccatgtggctgcataaacagaaagggtagctcagtgatgttctataaatcattcctaaagattatgactctaactggacctcccccacccctcggcaccacacttccggttcccacaccagccctttcaacagtaaaggcagggccataaagcccaggccttccttgttgtctgtccttttcctgcagtctgcctcttctccagattctcagccactaggctgccctggggtagccccagtaccagacacccatgtgctctcagacctggagaagcctgtgataggagctacacggttccttatgcaccctggagtttcatgtcactatttagaaagattctttttaaaaatgtatggcttgttattgtgggttattgttcagcatttcattcatttttgataagaaatgagaagggcaggaggtatttgaagaggttttaaggtcattgctgttgacacaaggccagtgttttccttaatattcttggcctagcaagatgattccttttgcaacaaatgtaagcaagctcccctccttttcccaggccgaatcaccttttcttgatgtttacccccataagagcatgcagtctcgaggggctgagggttgagggtgcgcatttcccaggatgagctggggtcagcccctgcagtctcatcaccactggggggcgctcatctgctat

SEQ ID NO: 21274 - DNA, 2046 bp, Mus musculus
ctagcccatgtctgctgtgcaaaggctgtcctcatgcagatagtttcgtagctgaacattttgtacactaatggctcacatcgcttttttctttttgctctctccttcccgctcccagtcggacgccttgtctaaagagtggaaaaagcaaaaggcccatggaaactccgaggagacaggactgaccgtcagacacctaaccctcagcgctgcccgtggcccagccacagtctgtgtaacataagtggtgcccgccatgtttgcacttttaataactcttacgtgtgtggtttgtttctggttccatttgtaaacaccaattatctaataccatagcaggaacaggaaagggaagaaaagctgtttattctctcttttattgttaaggttttttggatctgctactgacatcttttaggttggggggggcgagggacggggtcgagaagaaagagatttatatactgtatataaatatatatgtaaattgtatagatcttttgtacaggcatcgacatcgctgtttgtccctcccttctacttcctctggactcccagtccaggtctctccttagcttccccaagtttcactgtatatggactctgagagaatagatgggagccctgtgcttgtgctgtggatagcatgttttcttctggtgggaagagggtactggtccattagctgtcaaagtccagtcacttggccattggctgggtaggaggggagcccagttcctgtgctggccagcatggatttcagatctccggtggcccacatgtccatgctatccagatcccttggcagtctacagtgaataatggagcaatctctacctgaaggggctggatttggctgctttaaacatctctacccatgtttagcatgtcccccgtgtaggacatgagaggtgagaccccaagcatgtgaggaaaaggacacccagcaccagcagggttctcctgcagcagcaggtgttgggcatctgaggagatggtgaagaggactgaagacctgaaccagcccttctgcaaacccacaagagagcctccacaagcatgtagctcccaacactagagtccaactaggttttactttcgtgctctccctccatctcttggatcctcaccgattgggtcagccaccttgttggccaatcccggagttgctcttattcctctggcttttctcatggacttccagaattgttgaattgacgtggcgtcccttacttctgcttcctcagaggaataggagcgatgatccagctatagggaactctaggcttttgcacagagtgtcaccggaattgcaccagggcagatgagcaactttttctgtctaggtgacatgctgattcagaggtccttcagtcagagcagcaagtgatacttagcagctcttccatggtcagccatgatggcagtgagggaggccaggactggttcttttgctggcttgctctcctcaacctgccttccctgggtttccatctcagtatcctgtaaatgcatccaccctggtaaaccctgctctattttgggtctggaaggcatggaccacataatgctgcccacatgtggggaacatagccttctcggagcttgattcgatgaagtctcagctccagaaggttcccgctgtcctggtggaagtcacacatgctgtcccatgatgaccagtaaccctgtcctgcatggtaaggtgggaagaacaccttctcttggagccttgaacagaaacaccgcacgcagcaggctggagctggatggccctcccagcagactccagtcccatttcctggccagaaggaaatgtgcacagagaagccacctttatgtaggagtttagaatctgaccagccaacttctctctcacagatgggcgtaggctgtgctgtgtggttttcccttggggaggcgggagcaagaaaaagtatttgtagcttgttttataaaaaataaaaatgggtaaacttgggcagctggtgcctctttctttgggtggccttctctgaaggagaggccccatttcctagaaggttt

SEQ ID NO: 21275 - DNA, 1125 bp, Mus musculus
tatgcaccagtgtttgaggattatattcaatatccctagatgaaatataccttgtccacattttcaaggtgtatttcaaaattgaagacaatgaatccgaaaatgatggcacattctagggactgaatagacttctagattttctatcttctcattctcattcctggattgtgctaaatatggtctattttatgttctatgttaagccagcaggggttggaacattctccctcattcaattacatgtttatcagctttctggttttaatggtttccttcactgcttaagcttgactgtcttagaacttgttctgtagatcaggctggtcttgaacttagagaagcatctatccagtatgtctaattttagtcttaactttgtagttgtgtgtagtctaaggaggaagagaaatgtagaaaactgaaattctcctgaagagaagaggaacagaagcgagttttggaagtataccacagagtaagatatgagatattttgggaccccgtgattttgaaagctgaaaagacaaagtgggcagttcagacaagctttggtgcattgccagagctctggcatcagcagctggtgaggatgggtttctacaacttcctctccccctccctctccctgtcctcctccatgtctctccttccccccaccccccgtgtgtgtgtgtgtgtaggggggggacatatgggtggtggcagtactggccaagaggacaggctcagagcattgcaatcatagtatttctttggaactatggcagaggttttgaatgtataacagaagaacaaaaagtacaagggagtggctgagaaagaagcagatgggacaggtggaggcacatgacatctctgagagggaaggcagggacaggtggaaagtgggacatcttggagaggggcggtacatatcttctcccttcagtccatgtccactaaattgtaaagactgtcttttttcttttttcgttatgaatggctagtataatggccattcctaagtgttaggatggcaaggagggaaccaacgtctaagggttatcttctaatgtccacttgtgtgccagaaaacatgtgcacatgtgctgtaaaaagttattaaaaatcccagcctgctgc

SEQ ID NO: 21276 - DNA, 1099 bp, Mus musculus
cctgtgttctgtatttctttcctttttttttttttaaagattatttattattatatgtaagtacactgtagctgtctttagatacactggaggagggcatcagatctcattgtgagtgtttgtgagccaccatgtggttgctgggatttgaactcaggaccttcggaagagcagtcagtgctctgacccactgaaccatctctccagctcctctcctgtatttctttaagggagttatttatgtccttttaaaagtcttgtatcatcatcataagatgtgattttagatcagtgtccattttctgttgtgtatctagggcttgctgtggtgggagaactgggttctgatgatgacaagtaacattggcatctgttgcttatattcattcctttgcctcttgccatttggttatctctggtgttagctggtcttgctgtctcttactgtggcttttccctcctccaagcctgtgtatcagtaattctgggagaccagttctctcctggaggaatttgggtatggagagctgtggtacagggttagctccagggtgtagacagtaaccagaaggatactgtcccctgctgatccttggttcctgtatcctgatggctctgagagggtccctcttgggccaggaatttgaatagaagtggtggtcatacctgtgctcattggggtgttggcattccggggagactggtcctctcctagcagtatttgcatatgtagtgctatggcacaagatcagctctgggcatagagggaaaccagaaggctcctgtttcatgctgctcctcagttgctgtgtcctgagggttcctggtgggtctctcttagtagcagtggtagtcttatctgcagtcacaggcttctctgcactcccaggatgctagctctctcccagcagtatttgggtattgagtgctgtggcacaggatcagctacagatgctgtggtacaagatcagctctgggcagagggaaacccttattatttttgcaccaatattcttaagagaaattggtctgaagttctctttctttgttgggtctttgtgtggtttaggtatcaatgtaactgtgactttatagaagg

SEQ ID NO: 21277 - DNA, 1177 bp, Mus musculus
aatcccagcactcaggaggcagaggcaggcggatttctgagttcgaggccagcctggtctacaaagttgagttccaggatagccagagccatacagagaaaccctgtctcgaaaaacaaaaagaaaaacaaaaaagaaagaaagaaaaaagaaaaaataagcctaccatatacagcaagccaatagccaacatcaaattaaatgggaagaagtttaacccaattccatcaatgtcaagaagaaggtaaggctgtcactctctccatatctcttcagtatagtacttcaagttctagctaaagcaataagacactaaatgaaatcaagggggtttaaatgggaacagaagatgtcaaggtatcactatttgcaggtgatatgatagtatacataagtgaccacaaaacctttaccaaagaactcctactgctgataaacaccttcagcaaagtggttggatgcaaaattaactacaaaagatcagtaaccctcctttgtacaaatgataaacaggctgcgaaagatatcagggagacaacaccctttataatagccacaaataatataaaatatatggatgtaactctatccaaagaagtgaaagatctgtatgacaagaacttcaagtctctgaagaaataaatgttagaagatgtcagaagatgaaaagatctgccatgctcatgtattggtagaattagcctactgaaaatggccatcttaccaaaagcaatatacaaattaaattcaattcccatcaaaattccaaaacaattatttacaaaccttcaaggacaattttcaactttatatgggaaaaaaaaaatcccaggatagctaaacaatcctgtacaacaaaagactgtctgttttggtttttgttgttgttttgtttttctttttcttcttttttttattttttattttttttttattttgagacaggatttctctgtatagccctggctgtcctggaactcactctgtagaccaggctggcctctaactcagaaaactgcctgcctctgcctcctgagtgctgggattaaaggcatgcgccaccacgcccagccccaaaagaacttctggagttatcaccttacaaatatcttagaaaaatgtttaatgaatagagagaatcttaccttgttggggattacaaattgctccggaaaag

SEQ ID NO: 21278 - DNA, 1179 bp, Mus musculus
cttgtattttacagttagctggaacatggattatggacttccatttggcttctggcaacagcttgaaccatggatatcaacatggcctctggtggcagtacagaccccagacatcagcatgggcctctgttctagtatggaccattgacactttcatggcccttggtggtagcacaagcctcagataccaacgtgtcctctgggccgtaggccataaaccattatgtccttggtagcaatccagtccattaacatcaccagggtttcaaacaggagcacagaccaccagcatccacatggccttcagtggtaagacaggtgataggcatcaacatgttcttctgtgtgatatggacttctatatggtgaaaccttggaccacagacatccacatggcttctgttggcagcatggacaacagacctcaacatgctctccaacagcagcttagaccatagatattaatatggctcttggccaaagcatgggccacaggcaccttcatggacctcagatgcagcataggtcatggatcaatatggtcaaccaacagcttaagtttccctacctatctattcctgagactgggatctctccttatttccctgggatctctccatttttccctagtttgaagactcccccaaataccaggaccatgaacctaaaagtttcaaatttatatccatataactttgatttttgaactgaatcataaggtttctgaatcactctacttatttttttctgacttataacctgcctttcctgatttctttgtatcagtatagaatgacaaattgctgccccttttacactgtagaggagaatttagttcttttcataacgtgtaattgcttgttttggggggtatttgttgttaatttctccctccaaaattacttcaagttttttttgccaatattcattttctgcttataatgagacaattaaagcattagtaaagcccttccggtaagcaccagctccgggtttccttgggtgcaagttggtagacacccccacggtccccaggggatcagtggaacacaacatctgttccaaactaatggtgatgggcctgtgacagcaggagcaaggacacaggaaccctgagtgaccagaggctcgggttccttctgatcagtactgatttaccttggtttataacagactaga

SEQ ID NO: 21279 - DNA, 1120 bp, Mus musculus
tgtgtgttgcactgaatatattcttgtattatttttcatagatgggatgatcacatttgccctaattaggatgtttttgaaattaaaaagtgtatcttaataatactaaggcagtaggtgcatatctagattcccaacacaccagaatatgtgcctgctctgcttagaaaagatttttctggtgtgtattctggtatataacagctgttagctgatacagactagattttttttttttttttttttttttttttttttttttggtttttcgagacagggtttctctgtatagccctggctgtcctggaactcactttgtagaccatgctggccttgaactcagaaatccacctgtctctccctcccacgtgctgggattaaaggtatgtgccaccactgcccggcaataatatattaatctatcctctctagttgtttttagctgatacctgttctagttaattggtacatgtgctggaaaattactgtagattttaaatgttacccatgctaaaagtttatcttttaagtgtatcttatttgtgtgtgtgtgtgttttgtctgaatgtatgtatttatgtacaacacatgctagcctgatgccttcagaggtcagaaggcttctggaactggagttatgaatcaaacccaggtccactggaaaagtagccagtcttgttcatttaactcagagccatctctccagctactctaagttaaattagctctgaaggggatgtctaggaaatcaatgacaagcatacttaatttcagagaatttaaaatgtaattgagccttttgtatttgtaggtaggtagattttttttaactcctttttttctcatttttaaaagaattttcatgactacatcatatattcttccttgccccatcagacttttaattggaaattaaacagtcgctagttccttgacaggaactcctagtgctttgtcccaatgtaacagttactatgttttacaaagacatttttcagattttgttacaagagtctaacagttacctttgagagagagagagagagagggtagaatttgtaacccttattttccagaaaagaaaggtgattatcagatttccaaactcatttgcttcatt

SEQ ID NO: 21280 - DNA, 1139 bp, Mus musculus
atgggtctttggcattaaaaaccaagagtcctctctggctgatgggttttcagtgccaccatatcaagcagatttttcaatgctcccttttactgccctctaggggcaaggcccgtgcttccagaaccagatcccactttgtaaggaaaaggaagggggtccatctgtctctggagaattgctaagtttgccgaatgagttgatggcagggagttgaaatcaagccgctgtcttttgtctccatgcccagacaaactgcggcttgagtaccacatggtgtgtcccccatatgggtctgtcccacatgcactggctggatgcagctttcttgcttgattttttttttttttccttttgaagagtgaatggctttggaagcttaagcatgcgaaatagaagcttggaaggagaagctgagaaacattatgagtggagtggccggggccatttctgctggttcatctgccccatgcttgccttgcactgcaggtgtttgcattgaaatccttgtgatgttctgagtgtgttgtttggtttctgtggggtgattgcctttccattaagaatggctcagacacggccttccacaagctcagcccttactccttctgtctgcttgcccacccgctcactcactctttccatgattccatagcatgtgaggggctcggtgaaaccaccacttttcatctcctagagcatgtgcacttgtctgtgaactaggagggctcaggaagagttgtctgacccccgaggttttcagtgtgattaaggagacagacactttctgaacgcccatgaaaaaggccgtaagggaaatagccagtgctaacgagtctcctcctccttccttcagcctcaagtccctggtagatggatacaagcagtggtcatccagtgcccccaacctggggaagggcccaaggagtagccccgccctacctgggttcaccagccttatggagataggtaagtagagcattggttttctcctggtttccttagagaattcttggctagacttccagtgttgtttaaggattccagtactacttactatccatagggtttgtctcatctttgtcctctactctgtcgtctccattttaccaggttttctaaaccccagtttccatgta

SEQ ID NO: 21281 - DNA, 1101 bp, Mus musculus
tcagttggcctcttgctcctgctcttgggaaacagatggcaactgcttctttgcaagggtggttttatagcctgggccatcaactctttgcttcctgtaactaaggccagcttctccttgggtgtgtgtgggcagtctgcaataggagataagtttgagtacgtccatactggtgtggttagtagatggtcccagctcccagcttcacagacttcactctgtgtttactctgtgaaaaagcaggacctctgttgggtgcagtggtgcatgcgagtttgagaccagcctggtctatatagtaggttctagaatagacagaactgtgtagagacactattgcaaagacaacaaaaaagaaaaaaacaggacctcttggttttgtagaaaacaagacagaagccaaacaaaggaggttgtcagtgacagttgatgacagttgctctctttctcccattttcctgcacagtgaccctggaggagggattgagatgtcagaattcattcgggaggccacacctccggttggctgcagttcaagaaattcttatgctggtctagacccaagcaatcaggtaggagtgtactactatgctgtgccttagtgcctctttctggtgctagtgctagccagaaagcatacttagagccatccataatggctctctctctctgacgacatttttgattaatgtataccatctatattcgttattctttttaagttaatttttaatttgatttgtatgaatatttgtgtgccatgtatgtatcacctgtagagatgagaagagggcatcagatcccctgaaactggagttacagatggttgtgtgccaccatgtggtgctgggaatcaaacccaggtcctttgtgtaagtattacagctctgaagggaaagacttcccctatagaagtgttatagctctgctctgagaggtatcctggtagaaagaataccacgaagccacactatataacaaacctcacacaagatatttattgcgggagttgggaaagacccagtttggtggctgccactgcttgggcaagaagcagcagagaactgaacagaaggcagggtttatatagggtttgttggg

SEQ ID NO: 21282 - DNA, 1198 bp, Mus musculus
ccgcctgagcagagtgcagagagcaaagaggagcagagcgagaagcccagcctggccaccgactccagagtttgtaaagacgatggtgggaagcagaaggaaggagatgtccggcccaaatcctccagcttaatccaccggacaacttctgcccacaagccaggcaggaggcgcacaggaaagaaacgggccagcagttttgattctagtcgccatagggactatgtttcctttcgaggagtctctggaaccaagccgcacagtgctgtatttggtcatgacgaggattctagtgatcaaagcgacttgagcagagctcccagtattcattcggctcaccagttcagcagcgacagctcttccagtgccacgtctcattcctgccagtctcccgagggcaaatacggtgccctcaagaccaaacatggccatagggaccggggcacagactcagaccacacgcacagagctcatccaggccctgagggaaccaccaaaaagagggcctctcggaggacttccagcacaagtagtgccaagacgcgggctcgggtgctgagcttggatagtggcactgtggcctgtttgaatgactcaaacaggctgctggcaccggacagtatgaagcccttaaccacttcaaagtcagatcttgaggccaaagagggagaggtgctggatgagctgtctttactgggccgggcttcccagctagagacggtcacacgctccaggaatagtttgccaagccaggttgcatttcctgaaggggaagagcaggatgcagccactggaggtgagtaagctactgcagcactgtgggttgaccctgttgctcggaaagtacagttcctctgtgttaggaaagcacacgtctctcggtgaacacggtggtctccaatggccctgctgtcttatgggacacatcagcttattcttgaccgcctcccctttctaagccagttatgctagtaataacccagtcatttctcatcctttatacagtagcaacagtattacaactgtattagggtgacaaagcactcacagacgtgacttccacagtgtgcggctgagctcccggagatggatgctcaccagtcatgtgagattcttccagatgctacggtagcaccagtggtatatttggataaccgactctttttctatttctgtgcttttctctcagttcaagttt

SEQ ID NO: 21283 - DNA, 1199 bp, Mus musculus
tttccatatgaatccctaccttggaccatatcacaaaaactaaatcacagtcataagcattaatatggaacgtaagatagcaaattatgtgacacaaaagatttgtcctaaggttatagaaaacttacaagatttggcacaaaaaaccaggatgaataaaaagctgattgataattggattcatcaacataggaaatgttgctcttaacactgagctatctctccagccccgagattctgcttttcaacctttttcctatgtcaactttatttgccatccgaattggccacttattttacagcatatcttagagaagatggtatgagatcataagacagttatgttagagaacactccatttctgcagtatcatgggacagctatgtagagggcactccactgtcacagtggcataggacagctatatcatgtccacagttggtaggggttgtttcctgtataatctgaaatgttattcagaccagacatcctaaatacaacctagcaggccttaaacagatgccttcttttttcagtctgatgaatttcttgtactcacgataggcctgcttgttaattttccatccacagaaaccgtgagatcctggagaatatattagctgttgtcctggctattcttgtggcttttttggggtccatccttctcatccaaggcttcttcagagacatctgggtgttccagttctgcctggtgatcgccagctgccagtactcgctactcaaggtgccagcgccttccctgctgtgtctaaggccattcaccaactggccacaggatgagaacttaggtttattttccatggaggcttacattggattgtgtagagtccaaagaagggtgtaaactttaaaaagtaattgtatgtacattgaatttactaaaaactaattctttaaatgaaaagagacttgttaaaataagaatttgtgccgggcgtggtagcgcacacctttaatcccagcagaggcaagcgaatttctgagttcggggctagcctggtctatagagtgagttccaggacagccagggctacacagagaaaccctgtctcagaaaaaaataaaataaaataagaatttgtggaactggagagatggctcagcgactaagagcactgactgctcttcctgagttcaattcccagcaaccacatggtggctcacaaccatctgtaat

SEQ ID NO: 21284 - DNA, 1201 bp, Mus musculus
aaaatttgaaaggaactaagggaatgtgttttgtgctttctagaacacagctgtgaagcaggtggatgtggtatgggttgtcttctaattttgttgtttaaaaagttctgagagttgatttacacaagtgtgaagagggaagtaaaatgaataccagctattcagtgagctctgcttagcctgcggaatgacagcaccaagcacgagggattcttcctaatacgaaagaaagtctcataccaaaagagggcagagagaagaaagctgaagacaaaaggaatttagtgcctgatccaggtctccagagaaagagaactttaatgtgagatgtgcacttgagaggcagaggcagggttgggagttcaaactcagctacagctacatagcaaatttgaggtcagcctgagctacatgagaccctctctcaatgaaaaaaaaaaaggagtctaaattcatttggaataaagttcagttacgaatatagctaaaacattttacactttaagtttgccgtccctaaaatattgatgtaagaggattgattcgctgttgggtatttaaggttacacgcgcccttttctctggatttcttcctcaggattcctgggatggccagcacgttcctgtgcttttctctgtcttctgtggtttgttggtggcagtgtcctatcacctcagccgacagagcagtgacccgtctgtgctcttgtaagtgaatccactcctgctgtgggacatttaagttggcatttctcatagtccaggcagctccttccctagttcctgtcaagtgttttgtcctgctctgtctgtgttgaaaatacattaactttgagtcatgctgattttgttagctgaaatgtatgttgttaaagattccatttttacttttttattgtgtgtctgcttggtgtgtgtgtgtgtgtgtgaatttcaagcttcatatgtattttctgctaaaatacctttatttttttcaaataaagctctttgatgcaatccaagatttttcccaaagctgacgagaagaacccagaagaccctctgtctgaggtgaaagaccctctcccagagaagctcagcaactctgttgtaagtgtggctctgtgagccatggccgcggcgggtggtggtgttatacgacaagtacttttcaaagtctttagtaattggacaaaataagtgttattaaatatagttg

SEQ ID NO: 21285 - DNA, 1195 bp, Mus musculus
gtagttttagttccatgttagggagtgttggtacatgtttctcatgtattaaatgctgctagtattaaattgaaaagctagagaaccaggttttagaactataacttttatttttttttaaacatgcttatttatgtagaagataaaattcatagtgtgtactaataaagaatgttgtattcatgcctttcagggtttcataaacttatcatagagatcactgttattgtgtatctatttcctgagacaaaggagttgccactgtgatctcctgagtactgggattacagttgtgtacacacacacacacacacacacacacacacacacacacacaccccacttctgtacatcagttccagacgtctgtctggtctctatcaaaagcctatggagcatgtgctggcctctggctggtggatgctgggtgtttgcagcacaggctgatgggctgtgcctgtctctgctacaggttgggtgctttgatgattaccatcgctggcctgaagctgctacgctcttccttcagcagccccacgtaccagtacatcaccgtcatcttcactgtgctctttttcaagtttgactatgaagccttctcagagacgatgctgctggacctcttcttcatgtccatcctgttcagcaaggtaatctatcacggcacatctgcctctgcagaaagaaactcgccacttgctgacgtggttggcaaggtttctgctggtgttacatttgactgttggcttctaagtaatagtcttcctctctcagcagttattttggagcatattaaacccataagagccacaatcaaaaaagacttacatgtgggtggactgtgtccactggcagcaatgaggttcagacagatgtcgagtacaaagagaaattgctgttcagtattagatttctctcctggttccttgtgacattacatttggaacatatttactccaaagggttgaagttcaagggaaatgtatcctgggataaaatacatgcatgtattagagacaggtagagtttctgttgcctctactcctcggtttgctggcagtagcagtaatgctgtgattggccagaagagggcacagaactcttaagaacaccaatccataagtccatgtctacattgaaaacaatcttcgtatcaaattgatgccagtgttttggcagttgataaatcttgtct

SEQ ID NO: 21286 - DNA, 1178 bp, Mus musculus
ttcccaggcctaagtctcgggctgtctggcaccatagggctgtgtgctgtgggcttgtgctgaggcagaacctcaggacccagagctgcttgatcctgacaggtgccgggcactcttcgtgggcgtgtgcccgagccatccttcctgctgtctttacctcccagtagtgtccccagctggacatgagtctttgggggatgttgcacttccaaaccctagcacggttttctttttatatacaatttgtaggtgtatggtgtgtattttttcctgtgaaataaatgtaaacacggccataaggagcttaggtttaggctgttcattaggttgtgttgtctcaccctgtagcctaggctagctccagatttgtgtcagtctccctgcctttgctcttgagtgctgggtttgcagcctacattgatacattgatattttagtgattttattcctcgatacaacaggtgaaagttgaagtgaaataaacgtttctttacctctgttcttacagggtcggatgacaacaatttgaattctatcttctatgaacacttaaccagatctctgcagcacagtctctgtggcgacctgctcctaggacggtggggaaactatagtactggggactgcttcatccttgcctccgactatctcaacgccttagtacacctcatagagataggcaatggcctggtcactttccagctgcggggacttgaattcagaggtaagccgctcagtcacctttaagttgtgtaggtacctgtggtagcaaagttgtgtctatttaaatcccaaatgaaagctgtcagagttggtagctggcgtacagcttagctggtaagagcatttgctgctcctccagtggacctgagtcctgctcccagaacccagaccgggtgactcacaactccacttccagggaatctgacccctcttctggcctccaagggtacctgcatgcatgtggtgcgcacgcacgcacgcacgcacacacacacacacacacacacacacacacacaataaataaatcttgaaaaaattacaaaattagatctttgaggttgttgcccctcccaccatcccttcacaattttatgtgctgacaagccaattcattctacacagaaaattatacattcaggaaaataccaatttaagttatcaaatcctgcacaa

SEQ ID NO: 21287 - DNA, 1170 bp, Mus musculus
caacacttgtgtgtttgtgtggcacaccccacatgtttctccacgtatgtgtgtgtatgcctacatgtatacatgtggcacacgtgtgtctccctttatgttttttatttctatcatttgacctatgaacaccaaaagttttaataacgttttgggagaatttttcaaaataaatgtaatataataatttttcacctctttaaaaataagctgattcaaaagcactgaaattaataatacactgcaagttgccttgctgaactcatggtggggtcttaaagaagtacatggcgtttttatttaggagggcttcagatagctttcttaaaatgtaggcgtaggacacggagttaaaatacaatattgtgaactatactgtctgtaagaacaatgattgttcatgtaacattaggaataaatttatttttgttttaatataatgttaaattagaataaatttgcattgtgatttgacttgaattctctgtgtttcttaattagggtatcatttactatgtcacaacctcctccaagttggaggagtggctggcgaatgagacaatgcaggaaggattgcgtctgtgtgcagaccggaactacgttgacgtggacccaacttttaacccaaacattgatgaggactatgaccaccggctggcaggcatatctcgggagagcttctgtgtgatttacctcagctggatagagtactgctcttcccggagagcaaaggtagagtgcaaccatatcctttgcagttctctgaatccaggttttaacaaaaagggcgaaatagcctgttagttaccgtgagctggcttctgcccttgctcacagatcctctgaaagagaatggttcacctcacagcagcacacgcaagctgtggttccatacagtgctctctgagatctggtccataagcactgaccaccgacctaactgtgtgtgtcccaaatgcaggcctagaccattgccatctctgagaacttccacccatgacacatgtatcctctgcggtccagtgtcagactggctttaatatttgaaattgtccttcattttgcttagctgtaatcattgtaaacagcttgttcaactgtgactactgttggacagtgcacatctgggacattccatgggaatttagataaaatggtgcactttggaaa

SEQ ID NO: 21288 - DNA, 1163 bp, Mus musculus
tctaaaagaaattcctattttaactgtcttttgattacatgttttacattagactctctttaatttcctttgaatcttaggctccctgcctgctgtctgtctgtatgagctatttattaccatggttcataagcaagcttcctagtcaaacaggacctgtctcctgagttcagactttagttcctggattcttctttcaacacactcttagagcagttgttgaaacttccctgacgctgctgccctttaatacagctcctcaggttgcggtgactcccacctccggccataaaattatttcgttgctgctttatagctaacttatagctaattttactgctgtcatgaatcgtatctgatatgcaggatatctgacatgtgaccccaaaggggtctcaacccacagattgagctctgctgctctggatgactgatgcagagcagacatgaggctgagtgtcatgaagactcctgtcagaatatgtgcactttatctccaaccttgcagtaacctggagtccttcctctatggattgcatgccctgtttaaaggggacttccggatttcttcagtccgagacgagtggatcttcgctgacatggagctgctgaggaaagtcgtggtgcctggaatccgtatgtccattaaactccaccaggtcagagacgggctagctctgctgtttaatttgttttgggagtttgctgatactttgccattgatttctatgttatattttggagacctttggaaaggctctcatctgaaccagggaagagccctagcaaagcattaaatcccagaaccttgaacctgttcctcatagtaacagtagtagtgaattctaatattaatatctgttaatattcatgatctagatgtcagcagcaaactgaaaaggaaggtctctaccctgaaatgcttgtttgacagcatgtgattgcagttctggtcccttacccagtgtcttagtcagggtttctgttcctgaacaaacatcatgaccaagaagcaagttggggaggaaagggtttatttggctttcacttccatactgctgttcatcaccaaaggaagtcaggactggaactcaagaaggtcaggaagcaggggctgatgcagaggccatggagggatgttacttactggcttgcttcccctg

SEQ ID NO: 21289 - DNA, 1422 bp, Mus musculus
ccattgagggctgtgtggattttctttacatttcatagtaagcaggggagagtttacaatgcagagtcctatgagagaaactttgtttcgtttatttagcctgatacttttcactaaggaggggaaatgagctggcagtgatcctcatgtgtctgtttagattgtggatctcagtcagattctggaaggaatcaacgtgtcaaagaggaaggagctgcactggcctgatgaaggaattcggttaaaagctgggaggaacagctggaaagactggagtccacaggagggcatggaaggccatgtgagttctccaggaagctgctgtgcactttaggtcgtcagacccatgcatgttttagctgctctgtgtctttctgcttgagtggttagcagagctgcactgggggtcgagagggcggtgcattcaaggtctgactgtgtgtgttcttctgcgttactaggtggttcaccgatgggtgccttgcagcagagacccaagtacaaggtcccacatcgacaagacagtgcttctcgttcagatcgatgataaatacgtgactataattgaaaccggggtactagaactgggggccgaagtgtgagcctgcgctgcatacctgggttcctttctctggcttcccagccctcggagagaaagcaaggttgcagaagagccacctgtggggaccgaccgcctgcccttcgcagcaaagacttgaccagtggcttggttaagctcctctccaccctgactcctgtcactgtcttcatccccaaataaagctgaaatatttttttaagttagctgcatgaaaggcaaactctgttggagcctctcgatggaaggcgctctatgcatttatgctttaacccatggactcttgtctctaactctaaactcatatttttctaatttctttgccaaaaacagttgccatggtttttgttgtagaagatgaaatccattgaccatgatttttgcaaacagacctatgtggaagcatttggttcgacatataacagtataaagatttaatgtacagtgagaaagatgatgactagacataggtttatcttattccttgaacactaaaaactttaatgaaaaaaactgcactaattttttacagtgatgcactaaatctgagatttctcagaacatttatttatatataaaaataaaataccattatttaaattgccttcaggactagcccctccctttcctgacacacaggcagcagaacccgctgctcctatccgtcagtgcgctggactccgggacacagcttcacccctcccctttcccagggctggtgaccagcaggtatgcctggcgaaggccagcaccagctgccctgtcacggctcccgtgtgccacgcttctccggccggtggcaggtcctgtcgaggttgcttctg

SEQ ID NO: 21290 - DNA, 1242 bp, Mus musculus
aaactccaaagaaagtagcccccaccccccctctgagcacctggggcagccgtctttctcccctggacagacagtagaaaacagtaggtcattttgatgtcccttactcttgtcaaagctgtgaccattccagtgtgtggcactggccagcttagtagcttctgtgttaggccaccctggtatggtatcttctgagatgagaggagaaagctgctgaggatatgggtatcagggtgtgtccagacactacaggaaacagctaacagcaggcgagaggatctctctccacatggcttcaaaccctgtttgtgtttccttttgttattttaaagtcggtgttcagaacccaatgtgccttgtattgacgtttccatagacttcaaactttgcagactttatcctttaaaaatatttgtcaaaagacttactgaatctttacaatagagccctttctctttgtaaactgaaaactgtaaagggtatttccccactcttactctattccctcccgtctcttacttgggcagttctgctctgtctgtatttaaagcttccttcccaaaggacttgagctccctgctgcttgcttgttccctgctctcggtgagtctgcctttgtcacgttggttcctaggtgacaaaagatggaagaccatccatttgccagaggaagaatcagaagataatctttggatgacttacttggtcaaagggtcggcgttctatctatgcttgctctccctgatagttgttagatgctatatgctctaaaagtgaaattccatatgtaaggcgggttctggatggaacatgtatatcaagtcttaatttgggagagttggacactttccttaaaacaagttattgtttgttaccatataattttattaaatttgtaagttaggaagcctaagagaagtcttgtttttagttttttaatctaaaaccaatgaccttaagaaaaaaaagtactacttttctaactacagcaggaaagataaagatttgtgttttaaaattaaatttattataatttgtttttcttcaagtaccctagtgatttaggttttctgcttagcctttttcattaaaatgcagaactctggcatcttttagtccttttagtccataattactaaaacttcagagatccatagttttgcaagtagttaaaaacaactttgtatctccttagatgcagctgcataattgaagtctctgttcttcttctttgaatttctc

SEQ ID NO: 21291 - DNA, 1909 bp, Mus musculus
agcctcatatttgagcaagagtcacactgcctctttacactctacatagtttcctaccagcatcctcttgcctcagcctagaacctaccctatgagggtgtcctgcatcagtcatcaaattctgggtctctagtgtttgcccagtgtctaaaatcatctcttttttaggtaaatttaagtcatcctttgttctgaatatatgacttgaaaaaaatagtaatctgaagttgtgtttcctagctactgaggtataaactgttgtctggtatattcattgctttcatatttaaagtgttttttcattagtataagcaaatttatttctgtatttttgcctttaagtccttagtattctttctcatctctctttggtagctacataaagttactttgagcacgggcccactgaacttttccacgggagatgatccatctctcctagaggcgttttcttaactgcaaggtgaacggagactatcagttaaagctttaagtggcgcatgcctgttgctggcccacccttgaactttgtgtttcaggtttagatggctgctgagatttactgagggggcaaaggagatatagtagatactgcagtgtatttaggtgataagaattttatacataggcatttttttaaagtatttgaagaccaccagccgttttcttggtttctcttttcaaattaatctagttgatgaacacccaggcagcctcatttggaagttgtcacctgttcacaagctctgatcagaaaggaattgcttatcaaacaggtctggaaagatctaaccttgcttgaaggcagaggtctctcttctgtggtgcatcacctcccagagtcatctgtccagagctgtatggtgagaatttctctggtctttctgaattggggcagaagttcatctgtaagctgagcatcccggcgtgccattttgtagactcggcatcgaggtgtccggggcctgaagcagatggtcacacagggttccactcagctgtacgtcactcttatacctattatataggcttggccttttctcagccttcagctttgtacgtgacccgttgtggttcgtgggaaccaacgggagggagggcggctctaacagatgttgagggtgaatctgtcacctgcactgtagaggatgtggctgctccaggtgactcttgggttaggtgtgcttgttactgaacaaaatccttttcatcctaagcttgagtctgcaaccaaaacgataggaatgggacggctctatttggctgtgctttcttaaaactgtagtttgagtaaattatcgacatggatgatgctagcctgtacaagcctggcatcacgttctgcctgaggaaaaggaaaaaggaatgttagaaatggttgtgggcgagcgtgcctgtggaaggagcatggctttcccttttcttctcgtgggctctgaaagggcattgcctctaccagcattcagtctacaccagagatgaggatatgtgtccatgcgcgttgtctgtgagtgtgcgtgcgagtgttaatgcaaacagcttgtaaatactatagttgtttaaaatggaaaataaaagctgagaagtcttttgacatatattgatcagaaaaaaatacagtattgaccgtggataaaaacaggaaataaattttttttcattttgccttctgtcatttttttttttgatcaaaaatttttaagaggattcgatatctcctgtgtggccttggttctgagctaatcattctatacctgtaatcatgggcttggcttacaccagataaaagtgcactctggcagtaactcttgcacaaaggtatttctgccctctgcgttaaattgcatgttaatggtagaactgtcagatgataaatgtatataagtgctcagttacactaagttacaat

SEQ ID NO: 21292 - DNA, 1149 bp, Mus musculus
gtctggctgccaatcttgatttggttttccagtgacgccttcatttcagtaggatttttttttctgaactgactgactgcggcttttggaaactgcgctgtctttgggtgctctctaaaatatgagtgtcagttgaaggcagctctctttaggtttagtttggtttggctttttcttgcaccctcttgcttattaggcatcatgctaagctctgggaagatagtatttttccaagcaatcatcatagaatatgtggattagtgaatgtcatgaaaaaaataggaccacctccatatgaaagtatttacacataacggggcagtaaacacacatgagaacctgaggatgatgacattttatcatgctaggggcctcacatatgctgggcatgctctctctgagccggatctccattaaaaaccaaatgagccagaagcaaggtgagcaagagccttgtagactgcgttcccagtgggttgtatatgaaagattatgacggtaagcattgggttggtgctctcagtgggtcagtgggtcagtgcctcaaaatttggaagatttgctggattgtctgcgggcttttggatcccgtcagtaatttgagatttgatactagatttaaagaggcatggctttaggtaagtacataaacaaactgacaggaagatagtgacaaccttctaccaaggttttccaaggcatgatgggattggttacctgcctcacacccgccccctgttgccttaccgggtgggtgcatttcagagcccttccttgaccgcagtttaggctgtctggtgtcttgcactattgtcttacttgtgcccttgagtgtgggcagaacgtgatgtagaggaggggacagagcctctgaacttgtgtggagacctgggttctattcttaccctgaggaaaagaaaggactgtctgtgctctgggggaaattctctggtggtccatgtctgtcggcacattcttgtttaaacttgtctgatagtgaggagccaacagagcctacataggtctgcaacagggacaacaaggtctttgtttggaccctttgagaaatacaggccactgtattcagggctgaagtgcaaagagatggtatgctggcttagattttcctgcttgcagcctaatggcttg

SEQ ID NO: 21293 - DNA, 1593 bp, Mus musculus
acagggccagcggagagcatggactccagattcctcatgcctgaagcctaccccagttcccccaggaaagcccttcgcagaattcggcagcgcagcaacagtgatatcaccataagtgagcttgatgtggatagcttcgatgaatgtatctccccaacctacaagtcggggccatcattgcacagggaatatggcagcacatcttcaatcgacaagcagggaacatccggagacagcttcttcgatttgttaaagggctataaagatgacagatctgaccgaggtccaactccaaccaaactcagtgacttcctcatcactggtgggggcaagggttctggtttctccttggatgtgatcgatggccccatctcacagagagagaacctcaggcttttcaaggaaagggaaaaaccactcaagcgacgctctaagtctgagactggagactcgtccatttttcgtaaattgcgcaatgccaaaggtgaagaactcgggaaatcatcagaccttgaagacaacagatcagaagattctgtgaggccctggacatgtccaaagtgctttgcccactatgatgtccagagcatattgtttgacttgaatgaagccattatgaacagacataatgtgattaagaggagaaacaccacaacaggagcttcggcggctgcggtggcatccttggtctccggacctctgtctcactcagccagcttcagctctcccatgggcagcacagaggacctcaactccaaaggaagccttggcatggaccagggagatgacaagagcaatgaactcgtcatgagctgtccgtattttcggaatgagattgggggagaaggtgagaggaagatcagcctgtccaagtcgaattctggctcatttagtgggtgtgagagcacatcctttgagtctgccctcagctctcactgcaccaacgcgggcgtggcagttctcgaagtgcccaaggaaagcttgatgctgcatctggacagggtgaaaaggtacaccgtggaacacgtggatcttggcgcatactattacaggaagttcttctaccagaagggtgagtaggtgcttagttttaatttttttttttttattttgctctactcatgggaaaaaaacaacagtgtgtagtatactgagtgttttagcggtgacctgagatgcctgtgaatctctgtctttcatgatgaaagagtttttctgtaggctttgttgtgattcatttctttgtattttggggatgttcttttccccttttaggtattgaaatcttttaaaattaaatattagtgtttcattttttaagttaaaacctatttgatttagcgagtgaaattaaactctgttttgttgacttgctatgtcatctttaggggcaactatgtaaagttgcaatctgatagataaaactttttaaaattacaacacaatttcaatgctgtcctctactttttagcacttttttttttgccttctgagtctttttattaaagttataatatatttctgtccctttcacaggatctctggtaaaaacacattgcattatttgatgaaaatctcagaacagtgagtctc

SEQ ID NO: 21294 - DNA, 1118 bp, Mus musculus
tctttctctcagtctctttgtggaaagagtatagcgcagtgaagaggagtttggcctagcaccaaggctgtgtgttgttgcctcagcccatttgagtcctcattccacttagctgtttaatgtgcccctgactccactgtgcctgtcataataataataataataataataataataataataaatctcttatatgataaatattattattacctttactgaagcacagccttcaatcaatattatgtgtaatatttaatcatgttcagctgattaagttgtaatcactttgatattacattatttttatgaacattattatcctgtagatataaactttagagaccacttgattccaacagaaaagctgggttttatggttaaatgctgggcaaagagaggaaccatcccttcaccttagataagcaacatccatgttctttcttctactgcttcctctgcctgctcttgtcgggctttttacccagcatgaagtggcactggcgatgtagttgatacttactgtgtttctactttatgctttatgggctctcctcacttgatgcttttaggaaactggcatgaacctgtcattgtgggcatgtacaaatgatagtactatacgttcttttttcctttgaaaatggttgaagttttgtgttcagtctttctttggttaccacaattaaaggacaaggagatttatagatggcaaatattaacctggagaaactaactccatggttgcctgtagccagcatggcttgtcaggaaggactctctcccagctgttccccatgtcatgcggtcctacagtgtgttccccgttgctcattgtccaagatgaactgccactgtaagccaactgatgagaaactactgtctaataaatctggttactctaagccagtggtcttactgttcctaccttctttttctaacaacacacagcgaggagacttgatggtgagtgaaggaaggcaggggccatgtgtcctagtttcatagattgagaatcccacgtatggtttagtccctagttgagcatttaaagtctgagacttgtctctgtttaggcaggagcaagcagcctggagagcttagaccttgcagagatg

SEQ ID NO: 21295 - DNA, 1146 bp, Mus musculus
ctcgggtatgtgaccacagtttgtctcattccttggaaattgttgataaggccaagagccctctgtccagcctcctacttcccaggccaccgtgaagcctgttcctctgagctcctctgcctggaaacagagggctgctcagtctcttctttccagtgcaggggcatcactgtaacctggaagaagtccctctcctcaaacactattgtatgtatacataaaacataaaaagccctatcacagggtacatatgaacggtagcctgtggaaacggtgggatatggagagagcacattgaacacataggctggtgcgctggagagcaggcagaacccagcaggcagaaccttctctgggctgtgctcccagcaagcctgtgtagctcagtgtttatactcagtgaaggatggtagggtttcttaaacatacatatttcttaccagtaatttctgggaagtgatcttgaacccgaagagaatatgatattttgcagtgtcagataaattttctaattttgttttatcttgttttacctaagaacactggaactattttggggctgatgagaacctcggtccagtggctgtgagcattcgaagggaaaaaccagaagacatgaaggaaaacggatctccatacaactaccgaataatattcaggactagtgaggtaagtggcaggtgaacagatgtgaggggtggagtagaagcagtcactagggactggagtcacggaggtcgtcacagagtccttggaacaaagaaggagcaaggcaggggagatagttgagttcataaagtgctggctaagacttgaggtcagtccccagcacctggggattgaaagctgtcatggtagcatgtgcttgaaatgaggcagagataggcagatccctggagcattctagctagacagccaagcccgcttggcaagctcctgggcaaccatgttattattattttttaaagtgtggataacatctgagggtctgagggcagatacctgagatgacctttgacctttgtacgtatgtgcatggtaatactcggaagagggatctgttctttgagtggggatgcctaggaaaggtgttgcctatggctggcatttggcctagctcgcagtaagagtgcaatgaaggagtgg

SEQ ID NO: 21296 - DNA, 1102 bp, Mus musculus
atgaaaaccatcgccccctgagcgcggcctccaacagtgaccagctggaggagcaggccctggtccagatgaagtcctacagcaggttggtcacccggtgctgaggtcatgaatgtacaccatgtgtctcctcagtagtgccagacgtgatgaagaggagatggaaggccattgatgagctggaagctcaacagccatgccagacacttgattttagatagaataccttacaactaactactggaaatacaattaaactggtcttgatggcttaaggatacaattatgaatactctttattatttaatgtcataagtcacctttgcttttcttactttacctgtgtagtaaagtaagaaaaagccttggtcacaaatactcagactggagttagccttccagtctggttttcggcttttctcagttgccactgtggctgtgttgtgactgtactcatgtgtgctcggcttccagcattctgtctcggcttgcctgtgtcagaaaacaggatgcaaggctggctgagagtgtttgtaagatggagcaaacagtaataaccgaagctcagagagcctctcaatgatgaccctcgactgagacttacactgcgcaggggctgaggttcctgcttcccctgcgttcctgtggttgaggtgtgggctgaacatgaagtgttccttagcatgccagcagccagctgtggagcacaccatgacacttgtgcgcagatagtcaactggaaactcctgccctaagtcctgaggatggttaggaaccaaggtatctaagccaagtgtggtagtgcatgcctgtagttccaccctctggagactgaggcagcagggtcaggagttaaagaccagccaggctacattttgagaccctgtctcaataaaatgggtgcatttcacacctacatttatattcagatacctataagatgttgtggctggcaggtaataacagggatggtgagcctggctaccagcgtgctgctgcttaggacttctgaacaagtctgaaaggctgtgagcttagctccttgttaattgtaacagagctgtcgcagatcctcttgccactgggacaactaggttaagct

SEQ ID NO: 21297 - DNA, 1148 bp, Mus musculus
ggccagaagcttgccaagttttccaggagtgggaactcccaggattccagggatggctaatgatgagtctggaggtctctgcaaaggggaggcccctgagagccagctccacttcagacccattgctctgaattttgtgcattatctagacattgttgaccttggtctgtgtgcccaccggccttacaactgtttattcacccagcctcagatggaaaatattatagaaaacacacatctgtattgaacaggcccaggccttgttatccttctctaaacagtatagtgatacagttgatgttgctttatattgtattaggtcatctagaggtgatacaatgtctatgggctgttatgctcagatcatatgcaaattctatgccactttacctaagggaccaaacatcttgagattttgctcttggcggggttccagatacacttacttcttggtggacactgaaggagagcagtgtttcgtttcagacccaagcttgttcaccgtggtttagagatcaacctgctatctgcttttgtggtgctacctgtgtgcgccagcctgtacttcagtgacatcgaatgcttgtcctgctgcaaaacagaacttattgactctgccaagagctcagccctcagataggttttaaatattcttaaccctgggaagctggcccaagaaatggcttatttgttgccccataccactcagtatgtaacccctgacttcctgctggctggagacactcagagtgccaatcaataagcactcctactcctgtgtttttgagcaatgagaaaatgcatgaaggggaacccctgaaagaggaattaaatattatcattctgtggcttaacactgcccacgctgtgctttaaccaccatctttttattgcagtgaggggattgtaaaagcagtgttattgagacataattcactagaatacaactcacccgtgcaaagggtgcaattcaacatttttggtgtactataataatgtctttgatatattataatcattagacattttcttatactaggcagagacgtttattaacctttcctcggaccttattccagggcttcttcagcttcatttgttacaaagaaatgaattgtgtgtaaacgacaatttcaaagagctgcagt

SEQ ID NO: 21298 - DNA, 1171 bp, Mus musculus
ttttccctgtacaatcacaggcttcttcttgtattaatatttaaattaatcggaaaattctgctacagtgcccaccccagcaggttcctatggaagtaaatgaagccaggagcatttagccctgttggcatctcactgcccaacgacttatggggcatgcatcttaccactgaacagaaaaggagactgaagtcttggtctgagagttctgagcaacagaattccagcaggctgaggcaacctctggggagggcagcccactactgctgacatctttctgttgtaaatccaccattgccatgtgagagctccatctgcatgacctcatcaaatcctagtcacttcccaaaggccctgtctctgaaatacgtcaacatatggtttgggggtgattgttgcaaatatgaactctagaaaacacctaactccaagctggggtctgagccctgtttccagtaccgtcccagatctgtggttgctagcctggtatcatggagagatgtccctgggcctggaaggcagccctgttttccttcgtttctcttagcaggtacagaccagcctggcatgctctgtagtttccggatccctggggcctggtcctgtgcctggtccttgaacgtccaggcaaataactgcttcagtacaggtgagccatggccatctccctgggtgttgagtacagaactccacagacctgaagaccccatccagcagctcctcttccccagactgccagcatccctggtcccagggatccgtttcttgtctccatcaggtttgtctcggagggtcctcttgaccaatgtggtgacaggacaccggcagtcatacaggatcaacagtgatgtcttggcccagcagtttgcagtcaaggtgggttggcctgggaagggtttactagaatgctctgtacagtggaacatttgagtgaaactcggtttccctgctgtaactctgggctggtgcctcttacaaggaaaacaaagcatgggaaggatcagggagctaccttgtttgtttgtttgtttgtttgttgttattggttgatggttttggtttgttttggttttcttgaaaccactcactatgtagccatggccggcctggaactcattatgtaggccaggccatccttgaattgagaggtccttctttctgcctcatcgtc

SEQ ID NO: 21299 - DNA, 1197 bp, Mus musculus
tcagggttgagctcaggcctgagaagcagagcttcttctcaggaaaccactgtagatggatgttttttcctgtctgtgacaagaatagaatttagagcatagttctgggtcccagactggtgtacagttctttcttatggagaacactggcttcttaagagaaattaaccaaggcatgtacccctcaactggtgtggtgctttgtattggtgggggggaggggtgtgaggaggtcatggagcccagagtacctagtataagctgacagagtaatctgtgtttcaggcctgctatgagagaggcaaggaagtcagcgtggtgcccaaaacatctgcctccactgactctccctggatggggctggcaaagtatgcctggtctgggtgagtttttctaacacgctaaagggttgctgggttttgctgggcttgttttctcagcacctggcagagtaccactgctgacttactgacttgcccccttgtaggtatgtgatcgagtgtcctaactgtggggtggtctatcggagccgccagtactggtttgggaaccaagatcctgtggatacggtggtgcggacagagattgtccacgtgtggcctggagtaagaaccattccttggcttccctcgggtttgcttgtcctgttgagttattgagtgtttgtgtctggagaggtggagtttgcttacagtagaaaagtcagccatgagttttagcacgtgagtggttgagtttagggagacaggatctgtagagcccattctgttcccgctctttgcctcttattcattatccagacgattgcaacacaaactggaatgaactagctgaaaattagtctaacactctcactagcgaataagatgtcattgtgtacgctcttactcattttctatatgcatatatgcataatttttgaaatgtacttgctgttcatctgtttctgcagagatggggccacagtgtgatgctcaggctggcctcgagctcctggactcaagtcatcttcctgcttaagccttctgagtagctgagactgcaggcattccccagcagtctttgctcaaggatagcttacctgccatttttcctgactttttcttatgacagtttacttgacttagtgctatggtttgacttaccattttcttatttttcacatctgttcaatttatggtttcttattaatatgtt

SEQ ID NO: 21300 - DNA, 1187 bp, Mus musculus
caacaacaacaacaaaacctagaaaggcagctgacatacaggcactgttggaagggtgtgagtgaggtgaatgcattctttccaagtaagaccataaagtggctcatgggcagctactaagaacttccctcttaaaatatttcaataattaaaacaatgctattctgatgagaatgattcattagaaacggggtaaatgcatgaaagagaccagattggggctggagagatggctcagtggttaagagcacactggctgctcttcaagaggtcctgagttcaattcccagcaaccacatggtggctcacaaccatctgtaataggatctgatgccctcctctgatgtgtctgaagacagctacagtgtactcacatacataaaataataaataaatctctttctttctttctttctttctttctttcttttttttggttttttttcaaacagggtttctctatccagggtttggctgtcctggaactcactctgtagaccaggctggccttgaactcagagattctcctgcctctgcctctctgcctctctgcctctgcacctctctgccccctgcgcctctgcccctctgcgcctctgcctcccaagtgctgggattaaaggtgtgcgccaccactgtctcgcataaataaatctttaaaaaaagaagggagggagggagggagggagggggagagagagagacagacagacagacaaacagacagacagacagacagacaaccagaggcctcacatgctggaagctcagccccagtctgaggccatcctggtctacacagtgaggtcctctctcaaaatacaaatgaaaaagaacagaagagaaacagcagagagttctcagtggaggagttggcctcaggagtatgacttatgtctgtgtccaggagagtgtggatcctgtggaggtgtgtgtgctgagtgcatctgtaagctggcttactgtttgtttcccttgagaaatacggagtgggattatcaggtgcaacatataacattatatatctaaaatcattagagtttttagatgtggtgtggtggtctgccctttaaaacagttacactgttcacatctatctgtatattcagtcaggaaagtacccatgtcatgtgccaggcagagaggtgtagaactaaaaacctctcccctcagtctacttggagaga

SEQ ID NO: 21301 - DNA, 1101 bp, Mus musculus
ttcaaatcccagcaaccacatggtggcttacaactatccataatgagatctgacatcctcttctggagtgtctgaagacagttaatttacatataataataaataaatcttggggccagagtgagcggggccggggtgagcagaggtcctgagttcaattcccagcaaccacatgatggctcacaaccatctgaacagctacagtgtactcatatacataaaataaataaataaatcttaaaaaagaaagaaagaaagagtatagtaaatcactttgctccattcacctcacagagagaaaattgaggtcaatgtaagttaaatgatgtcagattgttccagccttagggatgggtagagccagcttaaccaaacctccatggtgatagtgctctcctctctcccctagagagagcatagcatgtagacattgttccattcattgaaacaatacaaacggattgtctggtgtgctaggcatcatggcacagatcagacccctgcccctcaacaaggagttcattgtagttgtgaagctgagagcttggaagaatgtggactgtggatttgttagcaacaagggccggggagcgaaggggctgcgcaggacagggactgcattagctgtttctggtgtgacattttcattgattcttatttgttgattttctatctgtccgtccgtccgtccacccatccatctatcttgtggcctgtttctttgtgttctagtctgttacttttctttctaagtcccaactgtcactagcgcttatgctagttttgctgtagctagatggagtttgtaaaaaagggagctagctgtgtgtcccctttggaagatttttggagagatctcttgagttggcatttccagtcctcaggattggaaggctttttattcagatataaaaggagagctgaactcggtgaattgggtatgtcaaagaaattcatcatggagctgacaagagctgttttggaagaatctgtgtgaggttcctttctctgtggctatggtctaagctgctaggacagcagaggagctgtgggcagtgtctgtgtgtctgtgtggcaagggtcagcgctgctgggagggga

SEQ ID NO: 21302 - DNA, 1145 bp, Mus musculus
ggagatcatttttcagttcatgtttaagtgctgatgactgatgagacgttagaaggagctagtggggaccccatgatgaagggaagggaaactaagccatggaagtttaggctggccttggatccagttggtagtgaggttgaccttgaactcctgatcttccagcttctgccttagccctgtgagaagccaagagcgtctcggtgcctgggtggtgcagtgctgggcactatacccagggctccatcaacagtctgccaagcgagctgtagtcccaactctctttttgcctttcttttaaaaacaagacaaaacaaaacaaaacctttttttaaattaatttttttgttttttatttttattttatatgcattggcattttgcctgtaagtgtgtttatatgagggtaccagatcacctggaactcaagttacagatagttgtgagcagccacatgggtacaagagttgaacccaggtcctctggaagggcagccagtgctcttaaccactgagctatctcaccagccccaaaacaaaatcctttattctgtatgtgtgtaggcatgtgtgcggaggtcagaggataactgcagaagtcgattctcctttttatctgcgggttccctggtcatcaggcttggcagcatgtgactttccacattgagccacctcactggctgttcgtccctcttttttttttaagatagattttactgactggcctggaacttgatttttaaaccaggctgtccttgaactcacagaaattcatgcctccgcctcataagtggtaggatcaaaagagtgtgccaagtgtgccaccatatctgttcatcagtcaagaagttccctttgaccagtttgtgggtcagcatggctgtggttggaattttagggtggagatgtatgctagttctctataagaacctgaccactggcttgccgtctttggaggatgtagttctctataagaacctgaccactggcttgccgtctttggaggatgtagttctatataagaacctgaccactggcttgccgtctttggaggatgtagttctatataagaacctgaccactggcttgccgtctttggaggatgtagttctatataagaacctgaccactggcttgccgtctttg

SEQ ID NO: 21303 - DNA, 1219 bp, Mus musculus
agttaatttttctataaaagtcaaattgaaaacatttcattgaggatacatatgagctttctatagtgaaattcataggggatttattctgagtttaaagccattccagttctcattcgcttctggcttttgagttctgggattgtaactgtcctgccccagcaaaatacaaaatgcccctggttaatgctatatcctatcctttgttatttttttaatttttaaaatttcattattttttagctcttagtaaataatgatttgctggattttcttctttcccctggtctttttttttttttttttttttaactctccctcccctctgggttcatcaatgttaaagtgaaatggttattagagggttaaagagcagtgttgtggtgatgacttcagtgacctcataagtattacctttaatcattttgccttgctgtattttttcatgtttttaataccttaatatttcacaaattcttcttatttattgttagcttttggattttgtgagtataaagagcctgaatctaccctccgtgctctcagattattgcatgaccttcagattggagagaagaagctacttgttaaagttgatgccaagacaaaggcacagttggatgaatggaaagcaaagaagaaagctaatggggtatgtaatatcttttctagcctacctgtgccagttctgtgtaaatacttcatattgtaagtaaatttagcatggagtctcacaagattattgtcattgtaatatgtgcttgtggcttatgcaggagtgtattttatagtttgtagataagtgttttatctacccacagtgggtggatgactgttggtttgcttgttccaggttgggatgaaagtagtaagggaggctggacaaggttaacttgccagagaaaacacttgtacagactattccaatcagagctaattcattaaggcagctttgtaagtaagtataaaatatatatttcaacctacacaatgtttattagtaatcctctctcttttagtgcacacagattggattctgaaatgagtgaaaataagtcttaactacttcatgtatgagtgaccttattcaggatttttatttttcattttaattcttttactttgcatgaggataaaggaggtctttttgtcttgtgtgataatatatattgcatccttcacaaaacaatcttaaacttgagtatatagtgtcttaaat

SEQ ID NO: 21304 - DNA, 1161 bp, Mus musculus
gagttcaagctcattagttgtacagggaatttgaggctagtctgggtgacatgagacttaaaaaccaaaatgtattattgcataattcttgtttctgttacttagataatttcactgacatatactacatatatatatttacagggtaaaataactgttgcttgctgggcgtggtgtcgcacacctttagtcccagcacttgggaggcagaggcaggtggatttctgagttcgaggccagcctggtctacagagtgagttcccggacagccagggctaaacagcgaaaccctgtctcgaaaaaccaaaaccaaacaaaaaaacaaaaataactgttgcttatttgtcagatttagttttagtagtttggatttccatatgaagtaaagcctgtgttgggcatagtattaaggttttgttgtattacatatcccttggatttgttttaacttattggaatttttttttgagagatttttatttatgtgaaagtgagcatgtgtgtttatgtgcaccatatacgtgtatttcctgtggaaaccaaaaatgttattaatttcctagagttagaagcagctatgaacccccatgtttgttgaggaactgaacccatgttgtcaagagcagcaagattcttaactgctcagctctgttcagtctctgttttgacttttttttttttttttttgagataggatctcatgtagcttcttactactctttgtaatatgaccttgaactcttccccacccccactcacttcaagtgctgggattagatgttatctcatttattggatctttaaagaaatttgttttatttatttgtatgtgtaggttgtgaatgtatatgtggaaattagaagacaactcatggaagttctcttctaccatttgggtcccagggatcaaactgaggttgtaaagtttgtggcagggcccctttacatgttgagccatctattggcaccattccacagactttttaaattattatttgatctctttgttttattgcccatctaagctcattaaaattttgtttatctaattaacatgatctgattcctatacctgtgataaaacctcccctaaataaggcactcatgacagagcagagtgtaaatgccacaaaaggtcagcttggtgatccgtacaggaat

SEQ ID NO: 21305 - DNA, 1125 bp, Mus musculus
atgtatgtgcattacagtctagtagataaaaggtgcttcaggagaaaatgttcacataattgcttccaagttcatttagtgagtcgtgttttctgaaagaactgtatttgctttgggtttccctcaaaactgcttgtgtttcagatgatgagagttagtctggagaacgtctccagaagctctgtttcctctcactttggatttggaggtagaagctgaaattcagaaatgggtaattgtttggaaattgtgtgagctttggataatatttggcagcttatctattgactttttttttttttttttttttttttttttttttggtttttcgagacaaggtttctctgtatagctctggctgtcctggaacttactttgtagaccaggctagcctcgaactcagaaatccacctgcctctgcctcctgagtgctaggattaaaggcgttcgccaccacgcccggcttgacctttttaaataattccaaataatcttctgtcctgtgatctttttgtgatatttttgtactactgataattagcaatcagttaagagactgattaggctcataagctttctttctgaaaatgtagattgaggggcagttagccatttgaaaggtagacttgaattctttttttcttaaatccttcatggttgtaattgtggaaaatagctgtatggatctttcaatttcagtttgtaggagatgataatttagggtctacaggttaattctatgtgggaagccgtgcacaatcaccattacaagatggggctggcttcctcagtgcctaactagtaaataagcaatgtgcgcaggtgctggagtaaattcatgccaagtcactgcccatcccggggtgtaggagtggggtgatgagcgagcaactaatcaggagctgacacgtcacacagaggggtatttaagcagctccattttccgggttcggggtcttcctgagaagcaataaagctttgccgtagaaggatctggagtgttttttgctggtgaaacgttacaaggacagttctatattagcaggcctttgaatttacaactccattcctattcctatggttagaaacctatggagagtcttccaagggaaaagaaatcaggaa

SEQ ID NO: 21306 - DNA, 1218 bp, Mus musculus
cacatctggctttgaaatcacagagatccactggcctctgcatccttggtactggattcaaagagtatacctccattcctggccaggtgtatggttatcataagctgcttttgctgcacatagacatattggaagctgggctggttaaatggtaaggaactttgatgctaggactgactacccaagtttgattcctgagattcctgtggtggaaggagtcctcaagttgtcttcttgacttccatatgtatgccgtagcacacacagatatacaaacatggaaatagttttttaaaagattaaaaaacatgtagaagcatatgtggggaaagaatccttcatttgcagcctataacctttctggtgattaggttttgtagtatagctatctagtattttccttggttagcccattgatatttttttctttggaataatttttgtctattctcctcaaatttgtgttggtttttaagaacgccagaccagaaactgtcactaatgatgatgaagaagccttagatgaagaaacaaagcgaagagaccagatgattaaaggggccattgaagttttaatccgagaatattccagtgaactaaatgccccctcacaggagtctgactctcaccccagaaagaagaaaaaggaaaagaaggaggacgtatgtgttctgacaatagtaatttatataatttattcttctggaaagtacaatgtttctttagaaactcaggagttgtctgtgtcatgaaaaatgctataaaatacacatatatattgtttatttagggatagtgtaagttctgttttgagtttcagtgtctttgggcattttagttttatcattggccagatacaattgtattactgtaattattcattatttggtccaaaaggtgcatctacttggtattattgggaatactaatgtaaagagttagtcagataattaggtaaagttgaaatttttcttcctccattgatatggaaggataaaaataactgatagtaatgaagagggtaagttacggaagtattattttttggctagaattataggcaaatctttttataaggtagataaattttgtgcatgcaaatacatctcaaatgataatttcttacatgttagaattccttatcttaggaaacagtcctggtactcttaagagtattttggctattgaaaaaaaagcatgtgatgggtgatagaggga

SEQ ID NO: 21307 - DNA, 1143 bp, Mus musculus
tctaattatagcacaatgtgagctgttttttaaaaaatctttgtgggtttctctgcagattttccgtagatttccagtggccccattgatcccttacccactcatcaccaaggttcgtttgaactgtaggctttgatttttatgtgtgcactaactgccagatatgtgatttttatcattattattactattactattattatcataactttacaacattagattttacttccaagttggtgggttttacttagatgtatttgtaatacttgcattaaatactaaattttgttatttttctattaatgtatgtaaatctattcctttctgttcacttaattttaggaggatataaatgctattgaaatggaagaagacaaaagagatttgatatcccgagagatcagcaaattcagagatacacacaaggtagtattcttgatttttcacttgataccaatctagactttttacagaatccaaagcaaaaagacaagaaaatcaactttgcattagagtataatttattattgcctttaataggcttaattgatactaaggtagaaacaaaagaacagaagactaataccatatttaatagtggccattgctaattgttctcagtcactgactgctgcaagcatctcactttaatataacaaaagttaatttagatttcaacatgaacatcaaggtcagattaaactattcagggggcagcaggataacatacatatagttcagtttatcttgtgggcaggtctttaatcctaggaaaaacttttttaaagagctgagattaaaatttaagatttatatttgtgtggattaagtttgagtgggggagattttaaaacgtaggccagtgattaccagacttaccaaattatagatgcatggaagaactgtaaattcccataaagctaatctattcattgacccccaccattatgatagagatcatatggtgactaatgcaagatgaaactctcagcttggaaagtaacaaggaataggatgtaagtatgagcttctgttttttattatatttatggatgccccctcagaaaaatatgcaaaggggtaactggcttggaaatgggtgtttgtatatagtaaatcccactcatgagttttgcctat

SEQ ID NO: 21308 - DNA, 1153 bp, Mus musculus
tgccattccttcccaaacatttgggattagaattgtttaccaccatgcctggcaatatttttttttcaaaaaattgtgtatttcagtctatgattaggcacagttagtaatttttcagtcttttatgtaatcttacattgggttttatgttttattttttgtaatgtgtataattgctagcattgacttcagaatgcaatttagaacttttagttagaattaaagtctgtggctttttgtttaattcctacattgggattaaaatgcagggccctgttcattttagaaaaaatgccttatttgaattttacttttgactacctagtctatgtccccttgagtatagagaaattaacactaaattttgactttttgcttattgatttatcatacatgttatagttccccgtggttcctaaagaaaaaggatagaatgctataaaatatatgatatatttaatgttctatttccatagagaaaaaagcagagatcgtgaaagggaacgggagcgggaaagagagagagaacgagaacgggaacgagaacgagagcgagagagagaacgggagagagaacgggaacgggaaagagagaaagacaagaaaagagacagagaagaggatgaagaagatgcatatgaacgaagaaaactcgaacgaaaactgcgagagaaagaggctgcttatcaagaggtaaactgaggaaatgctctttctgaaaagcatagttatttccttaggatggtgaggcatgttttacagaatcctttgttaaagtttaaatttctgaaacttttttttagcgccttaagaattgggaaatcagagaacgaaagaaaactagggaatatgagaaggaggcagaaagagaagaagaaagaagaagagaaatggtgagattttaggtttaaaaaagtgtattgttaattcagaaacattcagacttactgtcaaacagaaatccttacaaatgaaatttgtcagtttctcaggtaattgtttttggttgagtgagtgcgtgcgtgcgtgcgtgtgtgtgtgtgtgtgtgtgtgtgtgtgtgtgttttgaggtggtctctctacttagctcagactgttttggaatcacatatcagtgtatatcaggctagtcttgaactcctagtaatggcct

SEQ ID NO: 21309 - DNA, 1147 bp, Mus musculus
tatctttattgtactggatgtatgtatgtatgtatgtatggttcaggcttgctgttgtcttttgactgcagggattaaagtcatgcacatcacagccagttgttttggtaggacagtcagcctcaaacaatgttaagcatccattctgtattgtctgagttatgcctttatcccctaaagccaattagcaatttgtgtatagtcttcatacttcatatctgaaaaaatacaaattaagtgttgagtcttcagtttggaataggcacaaagcaactgtcttccccttgaaagttatctttgggcttttagacacatagtgtgatttttcagaataaaataacacctttgtgcttacttgtaacacattaatgtcaacagcacccagtcctggatgtttacctgagtcttagcattcacttacttgatttctagtgttgaggaaattctgtattgtggacattttgtgtactaagcaatgatctgatcattaaatgctattaactttccaggggtagtgctcttcagaaacggttgcgtgatagggaaaaagaaatggaagctgatgaacgagacaggaagagagagaaggaagagcttgaggaaatcaggcagcgcttactggcagaagggcatccagatccagatgcagagctccagagggtgagttattataacatctgaaattgtttagttttaatttactttatcatctatcagtcacctatgatatattttagtttgtagataaaggaattacaccatatgcgcttttagacttgataatgctgttatttggaagattattagtatttgttaattttagtacagaaatcatcagtcttaaatgaactcagaactttgtatatgtttgtttagggaacactttagtggtggtgcatatgtgcaagccggaagtaagtctcaggtcttggtgtagtccatagaagcagttcactgtggtttacttgagacagaatctggctagggatttgcctgtcaccacattgctccagttgtcatacttgaacatttgctgtgttgagtttagtaggcattggaaatcaaatgtatgtcctcaggtttgcatagctgtcatttaaccaactgaggtatttccccgcaccttgaatccatacctcccatcatc

SEQ ID NO: 21310 - DNA, 2184 bp, Mus musculus
atattgaaattattagtatttagtaagtcattgagtttggctgaatcattatctttctttgtaccgtaaatgttgtgtttaaaatattttcatactggacagttgttcttttaagtcattatgttgattgtatttggtggatgttttggtatgttactgttgttttaatataccaataagtatctttacatgtgttcctgtcttttattttctaggtactagatgaagaagcagaagtttttatagtcaaaatgtggagattattgatatatgaaacagaagccaagaaaattggccttgtgaagtaaaactttttacattcagagttacatttcagatttcttctttcacacccttcaaaggactttgaattttcggtgtcttcaaagacatttgtgagatctgtaattttttaatgtagaaaatgtgaattcttttgtcctctaatttgttgatgctctgtgtactcactcgggtgtaaagccatctgtgtccttggtcctctttatgctcaccaggcacagactactggtgtgttttataagctgcagctactgtacacagcctatctgatagcatcttgttctgctgatttgttccttgtaaatattaaaatggctccccaattcttttgcagaattctacttactattaaaactgtattgtataggcgccaacatgaataagttgaatactagtcatacccttacagcctcgttcccactttcctgatcagaaatggcaagcccttgtaaaggcatggagtttaaaattagagtgcaaaacctagcagacaggtccttcctaatgtatctctgtattaatgtgtttatgtgaatgtatgtataaaagtcttttttttaatttttttggtgggctcccttaaacatttcgtaatcatcaatgcacacataaaggaaaagtgataattgtgccaacccaaatacctaggataattacggtgtattttccagagactggtattctgctgtgagcaacacactgctgaccagttttgtgttcttctgtgtataggatgatacatcataatcttatccctccctccacctgatggctcagaattgaagcagagtctagaattctggagcattttgctcaatatattttcaacttgtcttcatttaattttggcatattcattttaataaaacaattccagaagtgtaaggtggggggaggagctcactttcttatgacggggatgacctcagtgagagagctatgcttgcttagcatgaacgagggcctgggttctattccccgtaccaataaagaagtgaataaggtaagtttacaaaagagatttgacaaaacacaatagtagttaattcaccatggtagttaaaaatgtttacatctttcttccaaagatacatcatccaagacacattcaagacaattttctgctcacaaaattttattactggtcatcaagctttaactatattgatgacaagaaatccttggactttattagtaattcagaagatcactaggggcaaaatttatttgaaaagtaccaagttctaaacagctctgtcaagaaattaggtgtggctgctgccatgtttgcttactaaaaagataaagactgagttgttagaataatgaaactgtgagcttgagttactagggtttttggtttttgttttgtcttttttttttttttaaacatttgagaggacgtccaaaacactgtttttaatgttcaaccttgacatggtttcattatgtaaatatttcagttattaaaaatgtatatatttgatcttggagatgctttctttgagtcttgtaaataaatgacattatgttataattgtgtagtgcatatactagaaaacaacctgaaaagatggtatcagaagatcaaagtgactatcttattttaggtgaggctgctatacaaatatctctctacgtagagttgattatattttaaattatgatttagcaatcattccagaaaaatgatccttaattataaatttattaattatttttccagattcattcaaccaccacaccacaaccttgtttaaacagtttgtttttctgtctttcagacacatcgaacttttttttttttttttttttttttggtttttcgagacagggtttctctgtttagccctggctgtcctggaactcactctgtagacc

SEQ ID NO: 21311 - DNA, 1631 bp, Mus musculus
tcttaaaacaatttatttattttatgcatatgaataccatgtagctgtcttcagacacatcagaagagggcatcagatcccattacagatggttgtgagcaaccatgtggttgctgggaactgagctcaggagagcagtcagtgctcttaaccactgagccatctctccagccccataattgtagtcttacatggtgttgtgagaaagaatatggagagatatcttgaacaccactatatgctttttaaagtactattaataatgagtcccagcactcgggaggcagaggcaggtagatcttggagttcgaggccagcctggtctacagaatgagactatagccaggacagcttggaatacatgagaaaccttgtctgggaaaattaaaataacaacaacaatactaaaatcaggtagggagtacttcatgaatttgaaaagatgagattactaagtttgtagctgcatgaagaacatttggaggcggaaagttggctctgtggtggttaagagcacttgctcttccagaggacccaagttcaattcccaattcctacatggcagcttacaaccatctttaactccagttccaggggatcatctgatgccctcttctggcctctgtagacataggtgtatgtgtggtgcatagaaatgtatggaggaaaaacacctatacacaaaataaagaaatcataaagaagaagtgttggtacaagtatatagtatttaagccaagcctccaaaggggggaatggttgcctgaggaggagaatagaaggaggggtgaagtgagccaggacccaggtaagcgggagggagggcctggcttcctcggggacagcagtaaataataatccagacattagcactgtctgtaaggagtcctggtggagccgttaccacacatcccaggtgtatgtcttccaggatgccttgtgctgagagtccggcttactgaatgcatttctcgttctttagaatgacagccaagaacggcagcagcagcatgacaggcagagacttgacaaccctgagccaatatctaatgggcggccccagagtaactcaagacaggtggtggaacaagatgaggaggaagacgaagagctgacattgaaatatggagccaagcatgtcatcatgctctttgtccccgtgaccctctgcatggtcgtcgtcgtggccaccatcaaatcagtcagcttctatacccggaaggacggtcagctgtatgtataagtgcttcgttctctgggctggtgtggcttttcctcgtagcttgttgttatcctctcaaagatctgtggaccatcttccatctttcctgatggccagaggcagtggggatgatggcagtgatgatgtgatgtcttggttttgttgttgttgttgttttagttctaaccttttgaattcttacttgtgagccagcagacatggtagcagggcctgaaatcctagcacttagcaaatggctcatggaagtttagaggtttaggaaccatggctttgggggaccaccatgtggtgattgagacacaagcatgatggcatatgcctaatcacttggcagtgagacgggtcagtcaggaactcaagtccatcttgtgctgatgcagattccagg

SEQ ID NO: 21312 - DNA, 3561 bp, Mus musculus
gctgatgctgcgtggcgtggggatggtcctgagtgcgcctctgtctccacagggcctgtgccttacattactcctgctcgccattttcaagaaagcgttgccagccctccccatctccatcaccttcgggctcgtgttctacttcgccacggattaccttgtgcagcccttcatggaccaacttgcattccatcagttttatatctagcctttctgcagttagaacatggatgtttcttctttgattatcaaaaacacaaaaacagagagcaagcccgaggaggagactggtgactttcctgtgtcctcagctaacaaaggcaggactccagctggacttctgcagcttccttccgagtctccctagccacccgcactactggactgtggaaggaagcgtctacagagaacggtttccaacatccatcgctgcagcagacggtgtccctcagtgacttgagagacaaggacaaggaaatgtgctgggccaaggagctgccgtgctctgctagctttgacccgtgggcatggagatttacccgcactgtgaactctctaaaggttaaacaaagtgaggtgaaccaaacagagctgccatcttccacaccatgttggaaataaaacacgtcctagctgaacccttactgtccaggaggttccgtgtggaggtggcactgggccgggcctccctctcaggctcctttgctgcccacttgtaagtttaaataaggacaccgccctacacaaacctcacccctgtcacatcagtgactctgaccacttttgttctcaaactctctcactattatctgtggttgccgtttcttcccaaggccagcctggacgaatttggggttgctctatcctgagagttgtaacctcaacttccaaagtttatattttcttgaaatgatggatctattgctcaacagtccctgtcatccttaagtgacttctgggtttcccacaaattcctcacttttagacacactctaagcttacttctggcctggatgcttcctctccctgtctctcccttgccccacagcggttccctgacagcagacaaggcagctctgggaggtagctagtatccaataacccaggggtttcctcatgtgatgcaaatactacgtgtccaaccaatcagtgctgtcaacgggctgccatagctccttcgatggcaaataggatgtgtgcccaaagaattaaagcgatgagtggctggtgaagcgctctctgtcctggctggttttttgtcaccgcaatccactgccaaaggcagaatttaaactaggggctgagggatagctccgagtaatgtccaatgctgggagttggtcagttcagaaccaattgtgtcggtaaaaaaccaagggtttggagaaaagctgtttcttggttagctgtggaatcacctggatttagccagctgccaagaggaaagacgggcttcccacagccgtggggcagagtgagctagccgcacaggcaggtgtgagggctgaggctttgccctcaggaacctcagaagcagcctcactcgattctggtctgcctctcctctcagctcagtgcttcattgtgtgaggtgagcagcgacagtactgttgagcttacagctgagcgtgcgcgctgtggacccttaggctgaacacagagcaagcagcagctgcctcagccagaagaccaactgaaaagacttgagaaaccagtgtggctcaagcaaggctgccggctttctttcccagcctactctaggaaccactttccctaaagtgggtctcattagagtgtagaatacttattttgggtcacacaagagtactgttgatctagccctgggcctttgggcatgctagcaagtgctgcgctagtcgccacccctcatttggtctggaataatcctagtaagagtttgacctctagtagtccccctgtggtgggtgaggtggagacaggcgggtccctcggcttgctggcctcagcccagcctcatcaaggcttaggccagtgaaaagcaaggtggacggacagctcctgaggaataataccacacaaaacacacaaaagagaagctgagggtgcagctctttgggagagcgtggtgctccaggccctgcgttcagttcccaggctatatttaaagaatagaaacccaaacagactcatctcaggctgatgaaaagagcaggaaagagagccatgcagggaagaggggctgtgtggtagaagggtctgtcgttttaattttcatgcatatgtcaggacagccctatggagtcagctctctcctcaattacatgggttctgaggctcaaactcaggtcaccaggtacgtacgctgtaggcaagagtccctaaccagcgcagccacctcaccagcccctattctaagaccttgctactcacacacagacggcagattggaagttttgattcaaggcacttttgtcagtctcagctagagcggtgtatgtaagagccccaagtgtgtcgtgtgtttggtgataagagggtatgaacgggctgtgtttgtgtgcacaagaggggtggccacgagccaggcatcatctggaataaagccactgaccccacctgcttaatggaaagacagtgggaagaaatgcagtagctttagggctttggtctgatgcctacaggatacgagagccagcttcgccatcagaggctggagaggaagggcgctccttcctgtttttgatcctgctgggttaaaggggttctaggtacacagctttcatacagaatgactgcatttctccaagaggaagagagagagagaagagagagcaaaagcaatctattagagagagagcaaaagacaacagccaaaagcaatctattgacttcaccacaaaaggagcaaaggcctgtggttttgcttataaacttgacttgaaagttaagtatccttttgtgatagatgcccgagtgaatagtatgttgactgcttgttctgtctgtggatattagttagggtcctctcttgtgtagcccgggctgaactcaaatgtataatccttctgcctttaccttacaagtgccgggtgtcacaagacatggaccatcgtgtcaagttacatatatacttgtgtatgtacatacatgcacatacatattacgtttatttctgcacagagcatatgcctacatgaggtcagaggtcagctaacagcaggtggttctctcctcccatcgtgtgggttccaggaattgaactcagatcctcggctctgagacacatgcttttaccccctgagccatctcactgggcctatggctattcctgaccctaacttattgaatgtgaaattgatattaactgccaaataaggtcttccaaggccaggcttctagtgggagtctctgtctgaagaaaagctgaggaactgagggctttattcagtctcctgtgtgcttcgctcgatgaaggaggctcacttgccctctttcctacctctttccctccctccccccctttccctccatttcctgttcattcctcttctcctttctgaaagaaaccccaggctcttg

SEQ ID NO: 21313 - DNA, 1148 bp, Mus musculus
tatatcaaaaagccaaaatctttatttttatgcacctagaatattttaaatagttctcaatattaaaaagtatgagttgtaagtaatcttgccaaaagtgagcgggttagatgtaagaaattgtacataagattgatttatcattgatgcctattgaagtaaaaaagaggaagggttggaagttgtaggcaggagccctggcttgtttgtgaccattcatgttaactagcacactgcgaaatggtcataccgatgacccgtgcagtcactaggtagtagttttaataagatgagcaagcagtgttgtcctggttttaaacctatggtgaaattctaatgtcatcatttgaatggaatcaaatctatgctctagagaatgtatgttgaatcttttacatatcattgcaatttccttatgttaatcctttagcattacggtgacaatgacataatcatatccagaaaagggaacgcaggctattgtgtcggtttgtaatgtgggtcttaatgggctctgtccttgaagttttgttcccataagttttacagggatgagattctggcttctgtgctgtgtgtgtctgtgtccccttctgccccaaccatgaacagagcatcccatgccagttgcagctacttgaccatgggtaacaacatgagaccccatctcatttttacttttgaacgttggccttacaatcaaatgtaagttatatatacatatatatatacacatatatatatatttgtactgatgagaatttataatctgctttaacaaaaataaatgttcgtggtagagcttttgcccatgaagggctgttcttatttgcaaatgggtttatagttctgtttttaatctctctttttacagctcatttctaacttgtaactataaaatcttttggggggattagtatatccttaaatttcagggtatgactgggatctgcagcaatagtatggtctacaccaagaagccagagactgttagccccagcccaggggtagagtggagctgtgggagtagagacagggtctcactatgtagccctggctggtcttgagctcagagatccacctacctctatctctcaaatgctgggctttaaggtgtgtgtgtcccaccatgcctgacagcactgctt

SEQ ID NO: 21314 - DNA, 1292 bp, Mus musculus
cttaagtcatcatgtacagccagacaccccatggtccccatcagtggctaacgcaactggcaggatcactccttggtagtactgcgactacatcaactcttgtaaccttgctttatgtagattttaagaaataatttctcatgtgtttaaagcagtagtcaatagtcctaagtatcgaccactgagattttgaaaaccttcaccctcatgatttacccagatgccctttgctttacagttatgagtagacacttaaagactgaatttggtacctatagataagtgagacagtatttcaagatatatttttgagaaaatctaaatgaaacagcttttaaagtgtatcatgtaagtgctgtggaggaaacagtgaggtgttttgggcaaatggcaatatgttgtagattgtcactataggtgtcttaacctcagacctgcaaagcaatagttaagtgtgaacagtataatttatcatgtaagaaaaatattctgaaacctgtaaaatggcatcagcaccagatgaagtctccagtgggtcaagatagaattattgactgattgtggagtagtcaggaaccgctgccaacctgtgcctaaagtctcagccagaggctgccgattcttgtccctgtctccacgtggttctccctgaaagtcaccacagtgaagggggcagagtcttttgtttctgtttttaattattatataagtagtcttggtttgagaacttataactatcatttcagtaaaaatgactcaatttctgtaagagtcacgctggtcagaagggaccactgctttgacaatcaactctaaatccatacaagaatgtctggttgtgggctggtgagacagctcagaggtaagagtacctgttgctcaggacctgagcttgcttcccagtaccatgaggaggctcacagccctctggacctccaggggctctgatgtccttttctggacctccaggggctctgatgtccttttctggacctccagggactctcatgtccttttctggcctcccacacacatgttgcacagacagacatggaggtgagacactaaatgcataatcaatttttaaaaagaatacctagtctaatacctttttagcttttctgatggggagaaactttaccctgactggcttaaacgttcaaaaccattggcatttctcttctgagcaacagtggtgagacttcttggtggtgcagaaggcctataagcttaggagacactgttgtggttgcttgtagtttacacaggcaagccctgttcccgctgatgct

SEQ ID NO: 21315 - DNA, 1703 bp, Mus musculus
cctccctccctcccctcccctcccccccccacacaaacattttcggctcctcatcacaaatattggaatgactttgatgcggctctgttcctggaattaaagccaaaatgcattcaatttgaaagtggaaggccagcctggtctacagagtgagttccagaacagccagggctacacagagaaaccctgtcttaaaaaacaaaaccaaaaaaaacggaaggaaggaaggaaagaaggaaggagggagggagggagggagggaggaaggaaggaaggaaggaaggaaggaaggaaggaaggaaggaaggagggagggaaggagggaaggaagaagggaaggaaggaaggaagaaaggaaggaaggaaggaaatggaaggctgggtacctgagagaattaaggctgtcctcgctgtccttgtcctcctcatcctccctgcccactctgatcagtcctgatgtcttcttttactggaaaaaaaaatgtagttgaggaaggtgggacttatgccattcagattggagatggaaccaacttggaatagatgttctctgtgatcatttgaacttctagtattataaataatggtagggtgcaggaacacccagtattttaatttttcaccgtcaatatgatattggtatattggagttgtacttcctatgtctcctgatcctgagctaatgaccatattatctagctaggccttggagggctttcctacctgtgcttacggcaccagagatgctcagtgtggcgctgtttacatttaggctgtatgactcactcttgtgggccgtgcactgtgtgcaggttagctgcagccctgtcctttactccctacatgccaggagctcctctccagttatggtaacaaaagatggctgcaagcgttgcccactgagccctggagcaggtgggacagccaaattctctagataggagccagtgtttcctgtcccagcattcctctgtgcaggctggtcagcttcagtctgtagtctgtgccactagcattattgtaagagaaggtgacattttaccatcatggctggacctgatcaggtctgttgcccttttatgcaatgctcagtttcatgttccccacacagccttagaagctcaggcctagaagctgaaacttctgcctgtaggatttcaacttgagtttcttgtcccctgctcatgttaggacaatggttgaccagttaatctacctctgtcactgtcaacaaaatctagcttttatgatagattttgttctgtctctaaagcttaatatttgtattacactttagaaaatgtatcaccctgcacagactcttttgcagggtgtgtcagtcattaagtctagactgtgttgtattgagttgctcgtgcccagaagttagctgatgcagatgtccagtgcaactgaccagaagggtgctgtccctcaccgctcagttacttggaatgcttcctggggctgacctaaatgtggctctggaatggaagtttctggttgaataggtgtttgttgttgaataggtgtttgtcaggggtctgaaaacgagggagcattggaaataaatctgtcattggctcagagttggtgacagagaaagcagggagtcttttacctgggtttttcttgaggtcaaaacaaacaaacaaacaaagcagttagccggcctagacagtttgcatgtaatcattcacttt

SEQ ID NO: 21316 - DNA, 1444 bp, Mus musculus
cctactacacggagaggaactgttcagaggccagaagatgcagagctctgcccgagagatcttttgacaaactcatgactagcattttatacctttgagtcccggaggctgctaaaggagcctcaagcaggtcctagagaggcctggcctgctctttggtgccagcttccttcttgcctgtcgagttctcagtagctgccagctgatcccaccgcaccccactcaatgttgatattcacagtcctccctccccccaatacggcatgctggagtttgctggattcttccctgggagggtgatgtctcctaactagattagacaggagccttcattctgtggcttgttgtcatttgggaactatttatttattttttttaatatttaagttttaacatcctcagggaccaggggcctcttgctttccagaggtccaagtgcatttatcccaaaataaggcacctttttggcatccccaagccctcccccagttccatggccctggggtcccttaccttgtggctcttggccgcaggaatgacagaaactgatcgggctgggaaggcggggagtgttatcagtcacaggaagccagcagatgtgggtgaggtcaaaggcaggtctctgtcctgccttttctgtactttcaaatgctcgagggagttggcaagaggccagaattctagttttggttatcagcctcgattctggcttgaagaaaccatatttggcttggaattactgaagggttggaatgttctagagtccccttcgctttccagttcagtaggggcctaaagccacttttctgatatcatcacttaattttagttgtacaaaagagagtcttaagtgaccgtgtgtctgactgtttagaatgttagtaaggagcggaaatagcctacagcccgttgggaattggaaatagagatggggttttgttttgaagctgtagactattgggtatttcttacattcatttacacattagtatggttctatgagagagctgcgggtggaaataacaaacctgtccccctagatacctagacagttaccttaaccttcagtttccccggtttgtttccttcataggcttctatcagctcgaagtcccgggattacaaaaatgtggtaccctctagaagcaggagggcaacaagtttaggatctcttctaaatcacttctataacgcgtgccttcacagctcagccccaaagtgccacttaggtttcccaaggttcttttctatttaaaccatatctggctcaggccccttggtggacaggtgatagcagccacatgagatccttcagccacatgagactcctctgctcagtggtaccaactaatccttagaaatcttaattaaaaacagcaaaaaagcaagaacttttctaagttcacagagaccagatgactatagccggggtgggggtgggggg

SEQ ID NO: 21317 - DNA, 1118 bp, Mus musculus
gtgtatatgtgtgcacatgtgtgcagatgtgcgtgcttgtgtgtgtgtgtgtgtgtgtgcgcgcctgtgatggccagaagagaatgttagatgtctttctcagttatgttccaccagcgtttttcagatgggatctctcacagaacccatctctcaatgcttcagtcacagactggctggtgagcgggccccagggatcccccagccgccacctccctagccttgagattacagatgtttgccaccacatctggcttttctatgtggattctggggatccaaactcatgtcctgatgttttcctgtcaacacttctgccaccaagctgttcccagctaagccatgcttgctttttgtgtaaaatctttttttctcttcaatagtgctcaattaacacgttcgcacccaggacgttaatttaaagccgtctctaacatcttcctgccatctagaagaattcatctttatatgccattttatttgctagatctgaagccatgacttcatggccacttgttaaaattgacctgaaaagccagtgggtgtgcctgtctgtgtgtgtctgtgtgcctgtgtctcttcgagtcttcccaagagcgtttctcttgacttctgctgggcagcaaagggctctagcaatcctgagtcacttttacttaatcagaaacagatgaggtgatttaagcattcttccatgtaaggacaagcctgtttgccacttgctgttattctgagccacagcttttattctggtagtttttggagctgtcaaactctgcctagccctcatgctgcgcccccccccccccccagttgcttctccaagtaataacgttcacctgcaggcacaaggcagctaagaggctgggcttgcccgtttgaccccacatccacctcaggtcttgggtctttaattctttgtcaagctgtttgttctgatatctccgggaatgtttttttccattcagttcagatttcctgtttattctgttgaagagctggcctgcatgcttgttctctataataggaaagagacagggcctttaagatcattgtgaggtaattgactcaagctcatcggatctctgaggtcttctctgtggtggggaaagtacgtt

SEQ ID NO: 21318 - DNA, 2088 bp, Mus musculus
ggggaggccccaagcacccttgaactctttccatgcagccaagaaacccccaaaccagacactgcccttgcaacccttccagctggcatttggccaccaggtgaaccgtcaggtcttccggcagggccctcagccctctaaccccaccgcctccttcccacctcagaagcagcagcagcaacagcaaccggcagccctgccccagatgcagctatttgagaactactaccccatgcatcaactgccttcgcaacagcaccaggactttggcctggcaccaggtgggccactgggacagacccacctggctcaccgcagcatggccccttaccccttttcccacaacccagatatgaacccagaactgcgcaaggctctcctgcaggaccctgcttcacagcccgtgctacctcagccccagatggccttcccacgtcgctcccgccgtctctccaaggagggaattctgccttccaactccctcgatggagctggcacccaacctgggcaggagcccgcgagcaatctgttccttcaccactggtctctgccgcagccaccgccaggcaccctggggcagccccattctgaagccctgggattcccgttagaactgagggagtcacagatgctggcggatggggacagactggcacccaatggtcgggagcgggagcctcccgccatgggtaatgaggaggtcatgagagcagggggcctcggggactgtggacagatgatacgaagtggggtgatccagagcacaaaacggagacgcagggtgtcccaggaggctaatttgctgaccctggcccagaaggcagtggagctggcctctatgcaggtgagaatgggcggcatctgctgcggtagtggggtgatgcgtataggtcaggttttattcagttatttaaaggaaatggaagctctttattcagagtacccctgcatgaggcacctgtacccgcagggacgctgaggttgccaagcacggtggttggtgggtaggaaagtccttgttggcttcttcccttggaacttgaggactcggagaagggggtgctgagagccagcattctaagaggcaagagtgtactggtagttgcacatgatgcttgtcaaaatgcattagctataatctagatgaggaagtcatgttgcaataaagttcttttttttttttttttttttaagtcagaagggaaggaagaccaatcagactttgagcacttgtgttaaccctgggttttaaattttattttatacttgctcaaaagtaactgatcatacgcaatagcaaaggtatgaatgtcacctgccccaggtttctgtaaggagctgagccacttaggataaacacctcccatttgatcagcattaactctctgcatccttagaatctgcaaccactgtcacctttaggccctggctgacacacaggaggctacataattttgagtctttgctccagccagatacctgtgagaaaatagctgcaaaccgctccccacccccactccttcatcttgccacagcgagatgcttggttacatgccgcaccccataggctagatgcaacatctgcaagccacctgtggactgatgaccacctggaatctgctgcttcaggccagggtggcacagccaggcagaagggagggggtggagaagatttgaaaggtataggaagagggatggcctaggaagtgccaggctgtcaaagaccaaccagtaagtggttgagttgctggcctgaatgggattcctaggtcagcaaacaggggctcaactcctgaacctcactgccaccccctctccccaatctccctcttacccaggatgccaatggctctgaggagaagcggaaaagcgtgttggccacaacttccaggtgtggcgtggagttttccgagcctgccttagccgccaagagagctcgggaggagagtgggatggtacccctcatcattcctgtgtctgttcccgtgaggactgtgggtccaactgaggtggcccaagtcggaggtgctgacgaggatgggactggtcttgagcagtaccccaccgagcacaagccgtcagtcatcg

SEQ ID NO: 21319 - DNA, 1170 bp, Mus musculus
attgtgtagacagtcatgtgggaaggaacagacctgggctgcactgtgccccagcctagtttatagtttaataggacaaggttctcagtttggcttttgctttcccttttccccgtttgacttggagcttaggcaacatgtcagccccacttggccccttggtctgtgtctttagagggttccgagttacacaaccaaatgcagcagacgagagtctagccaggaggtggtgggacaggaagagcgaggacacctgatcctgctgtcttgctggcagctgccccatgatccctggcccccatgagtgacttgaggcagggggacactggtgctcatatctaggggtcacgtggctaacactgtcactggtttttcctctgcaggctccaggacctggcacaggcaggcatcatgattagggaagtgtagctgagcgcaagagcctccctagaagaggaaggaccagcggacatttcctagctcttgcctgaaggctcctgcgttttcctctgcctctcttctgccctccctggctactggactggggccaggcttccagcaggacctcctaccaagggatgggcagcagctgaaggacgtctcactgccaggcttagtcggccacaccatgaacctccaggcccagtccaaggctcagagtaaacgcaagcgttgtccttttggggaccaggagccagccgccaaggaacagccaccaccactgcagagtccaccacagtccctcagagctaaggaggaacagtacggggcccacgaaggtcccacaggggtggcctccaccacccagcctgtggagctgtctcctcctaacaacctggctctcctgaacagtgtggtgtatggatctgagaggaccacggcagccatgttgtcccagcaggcccaagtaagctcggtaaagtggcccagctctgtgatggctccagggcggggcctggaacgtggcggaggtggaggcatcagtgacagtggctggcagcagcaacctggccagcccccaccccactccacgtggaatcacctgcccctctacggtggacccaaagggagccctcatccaggtgtgggggtacctccctactataaccacccggaggcactgaaggggaacaaacctggaggtccccagctggatcactatggaaacgc

SEQ ID NO: 21320 - DNA, 1099 bp, Mus musculus
gacagggtttggaggcttggggtgggtggagctacagagctctgggtgtgtcttgagcgggcaggttggagcttgctagaacaagggccaccagagtcggcccttggagagcagcttggatatgtccaggcatatctgggactccgttatcgaaggcatatgtgagctaaaaccaaattccagaacggtcaaagatctggagttcttttggtctgtggtcccactgaaataggacctcccggctggaggtttgccaaggtccaagaggaattgggaaaagaacgtgggttggggacctgcctggatgcttgtgagggatattcaggatagtttcatgtcttccaggtcaagcagtgctcattcacatgattagagtcggggtagcggtggagggcaggctgtcacatttccttggcacatggtggccattcataggtactctggttccatcttcacccttgttgacagttggcttagttctgatcactgctggtggctgaaaattaatttgctgcagaatctaagtagcaggtcgtcttcctgagctcaggacccgcccatctcagttccctaatttagagatcacgtgtttgccccacggtcgtcagctgcttggttcttttgaagcttgaaacacatttccatagaaacaatgctataaatggtttctgggtatctgggttcctaggctagcccacagagagccttggtatcgccccagaagctgccaacgtgaggcattagtaaaatcgagagcacgcctgcagcagtaagagactgtgtggggttagttaaatggcgtgggtttatttaggtaacttcattctttctgtgagaggtgtctttcaaagttgtcctgataaagttctggggtccttcagccccaacccttccccctcccttacctgtttgcatttcttgtcctcatctggatacctggggcttgagccaccttgcccctctgggaccttggcctaggctggctcctgatcttgtttaggaacacagcaatctttgtcatttaaaccgacctcctcagcctgacaggacaaacattacacaggcacagtttgcacggttcagacttctcacctgattg

SEQ ID NO: 21321 - DNA, 1193 bp, Mus musculus
aaatgaccttatttatgtatctttttttataccagaacaatactgttttgattaccacagtccaatttagaatagatctaaatttctttttagttgtatttctttactggtaaaagccaggtacatgttttccccaatttttgcagggggaaaaaaaaaagtctggagagatggctcagttgttaagagccctgactgctcttccagaagaccagggttcaattcccagcacctgcatagcagtttacaactgtctgtaactccagttccaggggacctgacatactcacacagatacaagcaaactagcagtacatgtgaaataaagataattaataaaaagaacagggtagagaaagagagacttgcatggtttcagttggtaaattaaccttgccttagtgagacctgtcttccctccagcgctgtaagatgaacgaggacactggcactgactacttggcaccgtggcagctggcgcaggtggctgatggtggaggaattggagttgtagaggagagcaagcaccagaagttgactaaaggcgattttgtgacttcgttttactggccctggcaaactaaggcaattctagatgggaatggccttgaaaaggtgaagtataatataaaactttatgattttttaaaaattaattctgcatctgtattattttgttagaaagggaatgacattttcttttaggtgatatgaaataataatgccaaatataaaaatataatgcgaataatacatataacagtgccaaaatgtggaaagcctttgtctttttttactttgtctttttttatcagacatcatctaagcacattatcatctcaaattgaatgtataatataaagctgaactataagcatacaaatatttaatactgggggctgaagagatggctcagcggttaagagcacttactattcttcttgcggtcctgagttcaattcccagcaaccacatggtggctcacaaccagctataatgggatccaatgccttcttttggtgtgtctgaagatagttacagtgtactcacatatataaattaaataatattaaaaatatttaatactaagaactagaaatcctccatatagttatatatgctaaagtttcctgagaaatagctaaatatatgaagaatgtgtttacttgatgattgaaagtcatctcatggct

SEQ ID NO: 21322 - DNA, 1286 bp, Mus musculus
atgagagactttaaaagtctttacccgaatgtttgtctgtacaccacatgcatgtctggtgcctacagtggagagtggctggagagggtattggggcattggatcccctggaactggagagagtctgaagccaccatgtgagtgctgggttctagaatgcagatcctctggtagagcaggagatgctcttagtgttggccacctctccagcctgtctgtacttaatggcataagtacataggatttcgggcagcattgggagtatttacagattgtggaacagtttggggtaggacgttttgggctgggagtggtctgagaagataaatgagtggttgggagtctccagagacaaggtttacatccagggatgatgtttgtgttctgccaaacaactaattgagtagcaagcctaacaacttactacgtgctgataaaagcttgtgtttattttaggaatttttttttaaagacaagagtctgttaggtagcttgctatgtaatccaggctggcctggaactcaaagatatccacttggctgtctgcctccgagtgccagtgttaaaggcctgtatccccattctgggcttatactttggagaactaatagatataaacatcactaagagtttcactgatgaaagtgagtcggagtggtcagggcagaacactgatcagtactctaggggctctgaggtcaatccccaatggtaccttcccacaacaagccccaagtaatcaagctccagaaagctataggattaagtaaattaaccaatggttatagacatgactattccagatatactgatgtatcacatttgttttcttaattttctcaacctttagaaaaataaaactggagatgttttctgagtatgacttatgaccactttttttttttacagtcaatatattttagaggcaaaacaaattagcagccactaaatcaaattttgcagcgttctaaccttgttttacatactttctctggaccccagtttttctttctgaacagttcttcatctcttcatatagtggtaactggtaaatctttgttttttaatcctttcttaaattttaggattttagctcctagtaaacatctccttgccaccccaagatttttgtcccagatactgtgtaggccagttgtccttgtcatggccatcctcaaatgggatcacagtcatgcttctcagtgcgcaggacaaactgtatcgaggaaatgttttctcccggaacattttgtaccaaaactatgactccctagctcatccagact

SEQ ID NO: 21323 - DNA, 1189 bp, Mus musculus
ggttgactttaggttattgtctctagaatgaccagtccctattcaaggcagctggagctgagatggtcttaccactcctgtactagaagcaatctcatgggccagcttagggtaggatagccagactcccagcacaggatgggacaggagtgttggggactccggctattcctttcctgtccagagatcccagtggcgttcatcttgcagatctcattctaactccagtgcctgttctttgcctaacttctctctctagttcatgcatccagaggctctgcttgaatacggctgttgctggcaccttttggttcagatagccacttagtcctgttggctctgtctggggtcccattctgtatggtttccctatgggggctgtgagtgggacaggctgagcagtttgatgactgcagtggttctaagacttagcagtgtcttgtctccacgcagattggtgctgatgggcacaagtcaggagtgaggcaagctgctgggatccagaatgtcagctggaagtacgaccagtctgctgtggtggccactctccacttatcagaggtaatctcttgagctgcccatcgggaccttgtcccgagcactcagtaccctttacaagaattgtcttttattctaggccacagaaaacaatgtagcctggcagagatttcttccctctgggcctattgctctgctcccggtaagtgatcctctggctagttagttcaaaggtagcttgccttagtcttaagaactttacttcttttcagcctgatttatcgggctctgttccaggaatgcactgcttccttcactcagtttccattgcttgaaaacacctgagttcagagagcaggttttcgttgctctcctttggctttcagaactgtccccaggctggcctgacactgccactgcctactgtgattacaggcgggcatgtgccaccacaccaggctgaggctcttcttttgacacagctctcggataccttgagctccttggtctggtccacatcacacgagcatgcagcagagctggtcagcatggatgaggaagaattcgtggatgccatcaactctgcctttgtgagtaccccttgtccagctgctggtgtgctgagggaaaaggccgtcaagcagctcctcttagcaagggcagagtctgagggcacagaggaaaatgcaaa

SEQ ID NO: 21324 - DNA, 1195 bp, Mus musculus
tccaggcctgggggatctgacgccgccttctggcctgagcatactgggcatgcgtgtggtgcacagacatgcatgtaacatgaaggcacaccagatataaggaaaggataaaacaatcaggaccggagagggggctcagcaaagagtgctggctgttttcgcagagttgggtccccagcacccatgctggttgctcacagcaggtacccgagaccctcctgacctcctcaggctcctgtattcatgtgtgcacaagccacagcaaacatgggggtcagaagacagcttccaagagctaatctctccctccacaggggagattgacctcgggccctgatgcttgtgtggcaagtgcttttccctgctgagccagtttgccagccctgctcttacagctgaaataagcagggctcctgggaggttctccatggggcttctgccctgtttctccttttgtcaccttggctgtttctttatgaagtcacctgtcctctctcttgcagcaccaagcatcactcacttcctttcctttctctctaggaacagattatggcctttgcgagcaaatgagtgcttctcttctggagaccgtgatgacaaagaacacctagccctggggccttcccaatgtggtttaataaatttacactagaacttgtgtctcttttcctcttctgattaaccggcctgtggtgccaaaatagtgacagctaaggaaaaacccaaaggaaaactatttaattaaaaggagctttttattactacacaaacaaaggaatctccaagatgttctccctcacttcacttggcaacagacctttctaaataaagtacttaaatgctggtcataaatttatataattatcttgacagagtaagaattagaaatacctgatacatttttgttagactgttgttttaaaattaacactggcatgccagttaaatacaaattgctttgacaaagtacactggatttaagggggacacgaagataaataacagccagatcttattagtactgctatttctccttccttatcacggctccacagttcagttttatttatggctcctctctgggataccattctctgtccagtaataaaacaatacacgatctcatcgcacgcacagctgcagaggcctcagcaaccagtcagaaggggctcagctgctgcacaggtcctccttg

SEQ ID NO: 21325 - DNA, 1189 bp, Mus musculus
ggtggaaaatcggaagcacgagtgtcaggttgtgattcacacctcctgaaataggagtctatccataagctaggcctgaggcctccctaagtgtctgtgggccagccgtgacccgaaatcctgcagagggggagagcctcagctcctctactgtggccggcccgtcacttatccaagaggtggcatggcgacaggtcctcgaagtggtaaaattcatcagggtgctaacacaatcacagagtcttgactccagttggaaggcacaattacgtgttcttccttggcctagttggtagtaagctagatgggcttcttagggaatcctcacgcttgtgtttttgtaagaaaatagcaactccatgtcgagttccttctctggtttcccaggaaaaaggaatgagtgctgctagtgttttacctcgggaagtgaactagagtgacttacagaacgtaggggaggtgaactaagacgtacagaaagcagccaagtgtgatcatttgttttactgcccccatggaacccagatttttgtatcttttctctaggtagaggagatcttcaagaattcacctttcctggtcccagatggcagcgttagcatcatggatgggtcctatgaaggtggggcagatgatgagatacacacttgttgggaaagagatggagtcagtgcaagatccagttaaagggactgggggtggggatgcatcatgagaggaaggggcgcaaagtaaataagcggggagaccgcgagagacgtgagccccagagagaagtagaacagaagaagggatctggagtgtaaaccttctttttctctcctgtaggcatactagcctgggttaccgtgaactttctaacaggtaaaacaacccttgaagtttctcttacaaccttaactggcttttacaggtagaccaggagggtaaaaaaaaatccacttctcttttcctgtactgttctttgattgagagaagggggtggggccagagaaatggcgagcagttcagtctattccttgtcagttcccagcaccactcgggtggcttacagctgcctgtgactcgggctccagggccttagctctgtgcagccacactcggctgtatagacccatacacatacccagaattaaaactggaaaaaaccccttctttaaaaaagaagaggggagagagacaagctaat

SEQ ID NO: 21326 - DNA, 1286 bp, Mus musculus
actaacatgtaacctagttttacatatcttagcattgtgacgactgctctctgctcaatgccactttcttctgcgtgattcatggccactgtttaattctatcattgtccatgttcttgtgtcttaaaatacttctcaaggatacctcaggatgaagtgataagttagcttttagttacatgtgccattcttcatggtttgcctcgacaaccattaaatcaatactccagccattaatgcagatacaaatagatccttagataaaatctttccacaaatgattttgacccagaaatcaaaggatctcccatcatgaaagtgaatacactcttgccttaagtaggcttaacctattatttgccaaattttgttattcttcttttggcagtatttctcattagttgatactttttaatgaaagaactcttcatatggaataattgattaggctactagaaacatcaaagtttcatgctttgacagtatccagtcaccttattcaacttaaccagttattcagctgcctttaagcttgcttctctgataatctaaaccttcagtcagaagagactgatgtgctgaacagaacagtgtgtctgtctgacctgtctgaagcctgactttctaaactagatggctatggactctgcttaatctttagtgcttagtgaggtgtggcgctgtcattactgtgctctgttctgtatagccatgtgtggacagtgctgctccagtccattgtgggtttagtgagttaaaataaaaggtggtaaaaaaaacctggacattccctactctttggagctaagattattaaagtaaccagccctggcagaattcagagcttcagtcactttaacaaaacacaactctgattttcttttgttttccatcctaaagctaagtagacatttatactttgtgactgcaatgcattttgttttcttataaaacacagttcacattaatttaatccaacaattttgggctgggttgaaaagtggttattatctaaatccaagtagaatttaatcacagactcctaatattttccttagatataaaggaagttactttaaaaaaattacaactaatccaaattgtgttatttataatcataatcaacagatttgaccagctacttgtgctcaaaagggtttcttgtttcttagatgaaatttatatttggttgcatttgggttaatatcattaaatgagaaaaccagcattttccctttttgtccttatatgtctttgctgaattttgtgagcttctatactgatta

SEQ ID NO: 21327 - DNA, 1153 bp, Mus musculus
ctgaggttaaaaagtaaatgctagggtttttttccaactttggcacgttcttgcagaagtacaagtctgggagagaaaggagtgtaaaactgttaggtcaagggcaagagatgatttggttggtgtcttttgtggcacacacccttgtcattccagcactgtagaaggaaggaagactgcaagacagctgtctcagtaataacccaaagtgggctggagaaatgcctccgctgttgagagcacttgctgttcttggggaggaccaagttcccagcacccacatacatggcaactcacctgtaacttgaattccagaggatctgatgttctcctggcaccagttgtggacatgcacacacatacacacatgcaaacattgtagacaataaatacacttttaaaaacataaagaagcatctttattgttttttgaggtttgttgttgttgttgttgtttttctagacaggaattctctatgtagctctggctgtcctggaactcactctgtagagaggctggtcttgaactcacagatctgcctgcctctgcctctcaaatgctggattaaagccatgtgcatctttgcaaatgttggccaatttgccaagttttatgttttgggctgtcttgcttgtagttggagaattaaatgctcagtattaactatacagtagaagcagagcccctgagaatgcctgtcagtctggagtagaactgcagtcattggttggagagataaaacagggaaggtttgtcagattcattttaaacagtagttccaatagagttgatggacgttgatcccttcctaggctttaaatttaggaatgattgtgttcatggggaaataaaagggcatattctggtttttggttgtttttttttaatgtttagttattgataagctggagattccaacctaacagtatttcctggcttagataaaatattaattcctttgttttgtctgctggcttgtgttgaaaatataatctgagaagaaatgacattgcatgagactttataaaagaatacaaagtactttgctgtgggtactagagaaataatgacattgacatatataaatgaaaagtatctccaaccattacatctaaattaatagtttgttaaaaggtacatttttatatagct

SEQ ID NO: 21328 - DNA, 1128 bp, Mus musculus
agagtggaaaagttctgatgggggacattgcatggcctttcaaacttaaagcctttaaacccattctctcgatacctcaaagtttccttttatctaaactgattttgttttgtctatgactgttttcctgtccttgatgttaaacattggggtggtatatagctcgtagtttaataatgataattactgtttattcttgtctaggccttcagtcaattcatgagtaacaggtatagtgttttcttgggcttctctagttgttggagggctccaagcctctgctgtttaaaatagtcaacaccagccacatgtatgtgtctgttcaaagtaattaataaactttagaatccccagccgcactagcagacgctcagtagctacatgtaactaactagtcaactattactggacagcaccactttgaaggttaacaactgctctacgatgatctttgctttctctatgagctaagaatggcttttacatttttgtaaggggttggggacagagaaggttgcaaaacacaaagtgagtctgacctcaaagcgtaacatatttaatgttttatgctttataggaaaatgtactgaaccttggacctccctgatcttttttgtccgcgggccccaaactcagctttctgactaagttaggttaagagctaccctgtgccgttagaatagtgtgagtctattaaggagggctatagacagaattcagagcagagttcttaggacgagtgatggaggagtgactatagagtgagacagaggacaagtgtgtttcctggttctagcaacttggatgagcatttaaaatagataagatggaattacccactgcttaagcgttgtgaatacacagctctagtttagcaggatcccattctgattctgtacactatttgtgtctcctaactactaaattcttctgtcttactctgacaggaatgtacttctacatgattttattttatttttagtgctggggctcagtgctatccttctgctcctaacttatgttggtcatttagggaagaacaaagtaaaaagttgtcaatagtcttcccaacatctgagagatatgtgtgactctaacaatttttcattaaatggaaggctcacaaat

SEQ ID NO: 21329 - DNA, 1166 bp, Mus musculus
catatcttttttacttagaaaatcctttatgctgtaggtaatgctggttttcacaggtagcttctacttaatgtgtgtactcaacattaattaacatactctttactttcccgagcactaatggaaatactagattataaccactctaatactctgtggacattccaccagacactttgcttaatgtgatttaaggcagtgtgtaatcactccttgcagtctttgggccagtcttcaattcatgagactcatatatcctgtctagttttaattaattttgcaaggaagatgccaggagagacagtgttaaatacttccatagaaccaggttatttcgtccactgggttcttgtcagccactaatcttgtagctttatcataacagaatatagaagagtttctgctatagtttctagtcttgtgcttcagtttacatgtgctggagtagccttatacttaagatagtggtactcagaatagatatttgagaatttcttagagtaattgctagttttgtttgtttgggcttgggtggtttgctttgctttgttttgcattaggacttggggaccagctataattgatatcaagtgctccacagtgtcattggtaggacaaacgtaatatataacaattgaagaacacgtaaatggttataaactaaaagaagacaggagcagaagagtccagtataccccctgccccctggggggaaaaaaaaagacaactcaatgtgactaaggagctgggagactcctcttttattaatatttttgttttgatgtcttccagttactatcaggttttttggtttgtgtttgttcgtttttgaatttgttataacctgtccttgaaaggtggggagacagttcatttggtaaagtgttggcttgcaagcacaagaagctgagttcaatccccataacccacattaaaacaaaacaaaacgaagtatgatggcaaccccttgtgatcccagcactggggaaaggagacgggagggtgccatgcctaggatttgctggccaattgctctagccaaattggtaagtttggattcagtgagcaacctggcctcaaaaaataaaatagttgagccagtgtgatatgtcagctcatgtgtatggcgcacttacatttatacggtcaaagagtcatttatttgt

SEQ ID NO: 21330 - DNA, 1126 bp, Mus musculus
aaggtaacagaaggaactctgggtagtctgttatatttgtaagtaaaaaagtgggcaggcacggttgtgagagtccccacatgactgaagacaaggaagcctgattgactggtgtgctagccagtggtagtggcatttgtcccctccttcctcctctcagccgcttatcagatgctttgcttatgtgataagaacacaccccatgaaagtgtcttggcttaactacaactctcgcctattttttttttttttccaaattgcatatgtctgctaaattctgaaaatcttgcccctgggtaaaatcgattagacctagtctctcacattttgaagagtacagcaggttccttgaacattgtagaaagaaaagctctgtggccatcgtccactgggagtgtggacacaggaaaagtgtggtcaagtttgtggtcttgtctctgttagggcacagtactcttggggtccacagcaggtcccttgactgtttttgacatttgtgtttaatgctagaattgatgttggattttccccctcattaatggttctgatcaacacaattttactttttgaaaggaaaaggcagtgaaatatataccataaaatatgaatatgagaagaaatatattctgctggggtactccctacaagggccaattggttttaaatttaattctataattgacattttttaatctcactgaatgcagttaaagtgagtgtgtactcatggtgggaacaatgccataatgtcagttgtccttcttcactctgtttttgagagttgatgacatcaggcacttttcagagtttggggaaattgaaaagtctgtggagaatactgagctagctcccccaaactaaagcaagtctataataggaagccaggagttggtgttttgatctgctacacctcctcctcctatcatcctattcaccagcacttaattaatgtaagtagatgttttagacttgtgctatttattgtttttgtattgtcatccttagaaatgttaatagtgtatttttatattgataatataaactaatgtatagtatgtatatgtattttataatgttagagaatactttgtgtataatgttgtgtctctataataaatatgtccct

SEQ ID NO: 21331 - DNA, 1157 bp, Mus musculus
ctcttactgcttactctgttgtcttcctcttacccctcactctcaccctctctctcccctctctttgtcttctctcctctcctctctccctcttactctctctagccttctccccacctctctcttttctaccttctctctttccccctgcatttctataataaagctctaaaaccatagagagtctctgctcatcaagatccgctgcgcactctggtcagtgttgggaacctctttcctcttccctctttcccataaccccagggctttagcaaggtagctctggggctccccaggtagggttgccccttggccaccccctgaagaatgggatagaggaatgcccacccagggatgagtggaaagggtaggtggcaaccctcccaagcctgactgagcagagtataggtggaactctggtgaggtgtgggcctttccccttccccctcctcccctgggcccccccttttttgtcccaacagaggatgaccttgacctcctgaccatcctgcctccaacccagtgctatgattacagtcacggaacctggtctctgtggtgctggggactgaacccgggcttgtgcggattaggcaagccttctgccaactgagtaccgtttccaacccaaggctttaaactctatctctggtctcagcctccaagtgcctggcttgtagccatgcccattgtctgctttccaggtttattacgggtctttgcggccatgtggcagcatccgtcacagtcacagtcaccagcctctttcccctcctctgactggaagcgatgaatttggaattgttgcagccattagcctacattccactcagcatttgtgtgagcatgcgtgtgtccgtgtgtctgtgtgtgtgtgctcgagtgtgtctgtgtaaaggttaattcattttgagataggatttattttattttatttttagtgtttgtttggttagtttttgagacaaggtttctctgggtagccctggctatcctggaacttgctctgtagaccaggctggcctcaaactcaaagatctgcctgcctctgcctcccaagtgctgggactaaaccatcaaccactactgcctgacctttcaaaaaattattattattataaacaaataatatataaaagtttcagtcactatatagc

SEQ ID NO: 21332 - DNA, 2126 bp, Mus musculus
gctgttcttacagaagacccagggttcaattcccagccccaagaggcagctcacaaccatctccagtgccagggagcttggttcccttctctgccctctgtgggtatcagggacacaagtggggcacatacacacacattcagacaaatgttcatacacataaaaaatgtttttgtttttttttttaatgtaagcaggaaagaagggggaaagaaatagcacacttagaagactacgttcataaactggactaggttggaggataccgttgactaacagggctcactcttctgagcttaagatcacaggtagtgggctaccctaatctggcttcaaggtgatagataggacttaaaaagaaccggaattgaaagtgcacgcttaagccaattatggataaaaatcaaggttccagtttcattttttccaattctttttctcttttccagataaaactggtggtggaatggaaacttgaagatgacaaaaagaataatctcttctgctgggagatcccagttcagatcacaagctaggctccttggcgcctgtgtctgtgtgggctgagaggccatggacggagtgggggggaagaaacagaaatcagacccgaaatggaatcagtgccatatgatgaacagaatttcaagaatgctgttttatgccttttaacctccaaagcagtaactgcaagcctactactcttgagagcgcgctcagagccattgtcccccgagatagcctctggggaggcttcgggagggaaaggggaaactggaaagattagattggtgtccatggctgtttgctgttggattacaggcaggttccaccagacaggatgggacggggttgcttagggatgtcagataacttgacccagggctatggatccactgtgaaggatggcttcccagagtcttctggctgcctgggggtgttacctcccctgtttctaagtgcctcctgagtccccagcccctggcttatcagtcagatgagtctccttggtagcctctgccccatcgcttcagcagtagcgactagctctcctcggtatccagactggctgaggggcagtctgccgcagaaatttgtctctgagtggctgtgtctttgtggttagctctcgttctttggtagttttcattaaagccaatacttggttgcaggtgcttggttttgttttttaacggtatttgtctgtatcctctctctgcatgtaagattgagcctccccataaattctaacttgccactcctgcgtgtgtgttcagtctgtggttgcctacttcttccagatggcagcctcctaggtccatagcaggcagccacccagttccgaagctctagagaagatgtgactcacaggactcacgggcaccgcctctttcctcgtttttatttataccagctagactttatccatagaaagtggccttgttctgcattgctgtcagtgtgcctgaagcagcaaccaccacctagcaccacttgaggaggcgtggtgacggggacactacgcgccctcatggggaagcctagaaaggagagggaggaagaggctgtggctctatggaggcaggagggatgtgagttccaggccagtccgagtggcagcatagtgagatccatttaaataaagaagtaggcccaagccgacaaggggcagaagggtcgtgagttccacaccagcctggacttaaccactctgccgtcccacccttccctgactcaatttcagttctagaaggcaacagaggcatgaagactgctgcaagttggagaccaaccccgtctacaaaatgagctcaaggccagcctgagctaaaggagacctagtctcagatggggagagagaacatcatagcagataacagttccctttactatatctcaagatgactgacaggtatggtcatggatcatagtttttggtagggaatgcacacgctgtttttgagatgaggtctgacgtatctcaggctggctttgaactagccatgtatcggagaaccttgactttctgagcctcctgcttctacctcaagtgctgagattgccagtgtaggcccccattcataaaatccgaatagcataggactggaggcttgcgggtttttttt

SEQ ID NO: 21333 - DNA, 1264 bp, Mus musculus
gagatttgatgccttcttctggtgtgtctggggagagcaacggtatactcacataaaataaatgaataaataagtgtttaaaatatatatatacaccaaggttccaccctaagaaaaaggctggactagtttcagtccgagcccttaaataatccttctgtttttttttacgttgaatctttctgcttcagtccgttccgtcccagctagaagtcctaagcagtgttccatgcattggagaacaagatgtacacctctgggctcagggtgttgtgtgggtgtttgtggtatttgtcattcatgctttcctcttgtcttttcagggtatttgaacagggtggggcaagagtggtggttgactctgatagcttggccttcgttaagggagcccaggtggacttcagccaagaactgatccgaagctcattccaagtgttgaataaccctcaagcccagcaaggctgctcctgtgggtcatccttctctgtcaaagtctgacacaatgacggatgaccctgagattgccaccactgcaccagtgtgaacaacctagaatagtagaattctagaggtttctttctcatcatgtccggctctcatcttatttaatttaatccagaagtgtcttattctaccactgtaaattatggaatgtgaagcttttaactcttggccgaaatactctcccctcccccagtacaatgtcaaggccacatccaaaggctgttacctcacctgtaatcactggttggaacccagtataatttgtagcacctctaggactccaaaatttggagttaacctctctagccttcagaattgtttatatatctgtgtatagctatatataaaacatcattataaactaagttcttatcgtgttttcaatcaggatccagtttgggtagcttgaataccagaattgaggccaaaattggttagaaaggcaaacaagatattctctgctgtctctctctttcttcttccttccttccttccttttttccttccttctttcttttttctttcaacagggtcttataggtagctccagttttggactctcaattctcctgcctcagcctcttcatgctggaactgcagacatattactactaggcctgggttgttgtttcttctacttctactacctctactactacttcttcctcctcctcctccccctctttctcctcctccccccctcctcctcctcttcctccccctcctccttcccccctcctcctcttcctccccctcctcc

SEQ ID NO: 21334 - DNA, 1170 bp, Mus musculus
ggtctgacaagcttgtgattctcagtgatagtgaagtgctactgggtatataacgatcaggtgtataaggtaggactgaaaattactcaatggtaaattatccccaaacttgaggactgagctagtatttcagactcagtaggaaatctcttttttttgagtcacggtcgctatgtagtccagtccaggctagcctagaactcacagagattctcccacctctccttcctgaatgctgggattaaagtcatgcatcgtcatgtgcttggctgcagaggcatttgaggatgagtccgttaatttttcagaacccaaacgtgacagttttggtttgtctcttgaagatgagtttagacagagagcccaggcattgggccaccagagcttcctgcctgcctcacgtttactccatgcaggatgtgacagatgagcaaacactttatgccttggtttacctactagtcactgggatttggagttgatggagagaaggccctactccagggtagagaatttctaagaggtgcagggagtggtcatggctttaaaatctacatggaggagcttttgtagagctatgagctaataacctagggaaagaggctgccaagtttggaatgatccctcataaagaacacaggatacccttgaggaggtaactgaggggtacgagtcctaaaattatttttatctctacgttggaaaacccttagtcacatgcaaatgggataattacaatgaggtcagacacagtcctctgatgtttatctggtaactgtgtctgcagagaaagactcatttgaataaatgtcttgtctatactttccttatatgaaacagcaccggttagtaaaggccaaattcctggagcacacttcactgaaaagcatacaatttcaagagtggcagaagaagggaaacaccggtcccctgacctaccagtgacaccatggttctgttaaagctatcagcagggtcagtttttgtggtgaggggatcttgcacccccccaggatgaattcatcttgacaaacccccgcttttctcctgcactgtttgttggtttgtcagaggtggagtctgaagctttctatcctctccaggctgagtgctccctctctctagaactcccactcagagaagctgccagggcattcctctgcccatgag

SEQ ID NO: 21335 - DNA, 2827 bp, Mus musculus
gaggtgcacaggatgctacagctggccatcagtgagggttgcgagggctttggcatgctctgaccgctcctctgtcacctgcttggctcccaagctctctagagcatctggacacatgttaacaagcatagccactgaccttaaccacaaccattagccagaagatactgcatgctcccttgtgtctggagtattctgtcatctgcaagccctgttcttacctcacctgtccacgttcaccacaggccacttgagcacgtggcacctatctgagctctactcagtcatgagaggaggaccatgctgctgtcacttcgttggtcccttgaagatctctgtgaccggatctgcctccgtggctgggagacattcataacacagaggactcagttctgttggaaagccagcatgtgagacccttccaccatgcctcattccagccctccttgagctcactacttgaccagactgggtaatgcatcacctcttctcatcagtggtcaggagaagtgcagctagaaagtggcccacacaagccgtctgatttgtcctcccacataatggcaggcacaggccatggcactggattagttctcatggggactggtagtacaaaaggatgtctttaaggtgacagaactggaaaagatactccctgtgggcatttttaaagatgatcattaatctataaggaatttgctaagctttctcttgaatttgagccagtgagaaaagcagtcagaagaatgtgaaggatgtctgcgctgcagcctccagtgctgggtacgcttctctcgtggggaagggccgtgtccaggcatgtggatggcttgaagactactgatgctttcctctgaattgttctttgcactgaaggaggacttggactgacctccgacttacatagtttgttaagagctgtctttagcattctgctggaagaattttgggagcaacagactgggacagagcctgccagctgtggtggtgatctttggcagtgctaaggcaaaggagcggtgaagccactggggacagacaaggtggagacccagcagcagtaaatacctagcaattccaaggacttggtttcatcagttaccaggaagtgggggaaccatggagggagaacgctatattgggttcacagttacatggtgatcaaagagaacttctcagtctccaggaagatagcatcttttcatgagtgtttgaatgaaaacaacacgaaggctcaatatcacatggatttcccagtttctgtctttaataaggctttcctacaagccactattttccatggggcactcactcagaatattacaagccattttattgccaaaaccagcaagtacaccgaatcctgagacaaggcagttcttgtgacagtgccttggcctcctggaagcagtctgagccctcctgttcccaggatcacgagaaacaagctctcctgagctgctagaaccctgcctgacctcctttgcagtcatcatctgtcttttcttggcgtgggtgctcacctcacttatcctcggggtttgggacctggcatcaggacctctccacccaggatcctccatgccacatggtcactgctctcctcagggactgggacaaggtgctgccgcctgcccacagttttcccaaggaacacgtacaagatcatttagccactactctgctgcctctcagcctctgctggggcttccagctgggtacatggctgcttggccgtttggggcggttcttcctcctaggttctgcaatccaggctccagcacccctctgcagactacacagggggtcagtgtgtgtgtgtgactagacctctcattttaagctctagtcgtagcactttttcagagtctcctaggcgctgttgcagcccagctggggcagctagcatgccaggttggtctttaggcaccagagtctttaacaaaaaaatcctctagtactgtgtggttttctattcttccagttcactctcctgactgttcagaagcattttgctctcttttgcattttcttttaccttttttttctaatactgctttggtactagccagtgtggggaagagatacagtatgttggacagataaaaacatgtgttatttcttggtcaattttctattcatattccttattttggccagttcttttgtttgtgctttgtaacataggtacttgggagaccagctgccctcctggcttttggctttttggtgtccttgaaggagaccagtcatgagtaccaaggaatttgtcagcttggttctagaacttagcagaggttgagctctgctgcacattggcagaccaggtcaggatgtctgcagttggagatgtaaatattttgtacagtaaataaaatgcctacaataataaagagctaaatgagtgtttgagtggggggtgggacaatgcttacatggaagatggaaaggaaaccgtttagagatgctttatgtgttcttggaagcaggaagcaatctgctgtgaacagagtgtgtacttggcgccctggcttgtctccaatacctgtcctaagggtcacactgctcactgtagatagcaatccagtggggaaagtgtttgttctcagagcctgaggaaggaaactagtttgatatgaacaatatctattatgtctttttgtttttgttttttgtttttttcgagacagggtttctctgtgtagtcctggctgtcctggaactcactctgtagaccagactggcctggaactcagaaatccacctgcctttgcctcccgaatgctgggattaaaggcatgtgccactactgcccagcttatctatt

SEQ ID NO: 21336 - DNA, 1151 bp, Mus musculus
tgtaccatggcacaatatttacaatgcttttaacatttcagtagttcagtcttgctgccgattggttgaagtatgttagataatgctgccatgatttctacatctagacctgaagtcttccaagcactgctgccttaacgtttggtttttgataggtgacatgggatttgctaatgaccgagagtcactgttaaaaacaaagtctaaggcaagagtgccttgaataatcttacatggagaattttcttttcctgctttactgtcttgagtaatatcttttgttttacttgtagatttgatggtcctcgaagatttgaggatttagggtcaaggtgtgaaggaccgagacccaaagggcctcgttttgaaggaaatcgccccgatgggccaagacccagatatgaaagtcacccagcagagggcactaaaagcaaatggggaacgatccctcggggcccagcatctcaattttatataactcccaatacatccctaagtcctcgacagagtggaccacagtggaaaggccccaaagcaactgttggacagcagcatcagcagcagcctaagcagcaacctaagtcacaagcagaacctctttcaggaaacaaagagccattagcagatacaagtaataaccaacagaagaatttaaaaattcagtcagctgcgttttccatttccgcagatgtcaaggataccaaggcagctcagtcaaatgagaatctaagtgactctcaacaagagccaaccaaaagccaagtctcggaagggcccgtagagccctctaattggaaccagaattctcaaagtatggagactgaaatggacaaagcagaaggtgttactcagcctgtatcccttgcaaacaaacctgtacctactcaatctactttcccctcaaaagtagggagcatggagggaggagccgcagcagcagcactgactgcagacgatttcaaacctttgggtgttggtttgtcccactcagaaaaccaccaagaaaaagatcttcctcagccagacagcagagaaaatagattagaaggcaataaaggcagcagctcatcatatagaggtcctgggcagaacagagtggaagagtcacgggataaaggactagtaaacagaggtcgtggccagataattaa

SEQ ID NO: 21337 - DNA, 1137 bp, Mus musculus
ccctttcattattctggatgctatcaatgacagagttagacattttgatcagttttggagtgcagcgaaaaccaagggttttgaggtatagtcttaactttgaagcacttttagtgtgaatttgtatttcttggcctaattgttacacatttttatttaggtgtatttggctgaaatgagtgctgataaccagacttgtggcaagagaaatattcatggaagaaagcttaaagaaataaacaaggtgatttttagaaacatggtatgctggagaatcccagacatcattctttcagcactagtaatgctgtcttaagtcgctcagaaatctttctgcctgctttaataaatgttctcctttctgtcttataagtggaaagggatgcctagctcttcttaaagctagtctgttaaagttatagcattagttgtgtttctcttgacactctccttagtctttattggagtagttgtcagagttaacttgttctgaacatctcaatagatggctgaacactgggaagttgcacctcgtcacatgatgcgtctagacatccgctccctgctacaagatgctgcgattgaagaagtgagtatactctgcctcagggcagtgcagataagcaacaccttcttcactgtgaaaatctgaaacttccagaaaagttacatgagcacttacatacctttaaataatctcaaccaattcaggtgttaatatttccacacattttaataaacaccttataaatacttagtaacattatttcataccattactatacaatcatatgagaattgtgttgaaaaacctcataacccatcagtccggaatatgttgttgatggctatcttctaagaacaaggacattctctaataaatccatttaattataaaatttaaggtaagcattagctgggctaatggcacacacttttagtcccccaaaggctgacagatctgagtgagttcaaggccagcctggtctacaaaatgagttctaggacagccagggcttatagacctgtctcaaaaaaacaaaaaggaaaaaaaaaagtttacattgatatgatactataaattaaattcttttgtgtttttatttacttaaccttctcttcccacaccccctaggc

SEQ ID NO: 21338 - DNA, 1157 bp, Mus musculus
agtgagccaacactttcttaaatgcttatgcaatcctttttaaaaaatgattattggcatattgtaggtagagatggaagattttgatgctaacattgaagaccagaaggaagaaaagaaagatgcagaagaagaggaaagcgaactggtaggagacagaccaaccactttgagcaaagtgtctctttgttattcttaaggagtgttatattcagatctgtagtttgattattggtgttaatacacactctttacagtaaagcttccgtcctcatcctcctggaggctatgtacgctctttatttttccctagtccaagaaaaaaatgttgttagggaaattttaagagtactaagaaactcatctttgtactcatctatctgtgggtggttgtaagggagtagacttttcaagaaagtaattacatatgaaagggcttttttccattccagcaggtatgtggtatagcctacccaacatatgcatactcttacctctttgctgtaagatctcaaaactgagttctgttaccttgaggcagaagaacttactgaatgaagagccaaagggctgtcactggctgctggatttgttcttgttctctcttgttaaatgatggcaaaaatgactgtgtaggcaatggatttttacccaggctgctgagatacttaatgatgtgagtttaaagttctgtgtacctcctgtaagtgcattgattacacctctgtggagatgtttcccttactctgtcactcaagaagtaaaacctataaaattactgatgcttcagtgttggctaatgaggtacatagattaacaatgcctttggatggtattgcctttaaaatccacagtattgcttggtttatttgacatttcagctcttgctaaagttgcttctccttacttctcttaatgaaaatgtacacaccgagatccctgattcctattccctaaagcatagtctacaaggagtggtctctttaaagccatgtatgacattgaagattcgtggtagaaattgtgtttatatagcattggtgtcgacctctacattcctagatgtcttaaaatgtggattaaaagctaagctttaaaggtaatgataattgagtctcagtatgttttttaatagtctcatttttcttaatcaggtt

SEQ ID NO: 21339 - DNA, 1198 bp, Mus musculus
gatagaccagaggatgttcaagttgcagagtcttctcagaggcaagcccagcgctgaatctgaaagacaggccacagcccacacggagccgctttctaaataccaaggaaaccacagtcggtgaaactaatcttaagggcagacactgttgtgttgttgtatcttggtgcccagcccagtccccctcccccacacataatgggcattagtaactgtttcatgagcaagtagaaagaactgctaactcagaggaaagagtgagtctgctgactttgcataagccgggaagaatattggacttagctcctgcgtataattagtaccgtttggaatggtagtattcattgtgatctttagattatctgtcactgaaatctgtgactcatagaactaaaaggatctccttaaaagggctcaaccatcttaagggacaggatggcgctgattcttctaggctggtattttgtgatagagtactttattacattgactactagagaatgtttcaaagcttgaacttagatgcttcaggccaagggaaagcccatccatttgtatacatgggtgaaaacttgtgaaagtccaaactagggctttagctgttctggtgggtagtacaggcctgccatcccagctcgttgggagattgaagcagaggaagtgcaagtttaaggctagatcatgcaatttcagtacacctagtctctagactttaaaagggtgggatgcatcagtagcccccagccccttagcactggctcagctttaactgtatcctcagccaatcagatgttgaagaccatgggggtcctcttgtttaatttgtccttgtgtatctattaaaccttgatcagggtttctagaatggctgcagtagattttgaaaacagacttaccgttattgatttggggttccccagagatccagttcacagttgttggactctaatacaactgaccattgaaaagcgaacaacggcttattgttttgtaaccgtgtcaggtgagccctgacatttcaattgaaacatgaattgtcattataactcaatgcaaattcaacagttgttgaattattttaacaaataacagttggagttaaattattttaacaaaaaatttatttaatgaaaaaaaaaagggtaggatgcaggggtgggttggggagcacggctcaggagtaaagccgttgccagcg

SEQ ID NO: 21340 - DNA, 2180 bp, Mus musculus
gaaagtagctcctacaggcagccacaactgcagaacaaacctctgtgggtaacagtagctgtagagcacagtgtagcttacttgtgtcaaggcggttttgagtggcctgtttccttgtttaaactttggttctaaatctcagagctttgctcaaaagaaaataaacctaagttatccagaggcagcagtgggaggaaaggttttgcaactagaaccattgggtgggctttgctttctcacatttccctcagcagggctttgtctctgatctgctggatacagatctgttgacctctcctctctgcaggtggaagttcgacctatgatgtatgtagccctgacctatgaccaccggctgattgatggcagagaggctgtgactttcctccgaaaaatcaaggcagcagtagaagatccaagagtcctcctcctagacctttaggaggaagccacacatcctacctatcgatcatgcaggaactgaaaaccactcttctccctgtaccctcatcaatcccaggttagcctgatgacaggcaggcacatactattggcctcaagcacggaagccagggcacgatgtaaccagcgttcacaagtctgttcttagtgttccctcgaggctctttctctctccctgagactcttatcttctgctatcttggacctgagagagagtgagagccttaatggatgctcattaatgttcctgcctttattccagtcctctacaaaggcaattttgcttttctccagtaacagtatgctatagggataccaccagggaccatgtgatttgagtttctatcttaggaaagtgttctccagagatgcctaggggatgctttgcctccatcccagctgtgcacactctgacttgatgccacctgtgtggaggtattgaacacaggcaaagaggtgctgctttgcttcttaaatgcaccatcattctgacctgtcagtggcttcaaggtgctctacctcttccagaaagcacaggctggggtatttggggacaggcaggattgtgcagcatcccctgagcttacctgttatagtcacaggtgggagttgaaccctggcttgccctctctggctccattgtatgctggcactgggaagattcattttggcataattacgtacaactgtcgtcataccaaccctttccagcttctaggaatcgttctaggacactgttgtcacttaaagcagattttagcacatcatggcagtggggcagcctgacgaagggactgttctcacaagatcaggctgaagagagcttttaaattccaggtggtgtgagcatgttctgggaagaggctgtgctctccctccctgggatgtggcctgtggggagcaaggtcttgttgcctctggtgcagggcacagagacaggggagggtggactgcggtgggaaccagcctcaggagttaggacagcgacgagatgatggtgtcatctctaagatcaccctcaggtgcaggtacagttgttggaatattcttgaagcatggtaaaatgcttaagtggttttgagcgctcctaggcctcgtatcctgcactgagcctgagcctgctgacagttgccgtggccattagtgctgaatgcccttttttcttgtaatccaagacaagctggggggaggggaagaggtcagtattgagtgcctgcagcatctgctactacatctacaccattcagaacttgtaactaaaatatttaaagagactgattttgaatgaaaattaaagggcaaatgttctcaaacagggctccgggatctgtgctccttttgaccctcgaggctttacagcctccatcattgttggcaaccacaatgtcgttatcaccgaaagctactacttcctcctgagttggctatcttggtggagctactggtggacgcaggatctttgtatattcttatctctgagcagcataccaagcccccatcccatattttaggcatattgcttttaacagccagccaggagagcccactaatgtcttagtgccctgggttcctgtcagggggccccatgcccctgagaagccaattcttgagaaattgaggctcccacctatgtgaatccccttcaaaacaccaggggcagtttccctttgaagggcttgcatcatttctgagatagagtggggaggcacgaacactcc

SEQ ID NO: 21341 - DNA, 1335 bp, Mus musculus
cgcataaatgcccttgaatgcctgtgcttgctacctccaaagtcctggggaggggcttactgactgggttagcgaggaaagaacaccctaggaactttggtgatagtagccccaggagggggatatctccctctaggatggggaagggctgcagtgattgactctctccccacagctgctgcagtttgagccccagcggcgcctaggagctggaggtggtggcaccagcagactcaagtcccatccctttttcagtactatccagtggagccggctaatggggtaggaggcggggaatggacagtgtggctggcccagttctcttgactgtctaccagctgggctggcccctcccctcagtggacttcaggggaagcatgtggcgcagcagccactttttctgctcacaacctgcttgggcctcagactggtgaagctgctgcaagggcagagaggtgcaccccgtcgagcaacctacgctcaccagccaacagatacctgctgaccacacagcttggacctttagctgggacctagcatctcaaagggtgccttctgttgctctagttccaaactgctcaacacccattgagccgactgatgaatctgggaacactgccatctgtacaccacgtagggcatctctggagacatctcaggacactgaacctctggctcagtagacccaaaccaggactgtcctggatccactttagtcatgctaccagtgggctgctacaaccagatgccgttcctacagaggtccgggtgctgggagggtctgtaggaaagtctgtagggtgaagtggggagaggtgggacacagtgtgagccactcgccactcctgacccctaacttctgatttctgactttggagaataaaatcaaggcaaagagaagccagtgtgtttaagagcgggataagaatgcggttgtaccacttaagacggagtttgaaaacagaataaagcgctttattctctggctggctctcctgtgtcagaagagctcgctccacaggaccagcagtcagttcttctcaggtgttgttttccactctgcattttggtatgagcttctattcaattcaccgcctactgacttttagaatgagatacatatggaccaattttacccagtgccttcagaaaggtatttctggtctctgaagtaagtggtatgtccaaagacagccccctccctaggtctgagggcttgcctcaagacaacccagttgctgggccatgcatggtacatgcaacaaatttcacttgaccaatccccagttcgtgtgtgtgtgtgtgtgtgtgtgtgtgtgtgtgtgtgtgtgcgcg

SEQ ID NO: 21342 - DNA, 1170 bp, Mus musculus
aagtacaaacaacagagccactcctaccagttccatccgaagactgctgtcttgggatgggttaaccagagacactgttacgggatgccagaacggcttcaaatgtctctgccactgaatggcgatctctccgcctgagctccacatctgtgaaagggttaacactcctgtggtgtgtggcgaagggtgaatgagacaggacctggcacaaaactgggcacctgagctggtgcttggcaagggagacacctgcttgctggtctgggtatgagcaggcttgcccaggtgctgtttcttggtgctgttccttgtccctctgggtctgaccctctctctaggaggggacgccatcctcacagcatcctgtcctctgacttgtctgtgtttggtttctggcaggtgatgtcatttcccggaggtaaccagccactcagaggagagccccacacccagctcacgtatttattaccgtcaccctctcagaaccctccctgctggtacctaccctctatttattagccgactcgtccctgctgaatgacgtgccccctccaagataaggggcatggaaggacaagacgctcaggaattcagtgccttaaaacagaacgagagagaaagaaagaagccagccacggatctgtgggagcttcggcttgggaagaagcaagacatggacatggccttacaaggggcaagccgcaccccagaggccctggctctccagggaactggagaagagaagaggaggcctagaacctgccctgattcccagctccacccagagagcagctctggccccggctgcattgaaggcatgtagaggggacccagtctactgtatcctggagatgggacaggacattcggctctggagagcagagcttgcctgtggagtttgcccttcagcctagaagtttatgcttcaccctttgcaaaggtcctttgtcccctctctggaacacaggcagagtggcctggggctgagcagagggcaggctggaggagcagtagcccgtggactttgaccgatacaagtctgggttgtgtgtcttcgtggtacagctacgggaagtgagccgactcctggagggcccttgcagcccaccggttgtctctgccgggactaactgccaagccagattctcttgaataaagcattctagtctg

SEQ ID NO: 21343 - DNA, 1343 bp, Mus musculus
tagaaatcaaaaccaggtcctctggaagagcggctagttagtaccttggccagtgagtcactgctccagtcccaggtttgaattttatgtgctatgaaaagacatgagagaggttggtttaactggtatagtttgttctagtttgaggcagtgtctctggctgtcttctcactggccgtctacctgactcagccactggaaagcgttagcgtgagaatcacaagttgaagccacatctcccggtttgaactctgccacaactgtctagcattattgaactcacactctgtgacgatagagctggatcctcagtttacccctagcatgtgattgtcttgcaggagacattctggagaaggtcagcgtccactgtcctgtgtttgactacgtgccccccgacctcattaccctctttatctccaacattggcgggaacgcaccatcctacatctaccgcctgatgagcgagctctatcatcctgatgaccacgtcctctgacacggcctgccctatgcggacccagagtggagtggagacacagcattgctgctacagtggggaggggaggccagcctgagccctcagtgtctcctgccttcctgctcatctccagtgatgagtgcgtccaggactgctcctgccttccaggcttagctgagcagcagggctcgcttacctggggattttggagccactcaggctgtgtttgcttcaggaacttcaaccttctagctcagtagtgtgctagacatgccatgactactttgctgggttggtgtttgctcagaaatgccttccagaccttttgccaataaaagctactggaaactcctcaagttcgtttattgttctgagctctgaatggactgaagcgtcagagtggccccttctctgtctgcatagaggctgtggtcagagagggaagcctaaaacaagtacaaataaaagcagtttctccgtacaactaactggaaagggccccaaacatctttttggtatctacagtaatggctttaaaacttgagcctcaggctggaaagatggctcagtggttagaaacactgactgcttttctagaggtcctgagttcaaatcctagcaaccacatggtgactcacatccatctgtaatgggatctgatgcccttttgtggtgtgtctgaagacagctacagtgtactcacatacatgaaataactctttaaaaagaaaataaaaagatgagcctcatggagcttaaaatacaccaccttggggtctacttctagactgccacatcagatttcgggaagaagggaatcacttaaagcttccttttctgacgaggctgaggactgattagt

SEQ ID NO: 21344 - DNA, 1192 bp, Mus musculus
ggcttctaaattatccaaactaaaggattctgaaaaagagatgcaaaccgtggggatgacaggtcatactagtgaacttccagattcaaatcccagttggaaagataatagccagtgcactaggttagacttggatttttgtgaattattaaaaaacaaacttgaaaaaatagagagtgatatgcttccaatggcagattctgccacagaggatggtcccatcaataaaaacagtgaactacatcctaacaatacaacggatgacacagagaaaccagaaactcctttgctgttcccctgtaatgattctaaaatcagcagagattcagatgttcttatcagaacttcagaacaacctacaggaaaccctgactctgtcggtaaagtgataatgagtcaggtagaggatggcattggcagccaaggtggagtctgtccccagggtgatgaatctaaggcaagatcttgttccaaaaatgaaccaaacgcacactgtatggattggcagcagcattttgatgtaaccctgggaagaatggtttacatcaacagaatgacaggacttagcacattcgttgctccaactgacgaccttcatactgcttgtactaaagatctgacaactgtggctgtggatgtcctgcttgggaatggtaagcatgcaggactcattggtgtgaaatgtttttgggaaagagaatagtggccaaagagcaatataatttttgttcatagaggtgacctcagcagatagcattggaagactgtgcttcatatttttttgggagggggggtcaaggaataatgagataaggtcttgctatgtagtccgggctggcctcaaactctctttgtagccaggttggtcttgaattcatgatagctcctgcttctagagcctgtagaagtaaaggtatgtgccatctcactcagcttctgaaggcaagtttttaagacctctgctgtggttaaggaataacacagtaggttcactgatttacgagtgacactcataagtcactcatggagagtcactgggtttaacaatgtttaaatataagaatttagtagctccccctcttctctttctgctgcctcctcctctcttctctcccaataaaacctcttccacaccgggggaaagaaaagaatttagtaaagactgataaaagatgtaaatgtatttacatgt

SEQ ID NO: 21345 - DNA, 2352 bp, Mus musculus
cattgcacatctggatggatgaaggaaaatataaaaatggagtgggctgcccagggtcctccagagagtggaaagtattcatgccctctcagaagcctggagtccaagaaaacttagtggtagcgtcagtctagagcttattttcaggaagttcagttacttcgtgcagctgggtgatcatgagaaagctcaggttgctttcaccgtggatgtttgaagcttcagtgaggagcagagaaagggcaggccctcatcacgacggccggactctggggctacagtcagtacagggtgggggtgcctccctccaagacacaagatgtctacaccctcctcggggagtatgtcgagctgtgggggaaagtcaagggggaggtaacccttcctacagtgccttgccttgctatctgggaggacctcagtgatactgccctttggaggtttctctgtacctctagcatcgtggccatctgaatgggatgagcagccctgggcactccctgtctttgtctagtcagtattttttcctttggtgtgttttggagccatgtcatacccagtaaatcagtatcatctttgtacttgagaagcccaaagccagcaccaaatccttggggtcacaaaagcttgacagatagaacctgccgagtaggaggggattggcttcaagctcacatctgtgttcttgttgagaggagcagccaccttctccaaggacagtgtatgtcctagaagagaaaccttctaggccagcagttgatagtttcccttaaatgtgagccttgcacttccaccaagtctaatggattgcttgtgtttgaggccacagcagctcctttgataagtaccatatcctctgtactacacacagctaaattaatattgtttcatttaaccaaaccccccccccaaaaaaaaggttggctatctctcttaatattgcaggaggacctacctatgcaggagaaattttgccatttccttaagctagtggtatagaggctggtgctgggaggaagtcccacctctgaggatgggcagctctgtccagtggcatcattgatgtcccttgttttctcagttctgagaagcacagtacagtggtactgctttcagcactgaggcttattcctagaataggggaaagcccaaacctgacgtaaggttacaagttctaggggtctggcagtaaaccctgcagagagttttggttcagtttggtcaatgcagctttggttttcgtcaggactggctggcctttcaaggtcctgtatccttacgcttaccatctcagcaggcctgagaggcagggtttaaggtgttcagtacgagcattgcttctgctctggagctgaggggtgtgggcatgttgctgactgtggggtgacagtgcatgctgaggcaggcaggaatcctagggagccgtgctcaagtagagcatggcggcggttctctagtatattccttcgggaagtctagatttgctattactctagctgggaatctaagttctgtgccttagagacaatttgcactttccagaattgtgcctaggacaaccataagatgttctcccctaccaaacagctatgcaaacaaaaaccagttcaaaagtcacaaccatgcactgggttgagtaacagtcaagacagcagaaatgtcttcaaacggttttctatagctaaatcttcgtaaattgtcctgtttatcctctatgcagtgctctgtgtttgaagcttgccggtagtgttgctttgagttacagtatagcctgcgtttatcctctgtgccaacacttggctgaagagccagcttattgttagcctgaagctgggaaggatgaggatggagtggtgtggcatttctgttttaaataaacgtttaaactctcagcgagggctgtgtttgagtaagcctgtctaccacctcagtcaccaaagacggaacacccacagttcgaggccttgggaaatctctaattctgtgagtcttctataaataaataactaaaagtgttctttatacagaaatgacacaagagacattacacggaaataatctctgctgttttccaatctcattcttgccagaaaaaaaaagcaaacaattttttccccagaagtttgtaaaaatttagaaagtgcagaagggggaaaagccattaaaggaaggattgtcagcaggtcaagagtggcttgctaggcactcaaggtgaccagagtccaacctacagagtccacacagctgtgtgtggtctcacacactggcgtgtgcatgcctgcactcatacacaccatgggcctacataacattgagaagaatcagagttctacacacctccttggttctcat

SEQ ID NO: 21346 - DNA, 1211 bp, Mus musculus
agcacattccaacaggctgtaaaacagttaaccaaaagtcatacgaaggggaactaaggatttaatataagtgcaaggacagaagataaaatactgactgggtttatctatataaaacttcacagcctggcagtggtgcgtatgcctttaatcccagcactcgggaaacagaagcaggcagatttctgagttcgaggccagcctggtctacaaagtgagttccaagacagccagggctacacagagaaaccctgtatcaaaaaaccaaaaagaaaaaaagaatcattattagggctggagagatggctcagtggttaagagcactgacttccaaggtcctgagttcaaatcccagcaactacatggtggctcacaaccatctgtaataaaatctgatgccctcctctggtgtgtctgaagacagctacagtgtacttatatgtagtgaatctttaaaaaaaaaaaaaaaaaaaaaaaaaaacttcactaataacttagtcacaaaaatgatagtttttcacttttagtgaacctgttgagctaagtagtgaaatgtttaaccagataatttttgttttggttttttttttgttttttttttttgagacagggtttctctgtgtagccctggctgtcctggaactcactctgtagcccaggctggcttcaaactcagaaatccacctgcctctgcctcccgagtgctgggatttaaggcgtgcaccaccactgcctcgctcagataattactcttaatggatatacatgtaaatattctccgctgtaaacttcttattcaatttatggtttaaatttatgtttgaagttctagtgaatttttgtaaaaaaaaaaaaatggatgcttgcataagccacgtgatctcttcttctaggaaggtccaaaagactaggaaacattgtattggaaggcatagcattggaaggcatagcattgggaacaagggcattgttacatcagagcaaaggagagagcaagattagaaggagaatgcagagtggagtaacttagaaattataaggcaacttaaaaaaaatgagcaatgtgcagaatgcaaaggggaagaggaaaatagaagaagctgcagagagcagaaggagcaggcaggcttctccttaccactcgacagaacaggtcttttcttgatagcaaggcaggcttcatcttactacagaggacaaagctttcttct

SEQ ID NO: 21347 - DNA, 2957 bp, Mus musculus
cagtaccatcaaggcacagctgagctttcttgccagaactgatacttttggtatgagagcacatgggcaccacctatacccaacaagtcaatgaggactttaatgcagtaggatttggactggttttgcaacaagattattaaagtcgcctatggaaagaaaacaaaataaaacaaaacaacaaaccggggttacctagataacgccaaagccagccttcgtcctgggtcgcccgcctcacaggatctgtttgagctgtttgctttttctctcccacctgctcatcgccttgtccttcactctagttctcctcccaagatttctctgactgcggtcagctctttcatatcagttgtctctttggtttccttgtgaaaacaccttgaacttctcttggtccttagatgaaatgtttacatagcttctggtgatatccttcataattttatgtctcctaaaagggtcatgggtgggacacattaaaaggtgagctttgaactgtagataatctcttaaaaaaatctcattttagaccattaaaatgtttgtgctcaactgcttgaagtccttgtgtatgtgtgtttagttctgtccagtttatcacttgtagatcctgtcgatcatttccaggtagagtagttccatcccatggtcttcatttgcagtgttgcagctagccactcccttctccacccccccccccaccccccccccgctctggctccctaatctgctgccctgttctgaactctaactctgttatgtaaatgggtcatctagagtgtaacctttggaggttggctttctccactcagcataattcccatgaggtgcctctccaaggcggtgcacatcctggttttcctccaggctatggatggtactgcattgtgcttaaaggtcatgtgggtggcctggggattgggcctaactattaaagttcttaggtgaatgtaagttttcatcactccgggataaatacctaagagggccgttgctgtgctgtgtaggaagcacatggagttctaaaggaagcctccctgctctgtctagagtggctgtatggcaggttacagctctacattctctgtggtctttatcattgctattttaacttctccccttgagtggatgcctgtaatatctcattatggttttaatttgcattttcctaatggcagatggcgttgagcatcctttctcattcttgtcgtttgccatctgtctgtccttgtcagtgagatgtccgttggtggcttttgcccatttctatgtgggtcatttgttcacttcactgttgagttctgtgtgggttcctctatcaaatgggttgttgcttgaacttttcatataacttctaccaggaaaaataagtaaattttaccagcccttcatgtatggtcaatcactgatctaactcctgttcttcagtgttatctctgagatgtggatatacggggtttaacttggacatctgggaaagtcacagatagtaaatacttgaaatatatatgttgtaaaatcaaagccaaggttcattcggtggaagttttaggtacctcaaggcagttctggaaagtgtaccccagtttacagtgcctacctaccatacagaaggctctgggcctgattgccagtggcgggggcgggggtggggtgggtacaaatgcttgtaaacaggaaaaatacttgtttatcatctaaagtctttcccacttctcctgggaaagtgggtaaccttttaaccctgctgacctgttacagggcttatctcaattgcagttctgagaattacagggcttgcagtaaagaagtggaatattgaagttaccagagaataccgttaggatgacctggatgaagtatgcaggtggatgggaaagatgtagtggttaagtctcaggctgtgctgttaaggttccagttactatgaactcaaaagcctttgtcttatgacttccataaattcctcttgcatggcatcaagtgttctctggtacaatagtgccatctgctgttgaaaaatgatctaagatctaagatcttagaatacaagtcctcaccatggcaacagcagatggtcagaaatctgtaacattcatatatcaagtgataggagaacaatgtaagtatgaaaagaataaactttggggtcaaaatccatttgtagacttttaagtgcaaaaccatagcctgtctgtcccattagcctaacaagagactcctgttttctgacgtgtgccttcccccctaaggagcagtgacagccgctctattagatttctattttcttttctgaaaaatgtcaatttttcagagaggagaaaatagagcattctgtccatgtttttgtttccaagaacaagtataaacttaagctctgtagaactgaaattctttcaagtcctttcgatcattttgatcatgcccaaaacaaccaaactggacaacatgcttttcagttcagttgaagagcatttgcctttgacagtaggcgtgcacaacagcatatccgctttataaacaggtatattatctgcttccctccgttccagcatagtcaaaataactgagaatcatacagtttcaacaaaccttgttccttaccattgtcatgaacccccatcagagccatcttctgtttgttaatgggaagaggcatgtgggatttatacaggctcacctgttggagatgtttgtgtaaactttcacaaataaaagctagcagaaaccatttgaggtgtatttgtctgttaatctttagtgcccctttgtctgggtgagcaaggattcctctataattgttgttttttaaagcacagggagtgaaaacagataaattaaagaaaaaaaaagtcactgatttactgcagggcacttaagcaaaaggatgttttaatcattatgctaatgaaagaaatcttgagcagatttcctcagaaggctagagctttgag

SEQ ID NO: 21348 - DNA, 1221 bp, Mus musculus
accaggtgctgagaccaaggttgacccgcagataggggctgtcccactccagggcccagcttgaagagcacctgagccagagaggtgccaaaccaggtagtagcctcaggcactcctttggcctctctgccaagacccccacccaggggactactgagcagccaagaaaagccatgcattgcaaacacagtgtggcccgcggatggaactcagcatagactgcaatccacctccccagccctgcccaagcccagtggaagggggtgcactgtggggctgcaatggcccagctggagttggctgcggcacagaggcgcgggcgcccttccaaagcacatacttaatcaatgaatgtttacagactggctgtcctggcggggcttccaactgcacacggtttttatactttctttctttttctttctttttttttttaatattttttacaaaaaaaaagattttatacaagcaatatatatatatatatatatatatatatatatggatttctataatcactcgatgtgacacagtacaaatatgctatggtctgttatggacatccacccaccagttaaggccattgtaattcctaagtactgtaggctctgggtgttggggggtggccaggcgggtgaggtacatttccatccttgtaaccccttcctagtacccagtcctgtatcgttcagtaaacattgctcttaattacccagctgcctcgagtggtgtctgcccaggaagagggcatagtttccatacctgcccttccaggtaagcctacatatggccatttcacagatgaggagcccaaggcctagagatgttaaagaactctgcatataccattttgagagtacttgcttcatttatttaggccaagtttttttttttttcttttaatagtttgtgtctgggtgggggtggggtgagtaaagcatgagtgtctttgtgtagatatgtgcagaggttagagaatttggatccctaggagctggagtttcaggctgttgtgagccacttgatgtgcttcctgggggttgaacttgggtcctctcttctccagtttccttttgagtgtaccaggcactgcagtgagctggggagtaaaccagccttggtcttgcacggtggatcccgcaataggtttattttgtgcttgcttgtctcaaacctgtctcccttcatctatctgcgtggcagccttttcaaagggcagct

SEQ ID NO: 21349 - DNA, 1269 bp, Mus musculus
cagggtcttctggaagtcttctctggtcaaatctaatctttattaggtttgaaggagtccatagcttttcttctcttgttaaaacaaagataaaacctcttccccaacataacatatttccttccttccattctgaagttaggatatctttaatataaacaggctgggttagctcagcgtttttttttttttttcctgtaatccaatgtctctcaacagctgttttgtttgcttgtttattttgttgttcattagcatttaaaaaatttaaagttgggctggtaagatggctcagtggttaagagcactgactgatctttcagaggtcctgagttcaattcccagccacaacatggtggctcacaaccatctgtaatgggattcgatgccctcttctggtgtgtctgaagacagctatagtgtactcataataaataaataaatcttaaagaaaaaaaaagaaaaaccaaaaaaaaaatgaagttagtaaaatcttatgtaatttttctctgggggtctttgttatcccttttcatttgttatgcatccctttaaaaactcaattaggtctatggccataccaccctgaacgtgaccaatctcgtctgatctcggaagctaagcagggtcgggcctggttagtacttggatgggatacctcctgggaatgccaggtgctgtaggctttttggactccctttgccgggcgtggtggtgcacgcctttaatcccagtacttgggaggcagaggcaggcggatttctgagttcgaggccagcctggtctacaaaatgaattccaggacagccagggctatacagagaaatcctgtctcgaaaaacaaaacaaaacaaaacaaaacaaaaatacaattagatctctctacaactgcttgtcctgtaggattgtgtgggatacctgcaatatgctttctattgtagtaggcaaaaatattgcttcattttactagagacatatgctggagccttgtcagttttaatttgtagggtattcccatggttgccataacttctgttaaatgtgtcattacaaaaccatcctttccagaacttaaagctgtgcccactgaaatcttgaatacgtgtctacggtatggtgcacatattttaatctttctaaactctgcaaatgaaacatatccatttgcaaaatttaatttctttgggggacctttagggttactccttccagttaacggagtttgattatacaaagaacaagcaggacatttccttataattccctcag

SEQ ID NO: 21350 - DNA, 1214 bp, Mus musculus
tgctggtcgggctccggtacctagaggcagaaccagtatccagacagaagaaaagaaattgaggccagccttgccagctctgaaacatcgtcttccacctccactgtcttcttcattcaccctctatccttaaaccatttctgtttggctgcatccttaactccttcatctaggttcagcatcttaagctttcgagagggttttttgttttttgatcttaaattttggtttttggggtttttttatgtttttaaattttttaaggtattcataagaaaaattacttaacatgtatgtataatttaggagtcatttaaagaaaatactcttgttagtccttcaaagtcaaggaattctgagaagccccctaatgtgtcctcccctagctataacccctctagctccttttccagtcttttgcttttctctgcattccttgatctgttgtggtgggaacataactgtgaagccgcagctgctgcctgcccagagcagccgcgggcaagggctgcttcaaggtcctgagcacatagactgggctcctttctattgctgggcccaggggacaggcagttcttctgagaaggactgccctcatgagcaggaccaggctcctcttttatctacaggtggatgaaggttggaagagtctgggctgtttttagaccttttggtcaattgtatttgtgtaatgcattttataataaatagggaaaccttctattctgatccgtctgtgtactttggcctttcctaataacccttttaccctccaaactctttacccctcacaggaacatcatagcctgctttaccttcccacccactgttgtcagtaggacagttcaagactgggaaagcaaggctgcctccagttcctcattgtcagcttgataacttgtgttcttgatgcctaatctcttcttcctcaccgtcaggactcccatcggcagctcaacagttatggccctttcccgttttcttccccaaaaatcagattcttgagaacagctatagcaagtagaccaaagcagcctaagtcagacagctgcacgagcgtgtaaagcaaggtcagaccaggcatggtggtgcagatctttaatcccagcaacttgggaggcagaggcaggtggatctctgtgagtttggggccagtctcaaaaagccagggtgtgagggcaaggctaatgcctccacgtgaatctcaaacagaa

SEQ ID NO: 21351 - DNA, 1220 bp, Mus musculus
ggggaatatttataaacttctttgagaagcattattcattaaaataccccaggagagcaaaggagaaaggaaagttatttacccaccacagggttcatttacattggatcagaaagcttcaaatatctttccccagcccatttaaactctctccagaaaggaatgagaggagagacaggaacaccaaatccatggcttggtcatctaccaaaatgtaccagagaaatagaaaacacccaaaattctggtgccactcaggcagtggcattctactgctgacacaaagcatgttgtcctgtgatgaacaacttgtaaaggttagagaactgagcaaaaaggtcgagatgtccctcagtgtactggcatccagaagggtaaatgtgacagcctgctccaaaccaaactgatggcctgccaaggagtactggcacccctccgtttccaggtctgtgagacttggacctgcggtggtgtatcgctttcctcgagcctctcttctggtatcccttgcagtcctctctgaagcagtccttggcaatgtagatctgtcagcaacacagccctgagaaagctcatctcttcacctggaattctggaaaaaacacagtcgtgctgagctttagcttgccatcttctggggagacatgccaatgatacatggacatgggtccagagtcaggcatggtctcagaaccagcctcccttgagcagtacagctacgggaaagcgtcgccaagcaggcccaccagcctggtgtctgcagaaactatcactttggttcatgctaccctctgcagggggctgccttccttgaacagagaagtagttcacgtggtgaggaggcccattccagcatcagacttgtgaactggtagcgagcagagatctctgcagccacagttactgatgagcagcagtacctgctgcaacagacccaggtgccttacgtaagcaggttggagagacagacatgatggactaaagaagatgcactgtgtttgcaaaatacttatataatgctgagaaaataccagctgtcctcttcaaggagtttgtgcagagggtatcaggagcagaagcccatctaagacccctccccctggctgccctaggcacagttataatcagacagagacattgctgttatttgtcttcttagagtctatttttaccaatataatataagtatatacattatattaactgtattttctttattc

SEQ ID NO: 21352 - DNA, 1105 bp, Mus musculus
aactctatttatttacaccatggataatggtcagaaacacagtttgtttttttatggaaagtaccttaggctttgtcaggttctggattcaaattctgacttcatttactagctgaaccccaacttctgggcattaattgcctcactataacttggagctattgtgtgttttggaagagataaattatttgcgggttttacacatggattctggagggcatgaggctagatcttagattttacaatgtaagtggtgaaaacagaccaccatccatgaacaactaggttgatgcctcagttttcatcttgctgtgcactaagagggactggacagcttcttttgcaccttggcttacttgaaagtatcacagctatggcgttgagaaactctcctggcatttggattttatcatgacagctcaggacacgatctgtttgctttaggggatgatgagcagagtgattggttttatgaaggagaatgtgtccccggattcactgtccataaccttctgcccaagtgggctcctgatcactgcactgaagtagaaaggatggactccggcctggataaactctcagaccccacgttccttttaccttcccggccagctcaaagaggtgagtgtggagatgatgaaagtccagggcatggctttatgttccctgtgggaagatgcagcgtgctctccctgagcacttgcacgcctttgaccatgcattgctctctgaatcgtggagttaactcagggttctaggggattcaagggtgagtctcaaagctcagagttctcttctcctaagtcaatccatgtaggcttttgggacacatcaccagtgtgtgctgcatttaggaagcctggtatcagtcgcagacacatatcatggcaatgctgatgcattactttttgagtgctcattggaagcttggaagattggctcttacaagggacaggcttttgtaaggacattcacatgcaagaaatgatggcattttttaagtggatggtttaaaaatacttatttaaatgtaattgtttacatttacgatcctcttagtgtgtactttgacacaaatgcgtatcaacttttttttcagttctaa

SEQ ID NO: 21353 - DNA, 1256 bp, Mus musculus
gttgatgctactttgtcaaggtgaggaggaagtgagtgcctggagctgctggggaagagccacatttcccaaaagtgtcatctggagcacctgccattcagggctgtgcttgacacagctctctctttttgtatcagctgagtgtgttgactgtgaaacacatggtagcgttgttaaatgctcgctgccttggtcatgtcagagagaaaaacctctccttaagacagctagcaggtgatccggtgcgtcctctccctgaagggtcattatccctcccagggagtgtaagcagtgtgttcccccgagagctacattcatttgggaggccactctgtgactcttcagcagtgaggtgggcaggggccagaatgtgagtctgtttgcaaagggaagcctgaagctcggtggctgagaatgtatcagctgaccataacaaaaatggtagagggggtgcagaaagagattgcaggatgagaagagtaacaccaaaccctgtccccccccccccccccccgagtcactctggtcacaaggtgacttactgtaactgactgtcttatgggcgtctcagctgcatccacagaagacagggactgtggcactgttacatagttcaaaggtgaaagtggatgtgtgtgtgccgtctgctcctgcagtggccagtggaacacatttctactgtcctgagttgggttgagggagaaatctactgacgatgctttttaaatatttccaaactggttcactggtcttgatgacggcttgttgagacctccacagttaggtgcagaggtatcccctagctttcctctgtggtacattgtggtatactgcctggtccgtcgtcctctttttacctgggatttaaagtagcttatatatacatatttatttatattttaaatatctctctgaagccatgccaatattcagaggtgaaggcagagttgcatgctttactccattgtatgagtgagcccacactgaaacaacagacgtccctgctaggctgccctggttatataatctgttctttctcattggtgtcccgagtcagcctaaggcccacacctaggaagcgctttcatgactgtttatcatctttgtttgtcatgcatttctacacatttctggatacttctgacagggatcatccaagactacagcatctacctataatgaatgggaataaagttatttaccaagaaaatagaatattaagcacataaattctttctaaaacagggttgtaattt

SEQ ID NO: 21354 - DNA, 1144 bp, Mus musculus
tctttattcttttgcctgtgtggttggtttggctctcaactgttacacctgtttagaacatgatacggcttttctttcccatcttaaacaccaattaaaagtacctgttgccaaaaatgtcagcattactaaataactatcaaaagtctcttggtagtgctgggcctggtggcacacatctttaatcccagtatcagggaggcagaggagttcgaggccagcctggtctatatgctgagttctagaacagccagagctatgtagagaaatgctgtcaaaaaatgtcttgatggtggctcatggctcatgcccccagcagtgccaaggtggaggcaggggcattctaggctggcctgaactttgtagcaagactttgtctttaacaaccagttttaaaagcctcctaaagttttaataatgcaatttttttctacaaggtagtttatggcccttgaatcttcaaatattataaattgaagaatgaaagaagacagagaatttcaaaatagcccctgggtagctttttaaacttaactacatcgtattcttgccgatggccgatgaacaacagctgaacaaaatgacaccaccccagagtcatgtaacagctcctcctgcccagtgtccctgctggtgcccctcctggtagcagttactgcaaagcagccattcctaaccctgttaaccccagcctctcagcaactgatctcactccccccccccccccgtctcccaaccgcactccttctcttgcccaggtcggttgccttctcccctcttgatttgtgcattacttgagctagctgtcatagatggtgttgcatttttaatatgctcataagctcttcccttcaaacactttttcttaactctggacacctgcctttcactgaagtatgccccctactctacctatgaattctcttgtctattgaagcagggcttttaaatcctggacacacatgacgatcaactgggagttttagagggaatgatggttcagcaggtgaagggcatttgtcaccaagcctgataatttgagttctgcccctgggactcacaagtgtccgtcctctgccctgtacagatacgtcgtggcacatgtgcacaataaatatgactttcttttcattaaaggcaaaac

SEQ ID NO: 21355 - DNA, 1195 bp, Mus musculus
tattattattattattattattatatggaaaaataaaacaggaaaatacacaaagaggctcaaaagatggcaaagcaatcaataacaacatccttatatggctgctttagtcttttgaatgcccgctcctctcatcatcagaaatacaccaggggcaatgtcgggcacagctcacccctcaggatgagagcagtggtcactcctctccttcaggccccaggggtgctttgttcccactcccctaaggagtgccctcagcttgcttagctaatgtattcgcaaaccaaattagggggtccctggctccaggggaggccccccagtctgcttgctctatgcagggaattagatatcatctcatgcccaaatgcgattaggcccacagtccccaccccacatgcaaaagcccgctttctaatcagttttatgaggggcctctgcagatagacactaatggtattgagctgaaatctttactgagagcctgcctgagtgaagtctggggagataaaatggccatgctggatcaagcaaaagcctgttgccagcccttgtccttcctcttccttccttcccagccttcccttccctcacccaaacctgacttcttcccacagtgtctcttgtcacttaaggttgcccaccagaaatccaggaagggacccagtagttaatcaggatgttctttctccaaaatcttttgtttggttgtttggttgtttggttgttggttggttggttggttggttggttggtttctgagacagggtttctctgtgtagccctggctgtcctggaactctctctatagaccagggtggcctcagagtcagagatccacctgttcctgcctcctgagtgctgggattaaaggtggacatcttgactgtctggtgtcccccaatactgggactaacggtgtacacctccactgcctgctgtcccctaaatcttttgatctcacgattatacctgatggtcatttgttgactgtgtggcctcagataagaacttgattttttttttcctgatcttgcagctgtgtaactgaaaactgggaatatggacaacagggaaaggaaatagaatgttctggaacaaccattctcagccaaagtgatcttattccttttccctacactataggttacactaaatcccttctcacttcctgatggctcctcaaagctgtctg

SEQ ID NO: 21356 - DNA, 1160 bp, Mus musculus
actgtcttaccacgtaaatgcatttttttttaaacataagccatcgaaagcagaataatataaggacaactgtattcttacacttcggaagaagcaactggcacagagtaaggaagtaatgtatccctggctcacaaagctctgcctgcctctgtccccagtgctgggcctggcttctcgcttctcgttctttggttttttgtttgctgggagacaaggtttcatataccccagtagccaagggtgtgcgtgtgtgtgtgtgtgtgtgtgtgtgtgtgtgtgtgtgtgtgtgtgtatgtgtgtgagagagagagagagagagagagagagagagagagagaggaggtacaggggcagccatggagctgggtgggttgtgttgggcatagattgagtgtgcttcaagatgagtgtgcttggggctggtgagatggctcagtgggtaagagtacccgactgctcttccgaaggtcaggagttcaaatcccagcaaccacatggtggctcacaaccatccgtaacaagatctgactccctcttctggagtgtctgaagacagctacagtgtacttacatataatcaataaataaatctttaaaaaaaaaaaaagatgagtgtgcttgagacacaaggatcagagaacggcttcactacagggaagaggaaaaccagcctcctgcggtcctgaggaggtctaaacagaccggtggcagggttctagaggaacggaagctcacagtactagtaatgactagctcctgtgtgtttgcacatcctcctgtggtgcactgcggaagtcacaggacaactggcagggggttagttctttccttccatctttacctgggttccggggatccaacccagggcatcaggctttgatgcaagcatttttacctgctgagccatcttattggtcctgaacatccttttgtctcaaccaactcacagctttttgcaggaaagaagacagatctagataaagctgttgaatgtcacacaagtcactcccctaagctctcatcaaaggcagcacaccccccaccaaaagagaccctgacaaagaagcccttgaaagtttccatcccactctgagaaagcacaagccaaaaagtaacagcaaggaacagttctagaagtgaaagccaaagtatgtcct

SEQ ID NO: 21357 - DNA, 1099 bp, Mus musculus
tctgcttttattcaccctggcagggaggagcctagtgaatcctaccaatttcagggagttcctggggctactttttagttgtttacctgcttaaggaacctccctgcaggagggaatggtttgtttgtttgtttggttggtttgttttgtttttgtttttgttttttcgagacagggtttctctgtatacagccctggctgtcctggagctcactttgtagaccaggctggcctcgaactcagaaatccgcctgcctctgcctcccgagtgctgggattaaaggcgtgcaccaccacgcccggcttgtttgtttgtttttaatgagaggaaattgttacacaacacctcctccctcacttgtgttgggattggggtcaagggtctgcaccacaccagttcctggctctaccaaggtacagccacctgccctattctggctgcgtagatcaagtcctattcttccatgagactaggagttccatttggcttctcccttgctttccaccaatgcctagaactctgatagactgcgctggctagttttatgtcaacttgtgacaaactggagtcatttgggaagagagaacctcagttgagaaaagaagcctatgggtaaacctttggtacattttaaaaattggttgattgatgtggaagggccctgccctttgtgggtggcaccacctctatgctggtggttctgaggtgtatgagaaagacgattgagaaagccatgaggagcaagccagtaagcacttctccatggcctctgtattagttcctacttcccgacttcctgccctgacttccctggatgatggactgcaagctataagaaagtctttcctccccaagttgctttgggccatagtgtgttatcacagcaatagaaaccctaactaaaacatagacaagtattatttgaataagaagtaataaggacaggctgagaactggttgtgccaaactggcttcagatagtcccgagaagatgtggaggtcacaggctgagtatcagtacagaaacagggtctgagaagggggacagccaatgctctacagaggctggacccccagtcttctgagagtgactatcag

SEQ ID NO: 21358 - DNA, 1170 bp, Mus musculus
aaacaaaaaagcagaaaaagagaagacaggatcaggaatcatactttagatgggaccgccattatccagcccggaccacggggaaaaactcacttggtgccttttggttaaacggtctctctccgtccagttagaaaacttggcagtcttggtgactgtgaagtcctattgaagcaaatcccaagcttggacttcacagctctttgggacaggcacacggtcagcttccactttttgtgaggtaggcaggttggccaaatatttaggagggacagctaacatcttgccatccttaggccagcaatttgcaaaagacagggtctctgatttgaagtttacgaattcaaagtttcttagaactctgaagtcgcagacttttctggaaagcagctacagacctggccaccctcgcagctctcctacgtcatacccgtagacacgcccatgtggcccgcccactaggccatagccccgcccaacctctcacctcacttagaactgactcccgcgttctgtgttcgcaggctgctgaaccgaatgtcgtccgaagacaggcacctgggctctagttgcggctccttcatcaagacggagccatccagcccgtcctcgggcattgatgccctcagccaccacagccccagcggctcgtcggacgccagtggtggctttggcattgccctgagcacccacgccaacggtctggactcgccgcctatgttcgcaggtgcggggctgggaggcaacccgtgccgcaagagctacgaggactgtactagtggtatcatggaggactccgccatcaaatgcgagtacatgcttaacgccatccccaagcgcctgtgcctcgtgtgcggggacattgcctctggctaccactacggagtggcctcctgcgaggcttgcaaggcgttcttcaagagaaccattcaaggtgcgtggtgggcagctcaagacctggattcaggctttgggtgggggccttggtctacaggtctagttgggttattaattccaagtctcgtttcctgggggcagaggtgctctagaagtctcctgatctgtgtctctgggatcctagacaaggatttcaactctaagactcatagatataccatgtttcttcctgcttggtccctgaaacgccgtagaaagagccacaggaatacc

SEQ ID NO: 21359 - DNA, 1210 bp, Mus musculus
ccacagaatttcttaagttttcatcaggtatcatttaaagataactaaagaccatatagaaacactggttctcttttttaaaattggtgttccgctttgtttatcatgtgtgcgcccttatgccacagcgcacacgcacacatgtagagatcagaacttggaggacttggtagatctctgccccggaagtcttgatccttctcaggttctcaggcctggacacaaacacctttactcacagagctatcttatctcggtggtcttagaaatacaaatgtctaagggaagataagagcagagcccggcccatctcggtaccttatccaaagataatctttaaagaaacccaacccaaccaaaccaaaccaaacaacaaccaaaccaaaacaaacaaacctaacaacaacaaccaaacccctctagcatattctctgttactgtctttatcgcttccctccggtacttactgccttagatagcttaactttttcaaaatagggtcacttgcagttcaggcttgccttgaactcccaaccgcttagccctgaagttatagttatatgtgtgtgtcattacacccagtcttcctgtttgtctgtccctacccttgtccaccaccccccccccaatcatttcctccacttattcggttaaaacctattttcctgttttccttcttgctttgccatcctcttgtttctaggttaaatgatggttttggtttcttccaccttttgtagtttttgttccctgtgaggcccgggctgcttgagcatgctggagaggactcgcttcttttcttttcttttcttttcttttcttttcttttcttttcttttcttttcttttctcttctctttttaaaagatttatttatttgagtacactgtagctgtctaaaaaacacagtagaagagggcatcagatcccattacagatggttgtgagccaccatgtgattgctgggaattgaactcaggacctctggaagtgctcttaaccactgagccatttctccagcctggaaaggactgtatatatatttttttaacccttggactcctactatattcacaccttggtttatgtgggattctggctgactgtcaccaccacctgccactctcctaacctggacacttgttgttaaggagaaaagcaagggcagggaacgcgatgcaggtacttcccctgagagcaaagtgcagct

SEQ ID NO: 21360 - DNA, 2251 bp, Mus musculus
tggcagcgggcagaggcggtggtggggagatccctgggctggcccctgaaagataagcccatggataatgcaggcctccaatggtgggagtcgtgctgggaggatgcacactggccaagtgggaggacttgcagggtgatcccagagttgcctcccctccaggagtggctttccccatgggcagccagatgtctctctgtcctgatatactgagcctgatttggctattagggagctttacttgagggaggaagagacagtcaccagggcacatcccaccacacctccagtgctggcaggcctgtatctgaaagagaaaaactgacaggaagccccctgcgtgtggatgaagctgagctcttggcttggtgtgggtccccatagagctctgtggtacctggcatcagaaaccccacagggaccctgccttggaggagcctgcaggagtctgggtctctgccaggaagagcttttggcagtagtcctggctcctgctttgtttgggtgtccctccttgcttacatgttcaaggtctagtccctgggggctagcctgggctcctgccccactctgacttgattctggaaacaaacggcccacttggctgtgctgcttgctccctgtgttagggtctcacagtcagtggaataacagtggttcccgagtcttcagggaagcagggaatagaaacatgccctcccctgcccctgcccctgcccctgcccctgttctacatgtcacaaatgtcagaaccatattttccattatagggagtattttttttgctaccctgctttaagctgctgggctcttctaatctctcacagctattgtgcccttcccagtactcttagctcagcaccctacagcagttcaatacgccaccaataactttcttagtaaaatagttcatgtcactgatccatgatttgggggctccagccattactagggataatgtcagatgtgtggtgtctctctgttgtgggatcaaagctgtcccattccttagctggttggagatggatcctgttccccacgtggcttcctttggcattgccctctctatcctggggtgattggaatagtcagtgagtgaaggcggtgtcctagagtctttgtgcagatcctttgaatggcaattcatattttcttggaaagtcgacctttttcagagtgtagaattgaatataaagtgtgacttgggttcggagccggtgactggcatttgtggttcctgtacggaacactggaccctttcttcacttgtattgatacctgctgttcaccaggtgtgtcagctccctggcgccagttcagctagctgttaaattcactcaggctctgcttgtctttccttcggctgcccacagagctgagtgaggtcaacaggacccattgatctcctttggatctgttgggggcactctaaagggggtggcattactttaagcagatcctctctaagttctgggatcagaatggaatgagacaggcctccagaagaactctgaaaatcaatccacttgctgcctctaccaggcacccccacctcctggacttgcatacgacaaccgtcccccctcccccgccaccctcccccaccgccgtgccccccacagctacgcccccacccaggcaggttgtccctgccagccccaccttctcctctcccgacctacccactctccagccactcctgctgtttcctccctgttcagccctgcctgtctcttcccaagtgttttctgagagaaatttgatttcagcgagagctgggctgacggccatgcaatatgctttcacttgttccgtgcgcgatggaaaagtggaaagatcctccagggattctgggtaattgggttagtggccagctcatgtcaggaaattaaaagggggcctgatcaggttcctgctgcatgggctctaatagttttgtatttatagagtgctctgcctctagtctgccagaaatactactgctcttctggtcttgtgaatgaaggaagagacgttctcttgcttttccaaaatatattaatgttttgaaacaaaccaactctccagcatgtcagaggacagacagtgttgaactactttctgcctatacacatgtgccctccagcgccgcccccccccccaaatctgatagctcagaaggtctccccaaagcatcctggacatgcaggtacaatgacctctggctggacaggtgttgattgaatacagacagctgcttctggctgtgtgg

SEQ ID NO: 21361 - DNA, 1245 bp, Mus musculus
actgaaggttttcaaattcccacatgaagtcacataaggattaagtgagctgttggccctgtgaggttgcctattaccccaccttagaggccaagaaatggagatacaagaagtgtgtgtgtgtgtgtgtgtgtgtgtattcatgaggtactgtctaagcattaaagttctctgtacatctgaaggggttaaacagtatccaacagtagttaggacaagggccacgtgttactaagttaagtatttggagatcagcaaggattttcatattagcattattaatacctttttatatttggaaagtctcaatgagatgatagactctactaatctgagaccgcaactataagttaattagtattttatttgttcctcctgactgctttttaaaatatatatatgtatatatatatatatatatacacacacacacacacacacacacacaataagacatttttatttaaagactcccattttctctctccccaggtttgaagtcatattctaatttagaagtaattgtctattgtatcagtcagtagggataactctttactgccacaccctttgaaaatggagatgtttaccccctctgtccctagtagcccagacgagcctcaaacttggctgtatagctgagcatgaccttgaactgttgctccttctgtcccggattcccaagggctggcattaccggctggtatcacctgatttacgaggttgctttcttttgctggtggtattcaactgcaaagttgagctatcaagtcattggcaaagaggacaaagcctttggatttggaggtggcccacgaattccacagatccgggaagcacaggcccacgtcctccactccaaaggatcattaacagatcctgactgtagtggtgctgacggcagggagtatagaacccacaacgtgaccggaacaagcctgtggtgattgcccggaaagcagccaggccacctgcagcatccctgcttcaaggtcaactgaaaagcctgggctccagcagagtggctttgaccactgctgcctcctttagccagagggtgacactggagcgttgacccacctcctccaagggtcaggagttagatcagcctgaacaggaccactgggtcctcataggctttgtaggtttgaatgggacaggagtttcgaatgagaacagacccattttgtaccagtccttgatgtgcaatccttgattagttccagtcgacacattcatcctttg

SEQ ID NO: 21362 - DNA, 1164 bp, Mus musculus
tggggggtgggggggatgagccagcagccaaggtgtattccctcccctcatgggctcgcatttaacactctattactctactttatcacccaatgatagtaaatacttgagcacttcctctgtgctaagcagaccaataagtcttatgtgtgtgcgcacacatttaacctctgcacctctaacatgggcactgttggccccatttgacaggggagtgtagagacagaaggtggccttgcctagggtcacctttggtggccagcagagtgactactttgaccagtagttggctctggagtctgtgcctccaatgtgtctttgcacatctacataaatagtcctccctcccgtgttggatttatataataatacatgtatcacattacatttccatagtttcctgcctggcattttctgcatgtgagctagcaacaaccccttcctcacctccaccctggtccctcctggagttgactatccccgttttctcttgtagtgtttcttttctcaactgttagaaagcattccaatggtttcaagtagtgccagcacgcacttgctgctgcctggtggctaggaggccgcatgtgtgttggcgtttttttggggacctctcagatgttggagaggaggaagggactctttcccagggatgagcccgctgctcagacctcccagccagccggcccagcggtatgagagtaaagccttcggcacgttctctcccacagcagcctagaaatttccaggtggctgttgtgcccccaccccttcccatggcactccagcctcttacaggggatctaatggggtctctaagcaaatgttttaggttgttttcctgctgtcccagggtcaggctgtggcatctgtctgtccttcactgtgactgcttttgaggctgggtgggtaggaaggcaagcttaaggctcgggagtttcccttcagagctcagccccccaggttgcttgtgcagggattcactccctggactgtccttagttagcatcgatacgggttgcatgttctcagaaccttccagtccaaaagtcttctgaatttttttctttctttttaaaagtctatttattttttggtgggttttttgagacagggtttctctgggtaactctccctggttgtcctggaacctactctgtaaac

SEQ ID NO: 21363 - DNA, 1237 bp, Mus musculus
agcagagagctttcctggagcttgcagtatgttggagacacccatcttgccacccccaaatcctgctattaattcagcagctccttcaattacaaatgcaccttattaatcagtgttgtctccccatgctgggaaagacctagctagacccaatgggcatggtgataataactgtcaatattgactcaactcttattatgtaagtcttttccatgaattccagtgtgactgattgactaaggggatagcaacaggcacccccagggctccccccattactccccacccctgcctccagctgggtctgaggatgcaaggacacagctcaccctcccttgaggctgccctccagcaagcgccaaggaagcccctgggaccatttctgatcattggcttcttccccttctgcaggcttccccagtctgacacttggggaccagatgagcctgctgcagagtgcctggatggagattctcatcttgggcatcgtgtaccgctcgctcccatacgatgacaagctggcatacgccgaggactatatcatggatgaggaacactctcgcctggtagggctgctggacctttaccgagccatcctgcagctggtgcgcaggtacaagaaactcaaggtagagaaggaagagtttatgatcctcaaggccctggccctcgccaactcaggtaagggtggcacgtgaccctcagagggcttcaggggttctgtgggagcctaacaagcgccgcaagcgccgcaccgctgctcagtctgtgggcggggctggcttacggatgtgggaatgaccagcattgcttttatcagcggaacacggcattagttacttttcttttctggtgatgaaaagcaacttacagaagaaagggtttaattttgtcttaggattcctgagggatagaggaggtactggagcagggagcgaaggttccgtgtggcagccggaagtggagggatagcgttttattcacacacagggagcagagggagcgaactggaagtggaatgaggttataaacctcaaagctggtcttccagcaagtctatgcttctgaggttccataacttctatatacaccaccagctggggatcaaatgctcaaatccaggatcctatggggaccgcgcccatttaagccactacatcccgcaagggtagcctggagttcaaaggacagtagtcatggaggccagcactggtttaggattttctaggactttgac

SEQ ID NO: 21364 - DNA, 3964 bp, Mus musculus
ccaatgtttcagacggccggccgagttcatgggctgtaagcatcccaagccgatggtgctaaggatccagattcaagcaaggccaagcaagggatacactcatccctgaacgatatccccgccggctccctctatcagcacaccctcccctcgcccccaaacacctagacattgacttccatccctttatatctgttctgagttgtaaggttggtggctgtactgcatgtgagtggtacccatggcccagcatcatcatgaagacgtgatgatgtcagggttaggtgatagccgtgaggttcctaagacccaggtgcttaattgttgctgtataactgtatgaggtaggtatggctaggaaaatgggggacagagaagttatataatgtctcacataactcaaaagggactgccagccagatcccagagtcccccgaacgcctctgagacatccaataggtctgcccatgttcatcggcagtgccctcctggtggtctctctatgagatctgagctcagttctaccctcctcagtctctgactcagccctgcatcaaagatcctcattctactctgaatagtcagtcagcagacagacagacagagacaggctggctgctggtctgtcctccactccagaaatgccttccgtgttggggggtggcagccagcccctgctgacactgcccctctcctgtgtccacagattcgatgtacattgagaacctggaggcggtgcagaagctccaggacctgctgcacgaggcgctgcaggactatgagctgagtcagcgccacgaggagccgcggagggccggcaagctgctgctgacgctgcccctgctgaggcagacagccgccaaagccgtgcaacacttctacagtgtgaaactgcagggcaaggtgcccatgcacaaactcttcctggagatgctggaggccaaggtgtgatggcccagcacatggacggacggacacgatccaagtggagacctccacagccaccagcctcgacttttttcacacccgcatcggggctctgagctgtcccagaagaaggggtcttcttgcttcctggccatgtgcagactcctggggacagcagatggggaggtggggatggggagggtaggggcggggggctcatctgtcacccgcattttctttggaattttttttttccttctccatgggcagtgctaaggcttgggccagggacgacttcccttagagctggagaccaccagaggaagcagccttcctgcaagggatccatttctggacctctccctatttaggacctggaggtatctggatgggcagtgcttagtgcccgggacccaagagacatagattgggggctcctgaaggtgttggtgtcacggtgggcagtcccttggggcagaacgtctctgtggcctatcccgaggctctgttcctcctccatctagctggctccctccactttcccctttcttattgtcccagtacacccagttctcagtggatgctcctgctagagtagccacatccccaccccgaagaacccctcccctgcttcctgcccctacctcagccagccggaactcactggctcagaaaagagttgggttctgtacccactgctctttttgcctgctgtttctccttctcctcttgggcatggccagtctagaaacctatggagaattcaggacctggccccaccagaggtcacttgagggactctcaaggtcagtagcttaggttggggtgtaggatagcagagagacccagcggtagagggaaagtctcattgcacctcggaaaggaaggagctctaaaggtcccccttggcccctcccttacctcataaaaaggcaaggcttggctttgtgccataggagggcagcctcctggcatttgcaccagggatgtttgatgcagccctcctgggtcaattcccggcaagaccctgcagtctggttgtcgtatagggtgctccaccaacccaccgcagtcctaaaacccctcagccctaggcacatgaatgcacctttcacccacccaaaaggcagtcccaggctcatgctgtgtgtgtccttgggtttgggttgacaggatgtcctaaagatgaagcggttcattctggaaaatggacacgccactttcatgacaagtcctccggctttacctgctctgatcccttcctggagtgcaagggtcccctctttcaggcgttctggcacctgccactactgctggctctgcctcccgggtgacacctctaggagactggtcacttcacagacttaatgctaaacttccccagagagcctttccctgcccttttgcccacaaaggggttcatgcctctgcatgggctctccttgcccatgatccaaggtagataccacttttgtgttaaactgggttaactcttaggggctgggtttagctatcctggcttctgaaaactccccccagccacactgtggagagggggtgtcacctaaaattccacctagttctcagaatgtcttctgggcctatgaacacaccagcaagggttggacaaacacccacagctgcctgagcggacacactgctttgaagcagcagcagcagcagttaaatgggcacctcggctcggctccttgatctagtgatgcaagcaccccatacggctgcttacctgccgaagagaatggaccagtgacagttgggtgccctgtagggaagctgggtgccctgggcacctggagtcagagggtagagcccacttgttcaaagactagccagatgagagacatctgtgatgccagggtgctcaaaacaggaaaaagcaagagagaccctctcctattcccacctccccccagtcagagcaaaaacccaggctaccttccatatccatttctggaacccatggagaggaggcctctctctgctagtgtgtattcagataaagattatttcaacccagaaatataaacatagctaaccttgtaccttgtagaaggaggtgctggctgggatctctttctctcgttccctaacctttctgaagattctggatggttctggcgtgcctcccaggttttgcatccgtgaacagatgacttcccatggacagagcttgagaaatacgaggctctcatttgggcctagcagggtcagagcctttactatctgtgcctggtccttccctccagacttgactactcatgagaaacaggtggcaggcaaggatgacagacgtgtgacaaggagacaggagggcccagagtccaagcccatggaacagcaccaaagagaagcactatgtggagagattgctttattttctgataatgacgttgtggctggaatgacttaagatgtatatattttttaaccggcagtccttcgtgctgtctcacccccctgtatggacatgtcctcccacggccctcatgtaaactacatgccctgggattatctcccatccagtcccatgtatctgaaatctaataaataaggaaaggtctgctgagtcgttcatgcgttgtctgttggagtacacggccctctggacagcatcgctcttagggctcctgttgataactggagaggtcagggagagagcacctgtgcctgagaggcctcgtgggtcccggctgcatggatattgcaaatgtgagcagggcttagccagcatgcaagaggccctgggtttaatatccctagcgtcgcatgcattgtgagcagcaacagttgggacatctgatggaggtcggggacgccccgaggctgctctccagggagatgttcttctccatgagtgcctgagaggtgggacatcacccacctgagcaccgcatgcgtccaggttcttggtgttttgtttaacgcattgaagttcccataacttgcaaagtcacaaggaacttcattcaaaagtaaggtaccgagcagacatgttgctttgcagcaggctccttaa

SEQ ID NO: 21365 - DNA, 2968 bp, Mus musculus
tagctctccctccttcccccctccctgtctctatttccctagtaaccactcgctcctcttctgcaccctctgcttttcttcctgcaggccttcaggggagaagaagcccgcagagcccaaagccatgccagacctcagtgggtaccagatccgggtgtgaggcagatgccagcatccccagatctcctctgcgtctggaggcccaggaaagaaactacttcatccaggcaggggctagtgatggggtggacttggggtgggaggccagaaggaggccttgccattcagccccaagtgacttgccctcccatgaagccaagcccctaactttgggccaagaagcagttagtgttttatttggagttttagctctacaactgaagtataaggtatttgaacagaaagacaaatggatatgttggtagctgtcagggtctgttctctctctctgagcactgcgtggcttggggaggagggctgcctcgttctgtggtgctccttctctcaacagtgatcaggtttatgagcctccccagcctgtggggtgagggtggggcagtgtaggaatggaggtgttttctccaactgggcctgtcctggcagaatcatgacccagggaaaggaaagcagggtgggaggttctcctgagaaaggtctatttgtttttcaaatcaggaacttggcagaagccacatctgcctaaggtccaggagagccctttagatagtactgtgcaccccccccacctccccctacatcttcaccatggccagtttaggactaggctataggaggaccaggagaggactatagtgggaagagttctggctcttagcacatctgctggctccgtctagttctgactattgctgcagcccaggggctccctgaagaagggctgggctttgtagagagcccagccttgtactggggacaccatgaccttatgaaacttggctgggcacggggtagttgagaagaactacctactctagctgtgtgggagtgggctcttctctccccatctaataatctcagcacttggtggggaaacaagaccagagcaggctgcctaacctccagggtgccttcccaggcctagctgcctgtttaggcttggagtagtggccagttttagcagctctttgggacactggcaggagggggtgggagttgtctgccccctggccctggagcacaagatcccaggtagaaaagtgaggtgtggagaggggctgtctgggctggggaggagaaccagcccttgagttgggaatgtaagtgagaagggctgagagaggcagttcaggatggggatgcggtggggactgtgtggggaccgagttccctgcagcacaggtggcactcttcaagttgctggagacttcaagtgacagagggcagctggatgaggtggtgaccgttaagggactttactgagaggtggagtcagcttgggcagctgccaataagactgcagagggctgagggctggctgggataagagctagagacctagggactcaaatgcctacagggccagcaagaggcaaagaagagggctggatggggactgtgtcccaccaaagagaacatatcccattaaagtaggatgctgccattgtactgtcccacagtgcaagccctaaggggtgtaagcccttttttttttttttttttttttttttaggccaaggctctgaactaatatatgaattgtaattttttaaaagttaccagttcaagaagtgatcaccatagctgagggagtatcagtccacaatgtctggggtagagagcatgggctggttgtggggagactgtgggtggaaaatgtgacagtttaaagtttcccaaaggcagcaggagccacttcctgtatctctctccttagccccatcctgcaggcagaggctgagtttgtgcttgctgggtagagtaggatagaagggtggaattcttcctgcctggaaatggatggtggctggaatgaggaggaggaggaggaggaggaggaggaggaggaggaggaggaggaggaggaggaggaggaggaggaggaagaagaggaggaggaggaggaggaggaagagggatgcccctgctggtgacacaccaacagctcctgggcccagcacaggcaccatgggggggggctgagtgtttagtcccttgtcttgcctggttcctcctggggtcaggggggcccttggaaagtgcatagcctaggctacaccctctagccagacccatgaaaagacatgacactatttgatccatctcagagttcagggagtagggatggcagtagctcccatgccttctttgagaggtataagactggacaagatcttttttggatctcagtgtggctgcttatccctgggacagcagccctatgtgtctctggaaacttcaagatatgacaaaatatgggagaaggaggtgtggggagagctagagtcaggtgtatttggagaacagcaccaggtcccagagccttaggacaggagcgctgagctccagttcctctgaggcccaggaaagaaggaagcagggggagccccgacttgttcaggatttgagggagcagctgatggctaggggtacacacacccctgctgttcacctctcccaggctaagggcgtccggcctgtggagactgtcataggctgtcatgggccacagtggtgctttttttattattattttattttttactctttctcatatgtagcaagccacgcttccctctgtggccatttacacaggctgtgctcttgggggctggcctggctgtctggtttctggggaggcagaggcaaggactttgaggccttagtcaccatccatgacatcacctcatctcacttcctataagagccagggatctggcagatgtctgcagacctcctgactcaggcctgccctttcagctcttctaccccacccttggggactgctggc

SEQ ID NO: 21366 - DNA, 1226 bp, Mus musculus
acccatccttagtgggcatggccaagcgggtagaacagcagcccgctggccccagacttgatgatgaagcctagagactgggtactgaggaacagattcaggagactgaccatggctgatgtctggtccagtcagatcatgccctgacccctttccagctgggaagacatcctggctcaggggaggagtaggtctaatgatagctgtgcaggctttgtgctctgaggtctgtgcccgtgtaccaccccagctttcctacctgggatgagtttgggcttaacacatcagcgcccaccctgacatgctgtcagtggtgttaaagtgcaaggatgcacaggtggggaccaataagccagaggtgtgaagggcaagggtattctctgaaggagtggaggtgggagctagggattctccctacgggtaccacagcctctcccagcagcatctccagccaggtggggctgtcactgtactagctgtgagtcctgtgctaggaccccctcactccagttcgatgcactggggtcccaagcttccttgttaagtctggaaagaaatctgggtacacttgacccctgggccagtgatgacggaccgcccatcccctgtgctttgttaggctcttgtgttgtccctgatgccattattgtgcccttgtatcagtattacccctgcctttcagtgcacactttgtctcattcctttctcaccttcccctgaaatgaataaagtctcccagctcccatcgtatgggctggcagaaatcacgtgaaaccttgtctgattttctttgggagctgtaacccaggcccattcccaccctcatcagccccactggctgcatgcaggaagaagccaagattcccaagtagatggaaggggaaccaaactatgaggaacaggaagcctggattctgactctcagcctgtcaaggctgttcagctcctcctagccctaatctggagtcaggtttcccatccagctatgaggtgcctcttcctcacccggctcccaggagatagcccagccaaagctctccacagtccatcaggagaaaggcagtccatttcaggaaaccacagccaccaagatctgctcatcagatgcccatccatggctctgaggaaacctctggccccaccactttgtccactggctctagacctcttagctacccacactaaggcaagtgccaaactgaaaagcaaaccaacacacacacgaa

SEQ ID NO: 21367 - DNA, 1219 bp, Mus musculus
tctcttggagcgggactgcccagcacagccaaagcctacctctgcctagtccatgtgctacctatcatgagctgctgggctagacacaggttgaaagcatgacatagtagctgtgtgctgccgggaagcagcaggtgtggggcccttctctcccagtcagtcatctcagcatcctgggcacacttgttatttctggagacaaattggcccccagcctggagcaagcagctcagggatgccctaacctcagatctcctcactgccttccttgaggaaagcgggtggatgccttgtgctggggttcactgggctggcacagtgctgggaggctatggcatttgaagggtgaggagactgagccttcagggaactgttgtctcaccagactctgaagaactgggtaagagttggagtcccagcagaaagagcaggaggctctacagcagccttggccagcactggagccccagagggcttgatctctgacctctgcgtacctaagaaagtttcttttcttcttctctctcctcctcctcccctcctttgttccctcccattttctctctggagaagcccgctgtttagctcaggccaaaacatctcaacagaagcctggcttggggcaaactaggtctaagaactcagggtggcagtgcttgcccatgtgctctgccttttcctccccaaacatgggctccgcccgctcccctaacctactgaaaacccctgcagcccagaccgtgtcacctgcatgccttactcactgctggggtgcagcctagggtgacctcaggccagagcctccacatagcttcaactcagaagatctgctggcccagagatgaggggattgactgaggctgcagttaggcatggtggagcagcagttacacccttcccttgagttgaaagccagagacctgtctggaatgctgctgctgctgctgctgctgctgcgttgctgactctcagcttcccatgctcaggtctgggggacgtcttttcttatgtgtgtcttatttttaagttttgttatctgggtactggacatctgcctgtctgagccccaggcccatctgtctgtccacagcccacttttcaccgtcactctctgggcacctcctgagatggttccacaaccgtgccctgttggttctcagaacaggggccaatgattgttccccctgccaggaaatgcaggttcaactgctaaaggagg

SEQ ID NO: 21368 - DNA, 1209 bp, Mus musculus
ggggacagtcagtaatcactagtggttattattagtgtaagatttgtaattgtatatggtattagtgttcttggtaaataatattaacttaaagaacatgaagtgacttgtccaaagtcacagcctgtaagtggccgttaattcctttttaaagtatttatttattcactttacatcccaatattagctccacctctcatcccagtaccctgtcccacagatcttaccctcacttccccctcctcttctctgagataggagagcctcccccattcccccagcacacgagtcactgcaggaccactgaggccggacaaagtggcccagttaggggaacaggctctacaggcaggcagcagattcagggacagcccccactccagttgttgggggacccacatgaagaccaagttgcacatctgctacatatgtgcgggagatggcccttaattctaagactctaacttgggattgcatactgaatgtttatgccctttgagggcaagggaatggtgtctatcactagtctatcccagtgccatacacatagttggcattcatatatttgttgttaagtgaaacaaagggggttttgctgcccacgtggagatgtgcggtgactgctgttgctgaatgtttcccctacacgctctgtccattcccaggctgctcatgactttggcagaggatggtgacgtagacacggtaaagtgcttgctgcatctcccatttggttttgccctgtgtttccccaataccagactcaaggaattgactttggtctagaagatgccgagctgaggatggcagggtcaacctgtgtgcattatagattaagatctgccgagagttggtctcccttgtgcagcactgtgtacatgtttctgaggcgaacctcaggaccacatgctctacagctctgtttgccttgacttggtccccactctctcttcactgttttctatcacacggacgtttgtttctagtgagtaggtaaagttataattagttccttattgttgccttccctggagattagtggcttgctcattccatgcgtacactgttgtctgatggcgtatgtttgtatttgttcaaatgtcccaaatcacgagtcctttcgtttttctatcctggcttcctcatgcccacctggctttcctttccttttctttttttggtaggtttctggacaggaagacttctctc

SEQ ID NO: 21369 - DNA, 1173 bp, Mus musculus
cagtgactggaccggccttgcccagtcccctgatagcagcctgccaaacctcttcctcttgcctcaagacctccgcacttgaggttccctgttgtggtttgaatgggaaagtccccacaggctcatctgttcgaagacttggtcatcagggactggtactatgatgagatatggccctgttgttggaaatgtgtcactagagggtgggttctgcaatctcagatgctcaaaccacgcccagtgtggtactctcttcctacttcctacggatccagatgtagaactctcagctccttctccagcaccaagtctgcctgaatgctgccaagatgataatggactgaacttttgaattgtagccaactccaattatatatatatatatattataaagagttaccataacataagcaagggggacccacagcaagcaagggggtgggggaggaggttgtcatgagcatagtgtcttttcacagcaacagaaaccctaaactagcctggtggtggtggtggcgcacgctttaatcccagcacttgggaggcagacacaggcggatttctgagttcgaggccggcctggtctacaaagtgagttccaggacagccaagactatacagagaaaccctgtctcgagaagaaaaaaaaaaaaccctaaaccagacactctcctgggaggactttttacttgttatttgcatgaaaaccttcaggtctcccctagaatgataccttctcttgttttcagtttagttttttatttgtctgttttcttttccttttaaaaaagatttatttatttatttttggtttttcgagacagggtttctctgggtagcactggctgtcttggaactcactctgtagaccaggctggcctcaaactcagaaatccacctgcctctgcctcccaagtgctgcgatttatttatttcatgtatgtactgtcattgtcttcagacacaccagaagggggcattgctccatgttacagatggatatgagccaccatgtggttgctgggaattaaactcaggacctctggaaaagcagttagtgctcttaatcactgagccatctctccagcctctgtttgcttgttttcttttgggggttgtaagcctggcctttaacagctgagctatctctttagcccagttgccaccttctca

SEQ ID NO: 21370 - DNA, 1272 bp, Mus musculus
gcccttcccccacctgcctccacctcccctatccaccaagatgtagaattgtgaatataactgcaaaaagttagtcttatgtatagacattattttcgtcgtatgtttctatattttgaaacaggtatgtaacttcttcatttgaaggataagctggtttgtgttaagcagtataatattgattgggtctttcgcatcatattcgttagcatttatttggtggcagaatgtttgcctaggtacagaattaatagcccttagcaacgactgctgctggtgtgtatttttgtaaatgttatgcactctgaaaggaaaacacacaaaagaagagattttgtcgttttttgttttgccaaggccagtgttgctgcctaaaaaaaaaaataaaataaaatacaaaaatacaaaaaaacattgatactataaaatggtaaaaagcgtcttctttctaaacagccccagtgttgaagtctatacttaattttgttctgttctgttttgttttcctgttttgtttgcaaaatggtaaggggggtgttgggaggggatgggtggtttgtttggtttttttttttttgttgcaagtttgtgaagggggaaaatgttttgatttgtttctactgacctgaatgtgttggatcttcacgtgtcgttttgttttggctttattgatgcacggatgcttttgaacagtagagcgaaatgctagacatggagaacttgctctgtttgtcctttctacatttctgtagttaacagaacactgtaatgtgccttgcagcttagtaacttgtaataaattcaattgatattaattctgccctgagtcagcaaatttgtctttctagggttgaagctatgctactccaattaaggggggacaactgtttacctcctacttggatggaacctggcatcctggttccttggaaggctcttgagcaggctgccccaccccctgggtaccagactgtttacatttacctcccctgtaatctacagttgctgactaagcgatttctgtttactcttaagcatctttacccaaccccccatacaggacccagctgcaaaaaaaaaaaaaaaaaaaaaaaaaaaaattgtcaggaatgctctttggtgtctttccccggagcgatgagtagatcctggtacccagtgcagctgtgacttaacaagtgggaacagaagggagtttattttgcctctacaggcaaggcagaattttctgtccttgcacacttaaaacaaaaggtgtctggctgggctttg

SEQ ID NO: 21371 - DNA, 1175 bp, Mus musculus
gagtaacaatcacaaccccacattccaggcgagcgagagcgggaagggatgcgacccgggtggaggcgccgagcgagcgccctgcagccaacgtgagcgccgccagcctctgtggccggagaggtgctcaggccagggggcggtgggagcctgcgtgcgtgcgctcctctcctctgctctcgtgtgtcttggaaacggtggccgcggcggccggctccctccggcgtgcaaacccagacgccgccagcgcaacggccgtcgctgcggaggggaaacgctcctctcttggcagccaccacctcctcccccggccctcccggggaatcagcggcttcagcaagattggacctgggcaccgggtggcacaaccttctaaccctctccccggggcgcctggcgtagagaggactcagatcgtagggggacccctccgcgcttccacgcttcaatcactccggggagggggccaagaggccactggcagccggccccggacaccgtagccccctccccccagacccggagctcgcagccctgatccgccgcaccaggaagaaggctcccggtgctcttctctggaccagacagccgcagtaggaggtgggggcgaggagcgtgcggaacccgtcggccgcctgggtggtggagcccccgccgagagagaggcactgctgcgccggctgtggagactcgcgctctctcctgccccaggggcagaactttctcgctcccctccgcccccctcccccgcagctggacttcttccccagccagctagtcctcccgtaggagaaggcgcctcggaaacagcccgggcgggggcctaccttccccgaggctggcatcatgtcggcggcgcaggtgtcctcgtcccgaagacagtcttgctacctgtgcgacctgcctcgcatgccctgggccatgatctgggacttctccgaacccgtatgccgtggttgcgtcaattacgaaggcgccgaccgcatagaattcgtgatcgagacagcacgccagctgaagcgggctcacggttgcttccaagacggtcgctccccggggccgccgccgccagtcggggtcaagacggtggccttgtccgccaaggaagcggcagcagcagctgccgccgcacagcaacagcagcagcaacaacagcagcaacagcagcagctcaa

SEQ ID NO: 21372 - DNA, 1211 bp, Mus musculus
tctttggcctgcgagccgcttaagagtagttgaaaacaaacctgtgggctgggccctcctttggccttggcgaggctaggaatcgccttgcgccaggaaccccaggggtgcggccggttattgagctttgcaaacccccagggcaaaggggctgtgggggctggaggctgctgtgtgatttacacatttactcctcagtcggatccgtggcggaagtatttgcctttccctaaaggattaatcttggtattaaaaaaaaaaagtattgagttagtccagggcatagggttacacaagagccactagagcatgaaatcccaggaacaacgtgattcgctgagaagccctggggagctgagcctgcaccgcccgccaagacctgcccagcctcgggcgcatgggcaagtcgagcacttagagagaaattggggagaaggcaagggcgggcgggcgggcgggcgggcagaggggttggggttggcacagtggccgaaaaaccgatccggtctcaggctgttttcttcctggaggggcggagaccagggaggggaaaaaaaggcgcagaagagggggtagtcgagactagttcctgcctcccggcatcctcttcttgctgtcgtgccagggtttggaggagctccccgcaaaagctggtgtgtttcttacttccaaaaaaaaaaaaaaaaaaaaaaaaagtctgaaatgagctgtccagggaaacgggcctagaggaagagggtggaagatccagacaagggtgctattcactgattcagttggaacaaattttcaaacccccaacaaggaaacttgagaggaaggaaggcttcgagtaggcgggacctgtcgcggtggtcagtggccatgaagaccacaggtgtgcctccccttggccctctacttctaggagccctgggccttaaagggaagttcccaccagtctacaataatcctgggatttccacaagccagagcctttgccgcaggcacttttctgcctggacagccagaaagtgaggtctcccgagcagaaagctcctcctaggtcctcaccattcctgggtcaaggctggtacaggacagccatcattgctttccttgaattgggtccatgggtctatgggcttgcctgtgcttagcagttcagcctggaactcactgggcagagagagggggagggagggagagcaagaaaaaggggcggtacttgg

SEQ ID NO: 21373 - DNA, 1198 bp, Mus musculus
tgagtttgaagccatcatggtctacagagtgagttccagggcatcagggccacatgatgaggccctgtctcaaacaaaacaaccaaaacaaccaaacctcccaaaacaaatttatcattagtattaccttctttttcttttcttttcttttcttttcttttcttttcttttcttttcttttcttttcttttttcttctcttctcttctcttttcttttcttttttctccttctcttttctcttcctttcttttttcttttcttttcttttcttctttcctttttcttttttttttaaggtttatttatttattttatgtatgttagtacactgtcactcttcagacaaaccagaagagggcattgtatctcattacagatggttgtgagctaccatgtggttgctgggaattgaattcaggacctctggaagagcagtgagtgctcttaaccactgagccatctctctaacccttctttctttctttaaaaatttttaaattaaaaaaaatttttgagacagggtctctctatgtagtctgtctattctggaacttattatgtagaccagctaggccttgaactcataatcatcctcctgtctccaccatgacagatagatggcagaagcactatctcatgtggtctcaaaaaacaaatgtttgaataaatactaaaaaagaaaaaaattgatagtagagcaactttcactgttagctgctgtcttagggttttactgctgtgaacagacaccgtgaccaaggcaactcttataaagacaacattttgttggttctggcttacagaggctcagtccattatcatcaaggtatgagcgtggcagcatccaggcaggcatggtgcagagttctacatcttcgtctgaaggctgctagcagaacactcacttccaggtggctaggagtagggtcttaaagctcatgcccacagtgacacacatactccaacaaggccacacacctccaaatagtgccactccctgagccaaacatatatgaaccatcacagctgtcctgagccttacccaaatgggctggctgcatccctccatgagcctcttaaatttgtgctgacactcttttttttatttctaggtctgaaggtagtcagtggcttgaactacccctactgggcgactagtgccaacagtgttatcccagtagagtctcagggggatg

SEQ ID NO: 21374 - DNA, 2085 bp, Mus musculus
taaaattacaagctatcatcaacatcaaaacaaggtaaaacaatcaaaagcttgagatgacttcagtgggtcctcagggtctcgtgtaagtccaccctctgttgtctcttgtctgtgcctctcccagttgtttctgtgagggaaaaatgattgtgttatacatttaaatgaaataaaacccaaggccacaacaatcagaaaggatccttccctgttctcacattgggttctcacgcatgccctgtacgatggggctgccgtggagcggtcttgcatctggtgttagatgtgggcagcagagctgaagtgtggtgtccctctcagaggcgggtcttagggtgaagagcctgaggagtctccatgtcttcggtttccctgtgccggtaacgaagtgtctaaatggtaacgatccaaaggcttgtatcctctgttataattttcatcctcctggaaatctttgttctttatgaattaacttggttttttttgaccagtatctttttctgcagagagaataaatgttcttgggggctttagtaggtcaggagttaaaggatcccatttattacagagttggttgtgattctaacataatttaaaaagtataagactcaggttggctctactctgttcataaagatatatgacttagatatgattggtttaaaaataatcaacttggtaaaatctctattctttggttaacatagaactgttacctgctgtttgctttctgaaagtttccaaaatcagagtcggcgtttctgggcaggcttggctcctcgtgctgtgctcccccgaatctgcatggtatggtggacattctgcaccccactaggaagcggcctttgtggcagaacatttggcaggaaagctgtagagacaggtgcattcagagcagcctgggcaccaccgtgaggcttaccgcgtgtcagaaggctggaagcacttgctgggagccaaatatattactccactggaaaagccctctagtgctctaagcctcttggtctcctcttcttagatttgggtttttatttcccttcctgtccccatgaaagatgatgaaagccaccatggatcctcgctgccgagtggtgggagggttagcgccccccacctctacccccagtcactgctcctctgtgatcttagaggcacagctgcaagtctctaggctgttagcgtagcgctctgttcctggtgcagctggaagcaggtggactccaggagagaagctagatcttagaaggagcactcctttgaggccagaggccagaccagcacttggaggaagtcctgagtggactggaggagtcttcattggttgcccaaggctgtaagtagcagaggcctctgcatggtatgagctcttacgaagcgttatgtaggactgctgcctccccaaggtgagaagttgatttttaactcggatcaacccacaggagtacctttgtattggcaatattgaaacacatttagaaaggttcctggctgagattggctctagaacttgctgtcgtttgtaatttactgttttcttattgattgtggtacctctgacttttcttctctagtatgattccttcagcatacaagttactcttacacacatacggaagtggctttttagccatatcctccttagggtagagactatttaccaaatgtgaattcttctaagtgtgaagttatgtagaaattgactgtgaaatgtcaaagaaaaaaataaaagtcacttacttgaaagcaatttggtctatttgctttgtaactgcttaaaaattttaaggcctgggcctatagccatgggtagagtgcttgcctagggtgtgtgatgccctgggtgccacccctagaaccactgccctccatcccactgcctcagaaaccctggaagtttcaagcattgccttgtgttgtttggggtcggctgctgaatattgaagactgaatgctgtgtgtagtggcctgagtagcctgccaagctggcagggttttaatgcaggaggtggtggaacaagaaggccatgcagtggcttcctccatctgacacgtcagagagaactctgaaatggcagaacg

SEQ ID NO: 21375 - DNA, 1129 bp, Mus musculus
ccagcaggaagtgcagcttgtgcacaaagtctgggctgcctgcttaattgcattgctggcagggactggggagctctgctctcattgccctccccaacccttgcctgcaggcccaggcagggctggtttcttctgacccagtgggggcaccatgtgggtagattctcctggagaggggatacaggaatctgtgcttggcttttaacaaggtagcccatgggacatctaacaggtggctaattttctcttatgccttatttctggaggcactgttagagggaaggaaccctagagtaaccagagggcagcctttagagccagagtaggtagcagagtttagtgggctcctacgtgtccctccctttagtgtcacactgagggcagaagggtctcttcttatttccaagtatgggaaaaaggtgccccccacatagtccctcttcttccatacccaaactggcagatacttctatggaaaaaaggccacttggtcacatcactaagtgcttattctatttggaagatggaggggcagtgggcgctagggtgctgctttgcgtgtgggctgcagcccttgggaactgacagagatgtggtccatctcagccggctggtgagaaggaagatgtgccaggcagcctaacacagccagggtcttgacccaccacactttgtctttttttttttttaaaactttccagagataatcagagatcattacttttgtaataaataactcttgttttcaatactacattgttcttgtgcttgattgcatctgacttgtccttgacaaaaatggcaagaactagccatggtatctcatagctagggccattctaattccagctgaggctctggccaggcagagcctaatgccaggggaatgtaggctccctgagcacttgcttgcttgagagtcagtggctgttgtttccatttcttaacaaaaaccagtaacagctgagcctgctctctcttgctgaactttcccagacagtatagaaagaaacaagggaaccattttctctcctaattctgagagagctgtgcagcccagcatggtagcacatttccattccagttaactgagggccccatcctggcatggtcgtctgtcaagagtacc

SEQ ID NO: 21376 - DNA, 1196 bp, Mus musculus
cagatcaatggccccttttaggatgagcatgccccctgatttgccatgaattttgttacatttgggcccctagaatgtgtgatctaagattaaagggaatggaagttaatttctctggtgttttctgggtagccatttcatagcaggactcaggaacagacaataagcacccatgcaccttcctgcagacaatatccacaaagatgcgacagaaatcaacactcagatcacctacaactcctcggaccacagtcatttcacctaagttcccctccttctgctgtctcctcagaccaagatactatgtgaagcagtttccctgtcccaagggccaccaacacagaagcccacaagagcaaggcaacaagtaggcccaggttctctcagggcggcccccaagcccagggcctgtgcctcctcagcaccttctgtggggaaagggaagatgggcatggctagagcacaggcgatgcagccagtgtcctcggaggacgtgggagaccacagtgcattctatctggagaggtatctccttctttatctgggaaggccaggggagcactgggcccaacagagcttagagacactgaccacgagggagtggcaaaaatgagaactgctggagaggatgccttatgtagtatgtgtcacaaacctggctgtactaagggtgcctagagtcatgctaactactcctacccaccccatcgtaggaagccaactctaagatggcactggtttccggtgtgcctttgtggtaaacaacaccactgcataggcgctagctagcccgaatctggcgccgacccctccggagcaggtgcatgcaaattagatgccggcagactgaccaatcccggggggccacggagccttctcctgtgctagggtgtatataagcagtcctccctgggtacccgggatccctgtagcagcatcgaggcgttcctgcaataaaggctgttgagaaaaatccgaccgtgttgtgtcttccttgtcagccgaggtgggcacaacaaattggtggcccctatggggacccgaggatctcgtggattcagaactcttcagctggggaatggcggtacaggtaagtctcccaaattgattcccggttaaaaggggggatatgtttttctcgctcgtagacccagtgtgggtagctcttatcgttgttgttttgttttttgtaattt

SEQ ID NO: 21377 - DNA, 1154 bp, Mus musculus
gatctaagcccctaccctaccatcagtcacatcaacaaggagctgctagccttagaggttttccaagtgtctcacccccgtcgacagccagatacccctgccgagctgaggacttagctcccaaaccatgcccattggtacagggaagggagtaggcccagatgctgggtgttctactgctgtgaagagacaccatgaccatggcaactctgacaaagaaagacgttcaattagcttacagtttcagagattcagtccattatcatgatggtagaaagcaaggcacatgtaaggcagtcatggtgctggagaggtagcagagaattcacatctggatccaaaggcagcaagaagagtgacactgggcctgctgtgagcaatctgaaacctcaaagcccacccccagagacacaacgtcctccaagaaggccacacctcctattagtgcaactccctatatgcctttttattcaaaccagaacaggcccagaaatgaatgcattatagcagaggatttgaacttgagctctttcctcaggaagcagcagattcatggagtccaggctatttcttccaggtccccgtattaaagttttctctagcaacatgaagccagttcgatatatcttccttctgcttgcactatagtcactacagtctgcattaattctcttatctgtcacgtgttaggagggggtaggcagagacatgaccagctctcaccggctaatgttaattgtcaacttgaaataaagctagaatcaccagggagaagggcctttataaatgtctgttgggggttatattggtaccattgaggtgggatggcacccagcatggatggcaccattccctaggcagaggatcctggggcccagaagagtagagaaggagtggagcaaccaccacacgtgcattatgatcagctgctcacgctgatgtcttgacttccctgccattatggactataccctgaaaccatgggctaaaataaaccttctctcctttaagttgcttttgtcatggacaatttgtcacagcagcagagaagagaccatgagggcagccaagaagattgcatgaggatgcaagtttaaaatgcctggcaaagccaggtggtcatggctcgtatctttaataccagcacttgggat

SEQ ID NO: 21378 - DNA, 3618 bp, Mus musculus
gtcttcacaaaactggccattggcctccatctttcagaaagctagctgtatgtcccttccggctgtagcctctctaactgcctatcggtgtcaaggtaattgtgtagctgtgttggaaagccttccttccccatctgtggctctctgacacatcctcaggacgctcatatgcaaacacactcctcagataacgcatggacataggtagtagcttgaaagtagactattcttaggtattttcctatgaatggattcatgcactttaaaaatattttatttggtatttaggaaaaatggacttttaaagaagtatatattgtcccattatatgattacagacaagttaatctgtaactgtcatatattcatgggattaaatattattgtggagtttataatatatacattttgattttgacgagctgtactcagttccttctttatgaggaatgggcaaaatccaaaccctaaagtctgtgattgtatatttatgtttaaagaccactctgcgaaaagttgcctttaatgtcagagtccatggttctaaggtgtgggattgagtgaccctagtaattatgtgaagacgtttttagtggacagagagaaggtgcaaattaagtttgtgctgcttcagaactgtcttttaaatggacagtgaagggtgtccatttaaaacaggatagaacagaggctggaaaagtgaacaaaccatcacgtatgtcctggaattcattcactgcattagtgctactttgttcattggaactgttttgtaagccagagccttacttgttcttcttgtgctcagtggagaactctccagccctttgtgccatctgttagcaggatcagctagatgcatttttgggtaggtcttctctgctacaggtaaccctgaccggaggattggtttcctgtctccatcctttggggctgaagagagagtcagtcagttccacttgtggtgcagacgctacagttgtgaatgtgtcctcaaaggcatagttaagatgcatttgtctaacagcacaaaccctgcagtcacgtgagtgcttaggtaacaagcaggcctcgatagcctgacagcattgacatgttaaaccacacagagcacaccacacagcgttttctctgtcagggcttctatttagagtttctcctgaggctaaacatccacattaactcctgcccctatttttttcccatgaccagaagtgtagaatgtctacactttgggaaaggggaattacatgttcccttcagaccctttgctgtttgaaaaggcaagttttcatctgaaggaagggaaccagggtcctgttatacgggtagttggttaaagggtgtgggttctgtaaaaagcaagtccttgtgcccattgtgtgcctgaggtcagggagctgcacactccttctttggggagtagaaaatgaggatcagaacccaggcacgtgttgggtacccagttcccaatgacccgagcaagcactctttagtcctggtagcattttgggtgactctcaggcaagaacttctggatctctgtgtatctgatgctggtcactgacagacttgccctttgtgtaacttctgtaacacctgtgggcattcccaaagaagatccatttatctaggtgatgtgattagagggacttgtgatccagtgtgcagagaaacactgtaagcactttgtggccaaatttgcagtcactgttcctgctgagatgtaatgttgcccccttgaaccaagaaggctaaccagagactctgaaccactgtctcaaagctaagaaaacacaatcaatgacataaagcctgatagggtatcgattgatagactggctcctttacaaatcgtcattcctcatgaactaagtgcaaagatagtacaccctggctgtgaagttgtagggctggtccctggtttgaacccatgatcggattcttagcatgtagactactggcatggctcttcattcttagatacaataaaaatggcaccccagagacctagaaatacaccctgctttatgaaatttcagtttcctgtcatttaattggaagcttttttgcttatctggaagtaaaattgtgtatgtgacagtatattttctgaagttctgacaagatcataaaaggttctgaagtttggagttgaataatgtatagtcttacagaagagcccctaacccactgtcagtttaaggggtcctcctcggctcctccccactcagggttgaaatgcctggtttttagtggctctttgttatggttattgttcattcttaggttcaggccagggctcatccagaaaacattatcttaattccttccctcatagccttaatagtacattttattaagacatgttgaaaatacatctgtgtcctgttttgagattattgttccataagtgaattagctttcatctaatcagtctgagttatttccatttagccttgttaaagaacaagccagtctggaaaaagcaatcccgtgatgcatgacgttggtatatccatgttctctattttaataatgggaagtattttgaaacccacagaagaaatgtttgatgctttgtaataaaaaccaaaagcatttgcaaatgctttgtaatcagagtgatagattctagagagcagagtagataaggataatgggaaggcggggaggtgcttggagatttcctaaaccacgctatgccatttgcttatatatccaaagggctactctggagccattgcctgatccatcagtggttaaaagtgattgtgtttccttgctaaatgtttaagcagctgacaaccatgagacatgctttccttactgtttcgtatcgtatgctgatgccaaccaaggtcaccaaaggccttgaaggagaactatcacatagtcttgtcttttttcttcaaaatataaacaaatccaaactaatccatttgagtcaacttgttttccatgtctccctgtcatgagaaatgctgtccacatgtatggtttccacactaagaactcggtaccaattgttacttagtttttctgttctactgagtggtttttcttctgtcagactatattttctcacctcaaagcactgaatgtgttgctgtgatacacggatgaatcctgagccatggttttaacagctcagttctggtgtttttatattatgtgacagttttgtgagatgcttttgtgcatttttttgtcttcttttccaagttttgaaatctgtcatgaataaactttttcactgtgcacctaaaatatttgagttctttcttaataagcctttttttctcttcagcttaagaggaagagtattcagtgaacacttgtgaatctttcataatctaagattataaaaattaagaaaaactgagcctaagatgaatgtctgcttgtatgtaaaatcctatcaaagggtatagaacgatagctcagccatcaagagcacttgctgctctcgtaaacgatccaggttcagctcccagcacccacacagtggctcacaaccatctctaactccagttccagagaacatgatatactctcttctggcctccggtggcattgcacactcgcggtacacagacatatatacaatcaaaacac

SEQ ID NO: 21379 - DNA, 1145 bp, Mus musculus
ttactaagggtgctggtagttgatgaagaaagggtggaaggtaaccactgagttatctcagaccctgcccttttggaaatcaggtattagtccccgcaccccatcttaggccatgtgtgttatgtagaaaatttgctttggtaccaaatacagtgaaacccagacatgtttgccgtgattctgggtttatgttttttacactgaggacagaaagcttttggtgtccatggtccttagggaaagcaatcatgggattttgctgttgctgctgactgtgtgtgcatcttacttgaccaaagcctgcaggcgacagacagcctctcacagccggttccttctgaggttctggagcggcagaatgtattgtagtgggtggccacagagcggcaggtgctaaggcctctggtggagtgggcacacagtggcatgggtctctgcagccatccatacctctgtttcccagtctgtgttgtctgtcattcttctgaattttgaataattaggtttatttattactttatttatgttttttaaagcacatttcagattgcctttgaaacagctcccatctgtttctcataaggcttcccatctgctctgagccacgaaggccacctcttttatggcgctaaagatgattttagggcttagaaaatgatcatgtgtgtttattctaacatgtcatcctgcgatgcttgggaagtctggcctttcagagatggaggactccaacctagtctgtgttaggtacatctcagtgctcccactgcgggattctaaggtgtgatggacgcagatcaaactgactggggagtcagagataactgagcaccatgattatgggacgccaaagtccttttcctcctctgacaccctcttcataatgtttccgttggcaccttcctttatcatgtggttgcctcacaccaggcctctctgtcctacagaagtgatcacccaaagagcaggatcttgccagtaggtgtggtcaggaacaaaggacgcaccctgtagctgtcaacctggaagcaaagtgtgggctgtatggcccgccatagcctctcagtgaccagtcagcaccacaccgccgttctctcgtcattgcagatgtgctttgtaggggtactggcaaaagtctctgtgcc

SEQ ID NO: 21380 - DNA, 2564 bp, Mus musculus
gccatcaccaccaaagccgactgtactttgcctcatgcttttcatttagcattgtccttactcctgtgtttgtaagacccacttcacagcccacgtcaggaaccagaagataatcagaatcatgcagaagatttggcccgaggggcaagggcagggaataaatatctcctcttcatagtaaccttgtttaaaggatctagccttggagctgaagagagggcttagtggttggggacactgacttctttttcagaggacccgggttcaaatctcagcacccacggggtagcccacaactgtctgtaactccaagatttgatgctctcacatagacatacatgtaggcaaaatacataaactaaaggtaaataaataaaacttggtgggaaaaaaataaccagcccccttccacccttcattcacagtcttcacttctgactcaaaccctctcgtaggctgaagggtagagcgtcctcagagagatctgcctctgagcctggactgacattctggattctgcctccagaggacactgacaagtgctggtgcaccatatggggagctgtagggcagacaacctgctccttgcatgcacaaccatgcactttggtgtttcttcccttattagttaagggtatccatatctgagtctctgatgactggcaaggtatatagccacattacctggtgtgtaatatatcttgcaaaaagcaagataaacatctggcttagatttcttgactttagacaaagggggaaatgatacctgctaccacctgtttttccaaactgatgaatctacctaattgcagtattttgacaaaacccatagaaatgtaaataaatggttgctgtgggatcaagtatggtacacacctgtaatctcagaaggcagaagcaagcagatctagaattataaattattctgtgttacaaagtgagactctacagaaggaacaaaaagagagtggactattgctatgacttaatgtcaggacgctgttctcccagtgttctaggtaagacacagctgcgtgttcgtgcctctctgcttccaacatggggttagttaagaaaaggagagcagtaggctttcctctcttcctgtgccaagctgatcaggagctgtcaagtatttctcacaaataaaaccacgttagcctggggctatgaagggggagttattaaaatcgggggttagttaagaaaaggagagcagtaggctttcctctcttcctgtgccaagctgatcaggagctgtcaagtatttctcacaaataaaaccacgttagcctggggctatgaagggggagttattaaaatcgggattctgcttggcagtttatcaaagaatatatagtgcctccaccccaccccctccagttccagaacctatggataacctcttacctgcttactagtatactcagtacccagcaggcatcttaatccattaagctggttaatcaaaacaccttccaagtggagaaaagcatatccttcctcccctctgccttatccacgtgaagtgtgtgctcgggcttctagccagcgcacagggaacagagggaggcccaccagggatcctggcttgcctaccgaaggctattgctgctgtagttttcagtgacttctgtcttctaagatgctttttcctgtagattgaaaggtttctaggaagaaaacaaacgggaacttgcttaggccctaatgatgagcgttttcctctttgtggagtctgaaggctcacattcacagtttacccttaggagcagcctggtgggcgggagctgtgagcttgtttgctacgatgtggccttaaaactgttactgtttccagtgtgatgaattctaataagtcaaccctgaagaatgctgtggctcttgtcccgtgtcactgcttttgtgtaaagctttgttctttgggagcagttattggagacggaatgaaaggtgcttgcaagaacagcaccctgatgtgctcagtgtctgtttcctgcgccctctgcactctttccgtgtgcaaggaactccagttaactcaaagtccagcacaggtcccaggtaattcgtgtacacatcctgagtagagaatgtaccaagggtggtggagttatcgtcccccttaacactgtatgtcaggattagtttagccaatagttggaattaagagcttccttactagtttgttcttcacaggacatagaaacctctcctgtttgtttagcctgcatgcccacagtcttgatgatccctctctgtacaaaggcagctaacaataagggacgggggaagagaagagaacaggtgtctgtgggagagttgaattagagtgatcttgtagatccacgttttcccactgaccaagttactgtaggctggagtctgcaaggtgtactgtgtcgtgaacccttttcattcttgtaatgttcttatcatctgggaatgtgagatttttaattttaggaataatcttacaaataatcactcttctgtagccgtcttgccagatgttttatttttctttattttattttattttatattggatgactgtgaagcta

SEQ ID NO: 21381 - DNA, 1210 bp, Mus musculus
agaaatatacatgcacacacacaccccttattttttggtagagaactgctaagtgttgacatcgtaaggcagcttttttttgatatttaagactgagaaaattgaatcaacaattcactagggtaggcaagtctagggattcggttgcaaatacatttgggtggtttagtgcaggttcctgacactgctgcaggcagaggtgaatcaatggctaaagccctgtgaagctgctgccttttggctagagtgacaggagttctgtcacttctcccagtctgctttgggcttctttattgcttggtggtcccagagtatcattgtcttactgggcagcaggcttttcctacattaagtactgctttgcatttgcatttgtcagagctagacactaaggcagcccagggtcaaggactgtggccatagttccccacctctccgtaaaaagagaataaaggaattctatcaaattccatctgccacagtaactcccacaacataccttaaagagaaagtaaaaaacaattatgcaccatttcatttcggctgctttattcattcatgcgtttcagactatatgtgcacactatagatcttcagaacatcattactacttttcctagtttcttaggaggcttctgtagttgtttatgctttgatttttatccccagctctctttcaagagtgggtgtcattgctgtgggccaagacacataaatacttattccttgaaaatactcagctgcaaatttcaactaaaagtcaattctcgagagacctagaatatgttaaatgtatttggttggtttcccttctaaattttcactggttctccactctacttcttttggaaattaaagggccagtgtgtgctttcttagctctgtaagaatctttagatgtctatttgttttgtcttttcttccttccatccatctttccttccccccaccctttttttttttttttttttggagacagagtctcaccatgtagctctggctgtcttcgaactcactatgtagatcaggctggcctcacactttgagatctgcctgtccctgccttccccttcttagtgctggtatcaaaggtgtgcaccaccgtgtctggcttggctctattcattttgtttggtattgttcttaaagtgtatggctacatgtaatatggacatttttgatctggaagtcctctaagtgtttaagaata

SEQ ID NO: 21382 - DNA, 1744 bp, Mus musculus
ttgtgttttctttttgttttagttctggatttttgaagatgtattccttatgtatccctggctgtattggaatttactatgtgagccaggctggcctttgtaaaccagatctgcttgactctctgctcctgggtgtctcgattaaggttgtgcaccaccacacccagccatatgtcctttattttttggctagtcagaactttgttgtttgaggcagggcctcttatatatctctggctgtcttagaatatgacatttggaccaggctgactgaaactcagacctacctgcctgcctcattaccgctgggactcaaatgtatatgaataacttgatacttgtttattattttatataaatgttgcagttgaggtttttaaattagctgtaaacatggaaatgttaattcctaagtattcagatccagctttggataagtatacctttatttttagtgtccttcatttttccacagggtatggacagtggatttgcaggtggagaagatgaaatttacaatgtttatgatcaagcctggagaggtgggaaagatatggcccagagcatctacaggcccagtaaaaatctggacaaggacatgtatggtgatgacctggaagccaggataaagaccaacaggtaccgtgtagacagacagacggttggtgttccgtcccgtttacagcagccaaggaagagtgctcatgacctctgctcttttcccctagatttgttcctgataaggagttttctggatcagaccgcaaacagagaggccgagaaggaccagtgcagtttgaggaggatccttttggtttggacaagtttttggaagaagccaaacagcacggtggttctaaaagaccctctgatagcagtcgccccaaggaacatgagcatgaaggcaagaagcggaggaaagagtagagggacctcttaaaactaaatctgacatatgcagcagaggactgcctggtctggcctcattgtgaacagatgtccccaccccctccagacacttgagactccagggaatagggcgtcctagtgggtgggggtggggacatcctcttggaaatgggggaggaggaatgggatgaggaatcatcagagagatgaccaggagggagataaagactggactgttaaaaaaaaaaaaaagattaaaaaatctcgatgatagatcccagcactccttttcattctgggatgtaggggcattgattattctatttcggagtagtttttttatatggaatggggttatgtttgtgcttctccaatcttgcagcacttagaaataccactgccccacacagaattgagattccttccttgtgtgtgacactaatccagctgtaaccttttctgtaaacgttatgaataacctcacctcaaatggtgagtgggctaatgttcacacactggagctctgtcaactgcatttgccctgtgtgcttctccaccgcgccatggggaactaaggtcttgcttagtgcacctcatttcaaataaaaacgtgtagaaaaagtctcaattctgtttatttagtggacggtacactgatcatctcagaaatctttcttcatcagatgtttgagctccgtgcaaagcctttgctctttgagcttgaacgtggatctatgggagggaaagcactgtcagaaaaggtaattttttttttaaagaaacattaaaggataatatagctacttacaagtttagaaactcatacccagtgact

SEQ ID NO: 21383 - DNA, 1156 bp, Mus musculus
atcagctagctcctcagtggggattataaccaaaattagaacttaggccctttctcctccaccttctctgtctccctcccacagatccatgtgggtccacagtagaactttcagccacttgtaactgtcaggaaattggcagcaggagggctgaatagacccctttgttagcagcacactgagaatatccaatagttccccttgctttcagctcctagggtagggaggaggacagagcctgggtaactcacagagtctggctgcagtgggaactggctggtcccactgggaggtcagctcttagagtttccctaaaacgaagcagagcctctgcctgctaattgggagatccagcatctttgccctgtgtcatcactggcctctcctgctagagatggacttccagtccaggggccacccccatccactcattgctttggctctagcaagctaaggctgtaatggtatctcactagagggggctctgatttttccagggggagtgtagacacatgagtaggtatactgatattgtggcttgcttgtgaccagtggactctgggcgggtggaccctctgtgagtctgggccactatccctgctgctgggaaaaaccagtatccagatggagagaccttagtagacatctaatttttcaagaacgaagtaaggtagtcctgcctctctggccctcagttctcttagtggagatgatggaccagttgacctccaattaaggatcctttatatttgaatattttatagaccagtgactctacggcttagtgagcactgactggctcaagagccatatttcagaagcgttggaggagtgcgtatagctatgcagattcctgagaaccacccctgggtacacaggagagtctagaatgggaagaagggttgcagagtgtccaagtgagtctgcagcggatctcactccagtgcaaagcccttgagctatccgtgctcacccgaatgtgtacatgcaagacctaccttccagtattcaccagtagccagcagcctgctggagcctgtttatatccctgaccatggtagcatatacagccaggatcatatttacaagaaactttaggagatggtgacagcaatttccattggtcttggattcagccctagtcatcaggatccca

SEQ ID NO: 21384 - DNA, 1140 bp, Mus musculus
cacctgccatctttgatttttctccatggttctgtgctggggtttctcacttgtttcttttctcccctctttctttctcacccctcctctagacacaagaagagggatgccggctctttcttcagaaggactcagatatctttcagtgaggcctttagcctgtggcagatcaaccttcatgaacttctgcttcgagtgagggccttgaggctagcttgctgggtctcagctctcctgggctggctgactcgggctccacacagaatgtgatggtctttccctgccccttcgtagtgtctttccacacctcattccttccttcacgctgggacgacccactgacccatggctgcctagggttggctgtggtcccagagtggtcatccatggcaccctcatgctctgccattggagcccctgccttggggtggccttgtcttgaggtcctggaatgtcctggagagtgagatgggataaagcaacctctctcccatctcctgtgtgtgccattgacttggtcatccctacttttatgaggactgtgagaatggaccaaccacctgtgtcacaggggcgtgtttaacttgtagggaataagtagaaactcagaacctgcagagaacagactttatatttttgctgtatcactcccaaagttgtctcgcctcagtgaggaagactgcatctgagagggaacgatgcaactgtgggctcatgctgtcatggtgacaccttcagtgttatatgtattgtatatattgtttattgtaataaaccaataaacagtttcaaggttgcagggactgttccttctcaatcattgtctccatttagactttcagttgctcttgctagctgcttccttgggaaacccctaggtttctcagagaggcctaagaaagtgaagtctggtttggttatagaatttatttgctagattgggagcaaatcctcatgggtcacagtagacttaaacaccatgtaccctgagaccttgcctccagaatccatgcaggctgtaagacccctgctgctgaagtggatgctcacagacatcttttggatggaacacagggcccctaatgaaggagctagagaaagtacccaaggagctaaaggggtctgcttccatataggagg

SEQ ID NO: 21385 - DNA, 1174 bp, Mus musculus
aactcatactggcagagaaagtgatcatttttaccttatattttcctatttctgtgtcacaattttccaacccaaccttgaatttataattgatgcctttccaagatgactggctacaaggaggagaagggattccctccaggcaaatgtttccagcagtttagattcaggcacatctgtacacagtgaattcataattgctttctccccaatcaagtgtcatgttttgtaacctgttgtggaggtgcctgtggaatagtagactgcttcttaaatgcttatcaccactcacctgtcatttcagcagtctgtaactacatgaggtattttcaaactattccaattatcattttaattgcaaaagaatttctaaatgatagctgaatcatagagcaccataaagaattcttaacatcatttatattatttgtcatgttatggccagtcgtcccactgtgatcatcctggtcatactctggatggtcttgctctgacctccatcccaacacccctctcttggctcagtggcatccactctgtaggaatccttatatacttagtgggatccacgctgtaggaatccttatatacttagtgggatccactctgtaggagtccttatatcctttggtcctacctgactgccctccacatcccagccttttcaacatcaatgtgcttttaaaaccttaacgctctgtcatgcccatctaccaatgaatgctgaataatggtcatcatcctgaaactgagtcctactgggccatggtggaaagacctgcaccgaggcaggaacaataaagcaattcctttataagaacattgaatgatgcgtctgttaaaatacacttgtttattacatttcttacatttctcacatttcatgaaagtggtatattttcattcctaatgttttattaaattaccataccatttgaaggtgtagaagaaatgactctctccccacacctccgccccatgaacatgaatgcagttcttgcagcaggacatgcagttgttacacatgaaagaatttctgcatgctgcgtgagttccgagaccacttactcagtgtgacaccctcttcttcaggaccttccacttatcagtgataagaaaagtttcaaagcaggtgtacctgtactgattcacacttgctcttataaagtccacg

SEQ ID NO: 21386 - DNA, 1205 bp, Mus musculus
acctagaacagccaagcacagtgtccggctctgtcagcccggctctgtggaggtggacacaggtgggtcctgagggctctcgccagccagcctggcctgcttggtgagcttcacgccattgagagaccctggccaaagaaagaaagaaggcagacagcacctgagcagtagcacccagggctgtcctttggcccccacatgcatgtatgtacatgcatatgggtgggggcttcatgccttgcttcttagccatctctatttcaaatgaaggcgtggactaagaaggtgtgatcccccgtgttctgctgttttaatatagtaatgagagatactttcaccttttgtgtgacttcaatttgtatgtttttattctgtcttttaagaaatttctctttcccattggtttcatttttttcctgattactgtgaagaatagttaaaaataaataatttttgtgctgtatacatgcttttgtccttgaacattttatttaacacattccttcacgtgtttgtgttactgtactccttagacccttttgttttgccctattgtaaagtagctctaactgtagtaagtatctgatgaaccgacttcaccaaataacctgcagcaggtgtcccaccgacggctggaaatgtccaagccttgggatgaaatgaacagttattacggtgaagtcataaagcctaaacgtctgagtttgaatcccagggcgttgtcaccctggagactgtctcagcagttttggtttttatttcctctgttcagaacagctgataatgttttcctgggaaggggccagcaccagatccacagctatacataaagcatataaaaggaagaagtcagcaaacgttagtggcccttgtactacaaacgtcatggtttttgcttgactctcattggacgttgcattccagtggctgagcctgagacagggtgatgaggatagtataaggggagactgcacaggagcacatgtgaggtcacagcccatgcgtgagtataggacatcaggtcactgcttagttaccacatgttgggtgcctactaaagttctgttctaatttcagaactggagaggaatagaaatctctgcagtcccgctgcttgcactgcattgggtgagcacagaatttaaaagcagctgtattaggtatataagactgttgctttgcgacattagagggctgcagcttgt

SEQ ID NO: 21387 - DNA, 1193 bp, Mus musculus
gcccagacaggtctagacattgcagagatctacctgcctcatcctccacgtgcagagagcagaggcttctggtactaccagggccttatgttttttgataatggtataggatgttcagaatctggcatatactgatatttcatattcatagtgtgtatcaatttgagctggccaggtttctattgtcatagccatataactgctgcactggacaggcaagagagaagatgaactttgacagctgtagcttggtatagggcagtggttctcaacctgccagtcgcgtcagcatggggaatcacatgaccctttcacaggggtcaccttagaccattgcaaagcacaggtattgaaattataattcatgactggagcaaaaccacaggtatgaagtagcaacacagataattttatggttggaggaccaacccatgacatgaggaactgtattgaagggtcgtggcattaggaaggctgagaaccactaacgtagagaaatttcatcgtgcctagggctcgtcatgtgatgaaggctgctttgttagataagtgtgtagtaagcctttgcttaactggcctcttgaacatctcctagtctcacatctcttttcttttcccagaatacccttcttggaatgcttattgaagtatacagatatcggctttgttagatgatttttctaagggtccttacagttttagaagtagccataaagtgttgagaatcctttctaccctttgcactttcctacaaccaaatacacaatgcatttgtttatttatttgtttgatcactgtgagaactgatccaccatacatatataatattgcctttaaagaggtggaggctagcctagacttacaaatgagcctgcatgttaatcttactactaaagttagtctcccacctgatagatatactcagagtgagtactttctctagacttggggtacaactcaccctctagcgtgacctagcaagtctagtgatggtgagttatggatagaagataccgggtgctagggatttgcaggctgggcatctggtaccacatgggcttctggacggcataggagtgtattttcactcctcccggtattctctgatctgtgcataggaaagtgtcttagccagggtttctatttctggacaaaacatctcgaccaagaagcaagttggggaggaaagggtt

SEQ ID NO: 21388 - DNA, 3164 bp, Mus musculus
tgacccgaagaattacccttttgatagactgaactgaaattgcttattgtatgtggttatatttggtaaaaattgcgtgtgagcttttttcagaagggcaagaattatggtgttgaattttaattcacttgtataagaaaatttaaaactcataataggtcttaaacacatttttacttgtcactctcctcagtactcatacctctcgcttccctgctgtctgaacatctacgtaagatttaaagaaaaggatcgatgggcacagcttggagacgaagttgacccaggaatggatgcttggtttaattaggttttcctgcttgttaaatgcaacttaaagacttgggtcttacctaggttgactagaattaaagtgacagcttaatttctgtacagaaaaactgctcagtcccactctataagaggaaaccccaaatgggctctcaggaatctgttttcatctcacaaaggtcccatggagctgcagttgtacagcacacgtgagatgtggaggttttccttctgggctgcgtgtgtgcttactgtgcccgagtctgtgtgagccctgggatgacagtctgtgcgttggtctaagcataagggcaacggatgaggactggatttttattaaacaatttagtaattataaagtttcttgtgtttactagtaaaggatttttaaaattattttaattaaacaaaatttttaaaaaaaactttgtaatttgagggaaaagtttgagggtggagggggtagaggaaagtgggccactaaatacaaatttacctctttttcattgggtggcccttccaggccattggtgatgtagacttgggctccaatttgcacattggaaagaaaatacagagatttgacttgtatatcagaaattctagacatttactgtgtgttgagaatgtgtagctctgttcctgtaaggggctccacagaacaaagaggcagcctcctgggacctgcagggactctcgctcacacagctcacttctgttctagtgactaacaacatttgcattcgttacattcattcgataacttgcctgttgacttttttttttttttgtcttccatttttgtcttcctttattttgactttatatagttctggaagtaacagataaagtatatcacaaaagaaaaactgtgagctatattgtgcttttttaagaacatattttaaattttgttaatgcagttgatttctcctccccacttcgcacccttctgaaccaatttatgttgtgaaatttggcatcagtggtggggtcctcacatgataggagttagagtttgcttgtattccattactggtaatacaggttttttttttttttttaattttgtttgttttcttaatgtagctttttgaggggaagttagtttaatctcttattctcaaagcacacagcagttctggtttaagtatagaacttggcgaacaacagaatcccaggagttgctgagttgtccctccctcagtatagtctctagtctgtgtttactcagtgagatcagtaacctgaactacctatggcagcccagcagtgctgctccagtgaaacttgggctaatcagtagttcttatgctaattcagcacaggccctgcctccctgtgtagtcagacatactgaaggttagcattgcccactggcctgtttcttctagctgtacattgtcaaacatgaacaaccacttctttcagagtgacacaaagggggcttgtcttgaagcaggaactgaccatttatatttgtacctatgtattgcctaataatgacagcgtcctggactaatcctttgatctgggaaagctctgaaaggtggctccagcagccccgcactgtgctcttacgtgctgttctgttgtgttccatttaaatcaagtagcatgcggtgttctatcgtagtatcgtagcttttgctgtgtaaatgtcacttgctttgcattctcaatcatgctttcgccataacatttaactgatgatgtcatgaagttctaataaagtgtcattcctttggaaagcaagggattcccacttggagagttttaggatgaaagtagcaagtttatccaaaaggtggaaccagggacgcaagcagtgtcttcagaaactgatccgtttcgacgtgtacccagagtgacggcaccttttataggacacgatgccagtagtgtgccaaggtcagttcacatagatgactaacatggaagtgtgtgcctttcagtagatgagctcttgcctggtggtcatttgtattctcacaccaccggaatgcccgcgaacacacgcactttcttagtgacacaactttgtcccgtgcagtttctagagtcaaacaggataggaggggatatttatatgaggcgtttgtatttgaaatgttgaaatttctgttaaataagtctcacatttacactgttgcagttttaaaagtcaggctggcatcaaaattcacgaagcgtgtaccgagattgaaatgtgttattgacaagcatattctggctttagaagacaatgtaaaaaagtactagtttttatataaaggctttcttttgctctattgaaaatcaagtttttcttttggtggcttgtatggacgaatgcagagttgtctccctctgagagttttttttttttatattatagcaataatgtcaccatattagaggataagtataccgtgtataagaacagacctatctcctcttagcagttttccctttataacagcattttcttccacttgagaaggctcttgtattttcatattacatcatatgagaatatgaagcttttgagcttttgtgcaatgtgttattttgttgatctgtgtacattttcatttcatgtctccttcctacctgtctgaatcagctgtatcagatgtggaggttttggttaatggtttgtgtgttttctcatccttattgttcagtttagcttttcatctgttacccttatggaaattattctggtttatattcttcctcctggaagcccacctttgcccttctgttatcttcctttggtgcatgatttaaggaagactgcatcaaatttaatatttttagttttgaagaataaaagtttcctcccgtttgcggggagaacaaaccaccattgaataaaccattggtctttc

SEQ ID NO: 21389 - DNA, 1135 bp, Mus musculus
cagagtaatttccaggacagccagggttacatggagaaaacttgtctcaaaaaactccaaaacaaagaaggatctcgatccatcatacatagttattttaatatgacaaaaatctattgagttataacattttctgaatactgtagttagatgaatttgactagaaaggaaacttgaggtaactgaaagcttagtttaaggtggcagctgttgggtgactggtttgcttcatctgagagagtatgaaatgcacggtgagtagtcagatgtagcagaaggcggtgtgactgggtttaccagttatagctgatagatttggagtgtcccttttagggattctttaacttcatttcgtgtgtgtgtgtgtgtgtgtgtgtgtgtgtgtggaatgtggtggcccatggtatccatgtggcagtcaggacaacttgcaggagtctgctctctgcttctgccacgagggctctaaggatggcactcaggtctttaggcttggtggcaaatgcccttgcccactgagccatttccccactcttcagacctgcttttcatttcatctttgatggctgttcctcctgttgcctataggcatggcactaggattttaagtcatcataaattaaaattgacttttttcactcagagaatatcaagatattgggtttatctatgtgttctctgaaatttgcggggtcaaacattacttttttttgttttttcttttaactaacattgctgttgtttctttcttgagtgtgatgtttgtgtgcacacatgcaggtgtagatgctcatggaccatggtgcatgcatggaagtcagaagacaagttcaggtgttgatccttgctttccactctgagacaggatctctgttgttttcctctatatacactaggctagctgtcttcaagcttagagctctcctgcctgactcctctccccacctcatagagcagtggtattaagagtgctcatgctacgtagctggcttttatgtgtggtctgcagattctaactcagggcctccggcttgtatagaacaagcatttttaatccattgatttgtattcttcaaatagttaattaaaatgccatgatcatggtagctgtcaagttgctagaaaaggatgttgt

SEQ ID NO: 21390 - DNA, 1898 bp, Mus musculus
gttcctgagaaatgtaacacgtgagcctatttattcattgtgattcaaacgcctatagagtgtgagccacagcagggctcggccgctttaaatacttctaaatcaaacgtactcattaaagaaatggaaattattgacactctgactctgagactatcctgtgcttacagctagcaagccgcaatcattttctggaggacttaagtcatgatttggctctgctttcatccctgcctccagtgtcacccaagtgtcaggatggtggcactcaatgtgttgctgagtctgacctacagagtcacctattcacatcaaggaacacttgtgctctacactcagagggggggggggggggacgacacaggtgctgtccacagttacgctattgattcagtttcgttgctgccaatcaaacaaacctgtgagcctctgcctcctcactgtgacagtgactcatggaagacgctcacatctgatggagtgctcagccagtcctgctgagtcgggtgtttgtcctcccatctgtaaccatgtcctcacaggagatgggagtctgagccaggaaggcggggctcacaggtgaaatcatgatttcaaagctggcttatattttgtctttttttttttttttggttttttcaagacagggtttctctgtatggccctggctgtcctggaactcactttgtagaccaggctggcctcaaactcagaaatctgcctgtctctgcctcccgagtgctgggattaaaggcgtgtgccaccactgcccagctggtttatattttttaatcatctgttaaagggtagaaaaacaagagaatgagctgactttttttttccaccttaaaggtcttgggaattaattgctatgagtaggaagcattgccatttatacttttataaattcccctgataaaaggtggtaaatttatctcttctaagaatggttggctcagattaatcctagcaggtctgaagttgagattgtgataagattagaatgtgatagagaatccaatcgaaattaacaaaaaattaaataaaaatataccatctaataagtgaatcttgtggtaacgcttcactgccactaccatgacagcattttatataacattcattgctcagtatatttattgcctctatggttctgatgggtgttttcgaaacatgaccactgtggcgttgccaattctgtacaaatcaccacatattaagtatgctctttgaaaatgagattggctttagacattctcattcctaatcgtgtattaaagagattaagagtgaaggagatacaggcgggcagatcttaagtgtgggaacaaatgcatgccagtaacatccccgcggtcgcctaagcaagagcatggaagttttctatttcttctagtgtgccttagccaatttgccaaagtccagtcctgtactttaagagttgaaagggagtttgggaagagcatgcatatgtcaacttacaattccaagccataaaggcagaacatttcaatagtactatgttctgcagaacctggaaaaaggcaaataaaaactggacataatgaaaagctacgaaaaaaacagactaaagaaaataaatttcagtatgaaaagaattggaaactatccagcactggaccctgaaatttagtacgaagctataggaaagaaggggcatcgcggccatagacagcaaaggtcttcagctctgccaggattgctcaagtgctgtttaaggtactgttagcagccagcttccctgcggggacaagatgccacacactaagctgttggtaaggcatgctgtgacagctttgtggaggaaaaagttgggctttctgtgactatttaaaggacccaagcatggagccagctagtattgctgactgacctgt

SEQ ID NO: 21391 - DNA, 1081 bp, Mus musculus
cggccagcacacgcctgagtggaggcttacattcaagtctagctactgtattttaggggagacattaataagttgaccgtatccacaggcaggtgacccctggttatagaaggaggggggaggtgcagctctccagcagagcagagggcatggccgggaagggagcgcagggaagttggggaatgaggtaatggtcaattaccaaccagggtttccgcagagctataaaaaggaagaagggttagctttgttttgcataacttcaaaggcaaaaagaaataggaacagaagagaactttacagatgacagttacaggaatcttctaggaaagaagtgttctaaagaagaacgggtaaagtaagatgtcctgctgcagcaagtgcccagaggttaacccggccagctatcccagggacggtcacgctgggttgggcaagatggcaggaaagctctttttcaaacaatcttgataggagtgaggctgtctaagccccaggcagcctttccgctatgtgttttgtgctgttggagggcagtagagttgtcgagaagaagtctgtgtttttccacacttgggttaaaggccttgagagtctcagctgaccagtgggctgaagagttggttgaaagggtgaaggtcatctctggcttagccctgtgtcaggagccctgcctgggctgctagcaggcacagcacctgttttgccttgttcttcccatccccttggctaattcttctgccttggtacttcacctgaactatttggactttttaagatttgttttgccttaatcaaaagatgaaacaaaaagtccctctgccctatttatatttggcaagcaatttatcactaatttttaagtatggactaccctcttggttccatcaaatttggtcggcctctactgtgcttagggtcattacggatcacacgtagggaggtgatgtgtagttcaggacttactgataacctacctaaaaaacatatagttgggcagattaccttttgatatgcagaatgtttgcttgccacagtggtcctcaacttttatttttctgtgcttacaaaaacaaaaaca

SEQ ID NO: 21392 - DNA, 1118 bp, Mus musculus
aagagcaggaaaggcgctcccaaaacagttccgtttccagtaccaccggcaaaagccaaagagattctctgattgtcgtctaccaggatgccatcagctttgatgattcaggcaaaagccagccccaccccgacgccatcgaaaagctcaagcaactccaaattgatgatcctgatcccgtcggcaatacagccctgcccgatgacgaccccacggcctcggttgaactggacgccccctcacctgcctcagcgctctctcagcccagggacgggtggccaatgatgctgcgaatccccgagaagaaaaacatcatgtcctctaggcactggggaccaatctacatcaaactgacagccagcggttacctgcagctgtattacgagcaaggcttagaaaagccattccgggaattcaagctggagatctgccacgaggtgtcggagccccggctccaaaactatgacgagaacgggaggatccacagcttgaggatagaccgggtcacttacaaggagaagaagaaataccagcccaaacctgctgtggcccacgcagcggaacgggaacaggtaattaaactgggcaccaccaactacgacgacttccggagcttcatccatgcggttcaggaccgtctcatggatttaccagtgctgtccatggacctgagcacagtcggcttaaactacctcgaagaggagatcacggtggacgtccgagacgagttctctggcacagtgggcaagggagacaaccagatcttacagcatcatgtcttgacacggatccacatactgagtttcctctctgggctcgccgagtgccgcttgggcctcaatgacatcctcatcaaagggaacgaaatcgtttcccggcaggacatcatgcccaccaccaccaccaagtggatcaagctccacgagtgccgtttccacgggtgcgtggacgaggacgtgtttaacagttcccgggttattctgttcaaccctttggacgcatgccggtttgagctcatgaggtttaggaccgtatttgccgagaagaccttgcccttcacactcaggaccgcagcgagcattaacggggcggaagtagaggtgcagagctggctgagg

SEQ ID NO: 21393 - DNA, 1655 bp, Mus musculus
aactctaagatgccactggcttctgtggttttcctgtgccatccacctcaggcctccttggatggcagcagttttgcctccatctttacttcccacagaaagtacttgaagaaaatatctcttaaaatagcatacactacctaaggctggacgggacagtctaggtttgttcttcatgtagcagacttgccccttgctgtccttttacgaacggtcactacagcagatgcccttcccgagacttttaccctctgtttccagcctgcggcgtctactgcgagaactcagttctcgctgctgctttcctagatgatctcaagcgctttgctctgttctcttacctagagtctgtgggacgtgggaccgaagcaaataggcactgggttcggtggttctcttaaaaataatgcacagtacttactaatggcatccatttgaataaagtggcaataaagctagttgatgtcagtgacattaagccaactccaggattcgggagttttagcattaggatttagatttaccagctagagcgtggcttccttcctccctgtagcccatccctactgctgcctttcgtggtctgtctcgcaggtctgtcttgcggcctaccaaggctctctgacgagcctctgttctcctgcgccccgccccgttgggcaaccagctacatcagagtctagagaacacaaattttacttctgtggcggtgtacaaaagtggagtttttgtttttgaagtttttgtttctgatttctgggttttcttagttactagccgataatacagaaaaaggtctgacaggggctttattttcccccaaatttattaatacctaaactagattaatgtaaaagtacaagtcctaaatcttggtactcctgaaggcttgtagttcttctgaagatatatatagatagatagattaacttctgaacatattaccactcaccatctctaccttggagaagcgttagaaccctgctccaggggtctggtgaggagcgggtggctgggggttctctacacagaatttggtttcgtctggctgcttggttgggttttctctctctcctctgctccccaggtttgctctctggtgcttaggagcagccatggcagcctccacatgcagacctcaaccccttgtgtgtgtggcatttgcaaccagtgaccaaccacatctgcaaaacacgcaagaagatacgcaagaagtaaccggaacaaaggaaaactattttatgcaaaaaaaaaaaaaaaaaaactattttcatcagttattgcctcagatacgagagaaactatttctggatgctgtattgtcaggtttttaagtgggtatttttctttgaaaaagaagctaagtgtcttcacccactagggacttgaagaaaatttgaaataaccccatataccaatgatttctatgttaaagagcctgtttacacatcagaaagccgattttgtatgcatatgaagggccctttggttatgagcagggagccatccagatgttctttgtttactatttattggtgaacgatctgacactatttctcttttatttaagaaacaacgttgatatgatcaaagtatgaccactagagatgttgagggacatgcttaaagagcataagctgacgtcatgaaggaac

SEQ ID NO: 21394 - DNA, 3770 bp, Mus musculus
ttgaaaggctaacacaaatttttctgaaacatttcctttgctctctgtcctctaggacattcaccttgcaaaacgcttttatgacatggcagccgaagctagcccagatgcacaagtacctgtgttcctcgcactctgcaaattaggtgtcgtctatttcttacagtacatacgggaagcaaacgtaagtgagccgtggctcttagttacagatacaaattatgtcactttctcaggcctggagaataaaagttggaggcacagagtctctgtcatcccaggtaaagggcaagtgaattcctcgtgggtaacctgtggagcaggcaggagcgcagttttcccgtggcatttctcagagctctcaacacggaagcaggtggcatcggtgcaggtggtttctggttcagggaaaacagacgtaactcgtgacactctgaaacagtagtaagcattacgtcagacggatccctggcaacaactcagaccagtaccctaagaagactaagctagagggaagccggcacgctgattcactgtgtatctgatggttctcagtgccacacagttagcacgataacacagcttctggtctgatagagcctcagctgcttaagtgggctgatggaacctaaagaggaggggaggtacctgttcccctcaaagctaccacctggagaaacaaggcttacgtggaagtgcccgtgggctctaccacttagattttgctcctgtccccatattctctgaagtggattcaccagtgcagcattttgctccataaacactatgatgctcgaatttgttgttggagccatcattagggtcaaattgtccttatgcagaattataagtaagcagtgcttcttagatctacactaacataaacagtggacttccctcccttgcccttagccacgctactgagatcttccacacagtttcccagaactcaggataccttagattcttacatatgtgtaatgtcagttgttgcagttccctggtagcatgagccactatgctgtactttctgccagaaagcactaagcagctcactgtgaggactaggttgaggtgtggggacagagtagtgcctggcctgggccgggtctcatacccagccaacaggaggtggctgtcagactctgcagggctgtcccagacccttgtaccccgcactttcctcagtaggtacagcataccatcctgtatggagaggaatcttttgctgtctttttatacagatctagaaagagaacagtaagattctccaactgaaacaaaaaaaaaaaaaaaaaaaaaacaaagcaatcccagttcataaaaaaaagcaagagaaataagtattgatgagaaggaggtcagactagatgaacagacacaaaattccccgggaacataatcatttcctggaatttttttttcctacaaaattaagcacctgcgcctacagatgtgtattatgagggctctcgggcataatttcacaaaagctcagagactaggaatgtaacttgtaagttcagatttctttgtaaaatggtgtgcattttaattaaaacaaccaaaaagaggtgtttgttcatcaagtggacacccggtcctgtagctgtcagtgccatgggcggagcacagctggccgtcacctgcctgctgtcactgcggacaggttagaggtgtgccaggattcagacttgggggcggaggggtcttttattgttctgctgatcctttcagatatctactagagaaatagctagaaattgccgaattagatttctgatggaaaaaacagttagacatctgatgtccgctattaggaaaccctagcttagttcttgagacacaccctctgggtgtcagtagaagaagggtttaaaaatcatcacagtgtcctagaatttagtttttcaaagtctcatgcttatgtctactgttaagtaactagtttcagagttctttcaccgacatcgaagtgctaatgctttttgtgtttttctcattaagattcgagatctattcacacaactggatatggaccagcttttgggacccgagtgggacctttacctcatgaccatcattgcactgctcttgggtacagtcatagcttacaggcagcgacagcaccaggacataccagttcccaggcccccagggccacggccggctcctccccagcaggaaggaccaccagagcagcagccaccacagtagcagccacacactcaccttggtcggtgaccactggggagctgcttgctgagaacgcttgcatttgatgtagggctctggatggtggcaccgcctggaagaggcgtgaggcgtgttgaatcccagaagctgcttagaacctgctgccttccttttcagggatgcgcggctctcggcagagctgcagtgaatgtttgtttcagtgccatacggaatgacaactctcagtggctttcctctttcctttttctttcttcgttctgcaaacatacacaagacactcgagtcatgtctactgtaccctgtctttcctgagagacctttcgtcatcctgttgatgtgcataacttcttacctgtcttctaaggtcctgagcattgacaacctggggaaacccagttagttgcaagtttaaccctaaaaacatgcttaagtctgagactagaacttgccattaagtcaaaagcaaaacaagccaagcaggacgtcttcagggtgtttgggaaatgcagtaactgggaaattttaccagtctacatgccaggtcatatgttcggcactcttattttaaaagggattattgatcggattcctgtactgtgactctgacacttcctagcaaacttctcttcctcaaagactgaaaggctttgctaaagacttcttcgtgatgtcacatccctgccatggagtagaagtcaaactcagtcagctgactccgtgctcccacagaggactttgccccagctactcatgtgagttgcatatacagagccctagtccagacgccagaggatgatctaaatggagaaatcagaaaacagccttaaccaacttgaggtgggacctgggacatgccctccctcgggtagattcgttgcttcccggatctcattttacttcacatttcttatggcacagagaacagacaaccctcccaaagtcttcaaatatgaaatgctattgtcaagattggcaggtggtgacttcctttgtaatactaaaatactaaaatactcagacaatggaggatgggttagacccaatgcatggcaaaaccaaaggcctgggtgcaccgttgtgtatgctgcgggagctttttatttctgacggtttgatgtggctgtagaaagtcagccactgagtagctgttgtgttatcgcccttctgttgtaaacattaggaaattaaagcagttacacccagcattgcctgcttcagtaagaggcgaaaacaacgactgagagcttcacataatcaccccaaagcccaagctgaatttgtggtctgtgtaatcagatctgtggatggtagcgttgggtagccagcaccccatgggagctcacgcccctgttcattatcgcctttccattgttttctgtaatccttgtctgcaatgaaacgactttatcacttgtggagtttggaaagctttgagtttgaatgttgggattgtcatgagaattcaatgtagttcatctgtattgaacatgaaggctttaagtgtgaagttgtgtacatttgtgtgtgctcacagtattatgggaaacccagga

SEQ ID NO: 21395 - DNA, 1222 bp, Mus musculus
gccctgtgcatgccattcccctaacccgattcctcccatggcggaagctgactccactcactcgccttgacacactgagtcaaggaatggagagctgtgcttactgctgtcctcacctgttcctgtaagaagcagtgtttgcaagggtcagagcagatgatgctagtatcaaagagtacgttgaaggaggtatggaaagagcaaggccaacatctcctagctgggatcgcttcccctccgctctcacacctgtcgttggaggcacactgataaaggcttcgaaccattggagatctgtctttgctttatttcgagttctcacttgtaaactgagatttttcatagaagtcacctcatgaacagttcctcaggtaggagaatgtgctgatagctgtaatacacagctgtcactagaacagccctggccacagtaaataggatgcaggttgctgctgtttttactatgtgtttgcttctgaagaggaaggaaagccagcaggcagcaggtcatggagcagatttaaaaatcacccctagccaagctgcaaaggttcttttcctctttacacagttgtttaagaatgtgtgtgagcgaggtcgctggtcagagagactgatgactgcctacaacagctataaggatgaggactacaatgctgcagtggtccagtacctcctgctggctgagcagggctacgaggtggcgcagagcaacgcagccttcatcctcgaccagagtaagtcctgttgacgctttaaccacgttagcaatatagtttcaaagtgaagtgaacaccaaactcccctttccctacccgagtccctagactagtctccgtatgcagcgggctaaaacctgctccaggaagtagtgtcatcctggcccagtgattccttcgaacctggcgtttgctaacgcttgtttacttcccagactgccttaatttagtatttgctgtgctccatcctatcttacaagcgaaaacacttggcttctgtttcacgtctctcctgtaggagaagcaaccattgtaggtgagaatgaaacttaccccagagctttactgcattggaacagggccgcctcccaaggtgagtggctgattgtcaaaatgagccttaccagacttctcactctgttggtctcatggacatcgtcagacactgctacgtaccttgtgatcagccttcattcctcggtcagtggttgcagtcagtgcca

SEQ ID NO: 21396 - DNA, 1194 bp, Mus musculus
cagggcatggctaatagtcccaccttatgtcaaaggtttgtggcaaaggcaattcagcctgttagacaacaatggccaaatatttacatcattcatttcacagatgatgtcttgatggcgggaaaggacccccaagatttgcttttgtgttatggagacttacgaaaggccctggctgataagggattacaaattgcttctgaaaagatacaaactcaggatccttataattatttgggttttagactcactgatcaagctgtttttccccagaaaattgttattcgtagagataacttaaggaccttaaatgattttcaaaaattgttaggtgatataaattggcttcgcccctatctaaagcttactacaggggagttgaaacctttatttgatattcttaaagggagttctgatcccacttcccctagatccctaacctcagaaggattgctggccttacagctagtggaaaaagctattaaagagcaattggtcacttaatacattggtaaaatagaaggaccccctgactaacgaatagaagggtccagatccagttctaatttggggtagggactcagtttgtgtttttcacgagatgaagataaagcgcagtggctgccagataaattaatttgttagttgaacacagattctaaatcttctaaagtatcaccttgaggactaaaattcctcttttgcttagaagtcggcttgaggactcaggctccgaaaaaaaagctactctctgagccagctcccgacaggaggccggagactagcctcagctttacaatttgcatttgaataaagtacctagacttccccaaaagaagttctgctttcctactttctcactgtcgagattttgtctttcaagcaggtaaatcaacattctcgaggcggaccagcggatgtgcatccccgcccccctagagcacacaggtggctgctgttatctcctttccaaggacatttccagtgtgtggctttcagtctgagttaaaaatttaggtttacctagagggctagaagaatagatatttctatattaataaagattggtttttattttgatagacaggcttagccccttagctgacctctggcttttcacccttgctgttactgcaaggtgtctttagctcaataggctgtggaaaaaacagggatgaggaggaacgacttcca

SEQ ID NO: 21397 - DNA, 1185 bp, Mus musculus
tgaattaatttaattaattctaaaatgactcgggtttcccctttagtctattagctcaagggtttgggctgttggtttctgtaaaagtaggttcacacagtaaagggataataccatctggaacaatgatcagtgtagagttacatcatctaaaaccaggacagtaatgtggggctctatgtggtagctggatgtttccctttcaatgtcctcatgcctctcactttgtaggtaaaactgtgtgctgaaaatataatggtactttgattattttgaggatttttattttcttatataagaagaaaatcattattgtctcttggtattgcatatttaactctcagtggtatttgggactgtggaaatgtcttctttgtcccaagaggaacgagagtggagtgattcccacaatattgtatggtgtccacaacactactgggagtccaagtggtactggggagggccagtcatgtgaaacaattagggtgctctcaaaattgctctggtagaaggtatttctgaaaccgagtctttattttgatctcataaacaacatgggacgggcatctaccatgaaaatcagtacctatccatagtactgtgcttgagggactcgcctacatcagattagaaatcacctcatggaatctatactagcatatgaaaatttgaaaaaaaaaaaaccaaacaaacaaacaaattgccagcagtccttactggatgacattttggctgtcatctttaatcaggagactacattccatagttacatctcctctgattttggtcctctctcagcctcatcattacttattttgaggtaattagtcaaaagtcaaagttgagttgatcccatatattgtctactccttgtctgcccagtaactatttgcacagaggacattgcaaaaggcaaagcaaagcatgatcatacagatgttattggtagttaaatggaaggtgatcaccaatacatttttgctcatcaagatgcatttgaccctggggaggttctgggtttcacttaaacactgccatatgcactggagaggtagtacaacacatgcgtcaatcacagacaggcatgacaagagtaaaaatcctcccttgtgacaaataatgctatttgtaattttccagatgtttgttgatacaatattagacattttctcttgagagtaaaaa

SEQ ID NO: 21398 - DNA, 1185 bp, Mus musculus
tgacctatcaaaagaggatattagatgttgctttagaacttgaggataacatatcagctcataacttgtttttttttttccccaaatgaatgggaaagcaaaacagaagagttcccaacacaaaaaatagtatttacataaaacaactctcaattcttagccttgttaaactttgctgttttaaaagttaaagtaagcgaagaaaggaagctgtatctacactgctttccagtttaatcagcgggatcgaaagaatagttggcaacagcgatgcttttcactgattgtggggggaagccttttgtacacagtataatactgttttagcaaaccaggctgttttgttatagtatttggttttctagctgcacatccacgagaagagcacaaaccaagaccatagcaacaggcattttaaaattaatataaaacatgcaaatccatgcatacacatacattggagtgtttgtaaaggtgtctatgggatgtaagatttgtaactacttatggcaaaatgaggcatcaccactgtataccctcctaggatgacatttctgaaagggtaactcttatgatctgttactgtttgaatcctatgttgatttaattctagtttgtgtttagtgtgtttctctgacaagggactgcaaggggctggaagattctgtgtcatgcatcctcggagacctaccatgttgcacactttgttaactacaaacttcactctacactatacagtaccttgttgatatattcagtaaaggcttattttaaaagaaaacctattgtgtttatctgagtaaattcatcgaaatataacttgtattcatgctgcaatgtaaatagaaaatgagaaacttttcatacaaaaacatgccagagggtaagcagtttgtcgagcattcatgtcttcctactgttaacctctattttcagatcatagttctttttctgtaagaagttaatgtgatagtctagtgttccttccttctttccccactgaaatatttttagaaaattttattatatccaaatcaccacacaaaaaaaaccaggattctgtacttgagaaatgcaaatagacacacataactaatatgtatacaatacagatttatctgtctttcacaatataacctgttcattttgaacaataacgttgagaattcttgtcccttctattta

SEQ ID NO: 21399 - DNA, 1644 bp, Mus musculus
tcaaaaaatttatttcaacatttcaaggaaatttagacatgataaattgaacagtgtttatcacattaacagccatataaaatcacatggttgtagcatatgcataaaaagtagtttattccttttaacaaatgttagtaaagagaaaaaaacaaatactatgaaaaactgcaacgtttgtgattttataataatctttgaacaatcaataattagactgttttctaagtgtgtaatattttttaaaaagtaaatttcaaaaagattactttatgacaaaagcttatacacaacaatataaagttttcttaagtatttacactctataattttcaagctaaaatttctcaaatactcaaattaaagaaactacactaatatatgtcttaacagcttaaaagaagacagttcttgaaaagagtagcaagctcttctaaagagtagtaactattgtaactattcacctctgtattttgattaaggaaaagctatgaaatatgtatagaaataaagatgtggcttcaccgggcattttgtgcggagatcacggaaccaagatcaaccgtccctgctacagagcaggagttgccacagcctcaggctgagacaggatcgggaacagagtctgacagtgatgagtcagtaccagagctcgaggaacaagactccacacagacggccacgcagcaagcccagctggcagccgcagcagagatcgatgaagaacctgttagtaaagccaagcagagtcgaagtgagaagaaggcaaggaaggctatgtccaaactgggtcttcgacaggttacaggggttacgagagtcactatccgaaaatctaaaaatatcctctttgtcatcacaaaacccgatgtctacaagagcccagcttcagacacctacatagtgtttggggaagccaagattgaagatttgtctcagcaagcacagttagcagctgctgagaaattcaaagttcaaggtgaagctgtttcaaacattcaggaaaacactcagactccaaccgtccaagaggagagtgaagaagaggaggttgatgagacgggtgtggaagttaaggacatagaactggtcatgtcacaagcaaacgtatcaagagcaaaggctgttcgagccctgaaaaacaacagtaatgatattgtaaatgctattatggaattaacaatgtaactatttgacagcgaagacaactccccctttcccccctttttggtgtttgaaaagtggaactacagcttggtttaaaatttgtactgtttctatcactaataaagttgtggcttcttgttggatggaaaaaaaaaaaaaaaaaaaaaaagaaataaagatgtggttatgttgaaacaaaattttgatttatgggctcaaaattgaatccaatatatcattttgtgtattgtaattttgaaagttatttttctttttccttataattcattttcttttttaaaaaaatgtttactttatttattttttattagatattttcttcatttacatttcaaatgctatctgaaagtcccctatacccacccactcccacatcctggccatggaattcccctgtactgaggcatataatctttgcaagaccaagggcctctcctccaactgttggcctactag

SEQ ID NO: 21400 - DNA, 1193 bp, Mus musculus
aaaattacagatccaatgataatatgtggtggaggcgtggctgtggttgaggccccggggctcatggaagtaaacctgaagacgaggaatgaatccccgtcatcaagttgggccgtgggttaaggacatgaagattaagtccttggaggagatctacctgttctccctaccaattaaggagccagagattcttgactttttcctgggtgcatccctaacggatgaggttctgaaaatcatgccagtgcagaagcagactctggctggccagtggaccaggttcaatgctttcagggactacaatggtcatgttggcttggaattaagtgctccaaagaggtagtcactgccatcggaggagccattatcttggccaagctttccatcatccctgtgcagataggctacttggggaacaagattggcaagccccatgcttttccatgaaaggtgacaggctgcaatgtctctgtgctggtgagtctcaaccctgcccccagaggcactggcattgtctctgctcctatgcctcaaaagctcctgatagtggccgttctagatgactgctacacttcagccagaggctgcactgccaccctggacaactttgttgccacctccaagacatacagctacctgacccctgacttctggaaagagactgttcaccaagtctccttatcaggaattcactgatcatcttgtgaaagcccacaccagagtctctgttcagagggcccaggttccagctgtggctaccacataagtgtttttatacaagaaaaataaatgaattaagtctgttaaaaaaaaaaagaagtatatcaatactatattgagtaatctttgctaccgaaaaaaaaaaacactactatgaaaaaaattatattccttaatccttttttacagtacagacttcatccccctcccgacctctccccactccactagggctcactactccctggggcctcaagtttgtcaaggggttaggtgcatcttctctcactgaggccaaaccaggcagttctctgctgtatatgtgtgaggggcctcatatcagctggtgcatgctgtctggttggtggcttagtgtctgagagatcttgggggtccaggttagttgagactattggtcttcccacctggctgccctcctcctcagcatttttccagcttttcctcaattcaac

SEQ ID NO: 21401 - DNA, 1099 bp, Mus musculus
ttacatttagtaaataaaaatttaaagtatgagggatgggcgtggtagtataagcctttaaccttttttcatttgatgtatgtggctgttttgtctgtatttgtgcaccatgtgcttgtagcacccatggagttcttcagagggcttaggagcctctggaactggagttatacatagctattagttgtcatgtgggtgctgggaatgaaacctggattatctggaaaagtagccagctctcagaatcactgagtcctctagccctagtacaagcctttaatcaaagttcttgggaggtagagtcaggtgggtgtatttcaagccagccagagctacatagtgagatcctgtctctaaacaaacaaacaaacaaacaaacaaacaagaatgactataatttgaaagtagtgaatgactatttgaaaggcctccatactacttaattaaatttttttctgaataaacattcctttaagattagtgaataatgctttagttttggtataatgttgtgtttttcttcgcttatagacattcatatgatgatggagcttccacccggctaatgtcaacagtgaaacctctgagggaaccagcaccctctgaagatgtgattgatatcaagccagaaccagatgatctcattgatgaagacctcaattttgtgcaggagaatcccttatctcagaaaaaacctacagtgacacttacatacggttcttctcgcccttctattgaaatttatcgaccacctgcaagtagaaatgcagacactggtactcacttaaacaggctgcaacttcatccgcagcaaagcagtgctcacgctgccaagcagctggatgtacaaagcagccaggtatccgaagcaggacggttgtgtgagccaccagtgcttagcagcgtagaagacacttatagccccttcttcagaaacaacttggataaaatgagtattgaggttcgtatagatgtatatagattctggcttgctaggctagagattggcagttgtggattccaaatataacttacgtaactaaacacattgtgtgtttctcttaaatagtgtcctctcttggactggctgtctagagga

SEQ ID NO: 21402 - DNA, 1458 bp, Mus musculus
gcagtttgaaagcttccatcttctgatgagagatgttctacagaacttgtcacgtctttgaaatttagaatatattgctttcataatacgaattttactgccccactgaagtgtctaatttttcaagtttgtaagtttattaagtggtttcaacattttttgtttgttcgttttgactatgaaaaagacagtttaaagaaaagccaaattctattaaaacatttgcggcatgtttgtacattgctgtttaatatcatttttggtaatggtacttgcagcttagggctgtagtgctgtgggaaggccagtgtcctcagagctgaagcacttttcagcttttcccaaaggtaatgcagtgtctgtaacccagcgtggtaacagtggccaggctttgaaactgaggcagctttggaacaactagtttaaatttctttttttagtgtctaaatgaatttgctctgagaagcataatgcagactttattttgagtgctactttggtagagtggaccgaggtcctgtgcctttctgaaagtgagcagagacatggtcataaagggtaagcatagttggaatgacgatgtaaaaatatatggacagttctttggaatgctcccatttactattagcttatcattttataagtaattttggagggactacattatcacaaaagtatacaaaaatttttacaggcatatgtacagaaagtatcagaaaacagactttgaactcacaagaatataaatatacgtatatattcccatattctgaaaaatatcatcagaaataaccccacagaaaatatacttatgttattactaaagatcattcttgaaatgtagaagttgagatttaagtggtatattttaaatgacagaactatattgcagagataggaaggtaaacttgacaataggatgaaacttggcctactgtactatggagttttatgtgtggtttttgaaactgttaaggcaagatgtgtcatgttttagaactaaataacagacaactgatttcaaaaacgtgttgttttaaaaattaaagtgtaaacggtggttagcaaaggggataataaaagctcaaacattttgaggaccaaatttaactgttaagatacaataaagtcacatctataaaagtctgtgtttaataatgtgaagccagccttctactgtggtcattgcctttccattgaaagataacagaattagctagttattcagccatttgataaattggccttgaccatgctaaccccagagggtaaagatcagaaacagcaagagaacaaaggagaccagggcctaacgctgtctgctgcacaggttcaggtgaaatggcaattcttcatacagtgaggacactgaatttaagggttcagctttggaactaggccattaccactttgtaaaaaaatacgtgtagatgtctgtcttctcataattgtctagta

SEQ ID NO: 21403 - DNA, 1203 bp, Mus musculus
gatttgtgaccttttccgttccatcaacatcaggagtttagactccgtgattggtttcttgttaaaaaggaaatcttatttcgctagggaaaggaaacacttgacagaagactaacccaagctctgcggtactcaactcttggccgtagttattagttcagatttcactatctgcaattatcagcagatagcaaagaaactcatgtgttactcggaaggcaattcactagaggttaaaattcgcacgctggaaggcacttggagggtatgtcttttatgagaaataacctttaccacaccgatttccgattctgtttatcttcatcagagtaaccttaagtttactttcttattagtaatttcaatcacagggtgacagtatcttgctctctattgatctgaatcttaacgttggccgagatgtttggtaagctgtacatataaagggtaattttccacatttcagtcgaactctaatgttaaagttgggagcgtttgaattgattattgcctcaagcacatttctgtcttccaacaaagcgaatgtattacagaaaaatttgcaagtgtgttatgttgttgcttctgtgttcttgacccgggttctgtgagcaggcatatttgtttcttcgtggatgtttcgaattaggcacatcaaaaatcagtatagtggtttgatgcagcgtaagcaagacactctggtgctgaaactctacgagattgttattttagctctctgtacatatataagggggaaggggaccccaggcaattggaaggtcagctgggatggaacaaagtaaaagttaacagcatataagattgcagagaagggaaggcttggtgggggcttattatcattctcttgttcattagacactgcagtgaaggttttccagattctagttttttggaaaggaatctgacaagcagttttatttttctcaatttaggaattttctgttgtagtggtagtcaaggcatgagacctagtgaaagccccaaatcactaatttgaacagaagttaatagtaatttcccatcttattcaccccaagaagagagttatctcattttcttttcttttccctctgtcctgccatgtctgtccttctgtatggattgggcctctagctttacaaaactacatgaatagcttttgagtagcagcctcccaccagatattaccaggttaaattaagt

SEQ ID NO: 21404 - DNA, 3147 bp, Mus musculus
aggctagatttacccgcagcctgggctctctcagcgtgagggttcggggttagatgagagcacgggtgtgttctccacaaacctctggcacccaacaagccatccacagctctggaaccctgagccacgctttggtttctgctgtcaacttaccaagtccaaaagattccccacccccacccccaccccacccccaagatgttcaaactcagacctgaaggtaaaggtaagcactcagcactgtttgtggcagggggcttcttccgatgcaaaccccacacggctgtctcccctcggttcattttttctgaaggggcagaggcccctttcagaggtgacaagatgcagtgtgtgtgtgtgatttacttttctgatctcgtggagatctggagaactatcttatacaagtgtgttctgaaccgcagaaccactccgtttgcataaatacctcaccgggcagctttctaagtgttattttcctgagcctcccttggcaccttcgttggaattttctggaagacttgttggggaaactttagtaagggtactgttttctattttccttctgttttgggcggcatacgcattatgcataaccaaaacaatggctcaattgtgtttaactctgtattttgactgttgaggcgaaaaacaaagtcatcaatgtgtatgtggctgtttgtagcgaagtctgccgaatgaggctgtccgtgtccttaacaagccaaggggcaggaggcaccctctctttcccctcccccaagagcagtagagaatttaagcacaagcctatttgtgaaagaatattttgcttaagtgtaattcactttagtgttggacttccttcccaaatgtcaggtgttcttttagctttcaaactagcctgtgtatccattagtctgacagatcgcctgagcatcattaaagggatgtggtggggttttgtttttggttttgtttttttggttttttccttgcatttctcctgtggggagaagtggcgggttaatgtgtcattccagtatctcacggactcacatggggtggggggaggggcaagtggggaactatagcaatatctgcagatgctttggggacacatagcaccgcgacataacaactgccggctgtcagccctcagacacagttaagagaagagagagactcactctcttttcttaggtgatgctcacatccacgtgttttaccccgctcctgacagtctttcctcattctctagtacttttttggagaaagggtctgcaccgtacttaggttttctttctaatatacatcaccaagctcctacttccctctgcatctccagtcagtatgtttttttttttttttcaggagttcttttagtaaagctggctctctgaatctaaagctgaaccaaaaccacacacagattgtggcataaggaactcgtggtcaggatgactggggcaggtctccatcttggggccacgtctttcaaggagggatgggttggcgccctttcccaagagcgggtttttcctgtagtcgctagcctgtctattgcctcctgttcagagcagttccgaccacggagctttcttgaaggacgattgcattctgtggcgcccgagccacagatggggtggttttggtgcttacagtcccaacacagcaggcccatgtgcaatgtcccaagccaccaatttgggctttatcgatgctactccaacctctgtactgtcccttggagggtggaggagcctatgacatgatgccagagccagagttagggacgagtgaccggaatggggagttttcccatatgtgggattagactaaattcagtgtgatttctctttgccctttcaaaccttattcaggttgggactcatttctttctggtggatcacagctacccagatgtgtagattgatctctatgttctatagagaaatccttttctttcatcttcagcagggtttttatttcatttttattttgccaccaaaagaaaacattggagcatacgtcccctcttgattgtgactttccagtgttgaccgttcagttctttgtgttgtaggtcccagcccaccagtactatatcaaacactgttaggctcatgatgcagcactgtgatctaatttaaataatacttttttattatttatactactatatataatatacatcaacacttttgctatataacctaagtgataaacccctttttttggttacctgtcagactctagactttggtttctattgcagttaacacagttacagaattgtaatggtgtcttggttgttttgttttgttttgtttcttttttcttttttcctttgtaacggaatgtgtaaatcaaagtatatacattgtgtggtgttcctgtttcttgggatgtcatgaggagttacacacagcattcagtgttctgtatagacctgcccacctttgtgaattcatctgttaactcctcctttgagagcacgccagccacggtggctaactcccagcgtcctctctcctgctggctattcttgaattaagcacagactcgtccactcggttgctttatcatgaataatgggtgtgacttggtcactcttccgcccttcagcaaacaagtgctagcttcactgaccaaaaattaaggaaggaaaacaccatttttaaaacgatccaccttttcatggccgagacggatgttagtctacggtgctgcctcgcgctgccgagcctccggaacgagcccgctgtggaatgaccatttctgacttgctgtgggatgctcaaaagtacccttcctgtctcgttagtattggaatcaagactctttatttggactctatacagcagtgttcctccactgtgttgcatttgcaaaagtagagaacatgccttctccacccttttgcaaataattgatactccatattggattctcaaaagacttcgatatggtgatcctgtcaaacctagaaattgtattatcttttcatacctgacttccccgtttctaaaagtaaacagcacacttttagttacagacacagtcgccatttctagagtatgtgtgttgaagccatccaaggtcatagctggctcagccagcctcactccatcgttctcactgcctgtcctgccatggtgaacatgg

SEQ ID NO: 21405 - DNA, 1714 bp, Mus musculus
tcagttgtgtttggagtgaggctgggaagcagttacagagactgaagagcccttgtcccctagaggataaccccatgctctggccctggcatcccaaggtaccacaaatgccatcggccttgctgtgtggcaagcccagggcctggctgccagtcctctgtgtttcttagccttgagcctggtaacatctcccaggctgaataccagactgttcaggtgtattaggtgtcagtgactgaggagggaaaacagggatcgtcagagccattgataaccactgagttctgctctatgttaaattaagaagacttccaaagccataagcctgaaggttggtcctgtgtgtgtgtgtgtgtgtatgtgtgtgcgcgtgcatgtgcacacaaacacacaacttaaaggtgatgcagaaaataggctgtgccctcttaactgcccaaggaaaagcaatcatgcccaagaaatgacagtagctgttaagaaaaatggtacagatttttttcctcctaaataaataatctgacccaagttgggagggggggtgctacggaaactgccattagtattatggtgtctttatgagattaaaggcacattgatggactcaacaaagcaaaaacatgacaaacaatacaactcctgtactgtcctcaaaaagggtttgcaattaatatcagtactcatttttgcaacaaagaaaaacagaacagatcagtgactttcacattcagccagtgtagccagcagaaatttctgatccacaaatgcatggattcctttgaagaaaaagaaaaaaaaaaaaaagaaaaaggaaaaaaaaatcacaaaaacaaacttttttttattcaaaaataacaaagttcttgtaaggtaaataatgtatttagcatgaagcatgaattattttcatataaatatagagaatagagagaagactatgcctctaacttttaagccctaaagcttagaggccctttgttctttttctttctttctttttccttttccttttttttccttttttttttttttttgttattattattttgtttttttgttttttttgaagcaggtgtttaaggtttaaccttcttcagggacaaattctgactgttggggaacttactctgcaatataaattatcttcatgctctggtaggggcttggatggttgagctctgtactgccttgtctgcactcagccccgaccccctctgattctctactgaagagtgtgtccttccctatgtctgtatgtgtttaacacgacgcaataattcgagggcaaacttagtgtgtacgatagactcgagagagttatgggacgcttacttgaggaaaatccttaccgtgatctggttctaggaaaaaggcagtgaataattatgcaaattcgccagaagaaggggaaacacgctaatgggccttactgggtgagggtaagaaatgggtacatgggttggaggaagtacgccatcaaggggttggatggagcagccccgagcgagcgagcgagcgttctactgtgacagtgtgattgcgcagtgaggagggggctggccatctctgccacttcggcacagtaaccaccttgggactaagaccacctagatagtgagagctgaacaacaaccagaccatgtcacacaagccagaaactccagttacctttgccaaaaaaaaaaaaaaaaaaaaaaggaaaaaagaaagtttt

SEQ ID NO: 21406 - DNA, 1208 bp, Mus musculus
ccccatagtgggttggcagagggattgcttctttttatttatttatttatttgtttatttatttatttttcaagacaaggtttctctgtgtagccctagctgtcctggaactcactttgtagaccaggctggtttcgaactcagaaatccgcctgcctctgcctcccgagcagcccattgtctcgggctatgggtactcaacccgggccaatcagcctttgagctgctgcagggcaggtgcccaggcttggatgaagcctggccccaggaaagaggatcatttcatctataagcccggcacttgaaatgtcaacagatccctcagcctggctttcccctgtgagaaaggccactgatagtttaaggttaacagaaacactgacttcagggagaatggttttattgagttacagttcacaaacccacacactgtgaggttcaacgctgtacaacctggggggtttagtaacttcggggagcatgggcaggcatcactacagtcagttgtagagtctttacatcccactgtgtctggggaggaggacaactgtatgctctctagccatcattcttcctcgataaatggtttaatgaacgaagctttgcaagtcctggacctgctggaccatgatccctgatgctacatagtcgaggggagcggccgtaggtcgcagcctctggcacagggaactggtggtcctgttgaacgagtgtcacttggggtgctgcctgtgctgtgaacattcaggaatctctctggttgatctcaaggctgtgtatggcgtgcagacagaaaagcgtcacttagttaaagtcagagtatgtgctctgaagcatccagaaatgcctgtcagcagtgagtcccttcctcccttcagaaccacattccaaaatggtcccggtgcatgggccttcttcgttttgtttcataaatggtttctagcccagaggccggggagctagaaatgggtggtggggtgggggcgggggcgggaactctgctccaagaaatactttttaaaggaatctagccaaaccaagcccttaatcaccctcccccgaaacaaagccaaggaattttgaaatgaagactgtatcatgaaatagttctcattttgaagtaaaccgtttgctctggggaattccatgcccagaaaacactttgttgtttcaagttcgagggtaaggatgtcaggctaggtcgatgg

SEQ ID NO: 21407 - DNA, 1188 bp, Mus musculus
actatattagttattatctgctgtataacaaacaccacaaattaagtaacctggcccttgttaggtgtgctggtaggttggcctggactcaactggaatgatgtattgtcagttcctgtgacttttgtttgtgctcagttgtgtatttagggttctttcggggtagctggggcctctttctccaaggagtctaaaatctattgataaattacttcatgtttatttacaagatagtataggaatccccagtggggaataagtaagcctgaatatttaaggatattcaatttctgtgttgtatttgctcatatgccattggctgcattaagtcttgaggctaagctagactccacgttggtatatatgcacaggatgtagaggcttggttgaggtccattgctgtagtgaattacaaggagctcacgacagaaaccaaatcaacactacagttgaagtctccctccactattgtcctccagagtgaagttcacagccactgtctgcctgggcccctttagtactgcttcccttctgcctcagagattgataggcatcgtttgtctctaaggggccactggaagaatgtgcctggatcaacacaaatcttgggctgacggtggaagtagaagaggaactgagtagatagcaagtaaagcccacacagagtgttgtgacaaaatgacatctcaaatcccccgcagttgtctgagcccgggctgtgtcttctttccattcttgaatgtatctcagttctcaaatgccaacaagttctagatctgcctgttgtttgttcttctgacagtgagtgggcattagtgtgcagtgcagtcaagtacgcagacaacagaatagtggcatacagagagacccaggaccccagtgcttcagctgggtcagccacctgttaactttgaccttcagcaaagtggatggattagataacatctggttttatctgacttgcagtgatttaatgttctgtatatcgggggttctagtgttaaatatatctggtgattaactgtgctaactcattaaaaatgttgtcttgggttataccaagagaacagaattgagggaatagctgtgtttgtaggccgatgtttagaaagcctaggataggctaggtaggggaagaagtaagcagagtggatggatagtctgtgagacttaggataaggctatgcc

SEQ ID NO: 21408 - DNA, 1273 bp, Mus musculus
gccactaccgcctgaccaaggtcaccattctgctgacactctgggctcatttttcttcattgtgtaactgtatggtgggctcgtgtggctgccatgcaggagtactgccctgccttcaccttgtagttgagagccagataggagcagagggagtcaggcggaaactgatctgattcctcttctggggttctccggctcatgacttctctgccttgtccttcctaggagccttcacgtaaatgggtccagtcatgcctgccagtaagaaggccgagagctcaggaatcagtgtgtccagtggactgagtcagcgttaccggggcagcggtttctccaaggccctccaggaagacgatgatcttgacttccctctgcccgacatccgattagaagagggggccatggaagatgaagagctgaccaacctgaactggctgcatgagagcaagaacttgctgaagagctttggggagtcggtccttaggagtgtcagtcctgtgcaggacctagacgatgacaccccaccatcccctgcccactcggacatgccctatgatgccaggcagaaccccaactgcaagcccccctactcctttagctgcctcatatttatggccatcgaggactctccgaccaagcgccttccagtgaaggacatctacaactggatcttagaacatttcccgtattttgcaaatgcacctactgggtggaagaactcagtgagacacaacttgtcattgaataagtgtttcaagaaagtggacaaagagaggagtcaggtaagtcgcccgtgtcttctagaactgagtttagttattttttgttttaaattaaaatttttttttaaccattaaaaatgaatgtatagttaaccatgctgaagtcgttatgaatggataatttaacacattggtgagttgtggaaaatcttccttgtttttggtttgtttgtttgtttgtttgtttttggtttttcgagacagggtttctctgcctagccctggctgtcctggaactcactctgtagaccaggctggcctcgaactcagaaatccgcctgcctctgcctcccaagtgctggaaatcttccttgtttttaagtgtattggttatactttctgatttaatgtaatcacacaattaagctttgccaaatccactgtcttcattcatgtctcggacatgccctatgatgccaggcagaaccccaactgcaagccccccgactcctttagctgcctcatatttatggccatcgaggactctctga

SEQ ID NO: 21409 - DNA, 1178 bp, Mus musculus
tgggcgttggtaattctcctcgtggctatattaggtgtcacccagtattgtgcaacaaagagcaaagggaggaaggcaggtgaaggcacttcgtagacctgggattgttccatatcagagtgagcttcaagtccgggtcttggttcatcactacaatgcccacgggaagatgttactatcttcccataactcacaaactcccagagaactctaggctttctgccatggtatatcacttgtgcagggatatggatgagggtaacatttcaaagaatccccagaaagtcaggtttccaaggccttacttatttttttgagttttgtttctgccgctgtgatgaattactctgacacaaagtaacttagggaagaaagggttcctttcagctccaaagccaggttgtatccatcactctgaggatgcgactgccctccacatcacacccacaaacaagggcagagaaataaaaacgagcgcatgcttatgctcactttagtttctctgttctgatacagtgccccaaaccgaggactagtgctgtctgcttcccatatcctttaatgatcaagacaacccctcagccctatactcacaatccaggcagttccacattgagacgcttcagattttagattctgtcaagtcgacagctaagactaaccattacacctgtgaatactcatcagcctagcaattcctctttaggattcattacaaggaaatgatggtctctctatgtgggaatatggttattcatctgagtgtgttgacagcagagaaaactggagctaacttaagtacccacttgagggagagaccaaatcatcagttatagcttatgacaccgtacaatggatactcactgtggaactgttccttgaagtcctactgtgtgggtaggtagagagtaggcaggaagtgtatggtaccattaagaccgatgcagtctgaggcctctcagagctcagagttttgtcatagaagcagattctgtacagtgggaagcagagcgaagcaggcacgtcaggactgtgctctgatatcaggtcaagtgcagaaaaaaatctaggaaatttgaatccctaccagggaggcagagactctgagtgatagaacacgactatcccttttcgtccccatcactgctgctgctaccaccactgccacagccgccttc

SEQ ID NO: 21410 - DNA, 1169 bp, Mus musculus
atgcagcctcaagttgttttgctatattttagcatgaaacagactgagctattaatcacaggagctaaagtttccaagaactttatctctgaagatatctctaatctctgtattacttacttccctgttactgtgatgaagtaccatgaccaaaagccacttaaggaagaaaggagtttattttggcttacggttccagggaccagagtccatcattatggaaaaaacatgtgtcagcacaagtgcacaagcaggaagctggctgatcacatttcacccacacacgggaagcagagagtgagagcaggaaggaggggctaagactacaaaccttcacgcttgaccccccccaccccccgtgacatacttcttttgacgaggctccacctcttaaaggttccatgacctcccacagtgccattaattgagcatgttcaaataaatgagtctgtgggagatatttcttattctaaccactagagagtgtctttttgtatataacactaggtgggtcatctttagggcatgctgtgtctgcagtggcccatgtgttggctggaaataatgtatagcgggaagctgagagcacaattggaagtaatggtttagacatttggaattgtgagagttgtgaacattcagagcttagagaatatatgatgtgacatttgacgggaatgccagtgtctttaggctcgttgcccaaaatgcctagaagagtgtgttttctttctcttgtcccaagacaaaggcgggatgtttgcagtcttgcctcagagtgttcttgtggtttttcttatgacctggagctaaatatcagctttccatacctagaagttctcacacacacacacacacacacacacactcacaccccttcagactgtgttaggaaactgatggttcagggtgtgagatgttgggaattgaagatacagaatcgattggtatttgtggtgacaatgggaggctgaacactctcctgggttttttgttttgtttttattggttgatttgacacaagttagaattacctggaaaagaggaacctcagttaaggaaatgcttcttttaggttgcctgtaggcaagttggtggggcatttactagattgctaattgataagagaagagtccagccctgtggagagtatatggaactctgagtgg

SEQ ID NO: 21411 - DNA, 1190 bp, Mus musculus
agaaaggaaacacagtgacttgaacttgaggcctcactaaccatgtgcctgatgtgctgttccttggccttaccatgtgtgtgctgccccaggtcactgtgtttgcaggtctgatatatatcaagtaagaaggtaatttgaaaaaaaacataataagaaaggccacaggtctttgtttgtctctagagcctgggacagtaggtagcagcctgggtcggtaggtagccgtgcttcctctatagaactggtaaggaccagccaaccataaccctgtcccagcaacttcccattcagttgagctacctgactgtaagatacatgttccagctctgagctgagggctaaaccatgagcgtgctgtgctgcccaagtaagcagacactaaggggctacagagttcttttgtttgcagtttattaaaaaaaaaaaaaaaggttgatcccacaaagagggaattaaaaaggatgctggagaaagtcatggaacctaaggaattactaataattcagacaggaggatggagaggagccagcccagctctgggtccgatgcagtcctctctggctgctgccaccagtgggcttccgctcggtgaagaccactctgcagatctttctgaaccctgggcttctgtctgtcttctatttctgggccctccccatgcatcccccaatcgtgggcctgtctctagagaagggagggatgctgtgagttaaagccaccccagggctggattcccagagcacatcaccaaaaagtgagctggcatgggccttgttggtctatgggatgtagtgtttgtttattttatataggaagagactatagcagagcttctgtgtaatgggaaccttctggaaaagcagcagaaatgctatgtgtggtattgactttgaaggaagccagcaatcacccaagttctggtacccaagtacccttctttgcaggagaggtatactgtggaactactcagtttccttctcaaagcccattgcagactcagagctgaacattcagcggtcagggtcaaccccatcactgccagctcatgtccacgatcacccaggacctcccctatggagggccctggggaggaacgagaaacaagctgtggtcctcgttctcaggactctcgaggattcactgagatccatagatacaaagcatgcagcacatgatcagaagcatgc

SEQ ID NO: 21412 - DNA, 1129 bp, Mus musculus
tatctgggatgcagaatatctgatatgcgactcccagatgggtctcgactgctgctttggatgatactttgggctcagggtgtgaaaataaccaggtagggctcacaaaatgtctcagtgataatggtgtccgtcacaagcctggcaacctgagtttgatcttcagaccccaatgaaggtggaggaagggaggtgcttctgccaggttgtcttctgtcctccacaggtgctccgcggctcatgcccccattaaataggcacaaaacaaatatatattatgatttttatgagaaaaaaatagccaggtaaaggtattgctgacatcatcatgatgacttttagaagagctcagagtatgttgttaggttgggagagcagaggagcagatagctgcggtgtgttgtcattgttagtgtccatccactgggatggggcgctcctaacagcagttacatggttttcttcttatcgtattctttttacccaaaataggtaaaactctattggccaaagcagtagcgaaccagacttcagccactttcttgcgagtggttggctcagagcttatccagaagtacctaggtgacgggcccaaacttgtccgggagctcttccgggtcgctgaggagcatgcgccgtccatcgtgttcattgatgagatcgacgccattgggaccaaaaggtagactcaccctgaactgtcgtggagataaacagtattggccctccctgtgcagcaagcccttgctgggcatggccctctggatacttcactctgccctccaaggggccttaaacacctacccaggcagtgtgtggaacccagttgtgtccgagcttgcatggagccagtaccatgcagacgctgcagactcactgtactcatggtagtctttgccctgcagctaaaaggttgaaccaaacagggagacaaaaaatgggcctttaggcagagttgctgtgcagcgatgtggttcaaaagtgtgtctgtctgtctgtcccgctgaaaacgaaacagcacaatctgggtggtttaaaaagataagaactcgtttcccctctgttctgggccatgaaatctaagaccaggcactaaccgttgtctgcacaggactgcatctgccccagg

SEQ ID NO: 21413 - DNA, 1163 bp, Mus musculus
acccccttatagtcttcccagtttatgcatcttggattctcagaaattatgatacatgagacatttaaaaaataacctgttcccaaatgagcaatttgtgtttagtctgtcttatactttatttcaaaatatctctctgaattccttaagttaaaaataagtgtttcggtctgaacatactgttctttttttctttctttctttctagtcagggttctctttgtagccctggctgtcttcgctctgcagctgacctgcctctgcctgggattaaaggcttctggcaccacacccgactgactcatactgttctgtcttctaggcaatctgtacagaagctggcttgatggccttgcgggaacgcagaatgaaagtaacaaatgaagacttcaaaaaatctaaagagaatgttctttataaaaaacaagaaggcacccctgaggggctctatctctagtggcccacagtcgtcctcagggatggggagctgtccccaggaacccattctccagttcaggtttgccagtagaaagcctgtatcgtggaggacactgtgcctccatctgttgttggtcattgtgccgtgctgctctctactcccaataaaggattggcctggtttgctttctagcactgtaatgagtaccatgataaaaaaacaatttggagcttgagggaagagttcattttctctcagcttgtgatggaagtcggacctggagaaaggaactgaggcaggagctgtcctgggatcacttcccgcttctgtctgctgtccaggcaaccacctgcctagggctgctaccggctgctacccctcgtgctaggctgggccctcccgcataaatcatttattaagaaaatcccagagacttgcctataggccagtctgacagaggcattttctcagttaaagttccatcttcccaaatgactgtagctttgccaagttgacaaaaggtagccagcacaagcgtgtactttgacagctggtctgtggctgcccgcctacagctccctgcagcagatgggagggtcctgtaacagagtgggtagttcacgttcccaagaggctgagatccacaaggagtcggtatagaatcctatcccaaccatgcctgcctcggttctgggttcataatcttcctttcttaacagatggt

SEQ ID NO: 21414 - DNA, 1370 bp, Mus musculus
ctactttcaactacttttccccctctagaagaatcaaattgaaatcttttacttacctcttacaaaaaaaagaaaaaaaaagaaaaagttcatttcttcattctgtttgtatctagcgaagctgaatgtcagaagcccctctgtccacacacaaagtctgcatgtattggtcggtggtcctgcccctaaagtcaagcccctacatcagttttacagtataaatactcgtactaccttataaggaagcacttagtggactccttaaagttccatttgctaatgattaatacactgtttgggctggccagtttctcatgcatgcagcttgatgattgagcacagtcaggcatttgtattaaaactgaaaaatggaaaaaacaaattcaaaatctcagatggcttctagttcaatctgttcagataaattgtcagcagccagtttactgcaagcaaacatttaaaattggtttacctcaggatgattgatgtgcagagaatgggggaaggctaaactctgagacacagccccagaagtaggacagtcctcatcaagtgccccagtcccatggtgacagtgacaccctggtggcgagcccgagtgtgatggttcattgctgtgcgcattgcattggagtgactgaacaacaaggctgtcaccaaatcccacacattttattaagaaatgtttcctaagggagcatttttggactgtgttttaaaacctagtgaaccatgactcggagccagcagagtaggctgtgtctgtggacttgagcacaccatcaacattgctgttcaggaaatgataatttacgtccattccaagttgtaaatgctagtcttttatttttttttttccaataaaaagaccattaacttaaaagtggtgttaaatgctttgtaaagctgagattggaagggggacaaggccaaggccgctggaggggaggtcagcatacacagagacacgcaacatccagtgcaagctggatttcccaccaggttctctagccacaactcctgaaaccagacagactcggagttctttgccgtctatgaccacgtaagtcttgttattttctgtgttgtgtgcacatgcgcagatcacagtcaggtgatgttcagactagagccctggtgagagaaggcgtctccagcgtacagttaggatgtcttggctgtgctgctgctgacctgttgtaactacatgaggccatctgtgcgggagacatgatttagtgtgtctgtattcctatactcactgtgtatggcaaaagcaggccagacaaagacactacctttgattcagtttgtaatttatggttatacttatctttagccgctatacttctttattattattatttaac

SEQ ID NO: 21415 - DNA, 1128 bp, Mus musculus
ctatattgtaaggaatggctgcccggtaggcctagtgttatgtcacacaagaggaatagcatctatcattcgcccctcagcatcctgggaacttcttcttgaatgaagactgtaaatttggtcaagtcaactcttagttcagttatcttaatcatttgaatgatttattgtgtgtcctatgtgtatttctctttggcagcgaccagagttacactgatgtgtcccaactgacccactcagctggcggtcacctacttaatttttttcaataccccttgaagttgtccggtagaagtcagattatttgccatctatccctttgagtaagaaatcagggatgtgtgctcctcccctatatcgacgatgttcattaaaacacctatagcaaggatggtggtggtccttctgttaccgaagtcacccttcactgtggctgtttgacaaagagttgtacttggacgttgtgtaaatcttgagataaactgttttggagatttaaccacctctctgacgggggaccaactctatggaaattgtaaataagttttatttataaacctggcactgtattcaataaacatttctgcagcctttcatctcttaactgtgaactgtgtaggtttttagctcttatagcttccagttccctttgcggtatacgagacaaaccttcctgccctcaagtagaatccccaggacctatctatctagcaggtgagagtgtggagctggagatagcaggggcaacagagggcctatgtagtctattctagcattaagtagtttggaggttacccaatctccaataccaccttgactttgagaaatgtatttttaagctggctgtggtaaagcagagacaaatggatctcttgagtttaaggccagctggtcttactggagttccaagtcagctaaggctgcatatggaaactcagaacaaacaaacataaaaagaaactaaagaaatggacatttcaggtggcaggatggaggtgtagttcagttggtagagttcttgttcaccatacacgaagcctaggtgttacacttggcaccggacatcctaagctggatgtgatgacgcacgtgtgtaagctcgacactctgaacgttggagaggtagag

SEQ ID NO: 21416 - DNA, 1141 bp, Mus musculus
ctcctaagtctctgtttctacctcccaacagctgtgattatcagagtgtactatcatatctagctgatgttacaggttttacacaagagaatttcttctggactcagaagaatgcttttagaaaataaggaaggataacctagggttaagttccttgtcattggaaacaatccaaaaagtttgaacaccatcagatacggacatttgtgttggcaggagatttgacttaataagtacctttagctacaatgtcatttgtgtgaatggatgtgtcatggctcacatctaaaagtcagaggacaacctccagaggtcaaatctctctgccgtgatttccagaagccaaactcaggttgcctggttctacatggcagagtcctttaccagagccacttcaccaggctccttcgtgtgtgtgtgtgtgtgtgtgtgtgtgtgtgtgtgtgtgtgtgtgtagggtccttcacagaccatggaggtcccttgaggttactgactggactaagctcgttggccagcaactctaggaatctacctgtctctgcctttcttggctgtgattattgcattgctgtgcccggctttatacatgggtgtcagaaatccaaactcaactcaggccctcatacttggaataagtcatctctctaacagtaccttttataatgttcttggttcacttcaagattttttttttctttttgatttttcaagacagggtttcgctgtttagcccccgttgtcctggaactcatgctgtagaacaggctggccttgaactcacagaaatctgcctgcctgtgcctcctgagtacacccgccactgtattttatttttcattatgtgtacatgggggtgtgtgaagggacactggagcacatgacagggctctggcaggccttgccctcctccccagttccctctacctggataaaagcctgttggcttatctattcctgcagctggcccccaagctctattccttatttggccacttcctccttctgaggctgactgccaaggttcagcaatcaacccccaccctttggctcacctaattaacatgcccagataaaattaaacacctcatcctaacgcaggtttcccccttctcctttagtaaccgccacttgccctgtg

SEQ ID NO: 21417 - DNA, 1550 bp, Mus musculus
cttgtagttgaaagatgaatttcagcagtttcgtgtggtcagtgtcttcagctgctgctcctaagctcaggagttggcaagaacatgtgtgccaagagtaggaggtacattcctgcctcttgggtctctgctcagagcccaggtcacgtaggtacctggccctccttgagtgtctgactgtctgtctccgcaggctctggtccttcaccagctgggccgctacagtctagctgagaagattctccgggatgcagtgcaggtgaattcgacagcccacgaggtctggaacgggctgggcgaggtcctccaagctcagggtaacgacgcagcagccaccgagtgcttcctgacagccttggaactggaggccagcagccctgctgtacccttcactgtcatcccccgtgtgctctgactggccgcccgcctcacctgccacacgggctcagatgctctgcgcgggctgccggggccatcctgtcactcagtggacgcacctgcagaaccaaggccctggatggatatgtaaccagagtggattaacctcaccaacccagaatcattgctctctgctcctgcatccattcattcttgtttttgccagatccatgactgtcctctgaatctactgatgtccccaatggattatgtgccatattcagttagtcgacgcctgagttttaagtaaaatgattacggacttaatcagcgaatgtagaagaagatattccaggttaaagttcagtggcagaacagattatttttatcagtgctgtaatgaaagcaactgtcctgtcctctgaccaccccgacacctctcccgccccgccctcagcccaaaaccaaatgtgaattttctgtttcccacctcagtactcgtccatgccaggacaccagctgacaacgtctcggtctcattgtcaccagttgtaccatgtggtgaattactgttctctccttagaacaaagcccgagtctaagaatatttatattttaccaatatatggctgttacaagagaaggaaatatgagttatttaagtttaacttttttatgtgaattcagagtttatttatcgatggaaatatgtacaaagaagcttcaaatggaatatttaccgacattccttatacatgacagacacttggctaaacaggaagatgatgttaataaaaaaaatgatttttaaatggacccctggcttttgtctttcacaaagctggcagaccagacaacagccattgctcatctatgaggtgtaggctctcccattccggggcctgccctgaacagtccgcctgggcacagggaggggcctacatcagctgtgcaggcagctgctagagagagcctcaggcctggctccttattccaagtctgagctgcgtgtgttcttttctccttcccggcctctagcacctcactcccattcattcattcattcattcatgggtgaggagacatggggtcaagacacttacctggggaaactacctggcaaaaagggcctgaggctttacctctgccagatgtcagggtctgccctgtgc

SEQ ID NO: 21418 - DNA, 1136 bp, Mus musculus
ttgcaccctgcatgaaagtaaaatgtatccagtaaacaaatacgagctatagaggggcaggtgagagcatgcacttgtaatagttgttttcagtatatgaagttatttgaagcagatcataacaggttaaaaccaaaagcaacaaatagcatttttgctagtacattagcaagtaagagaaataaacactagccaaacagaaggcagaaaagaggaagaacacaacacaggcatgtgtgacaaatactgtttcaataaatggcattgtagggatttgttagttttttgttgttgttgttgttcttaaagatacagtttcactgtgtagcccaggctggcttcaaatgcatgatcctcagcctccagagtactggggtcataggtatgtgtcatcatgtttgcacaaatataaatgttccaaatactcaacccaaaagatcactagaatggaaaatgaggaacatttgaatgttgactacaggaagattatttatttatttatttatttttatttatatgaccacgttttagccatcttagcacaccaaaagaggacatcagatcccactatagatggttgtaagctactatgtgattgctgggaattgaactcaggacttgtggaagagactgctgagccatctctccagccccctccaggaagtattttaaatatactgctagaatagattgtgagggaaaaggatgagaaagctgctgcggtcccactcactgtaagataattggaggagctggattaaagtctgcagaggtggcgttgaagcaaggaagtcagtccagtaagtgtaataagaactctgaagttcatgtacccagttgcaaagctttgaaacacatgaagtgaaagttgttaacagtttacagagaagcaggtagctatatagttttgctgtgactcagtaaccttgtctcaatcaagtctaaagcaggaagacagatccgtaagttatagagagaagccgggagacagtgtgctgactccgatggcatcctacctaacaacagaacacatattctcttctagcacaagactgaccaagagcaagtgtattctaggtcggaaacaagttgtgacaaagttagaagagctcaactgtgtctctaatgcaggtcag

SEQ ID NO: 21419 - DNA, 1222 bp, Mus musculus
cctccaaaaagggccaaaattatctttcttttcacttctgaccttgtgctctcaagaatatagaagaattctgcttattctttctagacgttgaagcaggcaagtgtagggatagtttagtaacctgggatattatgtggtttaggctatgcacacattcctcttctaataatgcacttaacagcctgagacccttatctgtactaagatacatagtcctctctgaacagtcccacttgactgttaaactcagtttctcttcagatgtagtcccaacagacacaaggaccagttcatccattagttttgctcaataaagcaaaactcagatgaatttttagatataatctgctatttaccattttatgcctatgcataattgggtatgcatttgattaaaattagatacttaatggcaaaggacatatagagtagtgttatttacatgatctactctatcagcaaaaatagagaatctgtggcactataccccttagtaactgtacttcttctcttggccccatcaaaggaagcccatacagtaaccaaggcccctgagtgtcactgttgaggcctgctgcacccctgtgctgcatttctgtgctctgttctgacctgttctgtgtagcttggctttgaataaaatttccttgctgcctctgcaatctgtttgagtttttatttcaagtctttgattagagtctgagaatcgggaatcacctggctcagactcccgatcactggtaacattattactgcagatatttgaagagagttttatgtaggacagaccttttcagttctgttgactgtccctaagaaattatttcagatccctcacaccatgttagacagccaacttgtcgatttagacttgcgtggttgctgtttagcttttgtgtacccgttccttatctttagccatatatgtatcatgggtacacatctttctcatgtgtcttcccactaactctgtctgtgtggaactttgccttttagagcatgtgtaacttctgaacaggaagatactgctccatcaagagagtcgttcttcctcctcctacagaatggggtcatgaaaaccatgataaatgagtatcttttcacctgaaaatcaaggtgtaaatgtttatcttccaaaatcatctcttgacaactgtttctatttttctctgcctttgaagtgatataatacatttgccatgaagtgtttatttggtgt

SEQ ID NO: 21420 - DNA, 2293 bp, Mus musculus
agcacccacagcctgcaaggctcccacatcctagcccgggagagaacgccaatcgtaggaaaagctgacagtccctctccaggccagggtacccgaggccggccactggacacaagacgcttctctctggcccccccaaaggaagagaggctggcccccctacagcagtctgccacagccccagcccttgctactggatgtagcagtggtagcaacccccagatccagcacttttctcctacagtggctcctgcagtcaggacaaaatccaaagtgccacaacactcaggggaggtagccaccgtagctcctgtgcgtccagggctcggcacctcagagggagatgggggcccagggcatggttacagcgaagggcttctgaccaaaagccctggcaggtcttctgacttgcctccccatgtcaaaaggggccccgatgacttcagtcaagggagcagttcaaagagcacaccggcgtccccagagccaggtggggacccgcagacagtgtggtatgagtacggctgcgtgtgactcgcatcgtggatctgcagcttgcaaatgctaaactactggtgcgccttctgattacaatggcctttccccctgtttgcctgtggtggtggtggggggaagggtgaaaaatgaggagtggagttcccacggtcatcctgttggctgaagggaaacactgtgccaagccctaagaggattaccctccagggtctgtaacttattttctgtagctgcggcttccagcagctggcatcttatggacaaggccgtttagcatgggagccagttaggagtcagtggcaaagcgactttacccagaaacagacactacttgagtaggaatgctcgtttgcaacctgtcaacctccactaaatagcatgtgcacgtgtgagtacatgcacggacgccaggttcacaaagctacgtcctgatgggtctcgaaactccactcctgcctaaaagccattggtcctgggaaaggcttagactgggcaaaccacaaagatttgcagggttttggggaaagcccagagcagggctggctgctaaacccaggacccttgccatcctatttctgaggtccaagcacttccctttaaaacaggaccaagtttcaggatcagccacgggtcttagctctcgtagctggctgttgggccctgcctagtgggctttaagactacctaggaaccagccttttgggacttcccaggcttgctttactacaaacactggatctgccaggcctagggtgtgaggcaaagagatgccctacgagtatcccagtctggcaggcatagttactacacagaaggaaggccaaagccacacttgctttgtaatgtggctgttgcacccagcccttcttggctcaaacaattttttttatttctgaataactttttgggggtagaaaccaaatttctatatacacatacatacacacacatgaatatgtgtgtgtgtgtatacatatatatgtatatgtacacacacacacacacacacacttacttttgagggcctatttatgttctgaaagtcattctttcagtagtctgacctgctgtttgttcgtttgtctggtctacttcctgacatgttttgtttcctattgtaatggtgcttttcctgggatggactaaacgatttattttctgttttgatgtaatgtgctgaagaagaaacgggggagaccttgaatgttaacaggatccatggtgagggtgttggggttgtgtgttaaatagccattcgttctggaagaccaggacagggctgtaataaagtggaaaggaatgtgactgagccctggttttcttcagtaaatgctggctgcatgcaagagggcccctccagctgtggaggtccatagttgtctgagtcatttgctctataaaactgcacagccagcaagacagatgtaaagaacagagctgtccttagaagtgacgggcagcctgtggtccgcatcgcattaagtcagcatcaggtgagttccggttgggcagggggttctgctcctgtcaggacaggatcccaaagctacaaacctcccaagtgttgggtttggacctagggcgtcgtgtttaaatcagtgaagtagatgaaatggggaaaaggtatatataagtcttcccaggtgaccaaaccttgtgctgtcttctggtccacctgatacctcggtggttctccgctcaccagacttcctgtgtgcaccgctcctgcctcctggccttgtgccctcctttcctaagtcactgcaatctgttggat

SEQ ID NO: 21421 - DNA, 1142 bp, Mus musculus
ttaaaggccaaggaagggtgggggcggggagggggggtccgaagggaaataattcttccaggtcttaggaggttggggtatgaaaaagacattatagtgtttttaaatacatctagccaaggaggtgattttagaattacagactgttggtaggtgtttcgggtagactgtatcctgacagcgggccagcctgtcattaggtgtgtccggtgtcctggagtgggaacggcagctgtatgtgagctgagtgagtagtcagggagcctgtcattaaaatggctgagtaagagatgctggctgcagccttaatgagcattcttattcaataatttaacacactgaaattgaaaaatcctccaaaccagtggctcctggggcattgtgcagctctcctgttgtgcttcgtgagtaatggttggcaccagggcgccactaaattaaattgagtcagcgcctaaatggttctggcctgggtatcaggcgtaggttggccaggattccgcttccctaaatacgttttgctgacttagactcatttgtaattattgttcatttcatttgtgtttttttttcttcctcttttctctctctctctttttccttcctgtcacaatgataacaatttagcattccagcgcaaaaagagtccttttttgagaagcaaaagcaaggacaaagacaagtctccattggtccatccagctctctctaaacgcctgcggttctggtcttcctctgacatcccatcctcccctaacgagtctgcctctttctcagacattggggatttctgatcccctcctttaccatgtgtctacatcatgtgtccctccttcatttcaaaattcaaccaacaaccaaaagaagttagtccctaaaggccactcggtccctagcggacccctgtccctcccccagttccaaagtagccaccgtggattctgattgcaaactagaagatgacctgtcatgtttcctggactggtgcttcggcacagcacagtagtaggggacccccgggatgtacgtgcagtaacttgtccttgggccaggagattcatgctaagtaagtgacgtgacctcatgctccgccccctcccgcatctgcaagcttctctcgtgcccttgtgcaaagcggaagt

SEQ ID NO: 21422 - DNA, 1229 bp, Mus musculus
gggaaacactgcttccttccacgtcctggtgttcctttatcctagcaaaggggccctggcaagcatttagggaaatgctgccccctcgggtgcacaggctgtgattcggagcatttggacggtcacaaacactgtgacctgtaatggacagaatttggccaccttgggatcaggtcattcctgtttccactctgtgaggccaggtacctcatatgcagctggggtttttaagatttacttctgtgttttaataattgtgtgtatctgtgcgtgggtgtgtgcacatgagtgcagctacccgtggaggcagagatggcagctcttcctctagctggagtttatagttagtgtgaggtccctgcaggggtgtgggaatcaggccctgtgcaagagctgcacgtgctcttaactactgagccgtctctccagcctgagagtcaagtttttggaaagctagctgaattatgagagttaggacggcaataattgtattgttgtaggtttacatagtcccttacctacacatcccattttataatctcaggagttagaaagccccaccgagttgggcacagcattttttttattttatttttttttcagtgactaactccatatgttttcttacaaaagcgtaattaattatgagtgcatcagacctgattatttaggtaggtttccaattggttaccaccgaggtgctcgcaccactattacacttgtaagattatcaggctgtgctggtggctgatgtggttcatgggcatcacggctgggtgggactgttgggcacagcattttagagaaaaaaaaaattctctgtttttcttttattagcacagctttttgtttgttttgttttgtctttcacttataccagaacgcctaaactataatgtaaaaggccatgtcttttacaataggctgagatgtcttcttcgtttcagtagacatgagcaaaacggcctgggttcgagtgtagctgcctaggttagctcctgggactggatgagccagtggttggtgacacagagctgggtcacgctggctgttacgggaggcaaagctcctcagataatccctctgtacagagagtctggggacagcaagtagattcttcctcgtctctgggaggcacagtccacgatgtccttttgtgttcagtgtcttaacctggttcttgtcctcctccccccacctagaccagtatggcatcagggatgtcgtcc

SEQ ID NO: 21423 - DNA, 1816 bp, Mus musculus
attacccagctgtctaaacaaattaagtgtagtggcatgtgctgctgaagatgaattgtagcaatacataaagattaggtaaaaatagcatgctccggacacctctgctgcactgtgtcttttttgtaaggtgagcggctactaaaaccgaggtgcttgctaggagtacctgcattatagcaggatttaaagaagcaagtggaaatgttcagttctgggacttgggagtggggtgtctggttaacattgttggttctgtcggggtcctggcctttgttttgggttgaggctttgcatttgagtcatcggattgtggaatgtggccaaatgaaagtgtgtctgtctcacggagaagagagccaggagcccaggattccactcagtaatgaaccccgttctgtgtgtcaggctaacaatcctgcagctggagttggttttagctaaggctgctgtggcccagcgtttgctggggggtgggggattggggtggagtctgtgttgtcatagttaccctccccctgcttctgtctaggcaccacctgtccctccagttcaggtctcccttcaccaggatgcctgctggctactgtgacctcagccggatcctggtttttctcttccttaaccacttgtttcctatctgtgacacacaattagtgtacggcctccctgggtaatcgtttccacatgtgttcatgtgggtctcccgtgagatagtaatccccacaggtcagaggtcaagttttatctcctcttctgtggaagatagctccctagctctgggcctgcttgctgctttctcccatacagccgaattccaagtctcattgtagctgtgtggccaggcaggccatttggctgtgtgaagtgtatgtagggtaagccttcctgagaggagctgcctgcctgcctgcctgcctgcctgcctgcctgcctgcctgcctgcctgcctgctccttccctttcttcctgcagagcagggaactgaccatggtcccagcctccatccaaagggcactgagatcaaaagtgcccagggtcacaacaccctgtgccggggctcacctgacttctcataaactggagtttctgagttgctgcttttcaaggctttgtcaccacagttgagcataattctctgtgatgtgtctcatagcctgccacttgttcttagcattgctgttacaagatgcggataccatgaactctgcagcttaaaagcctgcgtacagcatctcctgttgacttctagaccctgggatcctttgcattcttgtgctgagagacctggagtcccagtgactcctttggtcctgcctcctcatcctcgagtgacctgagcatcccttgactcttaaatcctatctgcccactagttgtctgagttaacaaggtacttgtgccagtcagatagtttgccacatagggtctgtgtgttcagactctcatttgcatgaactgctgtttttgcagcagtccacggtggggtggggtggggtggggtggggtggggtggtccacagggaacaggctgaaagcccagcatctctgcacaggaatgtacgttactgatggtccaactgaattgagggtggctgtcctacactgatcctgccagtcatcagccatcattcctgactcctccctagaggaaaactgatatgtactgtggggctggaaaggtggcccttattattcagtttctctttaattagtcagttcattttggtggtggtggtgtgtgtgtgtgtgtgtgtgtgtatgtgtgtgacagaatctcacaatgtagctccttactgtctcccttctggggagg

SEQ ID NO: 21424 - DNA, 1203 bp, Mus musculus
cccgtcagctgaggttcccctctgtctgggatgctgccttgagtcagctgagagactactactgcctgtgacttgggtctgcactgggcccaggccctgcctagggctatgagtgttgcagggcccttgtcttctctgcagtctggatttgaaatgggttgggagagggaagggtattctgttatgattatgtctgtcctcccatcaggggaggtaagcagtataagtgtacacacaccataaaagtgtggccatggcacatgcacagacacacctgtacgcacacactcccacacatgagaacacacatacacatacaagcttaccacagatgcatcatatgcaaaacagaaagaatggggcctagattagcacatttggtaaaataacttggtgtgcaagcatgaagacctgagtttgatccccacgctccatgtttaaaagaatccagacgtggcggtgggcacttgtagccccagaactggggcagcagagatggaggatccctaagactcactggtggccagcctagcctcattgatgagccttagatcccagatcgaaaccctgtctcaactaagtctgtggctactgaggaacaggttgacctttggccccaaggcccagagggtcccctgctgccggtgattagcagctgtaagggaccaggtctgggcttggtgaaaggcctcatcacccactggagacagtgtaccgctgagaggtgtttgctgccgagttccaagtgggaaattatctcacaaaggagggactgggtgaccccgaaggacttgggggtggggaagaggacctgatgatcttgtcattttccattcttttagctctttgagagtggggatggcactggtcgctgtctagccccagctaagcacagtgcacacaagcacttgcagggagcgacagtcactgtccccctcatctcgccagtttggaaagagctgctacaatgtgtgtgcattagtggctggcacgtcattgtgcacagtgttctgtctgttccttctgatttagggggagcagaaattcagttcgtatattagaagactacttggcctgtataaacagcttgaaaaacaagggccatgaaggcaggtggcgctcagctctctggggacaattgcccatctcatgtagtgtttcctaccggtggttgagtgaatgggttttgttttgtgctgttat

SEQ ID NO: 21425 - DNA, 1827 bp, Mus musculus
tcaaattgtactgtcatagtttctgttgaagaatcagggctaaaggggaaatccagaagaaatatcccatctgcctgcattttgatagcattttatcttttatattgaaatacatttgagccaggcattgtactacacacaggtcagtaatcatagctactcttgacactaggaaagaaagattgctagaatacggcctgcctgggccacttaagaccccggctcagaaggtatacaagagggctaggtatgtagcagtagtagatagagccagcccttggcctgagcatgtatgaagccctgggttcaaccccaataccataaaaaaatgaattttatacaggtagtcataagccattttaagtagcttaagagaaccttacaaaaatatggaaattttagaatgtctataaaaattattttgagcatgctggcatggggcctatactttttctaagttttacaacaggtaatttcaaatgtagtgggttctttacataattcttatttctcaacagggaggactcgtgggtctggtagattatcctgatgatgatgaagatgatgatgaggatgaagacaaggaagacacactaccagtgtcaaagaaagcaaaatttgagtcctaataatagcaactgcctgtgatcatcagtacctgttgacaaaactggttctttacccctcccccctacaaaatccacatcaaagtgcagtggtctcttgtgaatgactgacccagatcagcaccacactggacttctgctcatcaagtgccaattcaatggagcaggaggaggggatgccgtgcagttaggggaagacataagcctgtgagctctccagcttggaccacacattgcccttttctcagggaaggaaatggaaataaaaagccaacagggcaggggttttgtcagtggaactctggattgactggtcagttgctacaatcagaacctgctttcttggaccatgtttgagacttagaagaatgggtctttctgccatagttcctcactagtaaagaatgccagcagtttctttgtataaagagacctgcctttaaaatcatacattctgaacattttagtcaagctacaacagatttggaaaacctttgtgggggaggggcagaataaagtatctttttttttttttttttaaatctgttccctttgcccttcaaactgcagattttttttttcaaagtggggatttgtccctgcttgattaaagattgagtggaattctagatgtggtcatttgtgtcataatttttctttttgtttcaatttgtttctgttttttttttctctccccctgggtgtatgattagttgttgaatatatatatttgggaccattaaaacttttttgatgtaatatagcctaacgtgctggcacctgctttacatgtgtaatttgtgttctacatcacagttcttaatttgtttagagttttatgaaagatggtatagtttttattgacaaaagcaaagtaatcttacaactatgtgcatacaaaagcaatactattttgtgactaaatattttatattaaaatttgcatcagcagctgtcttgagatttcagggaaatagagtggaatttaaaacttcaacagttttgttaaacttagaaacatgaaattagtattccaaagagattcggaaatttcatatcttggagaaatgacggtacattaaatcaaaattgaggatggatgatttaaaagtaatacttgacttttgaataataaaaagaaaagtgaagagtaagagaaattgtattaattgtatgtttcttttctttctttctttttttt

SEQ ID NO: 21426 - DNA, 1170 bp, Mus musculus
ggttaatcccaccacctgagagacagaagcaagaggattgcttaggatttgaggctagcctggtctacatagtgagtttcaggttagccagagcaagagccatagtgaactcctccttcaaaacacacacacacaccaaaaaacctaaacaataaaaaaccataaggttttcttgcacaaacgcacaaatacacgtaacttttctgtaaggttacactttatgtatggctgtatccacgtaaaccttagagcactgttagcaatatcctgagacccgtcacctcctgcctcagtgtgagctttccctgtgtggggtgcagcgctctgtgcttactctggaggccgtttcagtgcaccaacaccaagtgttgggacttccaagtatttctaaacctttttccaaagccgttagaaagaaaacatcctgatccccagcttcactgtataaggatgctcacattggtattcattgttggcactgtacatgtacaagtcatgtcttcttacatattttgtaaattaagataagcctttaaaacagaaaagcctatataagcaaggaacagtggaaatgagactaagaaagcgtcggcagtcctggcgcctgtcagtgctaacttgggttgtttgtgaatttacctggggtaacctgcatatttctaatgtgtttggaagcctggaggtgttgatgatgtgttgatggttaaaacgtctttttctgaaaaattaagtaactgagataatgctgctttctgatgtcacctgtgtccttaactaacttattatgctaatttctctgctgtgtgttagaaaaagttgccctcagagttaatggaaatgctacgttgctccagccagttttgctgatgttacagatgcccctcaacttacagtgggcacacagcccaataaacccaccctaataaaaaacgtcttgaattgagcatttgtttgctctactcagctgtcagttggccccacaggggctctgtgcccacggctgcccagcactgagaggagagagactaaatccgaggcgtggtttcagtttagtgtgtatcattttggccaactccacagttgaaacagttaagccattgtaagttgagggtctactgatagaggtttttatgtgtttcgtaaaaagttactctctctcattagcctgga

SEQ ID NO: 21427 - DNA, 1109 bp, Mus musculus
cttaattaagaaaaaccagattggatcagtagtatttttgttgtttttcatatttaacataaaaattcccttcatccctaatttgtttataattaaagagacaaattgattttgtattttttcaaagttttatacatattaaaagggttttgttgtagtctatcatgaatgaaaaggatatttttttttttaatttgaggaatacttttgtgtgtgtgtgcctaaaatggtctgtcattttaagaattagcacaaaaaaaaaattagctagttcctaaatgtatggaggtttaatagtaccagtacacagttgtgggtgaggcactagtgagaagtgtgtgggaaatgcagctgggtaggtgggactcacttgtctctgaatggtttaaaggtggtatttcctggaatttttttaatgattttttttttcaaggaagacagacattcgaaatgtgcttatcaaatttctacaacactggactaataggaataactttttttttaaaaaaaaaagactgttctgtataaataaaatatatgaaactcaagtgcaaaagccgtgaaaataaaaggcattgtcttctgtcaatgtgatgcactgtggccgagcagttccctcaggactcaactctgcagcccttcctcctgtgcctcaagtgtcggctgccactccacaggtcttccgtctgtcggctcctttgaaagccgggcttccaaagccctgttgaacactgagggttctggtgatgtgtgttaatgagttgtattttaaatatcagagattattaaataaagagaatgattttctattaacctttctctatttctaatttctaattcaaagtctggtgggaggcaagctatttatctgtctcttggaagcatttcctaaatgcattttcaggccacgttcagaccccgctgtaccaggacttggagctgtcacttggagaagcactgtctgtggagttgtttgtttttacacagctgcagtctgtgaatccctcacagatttctgtcagaatacatcgtctcctgatcccagacataagagccttccacagtgatcttttcattgcttaggactaaacccaatgacttttatacgt

SEQ ID NO: 21428 - DNA, 1208 bp, Mus musculus
gctttaactttagagtttataaaatgttcatataacacaccctacttaaatcatgtatgaaatacagcatgttagtcttttattagaaatgttttaaagagaaactgagcacacactgaatctatttgagtgaagctttttagtttgttatatttatggcattgtccaggcagatccaaaatcaccattgaattgccatcctctttgggttgacctaggcttactaaacatttagatttcattattaatgagtagccagtatgaaaagatgccaatgcttattctagccacagtatccaaagtgtaggagttctatgacattctaattcataaccaggagttgctgtttatagtactgcaggacagacaggggcaagggactccactgccacggctggtcacagactcgactaacttttccatttgtttttttaccaattggaatacttaaatgtattgtatgtaatgaatactaaactactgataatcattttttttaaatctgtaacttgttctgccagataaaatgcgtacagccgtgatgctagtgttataaccaagtgtaaggaccctttggaaggccagacatggtgctgtgttcctttgatgctggtacttaggagaaatctgcagaggtaggcagatttcttcttgagttcaaggccagcctggtctacatagtaagttccagactttctggagctgcacagtaagaccctgtcttaaacaaaaaacaaacaaaccaacctttggaaagatcactttcatattttgggatgtcatgagcttatctatgtttcaaaattcagaatagctgtcctttggcctaaaccataaatctacacccccaacgacagtactatgcagacatttcactgatttaagttgtttgatacagtcagtgcaggtgaactccatgctaaagttttaagccttggccaaataacttacacctcacagactgtctgaggcggtgcttctttttttcctgaaaacttgatttttcttgatgaagccaaagttaatgagcatgaattctcaaaggagtagtctgctttgttttacttaatatcaggttgagtgaagtaagttttattcgtgtcagagtctaagccacacattttgaatacccacatgtttgatactatttaagtcatgctgtgccaagagttactaaattcttagaactggccctgtgccctgcctaa

SEQ ID NO: 21429 - DNA, 1912 bp, Mus musculus
ccaggaggcgacgctgtgagtgaagaggacatgcttcgggcagctgtgaccatgtctttagaaactgctaaagacaacttgaaagcagaaagaaaaaaatagtacctttaaaagtcattttgctactcacactttgtaacattgtctgtgtgattacagtgtaagggccactttggcagtatgttcaccagaagagataaagacactgtagtggtttgtaagcagaaaggcagaaatgtgtcataggactaaggaacgatcgagatactagccaaagaggcagtcagcaatgaaagaaacttttctaaatgtcccgttttgtttttcaaatgtgcaatatctgactgaaattatggaatttttgttggctcttttggaccaactgattagctcttgccacagaacttgatcctataatgtttcgttttctctctgcattgggggtggcttggctcacttgagcttttacttcatttcagacctaccttttatgaaatgtcttttatatgtcttgttacagaaagatcagtctgtcttctcatacatatgtcgggcacgtggatgcttcctggtggtattttctctaatgtggtgatgtgttgcttttaaagcctttgttagtgggatcacatttcctaattgtgctgcattcctctactctgcagtcagctctgttcttgtaactgagcacgtgagcgtgctctgtctggatgccctgagagtggctgactcctggctggagcccttcctgtaccttccttcctctcttctccagctgagaaaagaggaggcagaggacacaaacagatttccttctacgtaacatgcaccatgaatgcaccacaggagaaactcgcccttcagtcctggtggtgggtttgtcctagtttttcatctgtgacaggagctttgtgttctaatcacgattaagtcctggaaaatagatgcctgcttcactttctaaaaattaaaaatatttttttttctttttctagtagaaaataggctgctaggatgatggtctagaatctgaaagtaatttactaataaaatatatttaaataatactgtgggttgacccttgcaatcatgtttaaatcgcttaagaattacagaagtcacaaagcttaaagggtctgtttgtaaataggaaagtccttagttttgataaacattaagcaggatgcagagctagtcttgctgggtcaatacgtggtatgatttgggtggaaattaactctgtgtctttgtcatggtgtcatagataccctgatacctgctttcccctccctcccctttgaagcccctttgaatggtgacttgtacataggtaaagtccaagaagagattgtagccagcttaggaaggggcagcatgctatagtgctctactggtgtgtgctctgcacacgtttttatcagggaaagttttggatgtaggatttattgctgtctaactgaaaaagatacaaatatttttatttatgcttatgaaatagctttttcttgataggatggatgtttggtttggtttggttgtgcgagggattgaacccagggcctccagtgtgctaggcaagcgccctacctctgagctatatccccagatccagaacaggggtttccttgtttgctttttgttgtttttcttagccattttgtgccaactacagttgttttttaaaaatttgcttcatgaaaaattaggcagtcctattttaaaatctatgaagttttctttcagtaattgcaaaggttcagaagagttgggcagctgtagggtgttagagttaggactttgcttacagttgattgctatactgaagtatgtaactactcccgtatgctgctcacatgtctagacattcattggcccttttcctttaccctttgaaaaatcacattaaactttc

SEQ ID NO: 21430 - DNA, 1085 bp, Mus musculus
gcctcttttctagtggtagattgtgtattaaagattgcttctagctttagtcttttatcttctgctgagagcttagacagctagaatattctacctagtcacagatagccaagatgaattaagggttaactttgtagtatttatttttaacattaactagtatttaaaagtgctagtgtgggctggagagatggctcactggttaagagcacttactgctcttccagaggtcccgagtccaattcccagcaaccatattgtggctcacaaccatctgtaatgggatctgatgccctcttctggtgtctgaagacggctacactgtactctcagacataaaacaaatcttaaagaaataatgtactagtgtactacagattttaagaagaaggtgtgcgtgtgggggtggggtgggggaggggtgctggagggtggctcattggttaaagtacttcctgcgcttgccttttcctcaaaccctccatttcttagctggaatagctccctgtttctctaggctctgtcttggctctaagactctgacttccttctttccctccaagctggccctgctgtcagcctattactcacaggtcagcagtcttccctcgtctccccactgcctctgaaggcctcatacttaatggaaatatgaaatatgacacattataggatttcttttcttaggtaaaaatgttactaaaaattagcctactataaattcatagcttatgagtaagggttactaagtaatgtttccttgacatgacattttttttagcagtgatgtgtaaataaagtccactccggcattgttaacacctgctattgggagcataggagtcagtgatgggactgaagactgtcggctgctgcatgctctacagatgtgtgtcagcatcacttacgtcctctctaggatggctttgaatgccgtggtctatctgctacaagaagcggtgtttcccagcagaacaataacacacattcgtagccaaggagtcctgtgatgctttgactgcttattcttgcactgtagctttcatggtgtgacctagtttatcagacagttcagtttaagagac

SEQ ID NO: 21431 - DNA, 1145 bp, Mus musculus
tttatttatttattttggtttttcgagacagggtttctctgtatacccttggctgtcctggaactcactttgtagatcaggctggcttcggactcagaaatccgcctgcctctgcctcctgagttctgggatcaaaggtgcacgctaccacgcccagctatttacattttaaatgttatcccattttctggttcctctctacaaactcccaatcccatccccccccaccctctgcttctatgagagtacttccccccaccactcccgcctacccgctctggcattcccctacactggggcatcaggccttcacaggaccaagggcctctcctcccattgatgccctacaaggccatcctctgctacagctggagccatgggtcgctccatgtgtactctttggttgatggtttagtccttgggagctctgggtgtgggtgtggggtctggttggttcatattgttgttcttcctatggggctgcagaccccttcagcttcttcagtcctttctctagctcctccactggggactctgtgctcagtccaatggttggctgtgagcatctgcttctgtatttgtcaggcacagagagagttttaagatagccagggctatccagagaaactctgccattaaaatccaaaaaaaaaaaaaaaaaaaaaaaggtgtttgccagggtactgtgtgctcctagtgcccactaaagccagaagatctggaactggaggaactggagttaaagaggccacgtgagcagccacgtgggtgtgaggaattgaacccaggtcctctggaaaagcagccaatactctttgttttgttttgttttttgagacagggtttctctgtatagccctgcctgtcctggaactcactctgtagaccaggctggcctcaaactcagaaatctgcctgcctctgcctcccaagtgctgggattaaaggtgtgcgccaccaccgccgggctagcagcgaggactcttaactgctgagccatctctccatctcccccaataccttcttgacagtactgtttctcattggagcagatttcagtggaggtgactactgaattggtatatgcaaaatgctaggcttacaaagtgcttgtgagtaagcatggaagcccgagttcagatccc

SEQ ID NO: 21432 - DNA, 1174 bp, Mus musculus
ttaattactttctgatgccaagcaaacctaaagaggcttttaacaagcctcatgtccacagctagcttcctatttcagatgcagtttaaaagatggcttgttttaagccaggtgcggtggttttcacttgtaatctgagtactaggaaggcagccaggagcttctgctgaaggttcgaggtcagcctcaaccacattgtggttccagaatatagctgtagtcaaatcaagctgtctataaataaataataaataaataatctccaaaccaaagtgtacttattaacacgttaattgtacatattaacataatccctgttcgtacagctctcgttgattacatccacttttcttccacctttgtctccctctgctgtgcattgtgcccggccatcgtgatccctgcctaccacttatttcagtatttcaaagactgttgtactttgtatttaaggttggttttttgtttgttttgttttgttttctgttttagcagtcaagatgaccttatttcagcttctacgtgagcactgggttcatatacttgtccctgcgggatttgtctttggatgttatctagacagaaaggatgatgaaaagctaactgccttcaggaataagagcatgctatttcaaaggttagttcatgcacctttggggagttctgtctcttttgttccaaacaaagaagtgggtttttttcctactctaatggttaacagtcaagtgatacttcaggtttgttatttaatcgttggatgaaactatgattacctctgtagtgcaaacaatttttagtttatgatctagccatttcagatctttgaaagtttcatttttttcttttattaattttcacctaatatataaaaatgactttaaaattatttgtgtgtgtgtcacatgttgtatgtgggtgcccttatcggccagaagaggggatcagatccactggagctgtagctacagatagttatgagcctccccagtgtggatgtcatctgagagctctcatgactactgagccattttcctgcaccctcatggcctcttcgtacatgcgcatatttgtacttttcattccctgtcactggctcccttcctctccaaatagagtctcttctgtttcatgtcacatatatttacatctagatcctgcatatgacagaagacac

SEQ ID NO: 21433 - DNA, 2965 bp, Mus musculus
ataacctcatcatttgaataaatgttatctaaaagaaagcctctaagctgagtgtggtacgtgcgcttctaatcccagcactcaggaggctggtgtaggaggactgtgaattagaggccagcctgagctgcatggttagagcctgtctcagccagcaagaggagagcctgctgtgttaccaggtctgtacatattttatttagactcatcttaactattggtccggtaactgtctctgaaaccatccaatgctcggtctttttaaaaagcaaatgtggaagctcgcatttttataaggtaacagtgtgatttaattaaaggttgtaaatggtttcctttctgaacttgttttttaagtttatgtaaacagtggttggattttatgcttatttttacaaaaatagtactgaacctggggaattgccaccctcgatacagtacaaatgaattctgttggagagtaaaaactgaaaatatgtaattctgttgacttgaacaatgaaccatgctgtcctgttgtagtttcccagactaatttttagaaagtagcatgaacaaggcaatccttgatgccttacgtggaagccgtcttctctacacttagcactcagagaggcctcactcttgtttaactttggaactatgtctatttcaacccagtgatctgctatcggtctagaattagtcttttattcagcttcatgtgctaacagaaccttctcttgtggattatagccctgaagcaaagtttgtagccttttgatactgaaaaccagatgcacaaaatagtgttgcagagatgagtgtaaagagcgtattgtccttttatcagccatgaaacattcctctttcactcctgttactagatagaggaggcctataattatatttccattccaggggaagaaatcctgcggttgttacatgctataaagctctgcatatacctattacatggtaattatatctaaaactatttcttgcctaacctttctgctgacctacgaacaggaatcagactttaaaatattccttgaagatgattgttgtacaataatgtcattggagagcaatccaactgcctgtgtctagatgacatcatccaaaaattcctgaaatggagaccttcactctagcctcagctacttaagaaaagcatgacttctaaagacaacagtgagataagtcatgagagcagagagagtctcagatgcaagaataaacacagggtgtgagacaccagtcgataactgcacatagttttcttataaagaaattgtatctgggcacggcacggtggcacatacctgtaatttcatcaacttcattcaaacttggctgaaggccagtctggaccacatacgaccctgcttcaaaagaaggagaaaggggatggggacataggtcggtggaagagtgcttacctagcatgtgtgaggccctgggtttgacccccaggtctagaggttggggggttacttagtgtatctgttgctgtatggttatacatttttgcaattattcctatatttttgtgactccgtaggtgacctgagacaataaagaagaaattagtttgtacggtgggttgtttacctttttttttcctttccttttttttttttttcttggtgtctgtatgcagtttacataccgtaaaatatttactctttttaaatatacaattcgctggttttggtgacatcttcaaccacttctatgtaattccagaattttttttaatcattccaaaaaagaaacccagtaaccatttgtaccccattttaaccatttgtaccccattttctcttctccctgggtactcatcaatcttcctgtctcttccagacattttataaagaatcatgtaacacgtagccttttgtgtcctctttcacttcaactaacggttgttttcaagattcgttaacgtagtaaagcgttagcataattcttgtttgcttcgggatgtagtcttgcattgtgtagctaaagctggttcaaactcataatcctcctgcctctggtgtactgggattgtaggcgtatacttcagtatccattttgtagttatatgacactcctttgcttggatatcatgtctgcttgtcagctgatgtacactgagtggttcccagtggtcttggctgctataaagaatgttgctttgaacattcttgtacaagaccttttttagaaaaacatgaacatttgtattgtacatttccttgcgtgtgtgcttaagaataggattgttgggccatgtggtaactttgcttaaccatctaaggagctgctgacttgtgaagcagctgtactgtttcctgttccgatcagcgtatgtgtaaggaagggttccattttttgctacatgcattgttgtctctgtcttctcgtctcaccatcctcagcatgtgaggaggtacagcctggagggtttgacttatatttcgctaataaataaaagatgctgagcatgtcatgtttcttgtgcttattggatgctttgtttgtttgtttgtttgtttgttttgttttttgagacaaggtttctctgtgtagccctggctgtcctggaactcactctgtagaccaggctggcctcaaactcagaaatccgcctttggagtaatgtctcttcaactcctttgtccttttgtaaactgttttgtctttttcattgtcaagaagctttgtatgttctctagatatttctatatgtctgtggtagatatccctgtggcttgtcttcactttgttggtcacttgatacaagacaaaatttacaatcgtgaagtccatttcttctctcttttcagtcacttgtgttactggtgttttccttagcattttctttttctgggtgttttaatatagttcgtagtggaggcaggtataggattagtatagggagcatgtggaggtcagaggacaacttgcaggaatcggctctcttctttcacca

SEQ ID NO: 21434 - DNA, 1203 bp, Mus musculus
tcttccggggataagggtcaagctaggacaatggcagtgtaataatgaacccagggagagtagcaggcatggcgttgagcactttgcaccttgctgtcttcatcttttcatcttggttggtgcaagaatgatgtgacctggtgtgtgggaagcaccaggtgtgtggcccagcaccaaggaggaagacacaacacctacaactcacattcaagaccccaaaagctgacggggagtgttagtgtgtgtatataagaagggcaagtactggggctggcaagatggttttgtaggtaaaagtcccactgtttcactgtatgactgacttctaagcattgtcctctaggggctggagagacagctcaacagttagcactggctgctcttccagcaccaccatggaactcacaactgtaacctgtttcagtggattcaacaccctcgtacagacatacatgcaggcaaaacactaatgtacataagataaaagtaagttacttaaaaaaaatgtcctcaggactatactttcagggatcatttctatagttcgttactagaaaggtttctctgactgtgtagagcacccgaaaccacgaggacgagatgtagcgtcccctcctaagtgtgaagccggttctaggtgctgcttgattgcagctgcctcttgccattgatgatcgttcttccctccttcaggagggtgagagggagagaacgcagtctgagtggaaaaaaaaaaaagaaaaaaatgtcctctaaacctccatagaacacatgcacacccactctcacaaacacacacacagatgacaaaataaaatattgcattacacacacacagttctgtatgtatttattttgtgtgggtgaatggatgggggtctgcatcatgatgctggcttgtgcaggtcagaggaaaacttgtgggagttggttctctccttccaccatgtgggtctgggtgattgaactcaagacatcaggcttggcagcaagagccattgtcttatgagccatctcactggccctcaaatatttcagaaacgaagtattcacgatcctctgaagaacacacacagacagttctccagaacagactgagtgtgaggctgtagaaccagacccactgaggttagaaggactgacatcagtcagagtgcacttgccaacctcaaaggaatggaatcagaattcagtattgggagg

SEQ ID NO: 21435 - DNA, 1169 bp, Mus musculus
ggcactgggaagatgggcatcattccagatgtactggggagggcaccactggcctgaggagactgtagttcctgaggccactcattggtggaatgggagggcgggttcccagtggtgatggctagggactttgtcccgcatgactccccccatgtcttgttttctgcagggttgacttaactcatctgattcatcttcctgtttcttgcaggatagagatggccatggacaaagtgtgtcttagtcactactgaacagctcgcttcccaatgagtgagcacagtccactggaatatgaaccaaccagagactgaaagggcggagccagaggcagcacccgcgcccctggcccccaggaatactgcccgcccaccccagggcttgctttttgaagatacctgcttactaagaagccagtttgggtgggtaaagctctctggaagaaggaactttgcttcttaggagtttttttgtttgtttgttttggtttgttttgttgtccattagctttcaagagcaaattccccgcggcttctctagccagggaaggaatcgtctgagaaattcaaagctgaaacctcttgccgtcttcacagtgatttcactgaagaagagggtggaaagcaagcccctatgggagaattatttttagaattatataatttttgattgcttttatattttattctgtaataatggatgtcttaaaacaaataagtgaagtgagacatttgtttctggactctggctttgtggtttgtgttttaccctcatggtgggctgacccttccctgctccacgctctgtgagcttgcagcccccctcaaccccccccccgcccacccctgttccttttgccctacaatgcctgactgtttagctcttcaccccgatcagtttcaggggcctttcttccttaagtttcactccgcctcttcatcttcctacctgttctgattggaataggaaatatcccctacaggcttgtatgctgagtgtttggtcctagctggcagcactggtttgggaagttctggaaactctaggatgtggggcctcgctagaggaagcaggtccctggggttgtactttggaggctatgcttgctccctagactccatccattgctccatttcttgccactgagaggggtggaacttttccctgcc

SEQ ID NO: 21436 - DNA, 1165 bp, Mus musculus
ataaaagaaatgtaaatacattttacagtaataagtatttattataataaaaaggggcagtttaggagattgttctgatctatccattacccaacaaaaaaactcctgttttatttatatgtctgctttgtacattttcccacaaacaactaggaatgtgtgttcttgcacaaatagttcagggattggtgggatgctatctgcattctgagttgaaaagttctaagtgttttctgacttttggttggcagttaggtagggttaggaggtagggacaggactgcccacccccagcagtgaccaaaggtcttagaggctttttttttttttttttttttttgtctttttatctcagttgttatcctcagcacattcctctgggctgattggccaatcctcttgagaccaggtgatgttctcgaccctttttaaattgactctgtctttcctttcagtcttctgtagcggacacggggtgcagaatgacctggagagtggctgtgcttctcagcctggtgctgggtgctggtgccgttcccgtcggtgtggacgatcccgaggatggaggcaagcactgggtggtgattgtggcgggctccaatggctggtataattaccgacaccaggtaagaaacccatgcgttcttgtcactggctttgtgcctacaaaatggccattccattttggaagacagttttgctttagtctcaagtgggatttcctcacctttccccagtggcggcctttagaaccaggcattaatccctttttgggtctgcactgtatcacttgcctgcctgtcacaactcaaaaatcaaaatgcatttagatatcaccgcatatcttgggggctcaagattaccaggtgagagctcttgtgttaacaccttcccttcatgttatagaaaggacacgcaggtctagagagaggaggtgatttaactgagaccattgacaagaggcgagcagtgtggaagctctggggaacggactcctggcccctctgtcctccatgcctctgtccctttacaccacctcctccctcctggtgtttcctgcaaatcagcttgtggaagtgagagagaagggcatagttgacagtccagcctcctgctgggaggaagggggtagccttggggaagcatcagtcctgtggaagttgga

SEQ ID NO: 21437 - DNA, 2482 bp, Mus musculus
ctttgtcagtggggtactggaagtgcctcctcaggtcccaggagcccgttatgtctgcttctttctcctctcctatcccctggctaatgcccagtgcctgctttgtctcccatctccaggctatgaaggagtgagtgagttctttaccgacctcctgaaccacattgccacagttctgcaaggccagagcacgggaggagctgccacggaggaagtggccccgctaaggcacaacaggctcctggcggaaccggcaggcagcctggctggggagcggacgtgcagtgccagccctggctgctgtggcagcatgaagggccaggacacaccctggaagactgagaccgaagcaggcaacatgggcgctggtgcttccgccaagctgccgcaccagagacttggctgcaccactggcgtatcacccagcttccagcagcactgtgtggcctctctggccaccaaggcttcctcacagtagccacagagcccaggacccagaggggcagagcgtggaaaatgcccactgggccagcagctccacatgggaacactactaagaattcctggtgatctgaggcttctctgttttaattttttacctgattttctgatgttatgatcggaatgaagggggggagacagagcagaacatcaagtggcccagcctcgaggacgccgcctgactcctgctgtgcagaggtcctcactgagtttacacacgcttgtgttctcaacactaggtctgaatgtgaggggggggggtgcgtgtgtgtgtgtgtgtgtgtgtgtgtgtgtgtgtgtgtgtttgtcatggcaagggtgagtgtgcatgtctgtcttcatggctgttgtgggccaggctctgggcaccgaggaaggaagcccatatctggccaggctgttgcagctaagcaggcgaaggacgaacggttttcccagttcccctcctcttcacacctgcccacacccagacctcaccctccctcttgtcccagatgtgctctcctccaaggctaacccttgcccccccacctcgctctccaaagccagggaagcagtagacgccccctcgggagctctgcatggaggatctgggttgtaggaagggaaaggagcttcctgtgggtgtagccgaagcccactggctattgctagtcttcactggctcgtggaatacagcaggccactatccaccctaccctgaccctattgctcactgagatccaggaaggagccatctgactaggagtccaggagtctgccaggacccaggatttaccctgggacttccaacagatcattccgtgagtcttcaggcctccaccacctcatctcttcagggtggctcctgaaacagagaactgaaggcctggtctagtggtctagcccacgaggatctctgcttcctcatgtcatcatccggtccctcttttcaggtgagaggagaccacccacagggctgctcctgttcacacgcgacagcccctcctggaacagcaaggcccagctccttcctgctgtgttcatagcgagtcccttgcactgagcaccaggcaagcccccaagggagttgtgccccatttcagactcactctgaccccacagcagctggcagaccacccactggccccaaagcccacaggaaaggacccctgtggagccccaggtcagcagcccaggacccccaagggtgatcttgtgtcttaagacatcagctcactatgtaaagagaatgaggcctctgggttgtccttaggtctaataagatagagtacactagaagcagcagccctgggaaggccactaagggccatgcaggggcatcctttgggcaaggagaagccgattggcttcctcggaagcagagccccaggactaaccacgtttacaggacctgagtgttgaactgattgatgtctgtaagtcaccttcccaggcctgaccctgaaaacagggggtgggaagcgtggccgcctcttgcactgctttgtctccggaataaactactgagatcaaaccgcattctgtacgtggtcacagtctttaaagagaagacatttaatgacagctttgccctttcagagtagaatcaccagactctgccttgagaacaagcagagtgggcagtgctgcgtcccctggagctccttcctctacagggtcacacatggtaaaccagccccggttatcaagtacctgcctcctggccaggcagcattctccacgggtcaggtctcccgtgcaggaatagaggagggtgggcaggtgaactttccaggactggaaacaggaacagaaacctgggccacctgcattcttgcagacactttaatgatacagaaatggacctttgtaaacattgaccctgaacagcactagttgctagtgtctgtcatcaccaaaggagccgagagggatcttccctgggactgggtcgttgtgggtgtcatggaagagtgggtggggcctgccacacaccatg

SEQ ID NO: 21438 - DNA, 1176 bp, Mus musculus
gtgtgtccatctcaggcactgtaaggatggcccctgggcacctagttcttgtagtaaagttataacaagaggcgactctgaccaaaggcctcctcctcctggctggcaggagtctcctcccttttgggcctttgtggaagaggctccaggtgttataagcaatgagtagcacccaacctaggggtccccaggattgcagtgattcatgatctggggagctctggagttcacagcctgctctgctttatgtgacagacccaggaaattcaaggtttcccaactcgaacagcatagctaccaagttcacggatgttcctgcaccctgtcccactcgctatgactcgaaactctttgggagtgctcaaagagggactcactgtccctgagggtattagaggggcccccttggaggatgctcacctccatccgtcttgggcaccagctcttcgccacagggccagggagaggtcatggtggggtcgcccaggaaggtgactggccaccgtgttggagattggcagctgatggactctgatgcagcctttggtctttgtctccccagatggctattgtgttcaaccaagagggcctgaatgccatccagcctccctgtgtggtccagaacttcatcaaccacaatgctgtcctgtacaaggtgtttgtggtgggcgagtcctacacagtggtccagagaccctcactcaagaacttctctgcgggcacatcaggtaatccgatccactgctcctgattgtgtcactctgtgccaaaccctggggcagagccgaaatggatacctggtgtctgtctcctggtcttccttgttatttctgggttagtgagagatgacctgggttgaaagagttgtatgagatagatagatagatagatagatagatagatagatagatagatagatagatagatagatagatagatagatgacaaaagggtcctgaagggccatcgagagaccctgtgccgtaggcaccttggggctccatccctcagagctgccgccgactccaggaaatttctagaagcttcttattcccaggaaggtcccttggcccacccagtgatggtgcccaggaggagtgtgccagagtgggtgtggccagcccagtgtgggacatgaaggagggagatgacggctgacccaccacattgcatgcc

SEQ ID NO: 21439 - DNA, 1179 bp, Mus musculus
caccttgggagcctggctcagtctgcccgggatgctgtgcaagctgcctgctgggcacacatagatagcatcttgcagctcagagggccacgagctgcttctgttaagagcgtaccgcaggccaccctcttggtatatcctcacaactcgctttgcacatctgagaggaaatagcgcaccgtcacgagggctctcaagagagatccatcctcgagacctcatccaagccttacacctacagatgccgtccccctggggtaagggcctccatgtatgtgtttggtagacacacataggcagtttgtagcagagccaacagaaagcacaccagattgatgtgtcatggtttcctggcctcgggtccatcagtgataggtgctggctggactcccgaagaggcatttgagaggaatgtctcagtcctactggttcagaggagatttgaggagagagcccacatctccagtgtgctgagacccttccttctgcatggctgggtgcctctgtctctgcgtgtaaaggaatcttgcccagatgtcagtacagagtgtctggagagacactttgggggtgtggggacagtaagcatgtaaggacttagaggcaagaggggcagtggctatgcagaccacccttaggtccctgtagtgttcttagcaaggccccacattctccagggtgacctaagtagccccatggggaaagccttccggataaccctattggcagaagtgctccctgagagaagactaaaaatggaagctcagacgccatgactttttccagatctaggtcattttcatctcctggcagatgtttacggggaaatgtctataaacagtatcagaacaccaggggacagtctgtgccaggggttggccctgccatgggaagccatcatcagctgcaaggacagctgtctgctaatgtcaagagccatgtgggggtatcctggctgcttgggttcccagctgcagcagcaccccaaggtgctttcccgagtaagccaggcaggaagcaggcagactccagagcagccgcagcacccttcccatcaccaccgaatagctcctctgtgacagaggggaacccagcctcgggatagcacacagccggcactactggcagtgttacacattgcctgacatgcaccttcagttgctatgcctccctgatcat

SEQ ID NO: 21440 - DNA, 1191 bp, Mus musculus
cggtgttctgtttttttgagcctttatggcatctaagggtcatggggacttctgatttgtagttcctttggtttctcttgcatccattgctaatgtcccccatcttagatgaaagggggtggtctcaagcctctgtgtgaatgtcagtttattctactgagtgggacttcagtgggcagacatgctagaaggaccaacagcgggttcatctgcccagaactgctctgaggctggccaggaagcccaatctctggtttactaccgcagtggttctcaacctgtgggtcacgacccctttgggggttcaccgaccctctcacaggagtcttctagctaagatcatcagcaaacacaggtatctatattatgattcataacagcagcaaacgttatgaagtagcaacacaaattttatgatggggggatcaccacaacgtgaggggctgtattaaaaggtcgcagcattaggaggtttgagacccgctatgctacagctgccccgcagcttttctgggatgggggtgacacaaggtgactcagagtcagaggaaatgtaggagggctccctgcctgctggatgcctttggcaaatgacctgcctgggtggacagatgggataggcaaggactctgagactgccaggcccgagagtaaggtgggacttgggttttgtttacaatgtttctgtgcttgagcaagtgagttgagattctcacttgtcagatcaggatagatgtggctggaagcagccttgaacagcccatcaccagtgtcctgtgaggagaacctagcttctggatctcttgacagtggcttgcaccagctcgggctctggatggaggctggggacaggctactggagggaaggtgccaggcagaaaccattctgctggatccatagccacagtctccaagccttgcctgccagggcttacaggaaccacggactgttccctaaagcaggattggttctgggctggcaggaagtgttgaggggaggggggagcttgtgagtgctgcaccctgaattttccttattgcctgcacaagccagcttgtgttcttccaggagggcagtgggctgggaacttcctgcgccctttcctgcacatggggcagtttcatggcagggctcctggtgggctccctgctctttctgtgccagcccctccacgggtgtaggggcccttc

SEQ ID NO: 21441 - DNA, 1134 bp, Mus musculus
ctgagttcatgcacacttgggttccttgtccttgtactctctgtggcccaggtggctttggaaggaccagacatgaaactgcagaggaggagcaggcacatacatgttcactgtagagtgctcttggtgtggagaaccacgaggcatttactctcaggcccacttttagcctcacatcctcatgctccaaaaatgcttgcacgcagtttatttaactttaagtggggcaaattctgaaatgggttgtttattgtcgaagttgaaattttaatttctcataaattcccccacaaattgctgtagtacatttatatttattgaatctgtcagggttgtttgtagtactgaagcctgggctccccgtgtttgtgagccgttgccacagcgatgctggggtctgaggctccgaagcagaggccttgctctcatatggtgtagaggttccggactgtgctctgggtggaaaatgtcgctgtagccagccttggctggagtgagagaactatttaagatggcggataatattctaattctgtccctcttgtctgtttccccttcccttggtgggcactttgcctgtcagctcggtctgctacccccaggcccttgctgctgcagtgtcgtttaggaccaagtgtgctgtcagttcaccagtgaggcattcaggctctgtggggacctggctggggtaacctagggaccttctcagtatggtcacggtgaagcccacactgccacacagccacggatgacccgaggccttgtctagtgactctttgtcctgttgttaccatccgtattctttagtctttcttcagtcttctctgtcaggaatgggttttgcttcagcctttccacacccagtccagtcccagtgaatgggctcgcacggcccaccctgcttcctctctgtaggcgcttggaatgggcagccgaagagacgccactgctgtggaaccctcagaccaggtcgggcacagttcacccgagcccccgaggcctgagtacctcaccgagcagagtctccttgactccgtctctgtccccaccttcctcactgtacctcccctaagtgggtgctataccagttttctggatgctcagccaccatctggtggtcaggaaacctgagtc

SEQ ID NO: 21442 - DNA, 1161 bp, Mus musculus
agaacttcacgatttctacttattaagggttttagcttgcaagttccttgtttgtttgtttgtttgtttgttttaaaagacaaggtgcatgggtacttttccccaactaaggtacaggttgtttattttttttaaatgcagaaaattattttcactctcagccacttaattggatgttaaatagacaaatttatgttcattcctgttttcttcttctttttttaataataatgacatgtgatgggaaagttatgtaaattagtgtctgttcatatcaggttttttgtagccattaaaaacatctcattttggaagacctttagtactggcacttagagcaaggggtgagtagactcctgtgtgctcaaggccagccagggttacatagtgagaccctgtctccaaaaacaaaacaaaacaaaacaaaaatcccatcttggaagacagtgtgagagcattctaaagatggctgctgaatgctgaagcacttgtcaggcaatttctgctctggttggtgtgtgcacatgcatgtatatctgtgtgtggggtgtgtgcgtgtgtgtgtgtgtgtgtgtgtgtgtgtaacactcaggatggacccaggatctgaacattttagcaaatgccctgctactgaatgatccattaattacaaccagctttatcttaccccagctctcagcttcctggcacggatgcgtataggtgctgtcccgagtggctagcaggttctgtgagcctttctcttccccagcctctgactcactgagccaacaggagcaaatccttggaacaaaaagttctgcgtcatcatctagatgggagaaggtgaccggggaagcaggctcctcatgattgccagtgtgtgtcctcactctcaggtaccacgaaccccaggccttcctatttcccattgagctgagctgggactgagctaacacagggtctgctgtcaaatcgtcctgatgtcctttgatggagtgtggcaagcaagttcatgtgagactaaaggaaagagaagcaagacaaagaaaggcgggaaggaatggaaaaggatttggaagaggaaaagcaaaaaaaaaaaagctgtttggaaggtagcgtccagttctggggtgaaaccactgctcaaaggatggctcctgagacgagagcaccatt

SEQ ID NO: 21443 - DNA, 1232 bp, Mus musculus
tctttttgttttctctgcaggaagcgagggatagaagtcgtgcaggtgagtgagaccacttcttcacattgccctgtgctgagctaagcgtgcactttgtctttgggagagtttgggcgtctgactgctgtacatgggcacctggattgtgatactccccctcgcctggagatctgacatagctcctgccccgcactgggtgcagacttgctgctggctgttcctgtttggaaagttacagtgggtgacgagtaggaagggccaggggtcccggaggtcaagacactcctaacacaagttgtgttaggaaggatgaagggacagtcctgcctaggtgactgtgctgtcaccctgtcctctgtgctcagccttgagctcattggctggaaagaaggagggatggatggatagagggaggagtggtaggtggaagaagggaaggagggggagggaaaagcgagtatggatagaatgaaggcgggagaagagagagtggagagacggccctgagatggatatccaggctccagcagcggcatctcagaacggttggcacgtttggcctgtctgtgagagctcgagcccgggattacctgtggatattctggtaagagacactggcccccattggttatgtctttccacggatggtacagtggtagatgtgaactcagattaatagactcatagtgaggggtaggttatgacatgtgcaccacagctgtgcctggtttcctgtgtcaccgtccctgcacaggacgaacctgactgtgtaccaagctgtccacacttggatttactctgacggctgagtcttcatgcatctgcagagggctgcctgggattgggaccaggtcaaggctgaaggcagacatctggaggaagtttccagaaagcctgctagggcatacacccttcagaggtcttcgttgttcaacttcaggagggctctacttcgcagctgtaggaaagggtttcccgatgcaggcgtgcacatacctggccagcccgagagcttcccggttccctgactgggggtggacaggagccttggagccattgtgtagagtgtgccagacaaaagggttctgaaatctctcaagatgtgtctgttgttcatttggatgacggcttgagggaggaagtggtgtctgggcacggagtgaagccaaactgagcgctttctactcgggcatctaaaaataaaggcaacggcaatgcctgtccccaca

SEQ ID NO: 21444 - DNA, 1186 bp, Mus musculus
ttcatctgctaccagccaggagtttaaagtttgggggtgtaaagatagggcacacccctgcttcctgaacggcagttgtcagtcaggacaggctaggtcaggctgcagggacactgcaagagaaacactgaaggcctagctcaggctcttacagagtccactgtggttccctccgcagtatccccttaactgtgcactgtggtcactttagaccagataattctgtcctgcacattatggagtctgtcttttggttgcttgtggcaccactcccagttggcagcatcccctgctcttgtggatggcgtttgggggaaactggtctcaaactcacagtccttctgcctcagctttccaaatgctgggtgagggtccacctggtaactaccttctttgcagactggcccaggtcaggaggactggtgagagggtccagtggtcacagctgaatgctgctttctgaaatacatgctgtatctgttcatgtgtcattacccaaggccaggactgtgcccacggcagaccgagggaggggccttagtggtacttaagagtccaggaagaggactgctggtgtggacagccaccatcttgaacctggagctgttcctctccaaaggaggggccatctctgctctttctgcaagtgtttagctccccaagggtgtactctccctgcagttctggggaggggtccagctggaagacaagattatgactttgagtctgctccaaactgaacacattttaccaagaaaagtcccctaggcacaggcttttaataacatttaaattattaagctttaccttttattgttactttcatggtattgttgaaagtaatggatttgcccatagcctgggccctctgcccccaaggacccagatgctgaccctggcctagaacctcagttctgagtgtctgctgtgaccgtggtgtggccctgccttggggtcacttcagcttgtctctgggaaggacttgggagactgcctgatgtttctttctctctgtcaaggacacaatggagaagtctgccttctctccagcccctcctcccagctgcccttgcccttgccccgaggccttgctgaggtcatcgtgtggtgcttttggattcattctgtgcacacaagtccccattctccttctggacattgaagtccccagtctccttctggacat

SEQ ID NO: 21445 - DNA, 1228 bp, Mus musculus
gagtgtgtccatgtggttccttcccgaggctcctcagggtgctgcagaatgtgttccaaagccaacctgttgtaagtctcattgatttcaaaaacataataaaacgctgctgcacttgctagcaaatacagtcccactccaatccatcccatccgctgacggaagttcatcattctccatgctctgtgccttcaatgcaaacacagaaaaattattgttaaggtctaataatgttgccatggcaactattccaagtgcacatgatttaaattcaagagttctgaaaagcacgagcattttaagatttaacagctgtaaacagcttacaggtggttttatataacagttgtaagcacataaaaatactggtttcagtgtctactgagtgctgttatttatgtgaaccccagagtgaatgaatcatcacttcttgcttgagtagacccagtacaccttcgtttcagataatgaaacatctagtttccccacaggacgttgctcttgacagttgaaatgctttctggcttaacactatttcagacgtgggcactgggttgagttctactcgttaaaccaacgtcggagtccccaagttaagacggtaactctttcaaacacttacagtggtcccgaaaatcttcctgttccccctgcaagcgagcaagagtcactcagttctgaacagtcaggtgcctttggcatttcagaacaagccaccttaagagaaaccctctgggtcgcgcagctgaagaaggtgagcgcggcggcgggagcacgagctagtagtgattaagctcagcgtgactacggctggtcacgcggcggcggcgggccccgtcgccctccggagccccaggcggggggaaccacctggagatgccgggcccgccccccactgcacccgccgccgagctgagctgggcagtggcgccaggcttggcctgcagaggcccgagctcggctcccggccggacgccgggccagcctgacagccaagccgagcagccccgggtctcaccttcctgtcctgagtggcccgcccgctcgcagtcccggataccgccgcattcagagcttccgtctagggccggaaacgcgcgccggcctctcatgacgtcaggctgtcagcttcgcgccgcctccagaggcggttgtctgttccctgaggcgtttgctgcggtcgttcttctgccctcggccgggaggcgggcgcggggagcccgggtct

SEQ ID NO: 21446 - DNA, 1161 bp, Mus musculus
ccctggcggcggccacttttcccgcctcctcctgggcccacgcagcggagcccggtgacagttgaggatggccggagccgagagccccaccgagtgccaggcggagctggagcccgtggtgtcgctggtggacgtgctcgaggaagacgaggagttggagaatgaggcgtgcgccgtcctgggcggcagcgactcggagaagtgctcctactcgcaggtgcgcgcggcccggctgctcccgccgtcctgtctgtttcccgctggccgcggccgggcccactcacggcggccctttactctgtgcttctacagccccggcccggctgccatttcatcctcagcttgtcgccaccagggctgtccctcggttccgctgatggtacactgcaggctccggtcctccagttgtcgcctcttggtggcctgcttttcacgaggttgttctcgtgatctctcaaacccagatattcttcgctccacttctcccaccgcccaagaatcttaattagggaccagatggggaaaagtaaagggaaagtgggccggctttgaaaatcttccggtgaggttcggcttccggacactcctgtagtctagtttaactgctagctgcccccacctcaccccctttctggttaaatgaagtttcgtgtgtatgtgctatgtgacatcccctctctctggggactggaaagccaagaggagaaaaggatctgtttggcatttgtgggaccttttgaacgagagagtttgaggggctgagatgtagtgtttagtgacgcatactgtacatttaagtactaacgtggaaaagggtgggtaggaaggaaacttaacaacaaggatgagaattggtggaaggaaacaggctaactatgcccatgggtggagtgggagactggggtaggagtgaagggacttggagttatggtgtggcgtggactgaagtcataatactagttgtcttcgttgaccaagttgggtttgcactgtaaaattgttgaataaatcttgtatcccagaagtagtcacagcatggtcgctggtatttaaatttggaggatcattgttaggtttcaaaccctggactctgctgttgtgcctatttaacatatcaaagccgatggtggcctcctggttctccctgcccttctgtccctt

SEQ ID NO: 21447 - DNA, 2487 bp, Mus musculus
tcttggcttttcatcaacaggttgttaagagagaagacattcagcagttctttgaagagtttcaatcaaaaaagagaaggcgagtggacgggttacagtattactgcagctaaagtggaatgccacttcctcggtcaggttcacgaaaatgccactgttccggaataaagagacctgtgtcacacttggtcccctttccatcctcccgtggcctcaggccttctccttaagtagctgcagggtttctactggtctctcagcaagcggcctctgtgacagctcattccacagacgtcagctctcctgcccaggatgcccaagacttctttctgttcatggtttgagaagtttgatttgatcttgtgaaagcaaattagcttcttttctagcagtttgttccatgacttccatatgtacgctcacagagctattgccctctgggtcttctgggtcttgcagggtctcttcctgttagcccgaacctctggggagcagtcccctctgccccatgatcacggtgccttgggtcaaagcttcctcaagcccgctctgccagtctgctcagcgctttctgagattcgatcgtggcttgaagagatgggacttttctctgtaccgaccttcacggtagccgcgactgatgtcgtctgtgggaggttggcttaaggcaggattgaggaagcaagcctttgttctgaatttcgctgattagtttgaagtgaaatttcattactattctaatggccctccaacatcagcgttagtactgtactgctcccagggcttccagggaatctactcatgtgagcccctttgctgctgcctaaaaatgaccagatcctaccccctaacgtgggtgctttacagagtcctctggttccttacattatcagggatatgcagaaacatatattaaaaatggacctattttaatactgttctgtcaggaaaatgttattggaacctgaatatttttccccttgaatctgctgaaggcaaggatactgactgaccatagtggtagtaagtggggcagtgacagccctagaagatggaggattccagccaaagccctcagctatatacatattgagtctttgtaaaagtgcgcacagccactccctcctgacggctcggagggtcttcatggattgttgtataaagtcctgtgtttgagagaagtctttcagatggtgtgaagtctttttaagctccctcagtctatgtggaaaacatcttttgatccacaaagacctaagtggcaccctccagaggaacaaggtcttccctagtacacggtgaggtacattaaagacattttaggccacatgttggtggggatttttgtgtgtgggcagcagttgtatgcatgaatactcgagttccttgtcacgatgaagtagcctacaaataaggcctcaggaaatggcatggcttcggtactgtatacagcttgcagccttctagtgacagatcctgggaagactgctatgtggagctgcaaggttcttcccgctgcaggcgaagcctgtgtgcactgagctggcctggatagggctcaggcagacccccggtgcccacagcctcggggtctcctgagctgaggatttgaatttgagagttgcactttctatgtaccagcacatcctcaaaacttctctcttcccagatgtcagatttaaccaccaagttcctgtctgcccctgataggtcagaaccaaggcttagcagcagtgtcagtgagcagcaaaaatacagccagcctatgttgaagggcttgcataagaaaggttccctacttaaccagaaaacctctttttgtacctattcacaactagttttcttactattctcgtagagatggtttgggccaacatgtggcagttgatattaatgcatgttttatgcagaagaaaatgtgatactagttgcttttaaggaattctggcattgtatgtacatttttgtagaaattattactcaatatacttcaatcaggtttctgtaaaatccaaattaaacctattcaaaatagttgcttttctgattgttcttggtcctgtttgttagccttacctaaatctacaaggctggtggtgtgtctgcccacagctttcctaccccaggttccaggttccggttctgaattggaggcagttcattttgtgtctgctactctataaaatgggccctggctcttggggaaatggctcagcagggttaagagagtttgctgccaagtgtgacctgagttcaaatcccaggacctacccaaaaacgagtactcacatgctggtagcccatcactgttgagtggtggatatgaggttcagggctaccagcctctgtccaatttcagtaacggatgctgtcagagagagatggggagagtgatactgcccacagtcaggtgaatgaagtgttctctcatccttgagctgttcctgtagttaaaaccttgatgaaggcatcctctgagccaggaaa

SEQ ID NO: 21448 - DNA, 2844 bp, Mus musculus
ggagccctcacggccaccggagaagtgaattgcacgcactttgaagtaaataggtttctattgggtatcagcaactctgatttctcctgaaactgtagtttctcttacaatcttttcctactttaccctgtggatatacactcaggaacgatctgacatctaaaccatccgaacagtagatattctcagggatgggaacatgcccatctcggtattccccaatcgctgccacggtcctgctgcctgactagttagctcagagtctggggaatgaggctgaccctgataatgtgcagtctaagcttgcaggcttgaacagggcacatagatagatagatagatatctgctgtaaggtgggctcacataacctttcaggctcttggttttgtttttgttttgttttttcttaagatagaaaaccacagggctctgctcatccttaacggttgtatcttttgaagcacagtctcgggttgcagaagcaaaagcagttccatcctgttcctgcctgtttctgggacctaactgtttgatgtgggttgagattgttccagatccgactgtactgtgctggcgctgcagagaagcaagtacatcaacgctttctcacctttgataggttttggtttttaacattttagaaccattgatcacacactttttatttttttctgaaaattcactaaatgtactctccaatccacatgatgtaattataaaagtaaatggacactgttcgtagtcttatttaatttataaggtttgtctttagtgtcttagtaggttacctggccgaactgtgtgtgtagaaatcgtgctttaatctgtgggattgtggattgctgtgacttgcaggtgtggcctcatgtgtgataggataggtgttcatgggaagctagactacgtgcctctggctgtgaaccatctatgacgtttcttaatgctgtacttacaaatgtgaagtgtgaatagggttggtctcagaaaagaaggtatttatataaaccttaggccacaggaactggcatttttcgtagtatagaaatttaataagaaccaaatcacaaaaatcccagctctccttttgaggccagggacaatcaggccatttggacaatcagcattccagtcccactaagtatcgaggctggagaatcaccacttaggttcttaaggcgctgttgatccttttcttgtatttttgttttagttttgggatttaaaaaaaaaaaaaacttacatttaaagttgcctgtggctcataaggagaaaaacctagaaccattcaaaacatagatccttaaatttccatgcaccgtctcccttttacattcctccattggctttgctctttagtgcagtccctaggcccgagctggcctagcatttcagtaacctgttgggcttttagggcttagagtgttaaatacatgtcttctgtgcccctttttaattcagcctagatcctgattgtgcttcctcattggctattctctttggttgcaggtcttttgttaacacttgtcatcctttattgcatttctttcattgtttgttgaagtcgatagcaatgggtacaactcttgtacatttgaatgaaactgattctacagggtgtaatgagagctaatgaatgccatgcggcgccagctgggctgaagcctggctgggtgcattctctagtgttgaaggatcaacactccctgtatctacaacaaggagatatgtgttcataatactgaacttgacttttaagggaaaaatgcttttcgtgaaatttgcttaagaccattgttttgcagtaataaggcaattgcgtgtttcttagggctgagtttgttgtcaagactattaatgccgcagtgatgggtgctatccccgggttctgcagcggttcacaaagtctaccatgtagctactttcaagcctcattcagataatcttgctaagagctcttctgcacgccctgccggtgttctactatcctctgtcaacactgctttgaacagtgctctgtgaagtgtaagttcttttgtcccaacagttgtactagctgtcatgtggttattgtctgaacaagtcttttgattttgttttccttaaaaagtatatccatgaccgtaccaatcttctgtaatcagaatattataatgctgcggccatttttatagaaggactgcaagtttgtgtcctgggaatatcttgtactcatgtgtttctgtgagctctgagatgaggagtccttgggtatgcctgcacatgtctgtctgggttatgtgggtagacgctaggaattctgctcttaaatgagacagtgggaagccctgaggctcctgagctccctcgccggccaggatttgccacgtctggcctccgccgctgcgtttcttgtggttgtgctgttaatggtaaagtcaagtgccttcaatgctaaaggctcagaaacctttcttaaactgatttcatgtcctatgcaagtgtttttacaacctgcataaccagtactttgtaaaacttgtttacgcttcaattgtacatagtgttttttaaagaaatatatagtatttttatttaggtacctccaaacttgaactcgtctgtgtgaagcattgtaaacgacacgtttctcttttgagtaccatcacagttgtacagaggttttcactggttctatttttctactgttactgataagcatgtaacactgactttatcctacatagagttggcatttcaaataaacagcttgtatagaaccgctgagttggacatagtctgttctagcttacagcatttggtctccatctacaggtgtggttgtaccccttaagaatagggtctgg

SEQ ID NO: 21449 - DNA, 1086 bp, Mus musculus
ctgcatctgtcttttgtgtttaaaagttgtgtggggaacatcttaaagagcaagcaagctggcactttttctcctttacagatgactaactttttgcacttgtacattttatttgtattgattttataacagtgtgttaaactactttattgctacatttaaaggactgtattttcatactttttgcattttacctatcatctaccagtttccatgtgcattgggttgcacactaagatgtattttcttacgaaatagttgtgtttattttttaattatagaaattccaaagaacagcacatcaaacgctcctctcttttttggtgatcgtttcagttcagatctctttgtgctcattctccataaatctgatgtcattctgttttgtaagtcttgaaagccagtcttcattccccacagcagaagtccgggtctcggtgttctttgattcagtgaagaacaggaggaggtgtccagtgtgtgtgtaattagtgtgggttttgttgggaccctgtagattctggagtagagttactcactcagtcacagggcctaaggaacttagactttagtgttagaaacagtagagctgggcttggtgtgaacgcatggcttcaatctcagctgtgggcgttggagacagctgatcagaggttcaaggtcattttagactatgtagtaaattcaagattaggctgggtatgtgagccctgcctcaaaaaaaacaaaatgaaacaaaaaacagtagcagagatggtgatgtcacacacagggcatactgatggggtgcctggctctgcatgtgattcaccatactgggggaaatgactgcctttagttgtcttgcattttgtgggaaaaacaaaaaaacaaaaacaaaagggctccagtcttatgtctgtcatttggtatttgtaatcatatgtttttcttaatattgtctagtatgtctggattttggtgtcttctacaaagttgtataatgcctagtgctttaaccaccaaaaaatgattttgttttcagtaaaacactacatgtcctacttgaactccactggagatgctggtttggtgtgtactgaatca

SEQ ID NO: 21450 - DNA, 1100 bp, Mus musculus
gaaccagaagagggagtcagatctcgtgatcggatggttgtgagccaccatatggttgctgggatttgaactcctgaccttcggaagagcagtcgggtgctcttacccactgagccatctcaccagcccgcttcctcactcttgtttcctttgttgtacagagcttcagtttgatacaattccttttgtctctttttgcttttgttgcttgtgcaaacttgccaaaaagcctttgcctgtgttttattttagaaatttcataactccatatctcttaatccacttggagatacttttttgtaaatagtgagaggtatgaatctattcatatttctacatgtggttatttagttttccaaaaaccattttttgagtagtctactactaaatcagacatattttgcccatcatacagtgtgcatatcatgagtaaagttttgaaaagagagtttattctcaagacttaacacattagcatcaggaaagatacacaagtttcaaatctgttttggggtatttttggaataaagaagttgagtgatttaaggcatgtattaaaatgaaataatcagttgtacgtgcatatgtaatcagatttcttggttcttcctagcatgcatattcagaaaatggaactctagcctgatctgagtatgagtttttcgtcctactgagatgtcacatgttttagacacttgattagactaaaatcatgacttggattcaataaaaatgtttacatatttaaaaaaataaccaagacggccgtttttgtcataattcatcagtgttggactatggtatttttattttgttttacttaaataagtgttttgcctgcatatgtgtctggtagccatggagaccagaagaaggcattggatctccttggactggagttaaagttggttatgagctggaaatcaggtcctctgcaagagtagctagtgctcttaacttctgagccatctctccagtttattaaaagtcaaagcaaataactaaggcaagtgactgtttagttggatttttcctaagtttcaacattatcctttctgtttatgtttttttttttctctctttgttgcagatttgttaac

SEQ ID NO: 21451 - DNA, 1429 bp, Mus musculus
ctaaccagtaccccccggagctcgtgtctctagctgcatatgcaatgggccatcagtggaaagagaggcccattggtcgtgcaaactttatatgccccagtacaggggaacaccagggccaagaagtgggagtgggtgggtgggagagcgtgtgggggacttttgggatagcattggaaatgtaaatgaaataaatacctaataaaaaataaataagcttcttcttcttcttcgggaaaacaccaaatggcggatgacgccggtgcagcgggagggcccggaggacccggggcccaggattaggaggccgcggcggcttccgcggaggattcggcagcggtcttaggggccgtggtcgtggccgaggccgcggggctcttggaggtaaagctgaagacaaggagtggatccctgtcaccaagctgggccgcctggttaaggacgtgaagatcaaatccttggaggagatctacctgttctccctgcccattaaggagtctgagatcattgatttcttcctgggtgcgtccctaaaggatgaggttctgaaaatcatgccagtgcagaagcagactcgggctggccagcggaccaggttcaaggctttcgtcactattggggactacaatggtcacgttggtcttgttgttaagtgctccaaggaggttgccactgccatccgaggggccatcatcttggccaagctttccatcgtccctgtgcggagaggctactgggggaacaagattggcaagccccacactgttccatgcaaggtgacaggccgctgtggctctgtgctggtgcgtctcatccctgcccccagaggcactggcattgtctctgctcctgtgcccaagaagctcctgatgatggccggaatagatgactgctacacttcagccagaggctgcactgccaccctgggcaactttgctaaggccacctttgatgccatctccaagacttacagctacctgacccccgacctctggaaagagactgtcttcaccaagtctccttatcaggaattcacggatcatcttgtgaaaacccacaccagagtctctgttcagaggacccaggctccagctgtggctaccacataagggtttttatacgagaaaaataaaagaattaagtctgctgaaaaaataaataaataaataaataaataaataaataaaaatttttaaaaatgttttttaaaaggccataatatttatatatacttatggggtgcaatgtaatattttaatcttcatatatatattagataatatgtgctttgaaaattgtagttaggtctgttctgatggctaaccaagagtaatgacagtatcctgtattgtttcttaagcccaaagtctagtaaggaggtgtccaatcacctctggtttctgggaagaacattatataccggtggagg

SEQ ID NO: 21452 - DNA, 1196 bp, Mus musculus
aaaggcactgccccaggactgtgtggtactagctatggcctacaacatgtgtttgtgtggctgaggcaagagctttgactgagatagtggcttacaatcagggaatatttctggggttcacaaaatcttctctctggactgtttctcttgccaatggaagatgcagatgctgtggtctctactcatggacagtaaatggagtctgcttctctgactccacagggatgaagttttgagaacttgcatagcatgctgctgtcataggtagggtaagacgagactgttgcacagtcactctggatgaggtgacagctctttcttgctcacatcacaaagaagatgcctggtggagggggttgggaccccacttccttcttatataccagatcctctggccaagcagaggggcttcagccacaactagggaagcaaggaaggcacagttgctgagccacgtctcttgctgtacgaattaagcaacctcttttctctctaaataattttggcacaaaatattgcttagtgctttctccagctccctgtgtactattctagttctttcccagccttcttcacttcccttcctcctactttctctccctctccctcctcctattcccctacccctccctcttcctatttccttacccctctttttcccatttctctctccttcctttctccacacttctactctcccagttctcctctctccccatcctccctcctccttcttccctcccccttctctcctctcttctctcttctccctcctccttcctttctcctctacccgtcctcctctctccttttccctccctcctctctcatctctcctcttccccctctcctctctccactccttcctctgtctcctgttcctttaccattcaccttcaactttacacctgaacaaatgatcagaggctaaaggtagatagccatgattgcaagctttcaactatagtgcattaggatgcctgtgcccccctaactgggtatatatagaggatatggacccctaggcattccagaaaatcatttccaattcccacaacaagctagccacttaccaatactgtaacttggacctctcaccaagctgtacagagaggtccacgcatttgcttgctatcacacagccaacaagaaatctggtccagagatcagagactagtacagctctttcttattca

SEQ ID NO: 21453 - DNA, 1656 bp, Mus musculus
ttttagagaaaaagttgttctgccccctccctcgatgactccatgagcctcctccactggtgtagcaggaggaggaggaggagacagccagcgcccatgaggaggaagcagctgcacagatcctgtggctgcatgcgagctcggcgggcactgcactgttgggccgtcccctgtggcccttttgcaatcccaggcaggcagagtgagtgaggccctgtcctctgttgggttgtgtctgtgtggcacaggctgggcagtgctccggcactcacgcttaacccagaggggaggccatgcttgggcctcaccgcggttccgacttgagaacattctgggatgcctgcagcttgtcacacaattgcacatttgaactgttattatttttgtctgtgacattttcttttatctgtaaagttgaaagcatggcagagatttgttgactgaacacttaattatgctttttaaatgttttggttacgtttcttctttttttcgttcatattatgtgaaatgattaaatttagaataacctctaacactcctataattatcgtttaaaataccgatgtttttattttctcgacagtagtccgtcctcagaaagatgcagacaccctgtgtaattagcagggacttgaggctgcttcggttctgccgctcagttcccgtgtacagtcaccagcagccaccagacagtggctgagagcgtggagggagaccagtcaaaaacccacaaccacccgctttgctcgtggggcctgttgatttaaaactactccttgctcggtgaaggcacctagtcctcctgcacaaacttaactgctggcaatccgaggccttgcacctttatttcacagaccctgagctgagcctacagccgcatccttagccacctcgggctctgtgtgtctcctctgtgcttaacaacgcccaagaacccatagcttcccatctgctgattgcttctctggaatttaattatttctcaataaattctgtattttatattgtacgtgagacattttaaagatatgtttgagaccaaggatagttaaaatgactgtaaaggtagtgtgtctgccatggagacggagtgctgtccactggcagggaaaatgatcacctcaaactaatttgcagttattatttgactcattattttcttgtctgtctttctttgataaacaaccacagacagtttaaatgtcatacatggcctcagaatttgccttggctgctggttccatagcagaagcactgaggtgaagggaagaacatatctgccttttgtgctgtaaataaagggaaatgactaacggagtcaggctgagtgttctgccgacaagaaacggaatcacatcacactctgcagccttctaaagaaacctgtatccatgcacacagctatcactgcagagctgtgccagcacctatggaccacagttacctttagcttttccgttttgttttgtttttctttttctttttaataattgtagtcaataaagttattgtctgttcacactgtgtctttagctttgtttttttgttttaatgtttatacttggtgcaatgtaaccagttcagctgtggtagcagaaagtggtctccaagggttttcattcagtagacaagctcgttcacattctcctgaga

SEQ ID NO: 21454 - DNA, 1107 bp, Mus musculus
taaaaataattttgtctgcttttatattatgttattaattgtaaagatagtgctctttctacatctggaatttcattttgttggttttgaaagtcaagcaaccacattcaaatgctgatagccaatggaagattccgctcggcaccgcagggctcggctatccttgcagtctggccgctcacttgacatctgcatggtggatatcaatttaacttcatccttgttcagaattcttcacttacagatttatactggataaaggtcattttataacttagaaaatgagcattcaaagagcatgtttgactttgtttatatgattaaataacttattttatgttaattgaaaacaaatggccatgatttttaaaagttgcctttcagtatttgtggttgtcatttgaaattatccataacccttgcttttattgagtttcaaacccttttaaaaacagcagctctgtctctcctccttccccgtccccgtttcagacaaaagactgcttgctggctaatggcaaactgggtgaggcctgtgaggaggaggaggacctgacgtggagggcccccaaggaggaggccgaggatgaggacgacttcctggagtatgaccaggagcatatccagtttatagacagcatgctcatgggctcgggcgccttcgtgaggaaaatctctctgtcgcccttctcagcctccgactctgcatacgaatggaagatgcccaagaaggcctccttgggcagtatgccgtttgcctcgggccttgaggattttgattacagctcttgggatgcgatgtgctatctggatcctagcaaagccgttgaagaggatgactttgtggtaggtttctggaatccatcagaagagaactgtggcgtcgacacagggaagcagtccatttcttacgacttgcacacggagcagtgcattgctgacaagagcatagcggactgtgtggaggccctgctgggctgctacttaaccagctgcggcgagagggctgctcagctcttcctctgttcgctggggctgaaggtgctcccagtaatcaaaaggaccagccgggagaaggccttggaccctgctcaggagaacggaagc

SEQ ID NO: 21455 - DNA, 1206 bp, Mus musculus
gacacaacttataaaactcatttaccccttcaagcccgcctcttctgattaattttcttattcaaaacacttttaatcttaattgttcttctctgttctaacatctgctgggtaattgatttgttgtgttggttctgtttcttagctccttatccaccctccttgaaatccacactgtcctttctatccatttgggtaccagtcctagtaagctgggttgggatggaggttgttaggtgttcagtcctgagcgggagaagcatacctcgtgtagggttcagtcattcgtgccattttagggaagtggcctgtgcagaaataattattaaatgacattgctggtgccatttcaatgtttgtttccagcagcacagctgtgtggcagccattttactcccctgttactcttgagtaaatgtgaagatagtggttttctttttgcaaagttgtatgcagaagattttagaaaacggggacatttctctatttaaagcaagccgattcttaagtgtggtgcctggctaagaagtatgtgatcttttcccatgtttcaggttgagctgctggaagcagctctggaccataacacaattgtgtgcttgaacactggctcagggaagacgttcatcgcggtcctgctcaccaaagagctggcccatcagatcaggggcgacctcaacccgcatgcaaaaaggaccgtgttcctcgtcaactctggtaatcaaacatcatttcccacacgtgaggagaaaattggatgagccttcatagttaaaaagattatctctgtgggtattaaattattgatagtaaaacgagtttgacaaatagtgtgcttactgaagtcctgctagccaaaataccattttatttctcagtagaatttctctcaattgttcagactctgtgtttctcttagatgaggacttctggggagatggctaagttgttaaaattccttccattcttgatgttttagcttcataaagcaggctgaaggcttgttgactagaggtgggtgatttttgctgaggctgttttagaacgttccatgcttcttaaaggctgttgggtttatgtttggggactgcagactgacctccgtttctgtctttaaagtcagtctaagccgactgtgatttgaatagtacttgttggtggattgacttgctctccttaaggagagcaggagagcaggtgtagact

SEQ ID NO: 21456 - DNA, 1131 bp, Mus musculus
tcggtagcttcagtcaatactgagtcctgtccccggctgctctccccagtctccacctccaacttatgtttctcagagaaagaattcaggctttctccttcaaacacagacctagagaaagggatgggtttaaaagaacacagtggaaaacgtgttcaacgccagccctggtgatgcacacccataatgctagctctgaggaatctagagcaggaaggttgccagccaggattaagaagtgaaatcctatctcaaaacaaaacaaactgggcggtggtggcggcggcgcacgcctttagtcccagcactcaggaggcagaggcaggcagatttctgagttcgaggccagcctggtctacagagtgagtttcaggacagccaagactacacagagaaaccatgtcttaaaaaacttaacaaaacaaaacaaaaacaaaaaaccaagacccaaaaacaaaggaaaggaaaaacaacccacaaaaataaactgtaaaaaaggactttggttttagtgtgtgcgaatgttttgcctgcgtgcacatatttgtattgtgtgtgcagtgcccttggaatgtagaatagggtgctggaacccccggaactggagttacggatggttttgagccaccctgtgaatgctgagtgccaaacccaggttgtctgtgaaaccttccaaatcattaaaacgggtagaagaccacaactcccttggatgaagttataatcacagggatccatttttttttaagtttaaaagtcatgaattttgcattgttattttttaaaaaggaagggagaaaagataggaaacccttacttgtttcagtgacctcaaaagtcaataggaacagattccaaggctgcgtggaaaggacagccataaaatgcctgtgttcttaaacgccgcatgagggttgaagcgtgttttatttaaaggaaatttggggagttcccaagtttaagacagtctctgacctgagaaccataccatgcatcgctcagcacctcagagaatgcacttagctctctgggtggagggccacacacaaaagccccctgggccttaaagccccaggcttaaggggggagggggtgtctctttgtttttatcacaataagtggcctgtttgc

SEQ ID NO: 21457 - DNA, 1119 bp, Mus musculus
tctgatgtgtgtggctgtgctctgagtcagtcaagggtaccctaagtcaggaggtttgatggcgcgttcatgtggtgtgctgacagtcttcctggggttcatgccctccttttatggaacggaatggtagaaactgcaggcttatggcttggggcacattagagttgtgtacctgtattttttttaatgcaggttttagctatcaagagctttctggatgctctcctaacacgaagtggtaagagcagtgcctacacgatagaactgtggttggggtaaactgagccagtagtcataagtacttggaagactttagggtggtgtccacacatggtaagcactacatatgttttggtcagatacagttttccccattaggtgtccccaagaggtggcctttggcaaggacaaatagcaccaggcagtcagcagcatcaggcttcagagggtgggaaaggtggtaggtcattttgggagctttgcgctcatcaaccgcttctttccaggtcaagctggttagcatcgatgcagcggaaatagcggacggcaacccctcgctggttctcgggctgatatggaacatcattctcttcttccaggtaagcctgccgctctctgtgacacttgaacatcatcgggagcgttctaaccacgggacagcacgcccacatcaagggacaccgcgagacttagtttccgtgattcatattcctctgttttctgatggggaccaggaaatgaagactgaggctcattgtttagttacaaaggtgatccgctaggggaagatttgcaggggctttggcactggtgttggccagaggcacgggcgctgtttggagctatgggtccctttctgcatcagccgagaacttgagcctcagtttccacctctgtaaatgcaggagtggtcacaagatgtgccatgtgtgagggtttcacccactgtgtcaagtttacacaggactcggtcactccgtagcctggcttctcgagggatgctaggaacatcaggaaaggtgttgaatgccttaaatagaccacagagaagccaggcgtggtggcgcacgcctttaatcccagcacttgggaggcagaggcaagcagatttctgagttc

SEQ ID NO: 21458 - DNA, 1176 bp, Mus musculus
ctcagaaatgccatcttccaacaggctaaccagatgctggagtaacagtggcctgaggtccgtaagggagagcaaagccacagaggataaaagcgagttctacacagtggcagaaagccaccagcttgtggccagtcagccctgggttcagcacctaaacctagctcttaactctacagcccagggtctccagagctgggccgtatctcaggcccttccttactggtctcctctgctctcttccctcaaaactagacaagagtctacaggctctgtcccacatccacacactatcaccaggagtccacgtggcacctggctgttgagctagcaatgaccattccacaaaggaagcctgggatctcttgggaagccgactccctctaccatcactgtctcctgtgttcagggatgcctgggtatcatcctgtgagcatctataatattaccatgggaaccaaaaggcaagcaggtgcctggggaacactgagtcttgtgggctgtcctgtaaggcttgtgctaggagactccatgcttgattcttctgctgtttttttgaaaaaaaaaaaaaaaaaaaaaaaaacctcccttgctcttctttgataaacggaaggccttcctctcattctttggggctgaggaagaaatgtcagctgattggaagtcctttggttgcaaccttgtactggagaggctccaagctctgtctattaggtgatggtgggtctcagtgacctgctagaaggtcagaggctggtctgaaaaagctatggctctctttcccttcccaggatttgctcccaggagctccttgtggctaggagtggctggaagttattgtgaacttcccagaagatctgaacacaaaacagggtggtaagctcagcctaggctctgcaggacaggggagcgctgcctctgtactcctaggttgggtgttccacaagcacactgaagggctcgggaactccttcctgtcagctaacaggggctggcaggtagcacaaggacttcaaagggcccctatgttctaaaggagtatgagacccagatgtggggctctgggtgaacctgggattcttgttccaatagtggctgataacctgggtaccagcctaatctcatccacctttgttccttcctaagaaaaactgaattttacctgaatgccctaaa

SEQ ID NO: 21459 - DNA, 1188 bp, Mus musculus
tacatatgtatgtgtgtttgtatgtgcgtgtggatatatgtgtgtgtgagtgcatgtgtgtgtgtgcctctgtgtgcatgtgtgtatgcatatttgtgtatatatgtacatgcgtgcatatgcatgtgtgtgtttgtgcatgtgtgagtgcatgtgtgtatatgtgtgtacatttgagtatgagtgcatgtgtgtatgcatgtgtgtgtatgtgtgtacatttcagtgagtgcatgtgtgtgtgtatgtgtgtatgtgcatgtgtgagtgcatgtgttaatgtgtgtgtgtgcacgtgtttgcatgtatgcatctgtatgtgtgcacattcatgtgtgagtgcatgtgttaatgtatgtgtgtgtgtacatgtgtgtttgcatgtatgcatctgtatgtgtgcacattcatgtgtgagtgcatgtgtgtgtgtgtgttcctgttcctttgtcctgcagacagtgctcacatgtaaccctcacaggttagcctgtgagagtggatgtgtgagaagcccttgacagtatcagtgccattgaccccctggtctgcatgcttcctcctgccctttcctgccccatccttcctctgggatcagaatggtgcttttaggggcagagatgtgtctataacccggacagaatgagtggagttagtggtcctgactgcaggggagccatgaagacctagaggtactggcaaaaagggcagaggggctgcccctagacacaggcgatggtgtcctcggggagctggcactgaaaagctggcatttcattgattcctctttgaggaatcccctcatcagccacatccctgtaggcgatagcccatcatcaccatcctcacactgctccgagaggcgggacttgccgtataccctggagctcagccccactgtggagtcctccgtcattggcctcacttccctgtgggaccagggtcctaagaggctttagaggaaggaaactggggtcgttctgcagcctggacaaagagattgacagggtcttagtgagctactgctgggagaatgggtgccaagggtgtgggccaccttgtgaggatgctcaggctgcctgagagcaagagaggctgagggtacctttgttctttatgcagagtggagccaggtctgagcagatcaacagagagcttgagaatcggtgcttaagctgatcaggctca

SEQ ID NO: 21460 - DNA, 1235 bp, Mus musculus
aatgatgctcttctcgtagaaacgtgtaaagtgctctagccgtgggacggctggctttggggtctcggtgactactggggtcgggaaggattgaaagaacaagggaattggtgggttgccgggccctgtggccattgtctgcaacgttgccttgcctcttaagaggctgaggcaggaggatcagttgaactcaggagttctaaataagcccgagtcagcccgggccgtacagcaggaccctttttaagagggaaaacggagggtgaggatgtagctcagtaggaagtcgttttcctagtgtaagcgacgtccagagttccaccccgtcacatgcacacagacagtaataaaagagagtattctcttagtgaattccggtgtagatgatgatggccccagggtagagtgcttgcttgcacatctgctggggatggtgcagaagagtgggcaggcgcgtcgtttttttacatggacttccccctagaacagagccccgggtgtggtcagttctcccgccggtagtacgcagatccagatcctggccagcaggcctccgcagcccactatctaatctgcagtcttggccctgcgctgggttagcggtaccctagagcacaccagacttgcagagaaagcagacaacagaggaagctgaggcatgcctgctcgagaggcagcaggcccatgtgcaattttcctctgatagggcctgggtactgttgccacggtgataatggctgtgccgtgtcattgtcgatccaccaacagtcagagaagcttggcagtcaagatattgtttagcagacggagcggtttctgttggacactaagtactgccacaaaacctcgagcgactaagcgtgttgccggaggtggtctgtttgcacccggggagtgaatgtaaaaaatcagagttcacacagagtgagccatgggatgtgctaagctgtggctcagagggaaaccggagccactcgctctgaagacagatgggaaccaaccgcctggcgggttccttgtcattgtattgattcctggtttttttatttttttctgatggcaagccccaaactaaaatcttgttattttgcagatcctctgattccaggtaccatacaaagatgtttacaagaaatgcagaggtaaaacagctgctccgaaagccaaccttttgtgtccttaacggcagagtgtcagttaaatcgccccagcgcccggaagcttttattcatgtt

SEQ ID NO: 21461 - DNA, 1235 bp, Mus musculus; identical to SEQ ID NO: 21460

SEQ ID NO: 21462 - DNA, 1235 bp, Mus musculus; identical to SEQ ID NO: 21460

SEQ ID NO: 21463 - DNA, 1317 bp, Mus musculus
tcccccggctgatgtgtctgttttaccaagagccttacctgactctcatgaggccaaaggttgaaagagaagccgaggttcctgctaagtcatcgctgaccaggagcgggggagggggcctggaattctgccaggagtgctggatgcggcgtttgtgttagaaggctcccttgcttctgatcatttcagtgacccatcttccatctctccacaggtattaaagactactccaactggccaaccatcccgcaagtgtacctcaacggcgagtttgtggggggctgtgacatccttctgcagatgcatcagaatggggacctagtggaagaactgaaaaagctgggtatccgctctgccctggtagatgagaaggaccaagactccaagtgagggccccgggccctcgccgagcagagcgccctctccatcctcggggccagaaaagccttactgcgtggtggtgccctgttgctgtgatgcttgcgctgggcctcctggcagcaagcgggcaggtgcttttactttagtctctggctcagaattccctctggtgaacgtacaaccactgcactgtaaatcaatgtcgcgatcctgtattgctataaccgtgatctgttcttacgttgtctttattctctgccggccggctttgggagtcacttctgattcttgtttgggttgtagagatggtaaagccccctgatgtttttgtaacttcctgtaaaagggaaatgatggacagaggagaaaatgtggtggctagagttgttttgtaaaattaaattgccaacacagacgtgtgtgtgagtcattaaatccagcaagaacagctccataggacgtggagaactagctgcttttctttgtgttttcttccatccttcccccagctctctgccaccctctgcttctcacgctgcccctctctcctccctgtccctccctctgtctttcagtgcagcccaggccggcattggctcatcaagtagccaaaggtgagctagatcctcttgcctccctcaaccttgcagtgctgagatgttggctatctgccaccatagctcatctgccaccatagcgctgagatcaggctccagggcattggtcacaccaggcaagcactttatcagctgaggtacagcgccagggcctgcctgtgtcctctgattttgagaaattaacagtactcccattcaccatttggctgctctgaagttcctttcggctactagggagcgcctgtacagtgtgtccttgagccaggtggcgaggctgtgcaggagggatgtcaccttgaaatgggagaagccatgagct

SEQ ID NO: 21464 - DNA, 1119 bp, Mus musculus
tgaggttagcaggataatgcagctggatccagagacgtccatgtcatcgctgtggagttggtgcgcaggttagaacatttggaattgcccttggtggggttaagagggacttccagaagctcaactttgtgcatgttggctctggaatgtttactgaccactcaggcaatggcagtaggcatctgagtctggagatagggggaagttcctgctggggtctggtccagtgatagcattggagcctgcatcctgatgagtttgccactaagccaagcagccaggagaaggctggccagaccctttggcatgctatgtccagcaggaaggaactgggaagaaacttctactctgtagctgggtattgggaagaacccagtgatggagagtggtgaggcagggggacaaccagatggaccctctgtgtgtctctgatcctgagtgtttccaagacaggacgctagtcagcccaatgtcaccaaaggtcaagtagaatgatatctgaatgtgaccagacaaacactgtgctgggcacaggacacagcagaacagtagaggagacccccacagctggcttcaagtgcggagtgctttctgttacccagtacttgtggcacagagcaagacaatccctccggtatctgtttcactttctatgaagtgagggcttgctggattcttctggctgggcattcatgcagacccaggcacacctatcactttcttcatgaagtcctgagtctctgagaggtctctcaaggtgagctactgcctgggacccttgggacaagcaggtgatctgagaaggaacactgctggggttaaggcagaaggtcaagggcctgtcactctactctgtgcgtctgcatcagatttcctacccggctgcccacagcaggaagagcgtttgagtcagcaggccactaaaaactttgcagaaggcgacagactggggacaggtgtggcactgggggagtggaacagacactctgtgtttgtcacaactgtacaaagtacatataatgtaccatagaacacgcaggacataggcactgcatattaaggtgtgcccatgatccctgtgtttatcattggtgggaagagccctgtgctgtggtcagg

SEQ ID NO: 21465 - DNA, 1214 bp, Mus musculus
ctaccctgttaaccccagtttcaggtttgaatggaaactacccactccgccattctctgtgccccacagcgattgtttcagaagtgatgtttaggaatacaaccccaaggctgggtaacaccatcactggggcaggacatgcaggcaggaagaacctgcagcaagagaaagctgttcacttcgtggacgagcaggaagcaaaaatggggaggccggatctcatgtggcattcactttccctgcctttaattccatgtagacctgcagcccatggagagggtgcctcctacagtgtggtctccccctcagctatttctctttggaaacacactcaatacacatgaagagacatgactcaatagccacctaagtgattctgaccctagtcaagttaccacctaggctacccagggaggagaacttcttaggaaccagtgtcccagatcaactcagctgctcacaggaagaggcagtatcaggctgcaaggcttggtcactcctgcagggtaacccttatggctctgagcaccctccgtatactgatctcttgaccacatataccagtacatctcaagggtagtatacttaactggaagcaatctcaactctcaacccccagacctgtggcagtgtctggagacacctttagttcagtgggcagatggcagggatgttgctgttcaccctgtgtgcttgctcagaacagcccgagacaaagcaggatctagcccaaatgtcctcggtgcccacttcagaaatcctgctccaggaagaggtccagagatggttcaagcttgccctaggagccaccaaacatccccctaggtccaggattatctccaaggcccagaataaaggtaagcatctctgggtttcaaaacctgccttcctccggtgttcctgtctcctcttgttggctgctctgctcattttcctgtccttgggtttttgtacccagtgctggtctaacagtgtgctgctgttgctatcttgtttggggcttttacttctcacagaccatgaacataactccctacattttctacaaaaatttatctttaaatacaatgtctcagccaggtggtaatgatgcatgcctttaatctcagtacttgggagtcagaggtagttggatctctgtgagttcaaggccagctggggcttcagagatggtttcaggatagttggagctacacacacacagagaagagaca

SEQ ID NO: 21466 - DNA, 1942 bp, Mus musculus
tatcttcagaggcagcctagagtaggagaagcttcttggacatgtccatgtctctcctttaccaccttaggagccccggctacatccatgtctgcagggcccctgaggtgactcgttgttcaccatcggttgtctaagagatgactgctgggccatctcacgaactcagccggggatccacagataatactgaagcaggtttctccatttcttcttcttttttttttttcctcagagatttttttaaattggatattttctttatttctctctctttttttttttttcaccccactctcttcacggtgtttgtgtttggccctgacctaggcatgagatacgaggttcagcatcagggactgagtagccacacccacccagcaactccactgcctgctccttgactgtccctctaaccctgccttctcttctcttctctccccaggtcctgcagctcctgtctgccttgcccaggcctggccccacaggggagatgttggtacttatgttctgtctgttcgctagtcatgtcctttttcctctacactgggctccaagaagaaaactctggccagacgctgccccttcccatgctgctgttgcctgctcggctgccttggttggtccctcagctctgctgactccctggcaaggggctccagagaagatcccagttctcctcacctcctctaggtgctcagtggtgtctgtgcctctgatgatcttagctgattgactcttccgtctttccctttggcctcacaagacaactagtgtctctgacttatgaacttgccttcttcctcacgggtccctcagcagtacatacaccatgagggacaagacctcgtcattggaatctggccaggccccagatcagccatcactcaaggtgttgtgcctgtacccacctgacctgtgaagccccacctacccagcaaacataggctttgattgcagagcggtgtaagacctgagagctctcttgcccttccttagaacctaggtgcttgcagccagggatatgcaaacctggggcctatggcctcactagaacaagaggccaggcagtgggcctggttcagatgggccctctgattgcctgtgtgcaggcttcctctctgggtgttcaggttctgtatttagtgtaaacacgtcctgtcgctgattaaatatttcactcacctaagttgggccaaatcggcttccatccttgaccgagatgccaataaatgagggagagaagactgctccggggtctcccagagaagccagggtcacccagggaagccttggtctcctagtaagaatgttgaaagggaatgtgtgggattttatgtggttctattttagagatacggctggatttaataaagctttgtagaactttaaaatttctcgtgctcttggaattatgatttgagaaccattagaaacagcagcaacctcaaaacaattactggccagttctggtacgcagcccctttggtatggtcctaccttctcctcaaaccctgaacgccctcaggtctggatgctgaccaggtgtgtcattccaagtgtctgtcctctttctcaatctcagcggttcctcacatgaaactccccttgacactttcatcccagccctccccatacccgtgcccttcagacacaggctagcccagtcacaggttagaccacccatgccctgttctcagctggttttcatggcctgctggccctcctgctccccttataagtagggcctcagaatacaagggacatcttcgaaaaggagccagaaagggccacggggcaccttgcttccttcccatctctgtatgaagctagtcctcagagctgccccaaagatgcagccggataaggaaggagaagtactcttgagtgtacagcaagaaaactataagaaatccaccacctctcatttcctatctctcct

SEQ ID NO: 21467 - DNA, 1162 bp, Mus musculus
tgacttctcccagacatgtgtgcagaagacagagttttagatggccccaagttccccaacctttacttacccttactcttgaacaatatcatcgatttaacgagggagagggtcattccatgacttgcctcggatgggcacagtgaggcaaaagtgagggaacagcattccgcaagcatgttacatagactgtgatatgttttatatatcacagagctgtttgcacatcgatactcatggtagcattgatcacaatagttaggttgtagaaccagcttaggtatctgacagtagagtagtgagtaaacaaagcatggcatgtatacacagtagacactttgggaatccacgaagattgatgaaggtttgccacttacaactgtgtatgatcaagagtaagtgattaagacatctcagaaagacaaatagcagttgctttctcatatttgtggtctctctctctctctctccaattctttttaaaaagattatgactttttttttctttgttggctttactgaaactagtggacacattacaggtgtccatgtggtggggaactgagggcagcctctggccaaccaccagctaaagaactggaggaatcttattgccaacagcagcaaacaacacacaaagattatagagtgtgttcatgtggccttggcaggatgtctgtccccatttgaactttgagatgaggtggggactacagctgacttctcaattacaactttctcaagacattgggggcacaaaaggtgcaccagattcctgactcaaggaagcaatgggggccacgtgactcaaataatttgttttgtgctacattgtcaatggcaagtgagtaacatcacaggcatgactcccaaagttcttgggcccacatattagacttatggatctaatgagaggctctgactggctcagcttgtgtcaggcactcttgttcaccaaccaatggggatgttaggtgagtagagtcggcagtatagccactctcacggtagtagttaacggaatcagataggatatttcctagcaagcttatacacaggcaaaacatgagctttccacagtaaatggtcaacagggccaacacatttcttgcctacaaaggcagataagttaattgccaattaaaatgcagtcatgtttgct

SEQ ID NO: 21468 - DNA, 1400 bp, Mus musculus
ggggcctagtggcagcttcctaggaaactagttcaattcatgtgcccatctcaggaacaaaagcagttcttagtaaaataatttaatatcaaaacaacacacagccaaaaacttgtgacattttagggcctggcacttgcctttcagagtggctggtgtcagtcactagagatttgctgccctgtggaatgcttgctttcattaaagtgactctaactgtacttgttactgacaagagctcattgggaatgagtttgtaaacagtgttgagtgcttaaagaaaggggagcactcctgaggcactggggagcactcttcatagttctgaggagttgatttttcagctcacagtgacagaagccacagggaaagtgaagcagctggggctccagtgtctgtcaggtagcgaaggcctcgcctccctcaggcaacatgtgctgttctgcactttatcttctgtgagcgtgcgtttgtgtctgtgtgtctgtgtctgtgtgtgtgtgtgtgcatctgtaatatgatgcaaggtatgctgtgttctctgtgttatttacaaggttatataaatacgatgtgaagtgaagatgtctcagagtttttggtaaaggaaggtaacctagtgtaagtttctgtatcctaaatgcaagtgagaatgtgagctctgtggtgggctggggcccgcgcattgcttatgtggccactgttaaggacttagtgcagcccgttagtgtcaagggcattggaagtgggctttattcttagaaagatacataaaaatactcccaagtatgttctagacaactaattcaaagtaccatttttacttggttaataatgtacattttgataacttgttgggaatgaataaagtatttttatttaaaggtaagattgttgtatacgtccatgaacatttgtttctctgaaaagcatatttgttgatgcagtgctctgattgaccaaaggacatgtggagatacctcggagctgattgtcactgtcactcattaggaggaggagtgtgtgatttgtgcctagagagtagcccagcagaatggacctggggctttgcagcgctgcatgttcttactcttggtttgtagacgttggtggctcttggggatgctggacaccgcagcagcatttggtttgtgcgtgagaaaggaagtcagtttcaccctctaagaactctgaacaaggaaccaggtcaaccttgactcacagccacagccacagccccagccccaacctctagagctggttcaaaaaacaaaaacaaaacaaaattaaaaaaaaaaaaaacaaaacaaaacccagtcttgtagacatttgcattcgctcgatttccttttgttgccaggaaacgtcaaaagctaccttggagtggccactggtggacc

SEQ ID NO: 21469 - DNA, 1198 bp, Mus musculus
ttgctcgagtacgtgccgggagtctgggtctcgcgaacgcgccaggagcgtgtctcaggcgggagcgcgcccagtagatgacaacaaattagtcgcgccgcgtcggagtcttgtctcgcctcagccgccagccctctctgtctgtccctctgtctccctaccgacggagcgcttcggaagctcccggcttggggcgcccggttctgctcagcgcccagtccccgccgggcctagtgcgagcgtcgcgacgcgggccatggggttgccctgagggacggcggcgccgaaccgacatgcagcggccaccgcgaacctagatccccaccgcggcttggggacgccgccgggccgaccctgaggcgctgccgctgcctggagcccaggtcggatcccccgagtcgccgccgcgtgcagccccggctccctcgagccgccagccctcaccatgccttggccattttcagaatccatcaagaagagggcctgtcgctacctcctacagaggtacctgggccacttcctgcaggagaagctgagcctggagcagctgagcctggatctgtaccagggcaccgggtcccttgcccaggtccccttggacaaatgggtaagctgctgtcagccagcaggggtaggaactggctctccccagggcgagacctgagcgactgtcatccagcatcgggcacgttcggttctcctttgggaattgtttagattcaagtgtggcccggctcagggaagtgtgtaaagtgtagcaagtttgcgctcctagatcacgtgctccggcttaaacggtgtaatggaggcacacacggggcgaaacaatcgagtcattggttgggggggggggggggcgcttgtgaggcaggcccaggaaagtacgtggccacccttgcctcttgggctgcgagtgtctgcggtgttcctaggcaaacaaaccctatttctgtggatgacgttaagaaaaattaaagatgaagaggaggtgacagaaatccccagttatttattttggtctggatgctggtatatttgcgtttgctgggttggttgtcttcattcactgaaagaaagttaggcgaaggcccctcttgccagtttgcctgctctgcttgcgtgaggttgtgaatggccccagtagtgctgtttagatttgcccttttgcttcacgtgatagatcgacaggtcgtaaacg

SEQ ID NO: 21470 - DNA, 1159 bp, Mus musculus
aaaggacttattattattacatttgtaaaaataggtttattttctctactgcacgctttctggtagtgtgttgatctgagtttttgcatttattctggtgtttaagtgatgttaaagtttctggaggaggagaaatgtattgatatattttatttcaaagtatctagggatacattttgtcgggaatgtattttcaaagtagaaatgtggaggcatggtgacacatacctatagttctagcattgtgggactgagagagagggcagcattggccagcctgggttgcactgcagctcctgtctaaaaagaaatcccagtgtgggcagtatggcaaggagcagctgtgtgacgagagctgtccctgctctcgtcctgttgattagtttcaaattgtagacttttttggaagtaaagaaaatttatccaattccatttttagtccagttacaacgcagggatcacaacaaacgcagccaccacagaggcactatggcattacctctcctatcagcttagcggcccccaaggagactgactgcctactcacacagaagctcatcgagacgctgaagccctttggggtttttgaagaagaagaggaactgcagcgcaggtaaggagatagcagtgagtggagtgctttgggatgcttaccgtccgaattttgaggcatttcccactcactcagtagttcagcttactctaaatctttatacttgtttcacacaagaatgatactctgtgaagaacttgttttctatagagtcctgttgctataagtgtgattccttggcaggtaagggggagtaaaacagttgtggttagggcttgaacattgtacattgtaggcaagtgctcttaccacagagctacccttagctcaatgaaaattttcttttgatgggggctggagatggctcggagatggcgagcactggctgctcttactgaggaccttgattcaatttccagtgtcctcttctggcctctgcatgcagagtgcacatgctgacatacatgcaggaaaacatacataaataagacatacaattaaaaaaaaatttctggtggttcttggttacagtgtaggagaaaaggaaatgctttaaccagtttacaagtgccagtgtaaaaccacgagtttctgatctcttataaa

SEQ ID NO: 21471 - DNA, 1101 bp, Mus musculus
atagggctgtgtactgtgccttggcccactgctgtctctgtctcattgtttatatagtatgcttactcgtgatatgtgctgtgtgcctcgtgcccagtcttgtacattgacctgattccattgacatctctagtgaagtttttagttttaatactttgagcagagaagcaccgaacaccattgaaaaagacataaaggaaaactgtgtgtgtatagtgatgaaacaggacgatggaaagtcctggctcacccctgttttgacttgtcatagagtccattttaaatacagtatgtctgaagaaaatcatgcccattagttagcagtatctttccctactggttggtttttttttttttttttttttcagggggacaaagttctagaaagcatgccaatattctgtcaaaacaaatcttatactgttactgataagacaggagacagtttccttgtactgctgtgttgtgatgattggtttcctttttttaaggtgctgatattgatgcgttgtgtgttgcaccaagacatgttgatcgaagtgactttttcacctcattctatgataaattgaaattacaagaagaagtgaaagatttaagagtatgtacatattggggcaagagaggaagagttaaatgccatttagtcttttgagaaatgtatttactggtggaggaatcatttaattgagccggcaatttttgccaggcaattttaaacactcagcatgcatttgtctttgtattttacataaaactagaatgataaacctgtaaactccttacagattgggaacagaagcaaacacagtgtgaacagccacatttcctttggtagaaatggaggattttgaacctccaggcttggggtgttaaagctcacagctaagaacttgtttttgttgggaattatgctaaattatggtgaaagaatttcagtgccgtttttaaaagtagcaatagtagccacatagcttacctgtaattctggtacttggaaagtagaggcaggaggagcgcaggttcagggtattttcagctgtgtggttggtttgaggccaacctggtctaattgagaccctggctcaaactaagtagaag

SEQ ID NO: 21472 - DNA, 1329 bp, Mus musculus
caaagggaatggaggcagctgtaggtcttcccttacaccgcagatcgttcagatcctcactgttgtgtgtgatgacataaatgtttatttataggtcaaaggctgagagtgaaacaaagaacaaacagtgttccggacctgtgtgcaaggctcagagagattttcattgtatttattcattcactatggtgcttagcttaagtgctcctgaactgcctttggctccctgatatttttaatttttaagatgtgtttctttttcagtttagtttttagtattgattttatttagttattctgtagacagtcaataactccttagagtaattgactagcgttagtgttggctgggacagttccatatgcacacaagcagtcttgtcttgctaattcacaaaccttcaccttctttatttttcttcttgaatccttttaaacttaaaccaaagtgtaggtcaaacgttgacccaaaaatcagtgtctcctcatagcatgtactaactagattacctgaggcgctgagctagctgccagccgtgtactcacctgtggcttagagtctcagtgcttgtgggaaacacactctgccatactctgccaacaccagtgttctactcagtttctcaaagttgtttgtctgtatgctttccctcagcctcagtagccaagaggtcatcgaatgaggagtgtgcttgtgttcctccaccacatgtttcccactctgctgcactgattgattacgtgcctgcagccatggcgccccagtggggttggctttgaaagtgtttttttgagtagagtttttttattcagttgtgaaaggatttataaaccagtcagaccaccccagttacgctgtttttagagaatgtatcttgtgtcctgtgattgagggagggcctttattgcggagggtagtgtctaaatacagcagggccacgtatttgaggtaatcacagataattgggagcagcttcagtttcgcttcagaataatccttggttgaaggccacaggaaggagtagattggctttgacttaactgttgctgaagctggctgagactaatgtgagactaataaatgctctcaacttctatgcctgtgtggaaacgtctcatgaaacattttatgattcatctctgtattttggaatattaaagatgccttgtaataaaatttgtgatacaattttttttaattccctaaaagttgagttaaattattgttcagttatatagttaattttataatttagagtgtcagaaaataactgctaaatgctagctgtgtgtctcaggtgaatgtaagtgcttcctccacacgagggc

SEQ ID NO: 21473 - DNA, 2726 bp, Mus musculus
aggcggtgggacacgcatcccattttaagtcacagtgctttaaactgtggtgtgttgtttgctttcattctcagaaaacatccagtacagacctttctgatatccctgctctccctgcaaatcctattcctgttatcaagaattcaataaaactgagactgaatcggtaaaaccacctcagggtccataaacagtatctgccaactcaacccgttgtctccagatgcttaaacaaaggaaagaaagaaagaaaggaaaagaggagattggagggacaagactagacctgactgacagtgggtttagctgtttggtggcctccctgccttgggctcatgagcacttgatcagaagtccaggttagtatgcgaagccaggagtgctattattactgtgttagcgacagctgcattaactactcagaaaaattactgcctttaagaaggaaacaaaacaaaaccctcgagctatgtttgtatccataactgacatccggatcgcgcctctgtgtgctgcattgtttggaaaactgcaatacaagctggcagaagaactcctcattctgatgatgcacttttatgtatttttttttaattagaaagtagaactaattttagattttcagcttaatggattttcaattttttttccccaaagaattttctttacaattagtctttaaattggatacgttgtgcattggtgtaccattctgtcccagaaagggcaggaggacaccgagctcagcccagtccttacgggcagctgtagcccttagggtgaattgtcaatgctaaggtatactttggacactgaaagaagaattaggcgatacttggttttgatgaggttatgattaagcagtatatattccttttatttatagagttgttttatagtgcatacaaatcagcattcggccaacaagtgtggtctttgagctttcgcaagctctgttcttttgccttcagtctgttagtcttcagaaagacagtgctcccccacccccttttattttattttttgcctttcttttttcccctttgcttgtatgcacaaggtaaggcttatttcacagaaaccagaatgccagtattttcctaagccatgacatgtaaccttgaccctgtggctgcgtgacacagacactaactttggtcccatggctagaacttgagagtgactgaagccatacctgtgaagcatccccggaggcggccctttgatctctgcgaggacttttgtacactccacacaactcctgttcctgtcttagacaaattgattttcatttttaaaagtgggcaaaaggcattttcttccagatttttaaactaatttttatttttaaccagtttatcaaaatttgtcagtgaattttacatacaaaaacattttaaaaatcatttctagtaagcacttgacatttagtcagctttccacttttgaatttttttttttgttctatcaaaaattagaaatcttctttaaagacaatgatttctcataattaagtagcagaattctcgtccatcttgtgacatctgacgggtgccagatgttgataaagttactctttgttaatctgggtaaaacagacctgtagcagcagatctttgtatgagcatggtttttgaatccttcatttcgctgcattctatcacacgtttgtgcattttcatgttacactgcaattacttaaactctcccctgtccttccaaattaatttccaaagttggagtatagtctttcccctgaagctatgcattaattaaggctttctttaccacttacattgtttatatacagtgttctactctccacctcttgctctgcagtcaccttgcccttcctcccaccatttgagtaaagaagacggtccgctaacaggtgacatgtactggtgtctgtgtgtgtagcttcagagttagattgacatcaccaggcacagatttagtcttgtcgttttgtttacacattggggaaaaattcagtttaataaacgttccatgtaactgcatccaagtttcaccaggctggagacgtggatcttttctgtgtagtgactttttacttctagtttccataacctggagatcagactgttgctttcgcatgatgtaagtagtgtctcatgactggagtttgctttgttttatagtatctgtactccttgtatttttcaagagctattttgtaaacagatgatgtatttctccattgaaaacacaataaaaaaaaaaacagcacaaatcccatagttggctggtttcttttgactctctctctccctctccccctttcagcaatctaattaattagttctacatacaaatatatggtgtggccccaaatgaagattggaatttaatgtgcttatatttggcaggtttgttttaggttagcctatttgtaacccagtactaatgtgtcacacgatagcaggcaatgttgttaacctagatgatcgttagggagaaaagggtggttatagctaccactaactcactctgaacaattccattttctacagtagtgttctgtctagtctgagcactgtacatttcccggtactgatgcatatggctctttcatgcctctactttcatttctctgtcagcaggtggcactgttgtttttcagtaggtttataattgtgtcttacagcttgaatcttgtttattttactggatcaaattctgacatttttcttaaatcctcacac

SEQ ID NO: 21474 - DNA, 1150 bp, Mus musculus
tttggtaagaaggagaaactttgtacagcttcgtttttaaatggcagccagttgcttttggatggtgccattgaaatatatcacattttaatttttttcctgttgtcatcgtcattttgacacttagaagtcttaaggaaacgtttagtgatattctagttaaaatgtcagtcccaatttcttttctaaatcttggctattatagagttggcaaagtatttcaaatttgaaatatgttaatacaattttagttctgagttaaggtattttctccatagatggctcgcttcagctggagcgcagcgccaagaagtaactccgtcaccttgtcataatggacgcctactggacaggaaaatgtctgaaggtgctcaggagccttcattagagtgtcctgatttatatggttgattcgcattataagtttaataaattattccttgaagggaacttgaaaattaaagttgatatgatgtaggctgaaactgaataaatcaaaaatcttatactgttggtaataagccaggagtggtcttgggagagcgtcttttaagttagagttttattaatgagtcattctgaaagctaaccaagattccttttctttaatttcactttcttcatttttcacactgattctgtgacttacttggtcatagactggaaacatttgcttccatgtctggcttctgttgctgctaggaagggagccacaggtgtgggagagtttcctgcatagcacatagctcggcattcacatctgtgtacagatatgatcctgtggggcttggtgacatgctgagcccttgaacaccactctctgaggctgagctgtacacatatggcgaactgcccacgttctttctgatccgagtgttggccatttttggcttaagtgttccctgtggctaagtactgtgtgattgcagatgagcagagtcctgtaaaagcatgttacctggagatacccgtcatttgaattcctgtacatctgagctgatagaattatgtgtgacaaagggtttaattgacacttcaaggaccaaaattaacttctgtagttgttgaggtttcctcaatgaagaagaagtgggtggatgttattttcatcatttggagcagatacctctgaagtggagaacacacactg

SEQ ID NO: 21475 - DNA, 2069 bp, Mus musculus
atggagaggtttgcatttctgatcctgtgcttttgtaagttaatgatcacttatgtgactttctctgattccttttcaaggttcacgaaccagaaagaaagcccagaagtaaacgagattccaggaaccatcttctctgcctattcatttgattttttttctccttttctgatttctgttttattttcatgtgagtcttctggggtgttagtaataattgagtggctattttttaaaaaaacactttattaaaatgaattttttgtgtactttactgaagggtaatttataaaattctgaatctttagtcgtcataacccatgtggtctggggctcaggctgctgtgcgattcccagactggacagagtgctcagcaggctccttgcttttaaggaatgaagaacctttaggtctcttttgctcgatgtagtatacaagtcgttgtgacaataaagtctggtctacatggattccggtcttttacacaagcgtttattgaatgcgtgctgtgtgcactaaggaagaaagagcacagtaaggtatggcctgtctgagagcagccccacagtctaaagtcagaagcaaggatgagaagcggcagggtgcccttcaggggagtcctgtcagtagggggcagagcctcccccacttagattttttgtttttataagtttatttaagagaaatgataatttgtaaaactcaagttctctagagatgtttgtttttgttttttgttttgttttggcttttggggatttgtttttttggttttctcagtctgacttgtatagaccaagtgttctcaaactcctggcctgcctgtgtctgcctcccaaaggcagtagctgagggattgcggctatgctctgcacgagagcagaagtgattacagtctgtatgacatcctagctgcagaggttacatgcaccccacactagctgcagatatgatagctgtgcaccccatattagctacaggggttacagctgtgcaccttgcactacctggagatattgcaggctcacacctcacactagaagcagggattatcatgtgtaccccttacacatggttggaaaacaagatacacagagtattttccaactcttttggaaataaagctcagaaaatttagcatgtttatgaacaatttcaagagaccttcctcaaaaattactcttagagcaatcagggttgggcaaatgggtaagcaagttggctgctggcaccgtgtgtattgtgtttttgggcagccgtggtgtgttcagaatatacctcacacggcctaggacaggcctgaagtcgtcacctcagtacttaagagactggttgctttgaagacagttctgtgtaaaccattgtgtgatggacaggagcagcaactgtgactggctccgcccgtggactgttgagtcatcacgtgacgtggaataaggcgcagtcagaagcggatcgagctgcgctgtggccccagaggctacttttctcagcgtcccagacttcccgtgggccctaggagaaggggcctagagacttctgtttcctttagaatataggggggttgtagtacagagtagtgtgtcggttggtcccaagtgtatttgtgacacctaaaatcaactcccaagttctgttttaaacatattcctgcttaaaataggataaaatgtgtgtgatacggttttgtctgtatactgtagcctttttttaaaatttttttaaaacacaaaacagcacaacctgttggttaaatattaagaaaacaaatatttcctcacatattgttttaaacaagtgctgacattttctcaaatgttactatattggcagggctacataaattagttaaaagctactagccagcagtagcctggttggtcgtcagctgggctccttgttctgctgcgttttcagtccctacggagggagcgtggttcttcctgggccagccgcggcagcgcccacagttgttgctgatttctgccctttgcagttccatgagtttatcttcttgccagttcctgagcgagtgtgcttgcatccgctcttctccctcgtcatggtg

SEQ ID NO: 21476 - DNA, 1235 bp, Mus musculus
acagtttgcgtcacacctgccttttccctgagccaccttgtcccccactagtgaagtcgaatcccagataagattattggaagaagggttttggaaaataatggggtcaccaggccgggtcctgctgtgtgagatcagtgcctttgtacgaggaagcagaagacgtgaccctccccgtgtgtcactccagtgggaatagcatcttgtgcacgtggcctgggaccggatccctgttgtttaagcctctgggtttgttctagcctcagtcaggacaagattgtttttctggtcaggtgagtttgttgttactgctagctaaacaattctgtatttgtaaattagctgtcctgtcttctatcctgtgtgcttgtatatgttgcttgtagattaaagaccagagacatttgtcatgttttttttttttgtctctaatttttaaaaatttttaaaggatttatttttatggctttagtctattgctttctattataatttctgccagtgttttaaattattttctaactagaaatcagaaatatttaatgtgactttttgttgtaaagtttttggatttacaattgaagtgaaatttgctgtggtgtttgtgtgtgtgtgtgtgtatgtgtgtgtgtgtgtctgtctgtctgtcattaggtaaggctgactggtactccaggacacccaatcagtagcttctccctctgctttgtttatgtcgcattctcatgccaggtctattactggacagtgcttgctttcgctgatagatcctcatgtcagcgtcccagcctcgtaagtgccaccacgtgctggttcttactcatggtccaccttatattaacaggaataaaagtgggagaaaataacttactctgtcaccacaacagaagtcaagctcttggccagtgagatggctcagtggggaagcccagtgacctgactctgatccccagaacccgtggagagaactttctgcacaaagttgtcttctgacctctacacacacttacctggcacacccctcccccagataatagagttttacacagccagctcttacctcagagtatgctgttcctagtctactccctgtgtgtgtgctacttaattgcagtggttgtgtggataaatggttttgaaaggttgacaggccattctataacactatgaacacacacatcgcacacacaaacataccacgccgtacacacagcgtgtgtgagggaagaattttt

SEQ ID NO: 21477 - DNA, 1147 bp, Mus musculus
agtggccaggtcttcatgggagctggggacagccacaggtctgccactgaggagggagataaattgtaagctgttcagcaattaggaatggatagtgattggcacagaggaactgaagagggtgggaaagaggaagagacattccgtggcagtggggttgttaaggagccagagccaacgtggaaaactgaagcaaatttgcctgtggcatctccaatgctacatgtgagtcactgttctatgttttctgaatataagcttgctggggaggggggggtctagtgtgtgtgcaacaccgggtgtagaacctgaggcaggtgatgtagaaagaaagggcagctggagccgtgcagggagaagggcaggtaccaccaatgggattcacagcctgagtctctctctgcccgtggttaccggggaggcaggcagggccctctgtgaattaaacgtagaagacacgcaccggaaaacatggcagttcagaaacacccggcgtgtgtgtaaatcctaagtctgttgtctgtagatcattaataacaacaaccgaggggaaagagaaaaaaggaaaaaaaaaaaaaaaaagacaggtaacggtgccatcctcgccacgccgcccagaaaccattaattacacttgaaaaaagaaatcggagtttactttaaaaggagctcgaagacaatgctacgtaattaatttaccgatttatcttatgaaaagccaccctgccatggttaaaatgtaatcacaaccttcaagctgaaggttcgagggagagactggatttcccgtaaaccgcttgtcaggacggaaaaggtaattattcggtgcctcctctccctttaataatctaacattgagcaatactgtttatattgaaaagcttgcacctttaattaccaattacatatacataatttcagagccaaaggagaggactgcgcaaagagtcctccagaaatatacagatgcattgtgcccgcccggcacacaggaaaggaagaacaccgactgagacataggagaagggtgtcaaaatattgtttggtcagaaaagaaacaaaaagggacaaaggaaataaactgagaagcaaaacaaaatggggatgggcggggggcaaactgaaattgaaattgagaattcaaact

SEQ ID NO: 21478 - DNA, 1194 bp, Mus musculus
ccttacctttgttttgagagtcccaacttcctataacaagagccctaggtcagactgtagttttgatgggtgtgttgagtcatgggtactgtgagtcctcagtttaaaaactgttagcacccttaccctttctctgtgcagctttgctaatttaagtcattaattggtgtctcatcacatccccccccccccccccaggaagataagatcgtcttgaaaaatcctgacctctctgtccgggccacaatggccatcaaattgcgcttgggtgaaaaggagattttggaaaaagcagtgaagagtgcggccgtgaaccgggagtactaccgtaaacacatggaggagagggcaccactgcccagatacgaggagagtgacctggggctcttggagggtggtgtgggggactcaaggctccctctggtcctgagaaagttggaggaggaagcaggtgtgcaggagtctctgagcctcacagagactgtcagcaaagtcaaggctgctgaaaatgggcttgtcaatggggaaaacttgatccctaatgggaccaggtctgaaaatgaaagcttaagcccagaagaaagtgaaaacgtgactggagaagagtcttcaggcagcatggccaaggtgaaggagcgactttgagatgctcatggaatccagtcgagcagaagtttcggacagcccaccacatcaccatgttccttgttaacatttttcttttcgcagagaggaaaatatgtttttgctgctttatataaaagtgatttttaagttattttaaagatctagcttccctatttgattaagattgccatcttgcttttgggcagaaaaaagtagtgaatagcagcggagaaaagaggaggcacccttgaatgactgcagaccagctgtgggcactcgctgctcctccaggaaagggtgaggtccgtgctcagctatgcttgcaggcctgctgtcctcactccagaatgagtgctggctctgcctctggctgcagagttgaggttggactctggagtggatggtggagatgaggcacagtggagagaaagctgggctaggccattgaaatagaggctgggttttttaataagaatatccccagtaccaaaagaaaaggtgaggtggcaacctgatttctaatggcttaaaatgttgatgatgatcctaattacataaacacacaca

SEQ ID NO: 21479 - DNA, 1195 bp, Mus musculus
acaaacaaaacatttataaagaggtagtatttatttacctctttctttataaagaggtagtatttaaaagaggtggggcttaggtagctaaatcctaagggagttagaacaatcattcctgtcctcttagactttcactgtgatatgtatatttttatatctaataatttgagtagaggcacagttaagtttcccagtcaatttgaaatacacatctataaatctctgtatttatcagttttataacccagcacatagtaaaaaactaatagagacagacactgccttccacttggtcttctcttgagaaacgttcatagcctgttagtgtgaaagtgcacaagctgtggaagtgggtttctgacaggagttaagttaaaggcctattctagagtattcccctgttttagaaggaaaggaagacatggtacattctaaagtacagttttagaggaggctgtgtctggagaggcttagcgtcctgggtcagtatctccctaagcctagcccatcttccctgcctcgtcgtggtagacatgtgcgttgggcttactctccttaggtatgcatttggcatttgggagcgtaggaggattgcacacgttcaccttccatgcagcaggctttaaccaagtggatgtgtggttactttagaagtctgtctactgctttaaagtagtgctaatatatgagaactaagcttttgcttgctctgctctgttttaagaatgcatactaagtttgttttatgtcctattttcttctttactgcatcttagatttacattttttatggcactcggtcaaatgcagagtttgtgatccacagtggttttttctttgacaataattcccacgacagagtgaaaattaagctgggcgtgagtaaaagtgacaggctctacgccatgaaggctgaggtcctggctcgggctggcatcccaacgtacgtacacagtaatgtggcttggcacttccctttggtgcatgtagtattcccattacgtagtgtttaattggtgtgttaataaaactcctccacagtagtaagtaagtagccttaatccccttatccctgttacacaagattcagaccagtgcttccagatagatataagtgtgttgctagcagcgtccacagctagttccaggggatctggcctgcagtccttgttaagttaaataagtgctctgg

SEQ ID NO: 21480 - DNA, 1294 bp, Mus musculus
attcctccccctaccccaggctaccctccccctccccctacctacaaccccaatttcccacccccacccccacgcctgcccccaactcatgcagtccctcctcaccctcctccaggcttgggtttgccaccagccagctacccacctccagctgtcccccctgggggacagccccctgttcccccacccatccccccacctggtatgccacctgttggggggctagggcgggcggcctggatgagataacggggcgcccccccctttgttttaagaattgttttccaaccaacttgaagaatagactgagggggcggcagcagggcgccttgtatatgctagacagttgcagtgtgggagggctgggccctggcatgaactgtgtgccctgggcagtgcctgctgtggtgtgatcacatccagtccccgctgccgtctgtgtcctgcacggggctactttaatactagtgaagatgttaagtagccacattggctcagttaatagcttcagtaaggagtgactaaccctctagaaatcagtgcctaattttcctgagaactaacttttggtatccatgtcctcctgtctgcagtctggctgttgttcttccattctgtggcttctctctgtggcccctagtaggtgaggtgactccccacttagcttgtaactctgtcctctattgtcatctggggggctgccttgacgggtggctgtctccttccctccatggagaaaggaggtgtgtacttggaaaacaatgtatgtttacatctctttgcaaagtcttgtacatagagagatattttttaagcgtgaatgtaacaacatactgtgaattccatcttggttacaaatgagaatccttcagtcagttgcccgaataaaatcagttctgaaactaccgtttatgtgtgagtacagcctctctctctacctcagttgatctgtcccacggcctgtgcctcctttggaggacctggtgttctgggctacatgagcttctagagcttctatcaggcttaggaccctcatgttcctgacctgacagtagccatgagtggtctttcctatccagggtgggaccagctgcccacccaacaagccgtcagctcacaacaggaaaaaagcactacacactcggctccgaggctcacaaagaggcctttattatctagttcaaagtagacactgtcacaatcttatgttactccttttactaaaatagttcaaatcaatgcttttaccacactatcaaaagttctattttttttctctctccacaaatcaaag

SEQ ID NO: 21481 - DNA, 2686 bp, Mus musculus
cgtttgagctccatgttctgtcagcaagaagcctctgagactccaagccaagggactgtctgggaggtagcctgctcttggtagaaggtccctcaacaagtattctaactctctgtcccttacactggacagatgccaccggagcctgaatcgtgacgcgggtggcacttttctgctaccctgccagagccaggaccctgggtcacagagcactgggtcccgtgtgtccatgactggctgggagctcagggttccctgtcacctgggggtcggtgctcagccaccccgaagccagcttctcctcgttagtattcactccttcagtgacgtctcctcaccaatgccaggcttagccactttgtaggtctctcctgccaggcttccttttctggtttacagcaacataggaaagtcctggagagtgtctgagccaggctcagcattctcaatgggcaggtagaactgggccattgcccagggtcactgtcaatgtgacggagcacccccccccccccccgcccgtgtgctacaaggagccacccctgatcccctgatgaggtttccttgggaaggatgggggcatgcctggttctggctttaatctgctgtgtggccttcagccagccactcagcttccctgggcccccagccgttccttctgcctcttgctcactctagaaaccaccccagttttgtggacctctgtcctcacagtggaagagctcatgtggcaacctactgggaacatgctaggccagcctgtttgtcatgctgtctcctcacaggtcacatctgagccttagcccctccctccaagggacctgtgggcgggggcggggggggggcgggggggtcaaatgcgtgcttcagtgaacgttgctcgcgcctcagccggaaggcggcacatggctgtcaggagttttctctagtgtggttggaggagagtgaggtgcttttgtgaaccatgcagatgctgtctgtaggaggccctggccacactgctggcttcgccagttccgtgtatttacatccacacccatcagctgtcctcacgcaatggtacttagagccccatgcagcaagcccaaagagcttgtccttgcctcaggtccctcccaaaccctgtgagcagaggggacaggccaagaaggtgggtgacatccttgctccccaacaagcccaggccccgtaaccttgggtggtacccagcacctttgctgcccacacccttgggtcccacactctcaggggaaaggcccatggccctcggtgtgcccagggagtgttgcgcaggggctgtaggggaccggcctactgctccggctgttggtggcactgggaagctctttctaggagctgctggatggtcaatcgatagaacttgcaactccatctgccggccccagctggtactgggtatttctaagtgggctgctgggcaggcaagacccttcctggttctttgaagccaagaaaccgcagaataatgttgaggtatgtggcccacacaaggtgggagccaagtcagagagtcccagtcacatttgtatcaggacagttcagccacctctgaaataagcaataagtaagagctcttggagtctgaagacaagaaagatcctgtccctagtgctgcagggcatccagggaatctaaagagaatttctcacaggctcctctgcccttgtgcaggcagagagagacaagctataccccagccctcggcagtaggctggcttccctaggacagcctgggtcatatctcaaacctaacaggagaggccagcagcaacccagttgagcccggggccagggagggcaggtggtcttccgtgacccttcccttctggagccttagcctttgcagtgctgattctccaccccaagctcacaatatgcttgtgctggctccacccccgtccccactgtgacaggtcacttggccccatctagggtggcctggccttccccggagtcagaatctgctgagcacatcttcatttgcgatcaacagccacgcgccagtgtttcaagacaaagtgacctttcatttttctttcttgaaacttgagaggaagtgagatacatactactgatctttttttttttttttttttttttttttttaagaaacaaaatgcatggctgcagagtggcagaggtgtctattttcatactgtgggggaaagcgtgctgcttttgggaggggctggagtgcctggtttctgccctgggccggtcttctataggagttggtggtgagacctgcagctgcccctcctgccctggccgtgtagagctggagcctgtgcacttcggccgtttctaccttctatcgaaccactttgatttgtggagagagaaaaaaaatagaacttttgatagtgtggtaaaagcattgatttgaactattttagtaaaaggagtaacataagattgtgacagtgtctactttgaactagataataaaggcctctttgtgagcctcggagccgagtgtgtagtgcttttttcctgttgtgagctgacggcttgttgggtgggcagctggtcccaccctggataggaaagaccactcatggctactgtcaggtcaggaacatgagggtcctaagcctgatagaagctctagaagctcatgtagcccagaacaccaggtcctccaaaggaggcacaggccgtggga

SEQ ID NO: 21482 - DNA, 1169 bp, Mus musculus
ctcatgctctagatgccaagttctagtttactttgggggaacggacacccctctttacagagctggcatgcatctctttggcttcaccttcttggggggggggctattcactcatgctctagatgccaagttccagtttactttgggggaacggacacccctctttacagagctggcatgcatctctttggcttcaccttcttgagggggggggctctgggagggccagtgttcagggtcttgatttccccaagtgcatcatgaaggaggggaatctttgcacttagggaaacacagggctgctggttttcagctatgtcatcagtaacagtggtcagggtgagtctcctcaggacactgtctcgctgagtgtctccacctctttgcagacagtcttttttttttttttttttttgctaggaggtgtgggtctggcccagagttgcagttgcagtagtgaataatgcagcagagaaggaactggccggactggaggttttccacccctattgggggtgggtaggggcagaagtgtcctgtttcctacagaccccaccccctccgagcgtccttgcaccaaaaactgctgcagattttgtagtagccaagctctgccttggcacagactgagaacccagcattggcactactacagacttcagccacacactggattgttctttttagttttgtctcttgaagtcagtgggtggcggcaaggtatcctcccttgatcgcgcacagaatatttccaggaaacaagggaaactgggcttccctatactgggatccaaagccttccttgcctttgaagagcagggggctgagctgagagagtctaggtggtgcccagagtggagtcggacactggacttgtgccttagcacctggcccgaatgcgccctttacatacatgcatggggaggcacagagaggaccccagccttgtctcgttggggtctccaccagggctattgggggtttctgccaaggatggcttgaggctctggcagttgccatttttgttttccggttggttcaggaaacgtggctgcctccctgttgttgattcctctcggatgggccttatcccctcccgctctggaagtgttccttccttatcggtgagcacagagtggctcattgataacccagttatccacagggtc

SEQ ID NO: 21483 - DNA, 1167 bp, Mus musculus
ttctcagcctcatgggctaagtagcccgtggggccaccaagactacccactagagctgtgtcaacaatttgactattcacaacccttccttcctttctcttatcacccccccccccacacacacacacctggaggctggggtgcaaggcgagtgggtggagtaaagagggtggggcctgcgacttctgtcctctatagtaagagagttccttgtatgtgaagggcctcactggtggctttgtgccttgtccctggagcgagctctggatagctgtactttacatcagatgggggtggggctagggaagcaaccgagtcaccaggcaggcaagacagggtatagcccatgtcaggcagtgtggccagggctctgggtgaggctcctggtccaagctttgcaggaaaaagtcattcctgcactgagttccaaactgaacaggcctgcatggtgttccaggcagggcgactggtaaggctcaggctcctggtcatcacagccgagaattgagcgctgttgcacaggctctccctggttgctctgcaactttggagccgattgttctctgggaaaaaaaaatttttttaaattacttgaactgttaagaaaatgacaaaaaagggaaaacatcattttcaaatttaaaaaaaattactgaactgttaagaaaatgacacaaaaaaaggggaaatatcattttctgcaaatctatgcagccccaaggtggagcagctggggagcctgtgctgtctgcatctctgcagtgcagttcctggaggggcacagcgtgtctacaccgtctatcctggctcttgataggagggggaggtttgggtgtggaggacggtgcactgggcaggtgcacttggtgtgccaggactggctgggaaactcctttcaatcttcagttcccaaggcgcctgtgcccacctcttatacacattaaactagacgggggtgggtcctagtcctcgctgtgtgaccggacaacagtcagtcacttaactcctctgagccttatgggtaaatggaggtaaccaacaggatttacatacacacaaagatcaaggtagcatcatagatgtgcattccatgaagtgagagattagtagtgacttggtgacatccaagttggcacctgtgttagacagggaggtgcgccatgtgga

SEQ ID NO: 21484 - DNA, 1149 bp, Mus musculus
tggttagactgtcctgtctgaggacacagccagtttcttcagcacctccacaaactgcaccccgtctctgtccatgcacctcgattcacggcgagacatttagccaccactctctgcgtattgatggcatgatacggtattgtcctcgtatagagttaacaacttacgataaattgcccaaagctgggccttgctgtgtgtgctctggacactgtacatttgtacccaaccaagtgggtcaagtcggagagggactcttcagtatggaggcagcctgtggagtgcagcgcctttgaggctctgggtgtaagacagtttccttccctgactctcgtgcacagacagcatgcagcatacagactgaaactgtgctctgccgagtagaaagtaggtagggtctgaaggtgtcgagaaggccttacctgtggtgtgacagattgaattgattgtttacactggggactgtatctcggatctttaaatagaggaatcacaaacagacttaaggacagatgctgagattgctttttgtaaactcgtttaagcgagtgagtgagttgagttacctgaactctgtagcactggttgttcatagtgatgaaggacagcactgcagacatctcccttgccatctctagcctgctgtggaaggaaacaacgtgactcaagatgaagctgtttgtatgtatccttatcaaatatattctataaggaaataaaatctgaaaagtgactttcttattgacctacgtttctgaaagtatgtgaattaaagaatttaaaattagatggggtccacactacatcctgttccccatcagagggctcactctcatggatcccttgcacacagagttctgttctgcatacagtgtggaagccttcatcagcccagacaactctaaaggaattggcttaatttcttgctttaacaacctaggcttagtaacccaatccaattgttagtttctttgtctgtgtaaatattggcaaaatggtcgcttttaattgacagttgaaggaatacttaggtatcaaggaaggggaagagacccatggcaacttgcatagtggctcatttggcgtcatcagaactgaataccacctcagggaggtaggacttgacttaggctatgatgtcagaggctt

SEQ ID NO: 21485 - DNA, 1177 bp, Mus musculus
cggccctacagaaacatgagtgcttcaagtcaagaggttattttttttaattgattgattgtttgattgattgattgattttggttttttcgagacagggtttctctgtgtagccctggctgtcctggaactcactttgtagaccaggctggcctcgaaatcagaaatctgcctgcctctgcctcccaagtgctgggattaaaggcgtgcgccatcactgcccagcccaagaggttatattaacacctatcaccaccattcatctaggagatgttagatacctgctgacagaatttgaaccaagccggactgtgaggcccactctttgatttcctagatccttttcaggtttgccaccatgtgggtttttacaggaaacagtaggagcacctggttggaggaaatcagcacagagtagggagttaaggtcaaatcccagcaaccacatggtggctcacaaccaccctaatcccgcaatgagatctgatgccctcttctggcacatctgaagacagctacagtgtacttaagtataatgataaataaatcttttttaaaaaaaagtaaggacgggggctgggaacagagtaatacaggtgatcttcactaataccatggttttggtagtaacttagaagccacaagcaaaacaaacaagttagttgccaaaatggcaaggcagaatgctccagtctgcctcaattaatggtgagcttactcaactagaggcagggccgtgggtctgcaacccagagactgacgtcagtgcttacaggagaaacagacactgtgactccaagaagtcatctcacctggctacctgtcttattaaagcagcctgggagtcatgtgtagaaggactcctgtgggtgatgaagcattgctttgcttgtattctgtgtttgggaagtagtgagggctgaatctgttagcgcttatctggctcggtgctaacaaccccagtactggcccattctagtattctcttacgttaaaaacaaataaatctgaggtgacagaacaaaactcattacctgaaggaatgaaatgatgtgatatgagtcccaacatattctagaataccacctcagagccatgtagcctttggcagtgacttagagtttagaagttgctcccattttgtaaactctaccaactccaggaggagcctttttgg

SEQ ID NO: 21486 - DNA, 1190 bp, Mus musculus
atgatgtcagtccagagcttgttcaaagtataaccaataagaaggagcaaagcacatccttgaatgcttcaggaagagcagaagtaagggagccacttcctgcccagggagtgctagctgaagtgctaccccagcatggagataactacagtttcatcaattctggttgatttcaccaaccagagttcagctaggaacacgagctcctggtggcagaagacatgattagtaccacccctcctcagtgaggcaggaggcacagacgcagtctggctcagttgcctactctgcataaggcctttcaagccagaagactgttcctgtatgaccccatgtcctgacttagacttggaaatgtggttaagggattgtggagagacctttcagaggcaggacttgcacagcctttcccagcagccctaggtaaaatacagcagaagggcaggggagcccaaaggagggaactctgacaccccagggctccccagcataggtgcctatagaccctggcaaccaccttcccattccagggtgaagcctgctgggagtgtgaatgacgtgggcctggatgccttagatttggaccggatgaaacaggtgagagccgggggactgggggtggggggggccagtcagcaggctgaggactagctctatccagtgggtctcatacttgactgccacaaaggcaggaacctagccagaagaggaaaaaggagagtctgagttccctgcagcctgcttctggaacccctccctgtgggcagccatcataaactgaggggtggtgagggcagggtttgcccagggccaggctgagggaaagagccctgcagcatacccctggagccagcgtctgtcccttcactgtgaggctctgcccagcaggagatcctggaggaggtggttcgggagctgcacaaggtgaaggaggagatcattgatggtgagtggacctcagccagggtgcgctcactgccctcccagcaccccactcgccccagtgagcagccctggaaacaggtgcagaaaaacaaagtgctttaccaagactgcatttctcgctgggtgtggcttctgtgtctgagacctccctctcctcagcatcctctcagatcacgtgtgcaggagagggtgggtgtggaaacaccccctagtttctgtcctttcctgttcacatctgttgcctg

SEQ ID NO: 21487 - DNA, 1142 bp, Mus musculus
gggaggataccagaggcctgtgaaagagggagggagagtgtggggagctaagcaatggggtgcagaatgagggggccggaagaagaaaggaggcatttgggaggacttaacagatgttcaggtgtccagaacagaacctgtcctagaggagaaaggccaggccatggtactagcatagtccataacagctctgcagccagagactcccgctctatcacatacacctctgagtggatgtcagaatcagggaaactctgggtccctcctacaagcagcccaacccagctctggggtgaggcatagtttttggctttttcacgttcctgtctttagtgggtagaagcccatgagggctaggtttcctccccaaaggtctgtatcagagctgccatgctgctgggcctctagcccatgtgtgcccatggcagcctgagcagggtccttccttctacactgagcccgctctcctgtcctgcccttagccatcaggcaggagctaagtgggatcagcaccacgtaagatggcaccagtcctggaggattgcgaggagccgtgctggccccagcgagcatcgagcctgcagaagctgggatgtacttaagtctcaacctgtgatacaatcttaaaatgaggaaacaaacttcaactcctggattttttagtgtatctgacacagaacaccgggtctattcttttttttgtattttatatttgcttatttaagtgtacgttcctttggtttatagagaacacccccaaatcacctgctttattagatggcttccaagttttctcctaggtgacactgttggtgcctcagctgacagggagcagctgggtgcagtgtggcctttccatgccacagagctgtcagaatgcagcacagctccagcagccacggtgttgcagtctgtctgtccacgcagtgcgcgttgtgtccacacaataataaactgttcactgtccaaactcaggctctggctcactctcacgcgccggctcttggctgccctggtggaaatgtgcaggccagagcatgcgaggataacaggagaaagagggggcctcagaaagcagctgggctccatcaaaacagccccaggagggtagacaggttaccaggcacctcctactggtagag

SEQ ID NO: 21488 - DNA, 1138 bp, Mus musculus
ggaggaagagttttgttagttggagaggattactttatagcagaatccaagatgggtcgatccctttgtgtacgggagaaagcttcaaatagaaggctcaagctagaagagtagggtagatagagtagacattagagatgacaagaggtaaagaatgttttttgtgtgtctggttaaggaagacaaaaggccaccaatatccacctgattacatcataaactcatatagacttgatgtttttaggaagaagttagaaggaagtcatgctaaaatcaagatcttatagaagttctaagatggggagttttggggaaacccttgtgtttggagagtaagaggaagcagagaaggcagaagagaattatttgaagtagagacttggggaggtgaggcagcctggctaccgatgaagaaccttctggaacaccaaccaggagagcgaaaaagagaatctctgttacacattgcagcactggtgcagtggcagatagaggactggaaaagactaaagagagagggaagctacaggttgtgagcaggacaactcagatgtgatggctcttggcattgttttgactctccctgccccgatgatatctcagagcaccaaggataaagaaaccagggagaaggccacttacagagaatgatgtcatgaatgccatggccacggcaagtgatgagaagacagtgcagcaatgtttgaagaggaacattcactgtgacaagtctttttggagcccagagccttgtgcatgtttggcagtgctgctgaactggagcccagcccacatggtctttccttttacaatcagctctgaggactctcattctatgttagaattgggtgttatcttgctcagtttgttagaatgtaaaaatagggaagtgtggcaccaaggtgttgaggattggactccagtcccatgtagaattagatcccttaaagatcatgttgacctacatggactttattggtggtagagaaatgccagaacctgtatgccttgctgttttcaaatctccatattgtgagactgtattgtcttggagtggggtcttcaggggcctttgactgggattcccacaataaaatatcaagtagaggcaccatgtttcactgttgtggatcagacc

SEQ ID NO: 21489 - DNA, 1647 bp, Mus musculus
gcacacatgtgcgaatccataccggagacaggccctatgtgtgccccttcgacggttgtaataagaagtttgctcagtcaactaacctgaaatctcacatcttaacacacgctaaagccaaaaacaaccagtgaaaagaagagagaagaccttctcgacccgggaagcctcttcaggagtgtgattgggaataaatatgcctctcctttgtatattatttctaggaagaattttaaaaatgaatcctacacacttaagggacatgttttgataaagtagtaaaaatttaaaaaatactttaataagatgacattgctaagatgctatatcttgctctgtaatctcgtttcaaaaacaaggtgtttttgtaaagtgtggtcccaacaggaggacaattcatgaacttcgcatcaaaagacaattctttatacaacagtgctaaaaatgggacttcttttcacattcttataaatatgaagctcacctgttgcttacaatttttttaattttgtattttccaagtgtgcatattgtacactttttggggatatgcttagtaatgctgtgtgattttctggaggttgataactttgcttgcggtagattttctttaaaagaatgggcagttacatgcatacttcaaaagtatttttcctgtacaaaaaaaaagttatataggttttgtttgctatcttaattttggttgtattctttgatgttaacacattttgtataattgtatcgtatagctgtattgaatcatgtagaatcaaatattagatgtgatttaatagtgttaatcaatttaaacccattttagtcacttttttttccccaaaaaatactgccagatgctgatgttcagtgtaatttctttgcctgttcagttacagaaagtggtgctcagttgtagaatgtattgtaccttttaacatctgatgtgtacatccgtgtaacagaaagggcaacaataaaatagcgatcctaaagaaagattacggcagaaagagctctgtaagcacagccttattttcttctgttgtccagaatacttagaattcttgagcctcccagaaattggaagcaaataaagcaacttgagtttcctttattttgcactcagtgacagtgactgtgatgaggtccgtgcatggacactagcatttcctacgtgccctgaatcccgagagcaggcaggaggcaccccgagctagggaactacctcagagtacacagacgacccatggctggcaggattgcccttgatatcccggtgcgtgtgggagtgagacgtttgcatgggcctgatgctttctgaagggaaggcactgactggcagtgggtgcgccaagggaggatgggcctgccttctttctcatcatcactcaggctgccttcaacggcggtggctccatgggttgtccaacaggaaatctcagtgcagtccttattagatgctgtcagatgtagcaattgagtgccagtagctgtttgcttgtagacacacttaagtgcagagcggcaaggcgatgagattattagaaagttgtactcagtgagtacttgacttgtcatgtgtgacctcttcaatgtataatttttgaacttttacttacctagggtcaaataccagacttgttaactatt

SEQ ID NO: 21490 - DNA, 1139 bp, Mus musculus
tggtgggcatgtaagacctcttgaagagatggtgtgtgcaaagacggcccatgtttctaggcagttttagcttgtgtcttcacatagatgagagccaactgtcggtgaagtgtgtggtgctccagggatatggtgctggcatggcttggcacccaccccacctttccactcggcaggactcacctgtggtacagccctcaaatcactgactagagtgtatgtctatggcccaggaagtcttgccccctaagtttacccactccccacaatagacagggatttgactactacttcctttcctctgtgctccgaattgacatgatttagccagtctgcggtgcggtgggtttttattctcttgacttctagcctacaggaagaacagggacttcaggatcagaacagagatgagcagagttgccagtagatagatgccatccgtgactaactactcagaggcattgccctagcagccctactggctgcagaagctagctccttttctagcacagactgtttgaatctctggccataagaggccgcatctgactttgcagccctttgttgttaatgtgacctcttctagagcccaggcccaggacctggcagatacactctagctgaggacagggaagggactcagaactccaaagcagatgtgcttgcttgcaacatttaactctgatcagaacaaaagctactccatgcttcaaatcacgtgccagcagcattgaccaggtaggttaggtctccaaaacagcgagctttccccacagcttgttaactcctctcagggtaagctcaggtgcctcagatggcttaatacaggcccttcaggtgagtaagttgcactgagcaggagagggtagctgtgtggctaacaggctacccggcatctttgggcatagttggtcagtaccgtgccaggaaggtcattccccagctgggacagcatgtagacttcataggaaagggtgggtggcagatgtgagcagcttaaggcattggtcattgagtgtcggcagtaggtcacaggcggggtgcaccttccaaggtgtgcctagccagcactctggagaccatcaagggggggctagtgagcagcactgtgctccgcatttcagagtggcagatttgat

SEQ ID NO: 21491 - DNA, 2080 bp, Mus musculus
ctccctgtgtctttggcgacagtgtattctgatgatggcctccgctccgcccagctctggctcactttcctctctccacgtgcactccctttatggctcccattagcaaacaggtttctagggcttctaggttatttaataataaacgaagataaaacagacatgaagaaaaggatcccaaggtgcaggacacaagacatttaatgtcctataagacccaggctaccacgaccctgtcaacctaactcataaagggacataggctgacccagagctcagggagggagagcatggacacacgcacgcacgcacactgctcacagtatcagccttctacaggattacaccagcggagccatgctcaccggggagctcaagaagacgctcatagacgtccttcagcccctgatcgcagagcaccaggcccgacgcaaggcggtcactgaggagaccgtgaaggagttcatgacgccccggcagctgtccttccacttccagtaatgtctcttttctgtggcaagcctgtctgtaacccaccctgtcaaatcaagtcacactcccaataggcttctcacgtggtaattcctggacctgggtctctgtgcacgtgtgcatcctggatgctgtttcttctctgatgtctccccgtctgttgtctgctacgggtgatcaagcgatgctaatgttgtgtggtcagatagaaccccagcccgcagtctctcccacaaagagcccagaggtagtgcttccctggcccacagaagactgtccagctagcagcctggggttccagaacaaattctgaaatgtattccagtttttctttaaagtgcgtgtgcccggttggccacggtggggtgcactgtatcatctctgttctcaggaggctgagacacgaggtctgagccagcctggtagtaatctgcctttgattctgctgctgtggagtcacaatgtcattactgtaaaactgaacactgctgtgaggaactgacaaggagacatgtagtgggacatgccgctgctccagcccacgcccccccccacacacgcacacacacttacatgtaatgtgtgcaaactttgctttatacttggctaagaagccatcagctttgttctgaaggtgtagctcagtagtagagcactcgcctagcacgcctgctggcccgggttcagtctcctgccccacgaagccgggcggataactgagctctctgcttttaaccctgattatggaccaggctgggtctttccactaacctgaggctgaggtagctaacctccagctcccgtgtgccgtccactccaaaatcatgcttgcgcccttggtgtactaacttccccacagatggcccagactccaccctgtgacgtgcagggctgcagctcctgacccccgggtcctgaggacggcttgttccctttgcaggtgcttctgctttgacacttgactgacggggagggcaggccagagcagtgtgctggccatgcctcaggccgttgaccatagctagacagaaaagaacagcagccgtccaggccgcagcgttctccctctgggcgggctgcatggaatgagcctccactcagagtcttggaaaagcagaagccgtacctcagggaaagcccctggttgaagtgtctgtcctctctgaaggcacaagggccactctgagtgttctgtccttgcatcatttttaggaaaaaacaataaactttgttgagctcctgtctgtcactgtctgaccaagcaggccacagaggaacgtggacttgctaaaggcctacgcactacacctactgctaaggctgtagctgttcccattggcggggggtggggggcagcacttaggaaaattgggagctgtgaaatcccatggtgcttagaggcaggctcctagggatcattgtgtggggccacttgtcctaagaagcccccctgctccctgagatggctgttccaccttgtttgacagtctcacagcctgaggagagtgtgtgcgtgtgacgtaccatttgcagccagctgggtactcagattctgtagtgggcagcgcaggcctgagccagcggtgcg

SEQ ID NO: 21492 - DNA, 1195 bp, Mus musculus
agtgtggggttgctcaggtccctgtttctgccctgctccttctgcctttggtccacagcagtcccctgtgcactgtctaattaagcacttccttattaatcacctctggttggctcagggactcagagcagcctgtacattgatttccaagtgggggctggcatctcccctcagcccctcagggtcgtaggcttccgtggcatgcatgaccccttctgcctatccccccccaccccaaccccatacacactgggtagtttcctgctctttatggctgcctcaacttgcctctcttcttggaagcatctgctaatcctccatgggagtccatcccctccgatagctttatgctatcagattgtggtcttttgtttgtttacatttttcatattgggcttttttttttccctttcttactttgcttctgttactgggggaaacatgatcacctagaggaatggaaaagtactggaggaaacaggaagcaggctgctccatcattacctgcagcttgcagtcatgggctgctctagcagccttgggggtgctctctctagttcagcttttcttgcctccccaggctctggggcttgcgtgtctgttaggagggcctgggtctctctcctctgcacacttctgaggtgcccctgggattagttggtgctgatgacagaggagtaagtgctgaaaggactcttgctcaatcgcgagaggcttttaaaacccagttattactgctgctcctatgaatgcccataatggcacgggagtttttctgaacctctctttattgcgcaaatgctgcctggatcagatcctgacaattcaggtgaattattattctgcccctcagaaggtgaagggaaagctttcagtttgtaacgtcttcttcccaagtgccctctgtcaaaaggtagtgacatgtgacagccattagtactttgctataatcacatgccattccatctcatgcccaaaagctttccatctgccgggtaggaaggactacctttatttcagacaccttccccctttcttttgttgttaccttctcttaaaaacaacaacaacaacaacaaaacagcctcctgactttacaggcatgatctgtgggaggagtgactcctttctctatgaggttattgccacggacaggggacacaggtgggacacaggggacagatggagtgatgac

SEQ ID NO: 21493 - DNA, 1171 bp, Mus musculus
ggagccttcaaatggagcttttagaattgttgagggctctgttggaaaacaaaaaggccatttcattggaaagatgatgaccttattaactataattaggcaattcacagaggtttccaatatagttcagcatctctccttgctgaaagggtgggggctatggtaatgtctttagaaacataatagtctttaccacattaacagtcttgtatctgctggaaggtttgtcagcctggtgttttcatttagaagtgaggtatagttttgtagctgttcgcattaatgtagtaattttgacatgtaatttcagacaacaatgtcaagagctgtctccatagctggaagaggatcgtggatagggctgtggacatgtccacatctctcaaatgagccttgtgctgtgccccaaggcagtccgtggccctggcctagcctcagtgctaaaggccacagcatatgcttagattctcttcttgagctaattgttcaaggatgtgcatatttgaaataatgggaagctaaaggattttgcatataccagcttatgctctgaagtctctctaggatcatttaaaaaaaaatactgtattcccctggattgtgggtctgaacctgggaataaactgtgctgcagtgcttgcctggtgtcagtctatagctgtacctgcagtgcttgcctggtgtcagtctatagctgtacctgtagtgcttgcctggtgtcagtctatagctgtacctgtagtgcttgcctggtgtcagtctatagttgtacctgcagtgcttgcctggtgtcagtctatagttgtacctgcagtgcttgcctggtgtcagtctatagctgtacctgtagtgcttgcctggtgtcagtctatagttgtacctgcagtgcttgcctggtgtcagtctatagctgtacctgcagtgcttgcctggtgtcagtctatagttgtacctgcagtgcttgcctggtgtcagtctatagctgtgcctgcagtgtcgtcacagggagcagcttcccaaccctagccctgccaggaggcatcccagggcctggagctgcagcctccacagcatgcttgtatatggcaccacaccccaactgcctacctcctcgcctccctctgctggctagggcattgaagcccacagcaaataacttctattttgtatc

SEQ ID NO: 21494 - DNA, 1195 bp, Mus musculus
aggtgaggaaggatcgatttcataactccgctcatacgatgagcatggggaaggaaacactcaaatgtgtgtgtgtgtgtgtgtgtgtgtgtgtgtgtgtggagagcattgcatcatgggagtggagttctgactggcgtgaagggcgatggcggaagcacaaagtgtgccttgtgccttgaccgtaagtgcaaggtcagaaaggctggacttggtgatgtctacagatatgtagtggtatgacagcagttctgtctacaacagaccaaatgtgtggcagttcctacaagagtgtaagagctgacaaatccccacacttggggtgtttctccccaccccctgccctgtctctcttttcttctttttctttatttcctggcagtgagactagaaccaggagcggatccacaccaggcaagttccctatcaccaagcccctctcagccgctctctgcatatttcttctggtcttagatgtgttcttaccatgtgcttgccaccggctgtgttcataaaggtctatgctacatgcatctgcaatctggatgtcctgtgccagacatacaagtcaaatgtaccacagactctgctgtgcagcttggtgcagggacactgtgacctgctcacagtgatcaaaggacctaattcacaatgcacttcctagaatgtgtttttgtcgtttgtgcctcgtcttagcacaacttttaagtgccctcaaatttaaaaaaaattatcaaaaaatttttaaaaaattaaaaaataaattgcaaaatgttcaaatgtctgggagatcttcgctcctaacttcccagcgtctgcccttgcacctcttctggctggggcgcctcatacagccctgtattctccctctgctttgcctttactcaggtaaccttgttatctcagtccaagtctctgaccacactgctctggtgatacctggcaacgagaaaccatggataaacacttggtgaattaatgaagtaggaatgaatgtgtggcttgcttacatccagactctccatgaagtcttccttgtttccagccccgacaaccccagtgcaccgaatctctaggaggaaggaggctgagcacagcagagaagaaaggtgtggaccaggtccttcagcagccctgagaactgaaaaggtacgctcattgggtgacagcccatccatcagctggtgtgtttatg

SEQ ID NO: 21495 - DNA, 1127 bp, Mus musculus
ttggaggctaattagtactctcatttctaccagcactttctttggccttttaaaccaaccatttttgtccagacaagaccaaaaaaaaaaaaaaaacaaaaacaaaaaacaaaacaaaacaaaaaacccaaaaaaacaaaaaacaaaacaactgggttgctttagggaagcccggcttggagtggacaatggtgtccaggcccctgaaaggggctgattggattatgaggcaaatggaggcagaaggagcacgcaggagacaaatgcagtgggcggagacccgctctgagttaatcaggctgattgaagggaccttttctgtcttgccgagtggcccgggggggctctcactagtgcactgctgtgtgcacatggagactggagctaccctggtccctctctggcaactgttcattcatttgatgctcacaactccctgtcctgacccagggccggcctgccatcacgcagggaagcagaggtcgccaagcggtttccgacggggcccccccacataacgttagcctcgcggtctcttcggttttagcagcagtggacatgaacctgtttccagcctgcatcctccagttcctctcgggactcctggctccactgtgctcacctggagccccgccagcccgcctccccctgtcctccttcctcgccactccagtgtctgtctttccttcacagccccggcttctcgaggcctgtctacactcgctgctttccttcctcacctccaatttcccctccaacccactgcttcctgactcgctcttctccatcgaacggctctcgctcaggtaaagacttttctgtagcttgacccttggcacaatgccagctctggctggacacaaggacacacgcatctcctccattcctgctgctccattggtttcacggctctggttcccttctatttccaacattactggcttcacggacacagctcttcttactttccctgggagcttacattcctagcccctctcagtttcccaaacctgccttgtgccacccagctgccaaggccacctagagcactctgggccgggtggtctgggttcaggtcttagggaaagctcttaaagctgggaccacggtgtaggtcagctcttcca

SEQ ID NO: 21496 - DNA, 3177 bp, Mus musculus
aaagagcaggggcagggggtgggggtggggctgaaggggtgtacaagcatgacagacagtaaaggcaaagaaaggggattaggaaccactaagacctccccagacctcacctagcaaaagctttccttctaggctagcctgtgagaagaaccagaaggaagcttttaagttgattacccagtgacacatcccaggaagtctccgtatcacatagccccattgaagggttttgagttcctctcctgaggtttaacctctgcaccccttgccccttccctaatgcctccccagactggtgattaagtcccgatggtacaggaggggtcagaagggtcttaaggaatgattggctcactggacagagccacccctaccccccccccagctatgtttttttttttcttttttccaattctattctactttttgccctttctccttaatgaacacagggctaatcttgggccttgtggaaggaggaggctgcagcactagttaatgaggaagctgctgagctccaatcgtcatctcataaggagccctctttgtctgcgaaggaaaaacactgattatcataatgagctgagctggtggctgaggggtagggggccttgggttcttaaggcacactttaatgtcagtgttgtagatttccctccccccattgaatggggttgcatgttgaaggtagctttgcttcaaggaactttaagagctccacactgcccagccattccttgtcacctagactcctgccaagttccccagtctcaccccagcaatcaacaagcccggtgaaggggactccctcctcccaccccctttcctcagtgggtccactacagcaccacccctgtgctggacttgaaggtagggtactaggatagagcgaaggtctaggagagtagaagccacacacaaggctccctgcccacagtgcagtcagttatagagacttcactgtctgcagggtcccttgtctcaagtatctatcaataatatttatattgagataataggtccctgaagccacttctgatattcacaagtcctaggtcaccggttctccaaacttagcagcagccttgagcaattcaaacaagatccccccccagccccccaccccttctgccaccagctcagctgcccttgatggcaggaagcttctaagtaggattccaggtaactacttcctgaagcacagtttgctctccccccccccaccccaccccccagtccacttcccgggactctcaagggtgcttgtgtgcatccgagggtataaaagtccccttcccctttccgtccaggcatccagggtggcttcagagtagttggcccacaggcccagagcattctgggtactcaacatctatgggatcaatcaggacatattggggagttacagagatgaagccaaggagggggagggaggaggcaggaaaagcactgcccccccccaactcttctgagaacaaccttttctgcctttactgcccattcccctccattctctgtctcagcctccctctgtttgtctccctccctctcccaattggatctggcccctgttggggtgcccctaggccaccccttcctcttctgggtgtcccagcaccaacccggtaaatagtggggctcagtaagagtatgtgggatgatgtacggtgggacaggcggacgaatggacgggctcaactgccacatctgggcagctaagggtcagggggtgtggggggctcaagggatgtgggatcagtagcaacctgccctaggctcagccccctttgaggggtcctatggttgcgccctgcattcgtccgcgcgtttactctgtcatccacagttgatcctaactgagcgtgcccatggtcctggccctgggcttggcacctgccacctagcttgtcccttgatggcctctgcttcccagggagggcaagctggggggttgtctgggagccagagcactggtctctggctccatagagggcattcagagggcatggggtgggcctggtttgcctgccctgccttcacgcagacctgcccacccccagggccttgcccccctctctgcctccctccccattcatggctgagtacgggctacttgccccccccccccgcctccccaaactcacctcagttgccaacagcctcctggtgcctgttggaccatcccttgctggttcttcatttcctgtgggcctagtttccaggggctgagtgaccagggtcttaaaacaggtttaaggcttggcttgctggccctggagatcccgtcgccgtcttcgtcgaactcgaaatcctagccatcgtccttccctggtgggtgtttaccacacttcccaccaccttgtccttgagagtccatggccccgccctcctaggccccttgctgaccatttggtgttgttttgggggctactatccaggcctgtcgcgtcttcctgtgccatttgctgttgtgctcaggttccacgagctgcccatctccacagaagagcaggtgaggccgctgcctgtcttcatgcgtgtgagtacaggtggcttttctttttagggtgttctgctttgtaggaattctaattttttgcctttcctcaaagctggcattgcccaccggccatgccggctgaagaaaagaagactgaggaccccaggatgcccagcgcgaggaccccaggaagcccagcgcgaggactccacccacgacgcccagcgcgaggacttcacgcacaacacgttgcaaccctcctggattagggtgagtcacttgcgccggtaaacacaactttgttagaatccactaacattacatcttcactttagaagttgtacagggggagggtgcaccttaccaagcgccgcacactcgcctggacgctgcctggagctgagagaaagactgttgccacgagacagcacgcgtgggagtccctcctggaccctgtctagcagggaccagagacggtaggtgggggtagggcacatgtacactcccagaaatagccagggcaagaaacacagtaggcacacaacatagtcaacccgactgactatgttcgtgatatgaagaatccacaggcccttggctttgtcccatgcagagatgtggacatgggtggttatccatccacccttggtggggagacatttctccccaccagccat

SEQ ID NO: 21497 - DNA, 1160 bp, Mus musculus
tgaagggcaataaagaagccatgctggaggaactgggtgggggcagctgtctggggagccctttcttctctagggactggaatttaacaggctggaaacgagtcccaagagctaccccctcttctgcagccttgagcccccatccctctcagagaaaaggaggaaaggaagattcaggccgccattcctagttagagaagatggaaatttctatgagagctgggtctttctgagtgagactccataaggcacaggggtctctgaaagagagaggcactgggtgggtggtggggacccctgaataaagcctagctgctcgtggacaccttggtctctagaaggtttctgaggaaaggggtatttcagggtgaagttgcctttgtggcatagaaaaattagtccagtaggagttagggacactttaggaaggagtctctgatggtgtttccttctgggtacctagaaacacagcaacagggctacagagcagagcagcattaggagaggggacctgggtctccatctctgatgcaagtatctggtgtgtcctggttttgtctggccctggggccagtgtctggggccccgcctcttcctttgggacctggtggctttagccaggcttctcaggcattgtccatgtttgttttctcatcttccttcatccccaagtccagggtgtgtgtgtgcgtgcgtgcgtgcgtctgtgcgtgcatgcatgtgtgtgtgtggtgtgtgggtgtgtgcgtgtgtgtgcgcgagcatgtgtgtgaagggcaggtgtcaagtgacggaggccagtagtccccatccctccagctcaagcaggatgtgtgtgggagaggaattaattaaggtgagagcaggggtggagggtacggtacaatcttgactttcttaattgctctctagtttctttgggcttaagagaaaattgcagatggtgaggtcttccctccccgagcctgggagtggggccccagagcctggctccccaccaccttgacttggccttctcttctctcagtgaatagggtctttggctagggcttaaggaggagactcttagcctgggagctccgaggcccgctgcagctggaaacaaaggctcaagcagaaaggaatgtgggggagccccgcggagcacagccacctgggga

SEQ ID NO: 21498 - DNA, 1099 bp, Mus musculus
ggaatcaaatcttactgcttttgtgaaggaagagaggatggcaacgatattgcaggaaaagagggaagggggtaggcaaggaggcagggaggaactttcatgtgctattcgctgactgggattggtaatagatagctcttggcccaccacaagctgcttccacacagcctaactgactgggagcagctatggatcaccatggccatgttttgcttgcagggggccatttcactgtctgtcacatcttcagtccatagacacatccctgcacagtgccctttccatagacgtggataggagggaagggctcaggcctggggctgtggagatgattgcatgaatagggggcgctatgcccagtgggtaccttgtctcctctctgggaaaggatctcttctgatcctgatgggaaggggcttagccagccaaagggcagggataggaggctttgtctgctgcctgctggctaccatcttgagtgtgacttacaccagggtgcagacaaagtgagcttgacctggaagcctagaggcccaagaggcccgggtgaagcaagtatctctgagatcaagcctacccttcagctcagagagtggacccctgcctaggctcccacacatgatcctaggtcccagatatgccacccctggagcccgtttcaaggcccatcttccagaatgtttaaacctgtgtatgtaaccagtaaaatgggagtttgtactgtgtattgaatctgtcttcttattggcctctgtgggctgctgggggagacctggagagttgtttattctagtgtcccccaccccctgggactctttgcttttgcccagttttctttctctgttgtggataagattttgtagagttgtgtgttgtatgcttgtgtttgaccattaaaaaaaaaaaaaaagtcacagccctccttgatttctcaattcctattgggggtgctaaattccaaaccaaaccaatccaaaccagattcatgtcaagtgcccaacaggaggataatagcttggctggatcaagggagcatgtgcagacccaagaacagagtggacagatgggctataccgcaagggggctttgagagctgagt

SEQ ID NO: 21499 - DNA, 1232 bp, Mus musculus
tgagactcggacagagtggagggcaggagggtagcacctacccagctctggagcgacatagaaagccttgctttcaaatgttaggattcagcagttttgatgggaggctctgagatacaagaccaggaagactattaagaacacccctctaggagggcaaggccaaagtctttggaaaaccaccaaggtttaatagactgtgaattggctagaagtcttgggggtggtatgagaaagatggaaaatcctagaataggtttttatttattggaaaagtcaggagctggtgtgtaggtgttgccccacccccatggctgtccagaagttgggccttctacatagctcaggctttctgagcacagggctgggttgccccctccagttcctaccctgcctagtgcatgaaaactctttatctgccatggggatggggagcagatggcttcatctgcagctgtgtctctctcagcctctacagccacggggacgccttgcacatttcctgtgggacatgctggacccaagactctggaccctggcctccccttgagtagagagacccacctactgactgatgaactgcgctgaccctggggtcaggcatgtggccttgatccctacccatggaccctgagacttgggggggtgggagaaaggctgttgtgtcttcactgttgagtctacatctgtgaaatgggctcaggttcctacctcacagggctgttgtgaggcagccgcaatgtgcttagaagcatggggcctagtggctcatggtgctttcaataaatttcttgttttaactaaagcagtgatgggtgtgctactaatacgagggagggtgggtgtcttgctggggcttccttttgtagtgtagtggggtagaggagttgcctcaaaccccagaaagtcacctttgtgctgccctgtgtgtgcttaagagatggatacactggggcccgatgaagggcctgtgctcggtgggtttaggagaaccctttcctcgtgtgctcgggatgccagtttccttctggaaatgaagccatgcaagagctgtgggaggtctggctttggagcctgaggggctcacagctctggtccttggagctccagagaaaatgttgctccggggctgagttctgtgcaccccccttgccctccacactccccggggctatgccagggccctagctgaggcgtcatcttgacccagatgggtggtcccattgggactt

SEQ ID NO: 21500 - DNA, 1232 bp, Mus musculus; identical to SEQ ID NO: 21499

SEQ ID NO: 21501 - DNA, 2944 bp, Mus musculus
tgccccaagccctctccattggggtttctctcccctaagtggagtggggcaacctgtccactctccagctcctgcccccttgcttggggttctaatcagctccccagaccccacctcaccaccccaccccactctccagtttctgggttagctggctgggcaagaattggtctatgtccttcgaccaacctccctagccactccctggggtacctgccgccctctggtgctggcctgggtacgcccagactggatgagcttcccagattgtaacgctgcatgacagcttcaacagagacacctgcacccctaccagcaagagatgacatcatcccatcccctgggctccaggtaagttccctgcacgtttccctgagatacccatgggcaatggttttgttttcctgatgacaatgagcaccatgatttgaactgaaggtcactgatggcatcggagtttttctgagaaaactcattgctgggtgataaaccagcgaggattggcataggcaaactcgggtgttgatggaaaagttctgacaaaccagtcacaaatctactcggacaatatgctgaaggccactttattgcttgccaactttccaacttgccctggaagtttggtggcccatttaaaattggaaacagttaaagaaaagcaaataagatgcgtgatatcagagagaagggtcagcaggtagcggtgttatctgtgcaagcctgagggacccgagttcaatccccagaacctatcctctgaccgctccattgtgtaccaacgctctcgcatacacaatgataagtgtaatttttaagatggatttagggaggagagatggctctctagaattgtctgtaaacagaatctgtttaaggggccctgttcagggcatctgcttttcctacctggtaggatgaccaggctcagaaattctccgaacaccatgctgggataatgatctgccatgttggatgttcagggtgggggatcaagctagacatgtaatccatagtgatcttcagagagagaggtttctaggctcagccttagggtcctggctttttcctcctgttctgttctgagaggggcggggggtctatctcatgcatgtctgtcaccatggacttcatcatcatgactttcatcacctctacctggcctctgtcatctccctgggctcagcatctcacctctggccagtccatcaccttcctcacctccatcatcctcgcttctgggctcactctggccgccagggccttgtacatggtaggctttcattcattttttgcacattcggtgaaggtcctactgtgtgccaggccctgtgccaggcatcgtgtagatggacgttgcccttgagagcccacacctcggggagatgcttacaaactgctggatgggaagggagcctgtgtcaaggctgcttgggtgtggatgcagggaggaggtgtaggtgcagcccctgccctacgatttccaaaataatctgtaaggagaggccttaggtgacctctttgttccaagtgggtggcttgtcccagaagtggtactaggtactcagtccactagcactaataccctcccagaatggctcactcccagattcctgcccccagcagccttgtttccctatcatctacacccaggtctctgggtcagcaaacccaggagtctgctttgttggagattgatccctggcctattttctgtgcactttggggctctgggtggggggagggtgtgggatctctctgtctgctgttattaatcattttttcttgatcatatgctgttaaactactatgttgggagttcctggttctgagaaacctgtcagttttctttgagggtgggtaatgggacttaaaggttcccttaaggtttgacacgtacttgacatttgggtactgtggtggccctcaggcctataccagggctctcaggaatgtattgttgcaatgaatctatttatacatttcaggatgttcaattaaatgtgtggttttttttttttttttttttttttttagatttggaactggaatggggttggctatgttaatgccttggtgcctacagggctgaggtagagggacatcaatctctagatgcttaaggaggagagcccaaaccccaccagtgatgtgaccctaccgccccctccccatgtcacaaccatgtgtctcacctccttacctgagtcacctgaagtttctgtctacctgagatgcttccccgctcacagatccccttcagtccctccttctacccatgtgtgatgttcaggctctcattgtcacacttaacctctgtcacctctgtgttacactaggtccgatatctggtcacagatcacaggcttcctcctaccacaatgaatccctctctatctaccctttcatcacaccgaatccctctgtgactcatgccaagctgcctccacgtgtgaactgagcctcctgaggttctctcactcttgtcagaccgccctcctggctactgtgtcttcttcctttacctgagacacagtacggggtacttgaccaaacccctctttcaggtgtgtcctatcctgaccccttttccactctgtgtctcatgaactcccctccagttatcatatgaacccccaacctaaattgagtctaatgtgtcctgactatctcgtcttccaatgccataacaaagtcccccttttatgtcctactaagtacccctccaccgaattattacttgggtcctctgccctcattcctgggtcacattgaactatgcttctattctagtatcacacagagccatttactaacctataaatctctatctagtcatgtgtcacaatctgtgaccctactgtatgtgacatggacccacctcctcttttgatatcacctcgaactcctcccctacccctttagtccctgccccacctccatgtca

SEQ ID NO: 21502 - DNA, 2176 bp, Mus musculus
atgttgaagcccaagatttcagcggtctggcgatggaactgagttttgtccagtgaacagtagatgttgtgataccgaaagcggaccaggacttggcggacatgctgggagtgttcctcctggctcattgagtagaccaggacctctctgccatggcaaatcacaaacaaccctaggatgtcttttaggatgaagtgaacaatgttgttcccttcgtcagagtatgagttcattgtgaagggccggtagcatctcatctggtgaaggccgaaaccgaacgatgctctccaagtgtcttccgtgtgtgtgaccgtgtgcctcatctcactttccttaatcccaagcagctccagttttgtgaaccatgccgctccatgtagctggtcgaatagctctggtaccatctgcgtgtagtcttgtctgtcagtcagcatgtcatacagtatccagtattcctcttgctccctggctttctcttgctgcctggctttctcttgcatcctggcgctcacaggttccaaagtctctcgggccccagactcgtaaaagacgccgctttgatcactgtctccagcctgctgaagctcagagggctctgattcagaaagatcatcggatccgtctgagcttggctggtcggaagtctcatcatctgcctccctcgggttaaacacgtcggccaggtctgagtatgtgtgtggcaatccgggcagtaggcttatgctgtatgtctctagtgcgatgcatggtggaggtggggtgaagcaattccgcagacagtagggagagtggaaggtacaccggcctctcatccagtcgacttcaggggcatgggttcggagccacttcatgcctaagacgatggagaagttgggcgaaggtaagatgtcaaattcgatgtactcataatgcttctggtggacacataccaggggctcggtgcacagccagacgggttcattgccaattgggatgccatccacaccttggattatctgtggataaggcttctcatagagttccacatagtgttcctgggcaaacctctcatccatgtagttcccttctgctcctgagtccaccagggcccgcactgcgacactgtggtaggggtccactctcaccaagagcagtaagaagaggtgatcgcgatcaatgtctgggtggaactcattgggcagccagctgcttaccctccacttctctggggcgggagcatccatccaggctacgcttcttgggcgcgactcaggtggcagcctgagtaatgctcttctctctgccagcttttcttcaagttgcaggacaagtacaatcaggttgtctagggaattcggctgagggatccggaacagatagtgcctgatctcttcgttgagcccctggcacaggtgggcctgcaggacttcatctggccagcctaaggtgggtatcagaccccggaactcattgatgtaatcggccgcacagcggttcccctgcctgatgttgaacatggcgtcttccgccacacgcagggtctgccgatactcaaacttttctgacatggcctccaggaaggctgagaagttgtttatcactgggctgttctgctctacgaggtcgttggcccattccaaggctaggtcagtcaggtggcggatgacgaatttcacccgcagctcatcattgtatagcatacttgggtagttctgcattgtcatctggcagagcacgacaaactcatggtagtctctgcgatctccagagaagggcctgagggagggcaggcgaccttcgttgatagcctgcatcatgagcctttctgccactctctgttgttcttttaggtcttgcatccggaggaacagcgagatgacgttccccatggtggccacgacttcttctggagagttcttgggctgaccttcctcttcaccaccttcctcttcctcctcttcctcgtcatctcccaggtcagtatcatcttggtctgactgggtctcggatgagttgattgtttcatccatgctataatcggatgcctcactgagtggttccgacccttcctggtttgaaatatcacttgactggtttgaactgtcgcttgactcctggttcgaattatcgcttaactcctggtttgaattatcacttaactccgggtttgaatcatagcttgactccttttgtgaac

SEQ ID NO: 21503 - DNA, 2176 bp, Mus musculus; identical to SEQ ID NO: 21502

SEQ ID NO: 21504 - DNA, 1128 bp, Mus musculus
ctggtaggggccactggatggctcctccacttcccggagtagatcagtgggtagctcttgcatttcctggtaggggccactggatggctcctccacttcccggagtagatcagtgggtagctcttgcatttcctggtaggggccactggatggctcctccacttcccggagtagatcagtgggtagctcttgcatttcctggtgggggccactggatggctcctccacttcttggagtagatcagtgggcagctcttgcatttcctggtgggggccactggatggctcctccacttcttggagtagattagtgggcagctcttgcatttccttgagggggccactgggtggctccttttcttcctgggctgggccactatctgagcccgcctgggcctcaacctgggcctcaacctgggcttcagcctgagcctccgcctgggcctccacctgggtctccgcctgggcctccgcctgggcccctgcctgggcccccgcctgggctccactgctgcctggtgtctcttcaacggtgttggatgagccctcggaggactccatttgttttgatgatggattcttaagctccatcatcgtctcaaatgagtcttcagagggttctatcatgtcgtcggttggaaaggagtgtgctctgaagactggtaagattgtgatgtgtgtggtcagagaccgcaactgtggagaccaaaacctagggacagagggataaaagacaggagaaaatgtagcaatttaggttctcaagatggcagggtcagattctatctcaaggacaaagcagatgccaagttactagaatcagagagaaaatggagaaattcctcctgcattcagttcagcctccttttctggttacttggggcacctccaggggaaagaccgtcaccccctgacctgccttccaggcggagtctgactaccccacctgcctacttcctctagtggaatgagaaattcacagcccataaattttgtggagcaactggcctggagcgtcctctgtggcgagctagcacctggcagggcacacttctggcccgctttgccctggccaggttcccttcccatttgtagtcacccaaaagtcataaaggtcacatctcaatg

SEQ ID NO: 21505 - DNA, 1128 bp, Mus musculus; identical to SEQ ID NO: 21504

SEQ ID NO: 21506 - DNA, 1281 bp, Mus musculus
ttttgctccccataaatgtttataaaatgcctactatgtgctgaaaacatgcactttcatggcttcatcctaggtcacactttgtgcatatgcaggataagaggggggtgggggagggatagtatcatttctcttgttcggtttgatctctgtccaaagccacgttttctccagctctgagctgagtcggagctttctaaacaccctttcccgggctttcaaaaaaactgttctcccaggattgcctggtctgcagggctcctgcagctttaaacatctggcctcaattctgctcatgcaaacatttctgcacgtctcacaaatgctatctttccaagtttctcctctgcttcggcaggagcagggttttcgttctcaaaagtgcccccccccccttttctgtcactgttgatttcgtctggtacaggggtatatctaacagaggtatgaagttgggtgaaagggggggcatgggacctttgaaatctgattgttccgtaatttttgaaaatctagccatggagggtttagtgcacggaaattgaatttaaagggatgtattggtttgcaaaacaaattaagctagttattcaatagctcagccatatagctattgtctttatgaattctgcaccttctgttacttctcaattttcttttttaaggtcactgggctgacctatccaaaaacagaaacacacacacatacacacacaaaaccaaataaacagaaatctcccatgttgtcattcatgtaaaactcccgttggccatcctccaaaccttgcagcaggatgcttttgggtctgcagtttctcagaattagacatctccttgttagcatgacacttaaattcgatcatgcaacccctctgattaaagcctctcactgtttatttactgtcggcaatattaaatccaaaccttttatataaacatgtctgacatgtaaacttaccaaaaaaaaaaaaaaaaaaaaaaaaaaactcctggctgaaattgaaaggccttagcataatgtccacgttgggcttctcattcctagaactggagatcacaggtcctgagcctgctgtacagaccatcagctcagaaacatgcacagcatattacataaatcaacttatttcctctttcaggaaaagtcgtctattattaaaatataaaatttgactaattcatccccaagttcatctgcgggacataaaaatctcagcaggtctccacctaaaaattgctcatggtttcaatttttaaatttgcagcaatccgattttaaag

SEQ ID NO: 21507 - DNA, 1168 bp, Mus musculus
ttggcttatatggtgtcaacagagggacaggatgggataagacagctggctgaggctccactaattataactgctcaagtatttggacagcagtggtagtgtgtaccccagtacatgcccaaactaacctttaacctttagtcctgagcatggccatacccttgccactgaccaggtaagcccctctccactgggcagaggccagcatgggacctctacccctgcttaccttggcttcaagtgtccaagtggatctccgatggtcctgctcggttcctgcctcttccttagaagctgttggggaaatatgttttcttcttagtcacagacataccatgctgttgcaactccccagcccagccccctcctgttccccaaaacaggattcctgttttcagacatctctgcccttctgtgtgtttcccgtgtgccaggcatgactggtgagaaatcatacacttgaggttttttttttttttttcactccttagaatgatctctgcatcgttgtcttgctttttaaaattgccacattggagaggaggaccatgaggcttggggtcatgccaccacctttggtgtgcctgacagtcctaatggagaccaagcaaaagcatttcaccctcagatggacactcagtgtgccttctcttcatgagggagccctttaagtctccataatgacctcttagttcccagtattggtcagcaaatgttgcctttcaagcacacagtaggtctactggtagcagtgaggcttgggtcaagggctcagggagacaggggactcctgactctcattctttctcttctaggtaacccagagataagatgctttctcccaggaagggagcagatgcctggcccaggatcacagaaaaaggtctgtggaatgttctcttaccttctaaaatattaatttagagaacttgcaaatttgcagattttcccagaatggaactaactggaactcttcattttacagctatggctcactgcccctcagggggcagggggctggtgattcctgagggagccctgcccccttccagggtgaattttcctaagtcaccatggagaaccagcagcccagaatcagtgccctgccaggcaggtaagcccatctctcttgtactttgttcttttaagggtaaggggcttcctagag

SEQ ID NO: 21508 - DNA, 1141 bp, Mus musculus
ttgttggctcccgactgggcactggggctgcttctcaaaagcctgtccctttgggctgctagccagctagagaaacctgctgcagcttccccatcacctaccggcctgcctctctgctcgggtgcctccagtagcagtgagctctctctccccagccgcttgcttgggggctcacgtactgagacgctcctctcagccctcccctgtcttttacatcagcctccgcagctccaacagcagcctgcttatgtctcggccctcaggtctttagaggaggcaagctccctctcttcagggtcctctctgtgctgtcgtcaatagcaaaacccccacccaccctgagaataaatttggggcctcttccacctgtctgggggtgcttctcctatgctctcttgccattggttactgagccttttgccctgctgttcttccagcagcccaggggagggcgtggtgctccccttaggggagggggggcagctgctctgtctctagctcttaatcagctctgagaccctctctccctctctctctctctctctctgtctctctgccccttcaccagttgctagggagaagcctctgaatgcaaagccccctgttttctatttttttttctttttcctgactgagcagtggctgcctggccagctccgtttgacctgcagaagtgggagctacaagagcagctgcagtagagccagggggctctcaagctgcacagctaagcttgactctccctctgtagccgtgaggccacacaattccctttagttttcagagtctcgggctttccctgtgaaatgaagatgagagtttttctctcaccggcttgaagtgaggactgaagcagatgagagtagcttagcctccaccagacactttataaacgctcgtggagtcgccagtgggatccaggaggagggtgacatgtaacaagtgtcataagagagacaacagtctggcttttcaaagctccatgctgcatacacgctacaacatctcctggcagagtcccctctgcaggcttaatcacacaaatcaagccagcccggaggcagctcttagcctgaggaactcacaggagatgtgggagatgtggcaggcagcagaaagccctgcagagcccacatctgca

SEQ ID NO: 21509 - DNA, 1232 bp, Mus musculus
cggtcggtcggtcagtcggcttcctgtcttcgaactgcaatcattcttatgagaaaacaaacaggaaatactttgccacacaccaatgcaatcagggtgggtgatggcagtcgggattcaagtcaccctagttgaagccctgagctgggtgggctgtctgtccagaactcacatgggaaatttcacaaagaggaaaagtctcatgatctccattggattggtgaagacaccatggcacagaaaagcaaagaagtccaatactcacagtctcccagctggtgtgaggttgggccaggatgaaacccaaggctctccgaggctccccaccacaccctgctgctgaagactgcctagcaaggctgtgccgagtggtgtgggtgggcaaaggatggattgactagttataagcacctcccagaagtccttgagatctcagctattttgtggcccaatccctttgaagggcagggtcaaaattaggtgtaggcacctacctattagcggaggcttatgaaaatgacattattaacctgatgcagagagggccctattcatctgtaattaaattataaatagagttagtggggggctagggtctctgtgtattgactgcagtctagagtgctcagaattttccagggctctggtgaacttttcgatgaaaagtgtcacctctgagcatctggggcttaaagctgggaacagagacctcctaaggcaagcccctcacactagggatgtgccctatactgacccctttatggtgggagagcccccgaccacctcctcaaacacaaacttagaccctgaccttcctctcatctcaagttgccatctgtgagagagaaatggaaactgaaccttctgagagacaatcccattcctgtgtgataagagaggggaaccaaacatccttcaaagagacagccttctcccagaaactttcctggttattgctacggttgccagacacctgtctgcttgtcagagctgtattcaacaggataactctggcaacttcccttccttcagagggagatgtggatggggatagaggagtggagaggggactcttaaaaaggagcagaaagcagagttctgcatccgatagaagttgggccacttaagatttgtgccaactcacggtgcagtggaaatggtctgaaatctttaaacagcagccaagagtctgtggcgcccccaagtgccacaagggggctgcctgggctaca

SEQ ID NO: 21510 - DNA, 1232 bp, Mus musculus; identical to SEQ ID NO: 21509

SEQ ID NO: 21511 - DNA, 1206 bp, Mus musculus
acaggatcccaggagtgggccactaaaaatgtttttttgaccaaaaggttaatttttattcgttgatgtataattgtagccttaaaaaacttctattttacctctatgtactaagatgtggtgagattcgaactaggctcatctgtgtttattgtatttaaaatgtatgaaaacactgggaagaccaaataggcaatgatgatgagattgtatctgtaatcaaagatggctgtgtctcttactctgtactgggtctgtttcaaaaagggtctgttgtttcctttgtggtcaggacatataggatcaatgtttataaaaaagaactgctttggggttgggggttttttggatagtgaatttgtacacattcattaaaatgataagaaatgataaatgaatgaatgaatttatgaatgaatgaatatgtgcttgggcctgtatgatgatcctagattaagataatctgccctgctcactaatggctttgaagcaagtgtttctacttcgtcctttttaaatatctgccttgtgttctacagaatggaggccctaatgtgaatggagactagcctgctggtagagaccttggcagtgaccgctgtgggcaatgagccatgggccaacaatgtgagtaatggctagttttgttattttgaacttgggtagttggctgatgggtgtttattgcattattaaacatgattgagtttgtaaataaaaccaaagatggccaaagccctagccagtgtggagactgtcatgaaccaagggtaattaatccaattaggcataataattaccgaattagaagtaatatagtaagctatttcgtatggggaaaatatcaaaggaaaagggaatttcttatgcttgggtgatagttcaattgttcatgtgcttgccttataagcaaatgggcctgcagttgatctggtggccatatataaaaaactggtcacggtggcattcttagagtctcagtcctaaggaggtagagacaggaagacctcttaggttctctggccagacagattaccctacatggtgtgttctaggcccatgataccgtatgtcacagatagtgcctaggggacaactttcaagtttgatctctggccttaatatgtatgtacacatacgcacctgcacagagtgagcacaccacccaaaagaagtatgcatatgcttatttgcatacacccatac

SEQ ID NO: 21512 - DNA, 1188 bp, Mus musculus
atggaattatatgtggataatgcccctttcaggacttactttgaattgaagccgtgctagatattgagagtattcaaatcactcacacgaacccattagtatgggcttttttactattcaatcttttccttctttcttcatattatattctacccatacacatgcactttatatataatacatattatatataatactttcatacactatagatacattgtattagaggatctgtatataagggagttataaataaaattacataaattactaatggaagaagccaataaataagatatgaattcctctttggctaatcatgtgtatgtgtaaaagccgtggttttatagagtgtgaattaaaagctatcagattgagggccaagctggtgttgctcctgaatttcctgaaacctgtagtttttaaaattcaaattttccaaaatttatacaaatcatgctaattgtttctaaaatgtttgtcacccttttgataaatattattgccacttactaaaattatttttaacccacagattcaatgctgtgtacctgatggatggttactgtctgagactgaggctttttgggccaggagtaaaaggacttgggtaagttcaatgcttggggtcctggtgtgttgagtgatttgtgccatgcgtgggtaggttcacctcaaaaggatgaataacatctaccaacaggcataaaagcaaaggttaggcaggaacgatggctgatggctcactcttcttattctagtactggggagactgaggcaggaggattgtttagagccgtcctgggctacatattgggatcttatctaagagagagaaagaaaacagactccaaaccaaaaccaaatagctgtagacaaaaccagacaaagcaaaacaaaacctaaaaggagcattaaaaggatgccatgattggagaagatgtgaagtgtttttagcacagatgtgacaatcacatagtgcagatattagctagctagaaattagtcattttgtggtgtttaagtccttgaaacatcatgtgcacacttaatgtgcacaattttatctttcagttataaaagcaaaccaagaacaaaatgaatcaagctgccaggtgtcagctgttggtgggtttgagattgactggttttagcctaacccaggtcctctagagataagtctggggc

SEQ ID NO: 21513 - DNA, 1726 bp, Mus musculus
agccctggctgtcctgggaactcactctgtagacctggctggcctcaaactcagaaatctgcctccctctttctaatgctacgttctcctatgctataccaataaaacctgctgcacctccaggccatgttagaccaataggcatacagacatacgtatgtgtattacacatacataggtgtattaaagtgtcccccatagacatttttggcgtggtaggaggaagagaggaccaattacataaatgaacaattttataagtatgtagtggaatagaagcaagtgtggccagcagagagaatgttttctataatgtcagacatcatttttctctcatatgtggaatctttaaaaacaaacaaacaaacaaacaaacaaacaaaaaactaaaccagaagggactcctgtatggggatgggaagaatgtgggtaatgggaacagagtattgtttgaatatttggtagacatgtttgaaaccgtcctttgaaccccagtgttagtgaaataagtacgcactgctgaatctaaccataggctcttttattcttttgaaagtttgtacttgattgcgtcctgtggatgcttgcctaccaactgactcatcctgacgtgccaaaggtcctggctttcccctgtgtgggtaagggaagaagagagttctgtgagtaatagcttcggttgtatgttcttggcttgggaagttgactcatgagtgggtgttgcttgcatttttctaaggtaaaaaaaatggttataattcataagcaaaatttataaatgccagtgttaggcagtgataggaacatcatcagactaaggcctgataattaatatgatttagcactatgaaaaatccaccaaaagaagagaagcagtttttcatttccagggttgcttactattctattctatatattattgaatgtgatttatttatgtaccttgtcactgataacacttagaggttattaatttcctgatgagaaaggatagagaacaatgacaaaagtcacttgttaattttagttgtgtagatcatggccctttgctcatccatggcaccttctttaaggccaaaagagggcaaactttagactatagagatggtaggagataagaaccctgaatgatttaaatgtggaaaacatgcacagatattggggaaaacgactactaattctgtggggaatggacacttgatagatagatgtattattcagtatttggtgctctcgggcattttgatttattaattcatcacatatatatataaacacatcaatgaataaagcagcaagcactgggagaaagtatatcaataggtatatagagcagcgagttttctaagatgtgtgaatcaaagagtttggcctaaataactcacaggtatatcagaacaagaaaccatcctggtgtaagccatgcttctaacacagctggatatattgaaagaacttggtcttagctgtccacatctgtgacttgtattataatgggacagattcaggaatgaataaagatggccaatttttaaaaagcaaagacaagaatgaaaagaaacaaatattatcattcgttgttgttatcttctgacccactgagcttcattctccacatagatcaagtctttttgaccattcccctgaaggacatgtcctgggtcatgaaccatgatgttgctatttgaattgtgttgggcagctggcggctggttttatttagaca

SEQ ID NO: 21514 - DNA, 1210 bp, Mus musculus
ggacctcgctgtgcattgttgagggtctaccttgcaacagcgatctcaggtcccctaatttacacattcgctgactggctcattatctttattctgtaggtagcttatttattcctaaattacaccctgggaatagatgcctggatatgaataaaagaaaagaatgcttgtcagaccagcacacactttgtggtttttatgatcttgcagagctgaagtctgctaatcatggaggctttttatttgttctctgggtttttcagtattaggatttgtttgatgtcattagcaatttacacatttcatcaatggtaaatatctgggccatgcactccctgaggtgggcacatgcagtctgagggagaaggcaatgttaatgtccttgttgtgactaaagaacagttcctggtggcacagtcttatctcctctaacctgaaaagccacaaaggttcttgaatctgagatgaataggggatggtcttcgtttcttcctggaacctcgttttgagatagttcactgtatttactgaaatattacaaaacttggagcgtaaaaccccaaatttgaaacatttaccgtgtcaaggatgtgagaaataggaggatcagctgtgactgttgtagtctctagatgtcctggagtggtgacccagtgatgtcatcgctcaaagtatgaagcacattgtttctttctcacagttcccacaaagccagaactcgggagtttctatgtgtgatctctcgtcagtttgcttgtgagatgtcaggtgatgtggcggtttgtctatgcgtgggtgatctgtctgcaaggttcatgttcatggctggctgctgatggggaccacaactttgccacaagagctttcttcagtgagtgtccttgggacatggtagttaatttccctagagagatctttgcagaacagagttaggtacatccttcgtaaaacacacaaaccatctccctaaagcacaaacttctccagggctctcctgctcacatggtgagccgtgatcccaggtgaatagaggtaaaccaggactttttgtgccacaggctgtggttcccccacctgcaatctcttagaggctgactaagtacctctaagttagttacctacccctaagttagttacctacccctaagttagttacctacctctaagttagttacctacccctaagttagttacctacccctgttagtta

SEQ ID NO: 21515 - DNA, 1212 bp, Mus musculus
gtattttgaatagctgctatatttttaatagtgacagggcttgggggggaattttgaatagctatatttttaatattgatagggcttatgggttaatagatcctacagtgtcttttacatggtctcagagaagccctagttcattaaaaagaaacctaactaggctctctttgaatttctaaatcttgctaagtgtatttttcttccacaaaatgctcacagacagctgacttactgagttttactaagaaacaaaatcacacacggtatagctctacacataaggaacagagaggatgttgggagtgagacaccaggttcgtggtctcccttgggatgctttgttcatgaacctttagtggtacttcaaaaggatacagctttcaaacaataagttaagctctgtaagaatggaccggtggtgaggatgtgctaggacccatttttttttttttttttttaaagattcatctaatttggtgtagtggcaaggatctttaaaaaatggcaatatcctgtaaaggagattttgcccctggaacattgtgttgtgtcctatggactaatgagttggcccgacgaggggtggaagggagatgtggaggaaggaaggtttgtctggaccggtgatgagttccacagggtatctgaaccaggatattgtgagaactgtttactgttgtttttaatttcctaccacattgatttgaagatttgcctatcagtgtggccctggctgataaggagggcgtcacaagtggtagaagatgctggcgtcattatcttccatcagatgtctttagacaagggcagattcacttagtgcaaggtccagcagagcagcagtcaaagcagacagagatgagctctgggtgctggtgaaggtctctcttccccgagctccttggttaaggaagatggatgccttcagtaaagggagagtttggtccctggagtattgtgttgtgtcctatggaataatgatttaacacgagaggagagatggaggaaggcttttctggatcagtgaggagaacttgggggatctgaactaagatattgtaactaaacccatgtatgtctctgaggtcttttacaactctcccttctttagggaacactttgtggggctgtgtcctaggctgatagacatgtggatacattggtttctttatttctatactagcagtgaggtgggtggtggcagagccc

SEQ ID NO: 21516 - DNA, 1158 bp, Mus musculus
atagaaattatctttgtgtagaagtctgaaaaacttagccaacttgcccctgggctttttggctcagtggtatgtaatcttttatttcaagagtattagtatataaataggaaataggtacataaaataatgaagacacattgatttgtgcaataggtagtgcaagaagccaaagataactcatgctattgcctactaaaaagcaagtgtgcttgttaattccaagtaacataggatagagtctgcaaccctctttcatattgagtatattagtagctgtacttaatagagttgcttgggtgtttgttggtcattaagaaaagcaaagtgcacaagctagccatgtgttaactatccacctgcttgacagatggttgtaaatgctgtaagacttactcttggacattcaccacattgaaaatcagaactttgatattaactctaaactttattattacatagttctgcttgacccactaaattctaaatcttctcttccctcttgtgctgaatgtaggacccctgatttaattatttactgtggaaccattgtcctgagtcaggaggatagatgaggaaaggtaaggctcttagttcatggcctctgtctggagtcttgtttatggctgctagctgatcattttcaaaatcagtaatggtcacctacctaaaacagttaacttacaaaatcatgtttaatccaagttgccctaatagacatgattttaaaagaaaaaagcagttatataacttgtccccagaactttagtgttaccttttgcattgtggttgagctctgctccccaacagtagttctttgggaaggcccccatataaatgctagctcacgagtctatgaggatttctgaggtggaagatgggatgggagcttcattatgtttgatggagccaaatttgacatctggatgaattaaacaaaagtgaaccacacaaaaattagatgtggattggatccaaaacagagacactagtgtgccttggagcatgtgccctaatggaagcaatgtggtctggatatcccgagaagagagccccaacccaaagatcttgttttagggactgtgtattgttaactgtgaatcaatcagtcaatgaatgacgcaaacacccagcataggccaatgatgaggagcatgg

SEQ ID NO: 21517 - DNA, 1187 bp, Mus musculus
tgtgcaagttagacaggggctgggcggtcatcttctgaggactgtctgccacagttgtcatgctcacatgtgaacatacatccacatgcatgtgcaagtgcacatataaacacacaccccggaaaattaagcttaggccataacagagattataccatatggtaaacctgtcacctccaattttgaatttcaaagtcccacctaaaagacaaccttgctcttaatgtatgttgggaacaaacaccagatgttcctaataattagagttatttttcttcttcttactgctgggttcagtggtgttcattacattatttaaaataaaacgtatgcaggttcataaatataaagtgctgttctcgcttagaccccatgaggtaataaatataaaggagttgctgccttcccaagtgttccgagcggaacgcaaacctaagcttatggctaattgatcacccccaactgcagttccccccaaaactaaatgacaccaattcatttgaatgtttgccttttactctccagaatgagagcgtggctggcatcgcttcatgattacattctgggaaagatcttgcctgttaacctctagagaaggagggacgatacagacgtaagtgggcatcaaacttcatgacctttgtgagagaggggcaccatcatgcccatcgaatgattcttgaggaacagattcaaagtggtcatgagctgaccattgatgagaatgttgtgtgagttaatgttgtgtgagttagtaaggagtgatccacttcagtcccaacaaattgctctcgaccaaaaagtgtatttcaaccatttctagaacgtttttacgtgatttgggtcataatacatgtggatacttcatcattgtattgccttcctggtcccctcccagagaggagaatatagtgaaacaatgaatcttctcatcatatggtagtccattgtgccatctttatatagatattaagtgagagaagtggtgtgattgacagtgattgatagcatgcacagatctggattcagtcagatttcccatgttgaggctcacagcagaaaggccagactttagctctgtgggatatgcactgtcaagatgtatctgtatttccaagtattgttcctcccttaattcatggatattgattacattattattgaatcgatgaataagtcaagactag

SEQ ID NO: 21518 - DNA, 1158 bp, Mus musculus
ttgagtcccttctgaggctgtgtgtgtttagttagtagtaggatcacaagttcagggccaacctgagctacataatcaatacttggtctctgcccctcctttcacttaaaggaaaacaatacatccagaatgttttgtctttatattcaggtttcattttcttttctatttttatgatttacttctctttttttggataaatgtgtgctaattatacattctggaggaatatactgtaaattcattcatttctttcaaaactagtcaattggaaaagggattcttgtgcctctaatgagacccttagacaggcaggcacactcttgatcagtcctgtttccaagtgatgaattgaacttgattcattttatcttttcaaagtcacagttagacaaatgaaaaggtggcctattgttgggtcagtgaaaaaaatgggaattgtcgtcatgaatattttagagttaaactaatgctgtttaaagtgatctaaatagctcactgttttaaaacctggcatttgacaccatagaatgaagactatagcagactgaattactctctgagatgaggactttgctattgccattgcaggtaagatgttttatgactccataatcagcaaagaatcctgtcagtaaggtctgatttcttcgcagtgttcattggatcttttaagtctacaaaccaatgatacaaatgcaatatgaaacaattgctaggaagctaattggcatattttactcacagcccattttattttcgcacagcagtgtacttaagttttctacttaataatctcagtctgcatgtccaatatggctgccaccatacacacatggctgcttatatataaagtaattactgtgaagtgaattgtaaaattcaatttctctgttgcagtgctcacactgcaagttctcagtagctacctgagcctttggggcactgtgttaggatcaggtttctattattctgcaaagagctattggacagctcttcacagagaaggctgcacacaggaagagggaagagagacagatgtgactgctttgaggcaggcatgcgaattgatccatccatggttcactgaaggcccctggaaagagaatcaggaagagaactcagcaatgagaaaagaaagaaactgtaaggagaccc

SEQ ID NO: 21519 - DNA, 1952 bp, Mus musculus
tgactccagaaaaggcaggccttttgcaatggtgactgcatctatttacttagacaaccttccagttgtaggaacaaaccatcccatatgcaaccagacagctccattctgttttcaccggccctgtgagatctacacactcagttctgggtgagaagacacaggtgggtccttgggacttggtggtcagtcagctgagcttaagagacaagctgcaggccaatgaaagatcacatctcctgagaaacacatgaagttgacatctgacccccccccccacacacacacatgcagacattttcatacttatggaaaatttgcaaagattttattgtgaagtaatgcaacattcatgacataaataatttttaagtgacagttgatttatcttccactgtcatgctaagactttagagttctgtccaatatacaagctcatgctaaagtctcagtggatttagtaagacttatatgactatatagaaagtgcattcattctcataacctgtgttttcccccccagaatggactcacaattgctgatgtataggttctaatgttttctattgtggacacgggacacccagactgaggttcgtggatttttgaaatttctaataataagataaatttgtgacttaattttgagtggatgaacttgatttgttgtggttatattgttcagttagtatgtaagtaaatatacaaataaatgaaaaaggggttggccaactatcaatgtatagagcacattgatagcaaagttgtttacataacttacacttttagtccttaaataccatacgaattgagcatgttttatctctccttctgagatcattaaatgggtcattaaatatagggactataagcaactgtcaatattgattagggtagttcaatgttaacattgttgatttttgaagctttattatgaacttggaagcaaaggcgccacacactgaaattaaggagatccaaagacttactttgataatagaaaattcatagcgattatcataggttcatatgatatcacattaattgttatgcaaaacttattcttgtgagttctcaaaggtagttatcctctctattcatcccacagaaccaatggctccagtctgatttaaacatgggtccgtgctcacacactcaatacctaccctctgtgctcacaagtcctgtgtgagtaagactccaaattattctgtcttgttttactcaatggtatgctctaccttattatagagtataccatgtattgagacaagaatgccagtcattctgagaaacaaaatgcaaccattagttgtcattttaattagtgacgaatagttgtgtcaatcatcaaacatgcttgtataattggatgagaagaggtgtaacacgggccaatgatgacgaggtttcgggattataagtcacggacgatgactacgtcactagaggtctgaggtccatagcagaagatgcctcatgtgaccctctcatgcaggggttgcatgtcaggcatgtgcatacagtagatattagccatgcactctcaccatttcatagtagatcacagaatcaagatacaaatctccatgcacggaaaggatttaaggcattgatcaatcctgaacataaatatttggccatcaatgatatttacgcacacactgaaaaatctattcagaatgacttacacaaaggtttatataacctttatcaaaggtaatttatatagtaagattcatggctgaagtcttcatgatggtcaaggccttaatttttaaaattatcaatttttttcttttctttttttttaacttgaatttttttttaatgaaaactatcatgacaatttgtctcttaaatgaaaggagaaatgtaaaactaaatggacaaatatcaacctttttattatctttgctgttgtgccctccctggatgggtgctggcacatg

SEQ ID NO: 21520 - DNA, 2999 bp, Mus musculus
gctcagtggataaaagaacttactgttcttgtagaagacccacagtgggctgaatcgcccatgtgacagcctgtaactctagttcttatgtatctggtaccatcatctggtctctttaccacatacatgtgtcacaaatacaaaatgcagattaaaaaaatcattaaatagataaaaataaaataaatatttgagaaaataattccacatgagttattaaaattagttataccatcattatattaaaaaatacagtaatttatgaaaacaggatgactgaggagtagacaggaaagaaaactgtaagaaccttcttagtatggttcagagctatatgtctagtgttttacatcataatagaacatatagtagtgtcacacatacagatgtttgagaagaggtgcgaggcaagtacacagatcatctgaacaaaggaacaaaataccaattttcttttgttgatctcttctgttttgaactctcagaatgcattcttccaccaagatgatttacacagcctagctggatcaggagccccctaataagctgcttcagattgtaatatagacacagtgtaagtacagtccatattctgctgtcgcttcatgttgcatttaaaggccatttactgtattgataagggcactatctgttttaggaagaacagtcaagtaaaggctgcgtatggcatgtgtttgacgcacaaggtttaatgaagttgtttcaaattaaggatatgtattgaaaactgcttcataactcaaaaagaaactgaggaactctgaagtttactggaatctcttgtctttagttttttggtgtttttttggtggtttttttgtttttgtttttgttttttttttttgtgaatcacaatgatcccagtagtacttgtaatcgtttgcacactaaagatgcctacgtgagtagagaagcagagactgatgttggatcaatgatgactgtgggtgctgtatgagtcgtgtattatgactatgcgtctgagagtctgaggttcacatcgtaatatatgtagagcatcctatgatcttagtgacagatgttaggagtagtctacatttacatgtagataaaatggtgatacatttggaaatcatttctaataagacataattccatagcaataatgttaagcacatagactaaatagtgtttcattcagatatgataactgggggttccccatgagtgatctaaaattgttagcaaagttcttgctcacctcagagccatgcccatttgatctgtaatgcagagatagtaatagaataatgaagacctcatgagggatatggtggagaatgacccagagaagcagacggaatgcagttacctaaacagaatcttaacctttttataatttttctgctttttgctctcagaatgtatgcctgcaggatgagtcccaccttcttcattagtcttgaggtttgagattccctgtttgtgtctgcaggattcagatagtgtgagtatagtctgtgttcttgtgttggaattcttttgcttgcataaaaacagggtagaaaatatttctggggctggtgagatggctcagaggttgagagcactgactgttctccctgatgtcctgagttcaattcccagcaaccccatggtggctcacaaccatctgtaagggctctgatgcactcttctggtgtgtctgatgacagcagcagtgtactcctgttcctaaaataaataattattttaaatacattattatctctgaagagcagatgtagccataggcatataagatgtatatgaagcacaatgtttaataaaattttaccaaattaagattgtgcaacaatagagataggcatcagtgcagaagatcccgtagaggtttaactgcactcacggatcttatagttagggcttgtctccagtggagattttcgcaatggtcctagtcatccattgctcaataattttacatagattagtagggaagaggaggactgatgttggatcaatgatgaatgtctgtgagcattcttagagtcatgaatcatgacgacaaatttaattctgagatcaacatcataaagtatccagtgacagctataagaagtagtcttcttttataagtcagtaaatgtaaataaaaattgactaggaagtcatttaatcaaaaggcagctcacaaagaagactacatatatgtatatatgtatatatgtaagaagaaagtgtgacagagtaatgaccatggaggtgagggataagatgaaatgagcagaagcaggcagaatacatagataagcgaacggaacatcaatctctttataacctcttctgtctatacttcaagaatggatatcctgcaagtcggcttcgtagagtctcccttgaaagtggacctcatgatctagcctttatgtccgtggattgacactgtgtgagtatcatcagcgtgtgtgccattgtttatggtacttacagatggccctataagctagaagagaaatcttgagaaaatgataaacatggctattgtgtgtagtacattgttaattttcccaaatttaacaacaaattaattttgccaaatttagtgcatataaataaatactcagtttgacaaaaggtcctttagagatctaagtctcactcaaggatcttgctgtttgagatttgtgagtcataattatctgcatagtgtctttaattactcaaaaaaaaaaaccacatacaaattaatagaaaagaggagggtgcatgttggatcaatgatgaccagcggtagccgtatgattcatggatcatgactacagatctgggagtctgagttccacatctcaataggacatcatcccccaagcactgttaccgttatgagtgctagtctatttatataattagtttaaaacatagatataaatttgtagcatatactccacttaagatgttacttcttaggaaaagttttaaggatatatcccaaggcatgactgaggataccgtat

SEQ ID NO: 21521 - DNA, 2999 bp, Mus musculus; identical to SEQ ID NO: 21520

SEQ ID NO: 21522 - DNA, 2999 bp, Mus musculus; identical to SEQ ID NO: 21520

SEQ ID NO: 21523 - DNA, 2999 bp, Mus musculus; identical to SEQ ID NO: 21520

SEQ ID NO: 21524 - DNA, 1146 bp, Mus musculus
gagcggaagatgatcgtggattaatgatggccgctagtgctgcatgcatagtggattgtgactataagtctgggaagctgatattcacatccttaaatactgaatatatacccatcattctagtgacaagctgagtagtttacttttataataaaaagtattagtgactactaataaattatatttagataaattagaaaaaaatataaaaattggaatttatgttttaatcaagtatagtaaatgtatacatttactatacttacattacaaacagtaattcatttgaatttgatatatgagaatttcatactacatccaaaagactataggcaatggtcttggtagggtcagtgccatgctttctttttaaaaagagcacactgtagcatattgtatccagagaggagtaataaagagtggggttatttacagtaggcacaaagtgaatatcagtctttttattttctcttctgctttgtatttagaatggatacccctaagctgatgtatatacacccttcctcggttgtgagattcctgctctggtggttgtagtcataagatatacatcgttgcgtacaccttggttgtgggcacgcacactactgttgaattaccaccttgtccaagtggtaagtaagcctctgcctcagatgtttaacgagatttttgccatgtaggcaacatataattaaaccattactataggataaaagagcccgtggctgttggtcatatactcagtgatgttttccttagatgtttttgtgatgcatgatcacttgataacgatatagatattaaaagagatagaggggtctgatgttggatctgtgatgacaaagggtggcgtatgagttgtggatcatgagtacatgtctggaagtctgagattcacatcatgaaagatctaatatatcctcatgaccttagggacagatgttaggaacaacctatttttacaagtaaattggctcatggtataaacacagtaaatagtttcttccagtcaagacatccttctacagcaagagtcctactaatgtaaaccaaacagagtcacacattcatacttgctgacattggatgacacatcaagtaaaatcaatggcaataattttgccatggttagagactagttac

SEQ ID NO: 21525 - DNA, 1146 bp, Mus musculus; identical to SEQ ID NO: 21524

SEQ ID NO: 21526 - DNA, 1212 bp, Mus musculus
tttaccaaatttaagaatgtatatgagatgctgaagaagacaaaagattctataaaggtgtgaagttccctaagaattttgttcttggatttttgtgaatcataattatttcaataatgctggaaatatattgcttgataaacatttattaattaatagagggcggttgatttttgatttataatgaccagtgtttgtagaattctgagtccgcagcatagcatgtagcttatgaccatgcacatgaccgtggcagcagacttgtatgatcttccccctctactaattaaggactaattccgcagcaagagtcatcgcaatatataccaaaccaaagtcacatttatttgatagcattattcaggatgccatataaacaataatgctcattgtgtaagagaaccatggccaaatattttgtccagacatgtacaagtataaagcagacttagctgagagctagagaaaaagacgctaaatacacagacagaactcatggatgagtaaacacaatttcagtctctataatctcatctgctttgtactctcaggatggatgccctcaatgggattggcactttctccattgctcctgcactctgttatcagcacttcgggttcataatgtacacacagcgtgagtatagtcaaccttgtgttgatttggggtgctcagaaatgctcacactgtgttgataaagccggcttatcatttgagatgagaagccattgccaatgactaatatgccatgtgacttaagatagtgtttaacagttttttttgtcaaattaagagttagttattttccagtgaaaagtattttgataaagcttttcattttataaatatactgagttaataccccatccaaaaataagagagtaacaaaatctatactcagcatggcaatatcttgaataatatcttgaatacgtatttttaagggccttattcttaaatctttgtgattcctaatcatttccatagcagtagtgatcactgcttaacaaagatgcagacattaatagaggagaggaggctgatgttggatctatgatgacctctggtgccgtatgagtcggggatcatgatcacaggtctgggagtctgaggtccacatcttaaaatatctagaatatgccgatcatctctgtgccaaatgctaaaactaatttatttctagaattagataaaatatcaataaaaataaa

SEQ ID NO: 21527 - DNA, 1212 bp, Mus musculus; identical to SEQ ID NO: 21526

SEQ ID NO: 21528 - DNA, 1734 bp, Mus musculus
accaattcagggtaacttggggaaaagggccgttgatagttcagtggtagagcccttgtcttggatccgtgaagcgctgggttctatcctcagtatcacaaaatcaaagaaataaaaagataatatctaggaatgttagtttttttggacagtgatttaaaaaggcagtacatggtgtactaattatgaatatgaatatatgaatgattaatcaatcaatcataaccataatcagcacacataccgtatttattttggtttggaaacctaatatacctctgaacaatagagaaaattgaggcatgtccactgagagcactgtatcagattttcaaacctccttttcactttgttcccttacttaccgatgtgccaaagatggtggtggctgcctctgtgtttgtctcattgagattagattagtaatgtctcatttgcctgaataggcaatttctaaaagtatctatcccctcttaccttggaacactcagtcctaactgagatgtctccatcaaatcccttccttcagggctcagggaacccagtggaagaggaggtggagtgtgagagccaattggaatggaagacagtgaggaaacaaggccttcgagacacaagaggactgctgagctcacaaagactgaggcagcaccctcaggacctgcacaggtctaagcttgatgcgatctgagtactgagagggcaactggacacaattctatattgataacccagaagctttctccagttgataaactctttcaaaggaaaaacttgttttctaccatggagtgacactggatatagaaactaccgttaacagcagactccatggctcagacttccaatacaatatgaactcagttgcaattttttgcaaggtttttcgactcatagttctttgtctgggtactttttcaccctacagagaatttctgtatatattatcgtttctgattctagtgttttgaattttcgctgggtctaaatatctctgtctcagtgtcagtatgtgtttctcatgatttttctttgcttctctttttcctattctttgcttgtattccctggtttgtgtttgagtgtctgggaactctgagggtctggttggtgatattgttgttcttcctatggggttgaaaaccccttcagctccttcagcctttcactaagtcctccattattatgattcctatgctcagtccagtggttggatgtgagcccccccccccctctgcatttgtcaggctccggcagagcctctaaggagatagctatattaggctcttgtcagctttgtttgtttttattctgtcttctctatactgtttattttagataactgtgtttattctaatgtatgaatgaataaatgggtgtgtgtttgggtgggtggggaattggggagggtgggggtggatgtgggaggggaaactgtaacacaaatacattgtataaaagtacattttaataaatgtatttcttctatgactaaaaaaagtgtgaagtacaattattgaaagtgagtagaaggatcaatggaaaatataaatgaacccatgggtgagtgggtacttgcctcgttgtatcaccctgagatctaacagggatgtctgtgtgggatggggatggatttgactgacccatgttgtatgcatgtgtgagtatttaataacattttcaaagagaggtagcactaatgatcgtactatcaaaataaaacaaggcaatagt

SEQ ID NO: 21529 - DNA, 1102 bp, Mus musculus
cacaaggccaattgggaaaaaagatgaatatggaattagcctgaaatattacatttataaattcattgatggtaattggataacatgatatgagtatcatagatgatcctaaaggcatgaagaatattcatcactcttaggtttcatgaatcattgtttttaaaattagatccattgaatgaattacttgtttaataaacacatgtaaatgagtgtaaatggtaggggtcccaaccaggaccaatgtgggcagtacagggctaatgagatatgaagcatgttatatgtctgacatgcggacacccatttatatacattaaagtgtatattttaccacaaaatatatataatccaagtgtcttctttctttaagaaaggcacaagaccagttgagctcattttccttacagacaattcagttgttccccacctcacatgttatgtgcatgacagggaagtaagaggtagtttgatagcttagtgaagccttcctatcattttgtattaattgtttagtataggtagcatgatgcctagtcaaagatttatctaagacaacaagtaaagacattgaggtttcttgcttctaggtttgtaaccattgtggtggttgtattgttattaatgaattagtaaactgaatagtgatcacgtgaagggagaggcatgacacagacccctccgactcagtaaagatgaatagttcatgtgtgggactgtaacatgtgtacatgatcatgtagacagccttcaggaaaatacaaggactttattctcacttttttgttcatgaaaaaaaattatttttaaaaggaataatatttaaaattaatcctttgaaaacattgtacatgtatataatatatctagttcatatctaccgccaacacctctctctagttttccctctgccctttcaacacaacttcatgtcttttcttttaaaaaggtgccctttttaaaagtataactcatgtaatctaattagtgttgtgtgtctatgcatgggcttggaggcattcactggggcatggactgcctaccagtgattatatattcccctcaccccccagacttctttagcagaaagtagctgctgttg

SEQ ID NO: 21530 - DNA, 1459 bp, Mus musculus
cttaatggcagatttccctctggtctctctctgtcgggatcccggaggatgatgtaagtaatatttctaattccttctttggtttgggtggtttatttagggagaatgcactgtatttttacagttttaggatgcagacaaactgaagccatttttacatttcagatgaaactgaatacgtaatactgatcactattatgcataaagagctaaagacatattttgacccagacattattctggattataaccagccatgaccttgttggtttttgttttctttttttttttttcaatcatgggcttttagaaacattattagttactgaatagattggctaacacagaggataaaaataagtgacggggtattgggtctccctgagagacaaatgtcagggctgaatgccatgtgaggtccaacaggatgggtatgctagtgagcaaggattagaggaggtgagtgtagtttttcagcctctgctctcatctctactcttcagaatggaggttttagagagaatggaatcttctctggtcctctccttggtgttcacatccctcttcttcattgtgaacaatagttaagtttttgggtttttttttttttttttggtttgtttgtttgtttttctgtattttcccacaggttgatagaaacatttagtcattattccatacatgaagaaatgagcactgtcaccaaaagatgtagtggttgacaggtttaatcttttggggaccttcatgcatatcatttttctattatgtagtttatataattttctctcttaatgaaacaattcacaaagccagaatgtattgtgaatggagatacatgcagcacctgatgcccccggattgctgtggcatgtgaggcatgtatgttgaatatcatatgtctagaactctgatctaaaacgaatgggcaggtccttatttaaatttgggtcctgtgttcaagtatccatttcaaggatctcatttaatatctttgttttcctttctgtaaatattattgtaaaagaataaaggcagtttgaataaacgtatgcatagagatgacaaaggtaaaaaatttgctcattatcaaaatacacaactaggatataagtattaggatttctaatgaagtctctctatacagaccaggctgccctcaaactctcagccctgctgtgtagttcagtcaaatgctagacttttattcattagtcaccaaaccttttacaagagaaattgttctgcactaaagatgatgcagacaagtcattgtcaatcattaaactgtatcaattataaatgtaaagctcattaagaagaggatggctagataggcttgcagtgattctgcagaaggtgacggtaatgtcatagtaatatgagtggatgcagacaccctcgccacctccctctttgtcctcctcagatggaggtgttaagctgagctgggaactcc

SEQ ID NO: 21531 - DNA, 1150 bp, Mus musculus
aaacattacatcctatagccgaagtttacgttctggagtacataaggaatcattcatattatttagtcatgagttagatatatggctctgtaagtcaaagctgaaagctgttgctcttttatctgcttttaaaagtcatttaacaaatgctttgttttgttttgtttgttgttccccacatcgcgcctctgagagctgactgcaggatttcctatgtttaatgactgcctcaaggtaaacatgggtaaaagccatacattttgtcgatgttttggttattatggctgtaactttacaaagcatgaaatagaatcctacaggtctactcttactttgtcttttggggtgaagatgggcttgtgtcctgagtaaatacgatgtctgaagatggttcatagcactttcttcatagcgctgtgaatactacagtctgaatatatcagagagctgtgctcctgttgaatatttgtgtatcaccagcattgctagtgaattattggcttagccagtaaatagtatctatgagaacgaggaaaggtcaagccatttctggaccaatgatgatagttaccaaggtatgagagagatgacgaataacacttgtctgaagctcagaggtccaacccaaaagataggtagataatcaaaggtccttgaaggacaatggcattttttttttcttttgtgctctgttttgtactcctcagaatgtgtgctcctaggctgatgtctgcattttctatgatcagcagtggaacatttgcacctctgcattgaacatggggcagtgtgagtactagttacttactatccctgctttttatgcagtctgttgaaatttggttacttcattatttaaaaatatctaagagagctggtaaggtagagagagagagaacagattcctagatattaagcccttgtctccatgcacatgcccttggcatgcatgttcataaacacaagtgaatatattcattgaaaataagttttaactatggttgtattaattcagccaaatacaaccagtgatgcctatggattttagttgaaataggacaatgagttggctatgtttgatgctcttcggctcctcattgaaggagagagacacttggaggtaaactggatctttagaggagtgtctttc

SEQ ID NO: 21532 - DNA, 1897 bp, Mus musculus
tagtcagctcaaatactccatgagttttattttctggtactcagtatctgagaatggtaaaatatttgatataaaagtatccatttctactaatagctattgccttttatcctcgtcagccttgtgtcaaatatggagttcatagaggaagctgaccctggaactctatgggaatagataaaaccatttagcaggacaagtgcatgtgtggcccagaaataaggagttggtgctctctgctcaatttgaacttttggatgctttatgagaggttttgctactatgctgtgaggtctttcacaacttcagcttactgccaggagcccatgacgtcatgaaaacatggaggtcactgccaggcgcaggccagtaatgcactaatgactaagttacacagcgaatcactacatggggagtctgtgagtggatgcatgagaaagcaggccagcatggcagaagtgagcgatgaaagacaaagcttttgagtgaatgacaaacataccagtgggtcagccttgaagaagtgaatgtgtactcttgagtgtatcagtcattctgtgaattcctgaatggttttatgaatggatggataagtagatcttcatttctaataaaggaataaaggaagtaatgagtcagcatttgggtccgttcatgagaggagccactgttggcccagatgaatggatgaattaatgaatggataaatgacctattgacggatgcttgatggactgaaaaaaaaatgaaaggaaggaaatcactattacaactgcatgtgtaactgaacgaaatgataagtgaataagtgaatgaaaggccaataggcagacgaatgagcatcacataattaaggaataaaagaattgattaggtagcaaatctgtcagcaagtctacaattaaagagtaaattgtattcttgtgaatgagtggctgaactagtgaatgagttggtgtatgaatgagtgagtcagctgtctgggtgtgagacagtgaatgaactcacagctactcctcctctgttccaaggagagtggccacacccagctccacactagttgtaaatacttgagctccctaccctctctatcatggggatttgtttacatgtcagcactaaactgaagagtcttgagggccaggaactgggtcaaattcttctctctgtccttagcccctgcccagcctcgagcctggtaggcgcccagtaaattattgctgaatgaatgagcaaatgactaaaaatacatgtgcttttgtggaaccagtatggcctggtagctgctctttggaggagtgtgctgtatgtcagatggtccgtggcatcctccctgcaagaccagactcttgccagggccaggcttcccatgccagataatgagacaggatactggcagttcttactgcccgggacactggcccatccttgggtaactctggcttggcatggtggaatggaagccctgggtcttcccgaaagctatcctagcctctgccaaaatgggagatcaaaaataaccaaagcttgtttttatgcctctgctgagtgggcgcatgacatgcctttccaagcaaaccaaattcctctgacttccaattgtgggactgtgagtttaaggagaagcactggcccctattatgcctcagctacaggacaatgctatcttcccgaaggattcatgatttctgcaggagcttggtataggatatgtgtggttttcttgtgtgcagtatgacacctgggaaaggagatacccttagaaaattaaaaagtactgttctgttccctatccacccatggggctatatttatttggtcagttcagttgtgtttttttgaatctatgaaccaagttccaagagggataacacatatggtgcgcctatccagacaa

SEQ ID NO: 21533 - DNA, 1112 bp, Mus musculus
gagaacggagccagccactttggcattagttagacatgtgtaatcgcgtgttgagaatctacagagactgagaatctgcacatgagggcaaagctcaagcctgtgaccatgtgtcaaagtggattcttaggggaggggagtacctgggggaacagaagaagagagatggatgagagcctgagccagggagatgagaaaagccagactggatggagatgtttcagaccaagctggctcaagggtgtagggctataggcagaaagctcagctctccaggcactcttgagaatctggcttcgtcatttggcgttcgctcttcctttcatcttacactgtggcatgcatgtgtactctgtgcttagcacaggattgcagatctgaggaccatagatgcactttctgtccctaaaacaagaggaagatgccggtgacttttcctctaatgctttctgaacagggacttcctacctcagcctcatcccattgttcctttgtttcttggagtactttgtgcctcccccaccccaatggcatggggctctgagcttccaccccaccctctatctcttctagaatcttacacacttctccattctgttgtcaactacccttcacttcttacagtactctagtgagttccttcatccttagatctttcaacaacctgtttcagctcccttccctcttggcagctttgcagaactcacatatttggctccctgccaccattcccattaaatggacccctgtgcatgggagcagcctctcttctgaacgctcacctgtgcctaaggctccacccactgtgaagttaatctcaacctgactctactgcctgtagcaagccggccgcccaaatgcccccctccaccagccctatgtgtctctgtctctctgtgtctctgtctctctgtgtctctctgtctcccccccccccccgtgtgcgtgtgcgtgcgtgcgtgcgtgcgtgcgtgcgtgcgtgcgtgtgtgtgtgtgtgtgtgtgtgtgcgcgcgcgcgcgtgggtgcatgtatgcatttctctgaacacttacttaattaccacctgccaccccacacctacactgggataccctggtttttcctcctggga

SEQ ID NO: 21534 - DNA, 1981 bp, Mus musculus
acctttttttcagtatcaaatcccatcttggaggcttcgtggtccagatcccagtctcagggaaggatggtcctgtcagcatccagccaggggacaggaataactggttctccacaaagccagcgagtggattatcgttctgaatggtgtcctttgtcctctaaaccctcccaggcctgccaggtctgaaggtccagtttgggaaggtgtcattgttattgttaactgaggatgtggaagaggggtttctgtgtttgaaacacatttggtcaacctctcttcccatcagaacaaactatggaggccttctggtccatacctcagcctcagctgaggacacactaatagttatgaacaagtgagtgacggacaaaacccatcccatacatcagatttctgttgcctgtgcttctaaccttcagtatcttgtccattctcaggaggacttctcaaccaatatggtgttccaaagttggggaagatggcagccaccgaggcaactctaccccaggtcatcacaggtaggttgcacccactttgcttctaacaggttagacacagccacccccacacatgtccagcatgctttggaggcacggtgatgggcttttaatcagccaacccctgctataggactgtctattgtagagaacacccactgtgtcagatggtacctagatccatgctattcacacacacccacatccttgtaataagagacttggaatcagcagtgttctagcagtaggaaagcaaacctgaaattggcacacacatttgcccagtgagctttaagatatgaaatctggagcggggcagtggtggcgcacgcctttaatcccagcacttgggaggcagaggcaggtggatttctgagttcgaggccagcttggtctacagaatgagttccaggacagccagggctatacagagaaaccctgtctcgaaaaaaaccaaaccaaccaaccaaccaaacaaacaaacaaataaacaaaagatgtgaaatctgttcttagtccttaactccacccagggttgtggtcagcagtagagctttctgtggggttccaggtagaacacaattctcatctgcaaatcatgagcccttttcataggcatttcatatcagatatctacattatgatttataacagtagcaaaatcacagttatgaagtaacattgaaaataattttacagttggggattacccaacatgaggaagtatattaaagggtcacagcactaggaaggttgagaaccactcgaccagggggtggaactgcctgcccctgcctgctgcttctttatactaccacatgtgctggcacacatttaccttcctactaactttataatgtgtctgcttttagaatcttaccttccctggaaactacccagactcacaaccagagggctgggtcgcttctcatcacccacctacctcttggaaccagaatccgaggctcattcctgaacacccccaatgtactgtacttgttgaagttgagagctactattcccctgttatctcctgaggcacaatttctggggtccctggttcccttcagtgaccccccctaaacctggagagataaggaatgcaggtggtctgtgttgttggtaaatagtctcaggcaattctgtggactgtcaaattgcacaggggttttggttgctctccagggcccacagaagcagacacttctgacaaggcacctggcactttccagctgcctttgtttgctttctgaccagtgctaattgatacttgaaggagaggttgtccgtgttgtcttctctttatttatgatgaaacatacacgggaaacctcttttttagtatcaaatcccaccctgggggcactccctgtccctgatgacgccttcagggaagggacctggactgctgttccctggactctgggacatgggacatgggagtatggcatcaggactcagccctggaaggaaagtcattt

SEQ ID NO: 21535 - DNA, 1981 bp, Mus musculus; identical to SEQ ID NO: 21534

SEQ ID NO: 21536 - DNA, 1149 bp, Mus musculus
tttcctttgtggttcagatatattgctgtagtgttgtaaccttccagtaacggtaacacacactaatcaatgcgttttgttttcagggaagggtcggtcatatgtcccgttcaggacagccgcaagatgatgaacggacattgcatccccagacatctcacacgctcagaatcctggagcctcccatttcaacctgttcttctgcttcccagtaccctgtgagctctttgttgtatttgtctacatcgtaagtcacttctgggtgcgggagaggggggacctcagagggcatcatccaggcactcacacagctggtttaggctgccctggattttgccacctagttctttgactttttttttttttctcagcttcagaagaggatcctggaactgagagaggagattctgtcttggagtttggcaccatcccatttcccccgagtgacacttcagaatgactggcaaggatggtaggcaacatctcagaatcttcagtcttcgtcccaggtcttcctgagatcctgaggtagagggggtttgggctggattgctatggcagtgatgagtactgagccactccccttgcctcaggacccccatccctgtccccctcccggccaagtatctgcctcacccaccatcccttccttccgcctgtccctcagcatcccttcacactcaggcacactgctggaacaagcaagagctcagccgtggtacctgaaaagaagttgcccatgttatttttcgcttttatttgtgacgaaacaaacatggtgcacttctttttcgatatcaaatctcaccttggagagctccccatggaccagagggaggacgggaggccagggggtttgggtcaccatgtgcacaggggcatttacctcaaagaagcacaatttcacctgcccctcttggctctgtgcattgttaggtccagaatgcccacctcctgggacaggcacagtcagtaagggaaaccaggaagcgcacttttaggctctgttgtaggatggagttcagataagagaagcccagaaaattataaaatccaaacaatagcaatttaatcaaacagccaatacaagccaaaccaccaattccttctggagacatgtgtctagatgtcagctgcaggtgtctttac

SEQ ID NO: 21537 - DNA, 1180 bp, Mus musculus
caattctcctaacatttgctcctcaatccattcttaggaagacttgctgcatggtggatggcccagagacggcggggctcacagatggtcacgtttagtgcttgcagattggtaatgcctgtgcccttggctttgtttattctggtcaaccagttgtcagtgctgccatcgagggctttctggacagcatggcaccttccgtaaggagaccttggcttcagtagctagtccaggtatgtacaatgacagtcacacactcgcattatgatgtatagcggtgctgtgcttcctgacaagaacctaaccactgatgaaagggttgtgatatttgggagggtgctggtatcatttccagaccatcatgggagggagagaatcatgcagcagataatgtgtgtctcctgctttgggtgagccctactccttgatgatttgaataagtctgtggagtcaggcgagtgtaagggtgttctggtgttaccctggtagaaacacgagtatcagctggcacgtaattggtcactcttcctgcttttgctccagagatgattccttgaccgacacatcttgctgacaaatgtcgggctgtcttgcttcatagtgggaagttcactgggaactacctgggttttgtttctgatgcctagcacttggcttgctcctctgcaggagagttgttatcctaacggatgctgggagaaggctgaggtcttcccatgaccctctttggggatttttgattttatttaagttaaattttttttcaaaagttaaattcttattaatatcccaacttcatgctccacaaattggtcaagaacagtgacaagagaatccatgcgggctgttgtgcaggttttagagagctgataaagatatcacgaggatgagcaatcttcccaactggaagagtggagactgggggtgctcttaaagtagggctagccggtgtacccagggactggatgagccaacatcagatgtgaacatgtaggaagaggaggggccaaagtagtacaaccgtaatgttggtggaaccacaatccctgaatgattcggtgggctgcagggagcatccttgctgctatcatggctatctcagctaaggcaatgaccctggatgctctgaaaggctgctaagatggaagaaagggtaacagaaaatgaggaagtcatagga

SEQ ID NO: 21538 - DNA, 1393 bp, Mus musculus
cccagggtctatatacctgcagaggacttctgacctacagcaagtgggctcccttctcatcttgaaaaccttccagtgtgaactctagaaccaaggaagacagagaaaggggacaatgtcagcatcgttgcaagggaggtgagtgaccacccctgccccactccagtgtgtttctagagcacttgcccccacctcactaacactcagcatccaatctgcctgcaggttggtggttggaaaccatagcccttggagaaatggaaggggccctttgtctgtcttgtctctgcttttctgtggtacttgaagagaagttgttcgtggtggattcgctttacttgtgacgaatcattcacggacaacacttttttcagtaccaaatgctacctctaaggatttcctggacatgatggcaacttgcagaaagatggcggttcagtcaagctggtagagaagccaagtatggatgtttggccacggacagtgtgcttgagctagctgtaagtcacctggtcgggttacctgagcatctgatccacctgtaggcctctcatcagtgggccgtgccaaccttggtgaggcagctgtggctctgcccccaagtatcagcttacaagactttgaaaagaggtcatcttccggaagagatgttggtgccagcaccattcagggtgtgtgactggttgaccagaggggcgtgcactctgttcaccctgtgggccacctagtcaccaaccctcagcatcaattccactcaaagaagactttccagagatcctaccaagtttggggatatgtcaatggacttgatggctgtgcctgctcagtggaccaggatgaactgtggtcttaggggtgtatgtttacataagatgccatgaggcatccgtggtagctgctgcatcactgtcacagcctccttgaaatgttgacttcagatgtggacatgatgttgacttcccatgagggacctgaagtcccttctctcctgggtgtgtgactgaattgtactttactaagcatgtgcctgtgccttacttatctgatggatctatcttccagttgtctaacctcaatatcctgtctctacaggagagtctgtgagatgataccaacctctagaagcaggcatggttgtcccgacatcgccacactaccacaggagcttccagaatacattctcttcatggaaactgtggaaccacgccccctctggtccaggaggactaaccagattcaaggctatcaccatcccccttcaggtaagtgtgcctcgggtgagcatgcacttaatgtaggtgtatgtcactcggctcggcccactacccaatgctgtcccaccccttcttcacaggacagtggaagcagccaccttttcgagagagtcgatgtg

SEQ ID NO: 21539 - DNA, 1393 bp, Mus musculus; identical to SEQ ID NO: 21538

SEQ ID NO: 21540 - DNA, 1393 bp, Mus musculus; identical to SEQ ID NO: 21538

SEQ ID NO: 21541 - DNA, 1109 bp, Mus musculus
ggtgactctatcgttgtttggccatggctatcaagagcatagtgcattgtgtcaagcactgtattcagatgagaaaacatcacagtgttaggcatgctgtagggaagagcaaatgtcagtcaccagtggggtggggctagctacaagccactcagttactcattccttaccagtttcaccagtccagggaagatctctaagaagtagaaccagatgtcaggctggtgaatggggagaggtggctcacagtgacatttagtgacatgagaatgctgatgtcctttccctgctccagtgtcccttgggaaggagagaacccagcagcattcattaccacccgatgcttgctaatggtgtgaccttgaatgagtcagcctgtcacctgtctgtgcctccgtttgtctgtctgagagtgttaatggctgcttataaggtatgtattcacgctgaatgtgtgttcagtattttgagagtgcctggtttcccccagaaagttggaaaaccattggcttttataatgatagttgttgcatgaatgtccttactctgtggatctcttcccaccctctagaacacaggttccttgagctcagaaaccccatctaatgctcgtaggtgcacacaggacgaatgatgctgagtgaatggcagttggacatgttttctttgttgaaccctctttgaggcctctcagaagccagagagaatagaggacggtgcagacaccttgtaccctgatgctgctggtttgtctgtgcggtctctcaggatactgccttggaaagggagttatcctcttttaggtcagccttcattggtgggcaggatggaccctactacacagagagtcatggtttcttctatgtcaaacctacctcaggacttctctaggagaaacactttgggattcagacttggtgtccgtgtgcttctgggtgagtgaccagtttctggccaaagcctggatgtctgtacaagtctctggccacctgtaggcaggagagaactctgcaagtcagtccattgctagtctgctttgcagttggacctgggggctcatcggaggtaatgccagcctccctagagggtgggagtcagggagccagagc

SEQ ID NO: 21542 - DNA, 1226 bp, Mus musculus
tggggaaatctatggatatagactagagctagtggggtgataagaaggactggtcaccatgtgggtttttttttttaatgtggctaaactttattttcccatcccaaacctttacagagagcttcatggagtattcagaagctggcgggtgtcacctggaggatgtgactgggtaccagtgccagagcacgtgcccactgagcagtcttcttcactttcctcgatcctcatgaaacattccgggtaagacactggttctggggagtctgctcttgccgagcagttggtacctggaacattctagggcctgcccttccttgggtttccatgttgccagctcccagggctaggcttaaagacgtacccattgttggtgctgaagggctaggcccgtacgggaggtcattttagagtggatgtatccagggtctaatatactatctggggtgtgatgagcaccaggtttcatggtggctctctttccaaaaggatctttacctcaaaggactccagaggctacatcattgtcttggaactggtcagtggctggagctctctccaggacaagtgcttggaggaagaacctggacaagcttccctccccatactgttgactggatcttgtagctaccgttagccaccatcatcgccattgtgtgcctcttaggagcatttccaggaggtgatgccagctggggaaagagcctctgtcccacaggtcagtttccagaacacctacatgaagctgcccgtggcgtcttttccccgtatgacacactgcatgtgaccagtctcttgctgccctgcagcaaggctagaagcctgtgtgaactcttgccaaaatcagagaagggattctgatgttggtcacactccaagagttttaaaatgagtggcgaacacagaatccatactctgcttatggcctaagtcaatggatcctgacccttactggagagccctccctggcgtgctcgtgcggggcagccatacacactggcacaaggggaccctgcgggatctccttccgctgttctttctctcctccctccatgtttatctttgaagcattacttgcttggtttataggactggatggtcaagcagttcttgctatgacatcaccgtggggggagggggcaggtgacagggcggggatgccagggtcgtggggctgcagtggttgggtgggcccaaggaggagcatctctggatgatgcagtcat

SEQ ID NO: 21543 - DNA, 1226 bp, Mus musculus; identical to SEQ ID NO: 21542

SEQ ID NO: 21544 - DNA, 1099 bp, Mus musculus
ctcggagagaggttacccgagcaactttgcatctggaggacgaatgttgctcggtgaaccccttttcggtatcaaatccctccagggaggccacctcagggaagaccatggactcatctcgctctggggtatgggacggatggtcgaccagctggaaagtaattgtttctaatgtacttcacctggtccactagccgtcggtgcccgctgcagcctgcgcccaggatgtcacagcctcagctcaacacctctgctggtacttgaagggagatcgaccgtgttatattcgcttggctgacttcgaataatacatggttgatcttttctcagtatcaacgctcagcttggagaagctcttggagttgcagcccctgtgggggtggggacagcatggtgcttctaggttgctgcctccgcggggaactgggctgggtggaacaggctgtgtgctgcctgtgtcaaccctactcaccatttatatgcaatcccccccttccccccaggacagcttcaggtggtgattccagctccagggttgctgcggtcaacactgggtacttgaggagaggttgtctgtgatgagttcgctttattaatgacgaatataacacagatggcctgttttcaataccacctgccactccggtcactcggcagtacataccaggtgtcacaccactgcccggtaggtaaatgcatggactctgtatgacgcttgtcaccccctcttcactgaacctcagctctgaggagcctcctgggatcgcaccaaccttgtaggctgggccacgaagcattggccagatgtgcaatggatggctgtccactttccatgcctctttcccgccacaacaatgggtgtttgtccctgtctaaggcttccaccgagggctgcatgctcaaatgccctgtaccctgggtgcttctcaataccatgagggcttggaggggctagcatgatacttagggaagagccaggccagttggttacacgtgcagttcctagtatctgaggtgagattgcccgtgacgggtttccattcttaatgctggtacagtgcatggtcacctctctttatcattggctcttactgtgtga

SEQ ID NO: 21545 - DNA, 1099 bp, Mus musculus; identical to SEQ ID NO: 21544

SEQ ID NO: 21546 - DNA, 1099 bp, Mus musculus; identical to SEQ ID NO: 21544

SEQ ID NO: 21547 - DNA, 1099 bp, Mus musculus; identical to SEQ ID NO: 21544

SEQ ID NO: 21548 - DNA, 1099 bp, Mus musculus; identical to SEQ ID NO: 21544

SEQ ID NO: 21549 - DNA, 1137 bp, Mus musculus
ggacaagtgactgaattggtgggccgggtctcctgggccttcgaagcccacgtgcaaatgctccaaagaaagtcaaaggttgtgggggatccccatgacacagatgagcacagccacagaactcaggctgagtctggctaacttgagactctgctatagtgactcccttttgtacgtttttggcttgctctcaggagcattgctgtggctcgaactgacagctttgtccctgctggagtttacctgctggactttctgacaccaggtctccagcgctgcttcggcaaagcgcgaaagtccccagcatttcacagctcggacttgttggccacgcccgcgcgccctgagcgcagctgggttccagcagcgcctcaggctctagctagttgcctggcacccacctgtcgagcgcagggagtcctgctgcttttgtgtttatttcttatccctgggttgggggaggggctcgagatagggaaagggtgggcagggtaatttccccgcctagctttgggtgcgctggagccctggctgctgatgacgaaccgcctctaactgggcttgaccacgggtcggctctgaattgcagagaggctcgaaacagcgcctaaagtaagagggggagagtgctctgggttccacagggaaccgtcgaaaaaggggtggaagagggacatggtaagggatggacttcgagaccaaaggaagtggcttggggaatcaatctgcgaggttcgcaggtccccaggagggatgcgagaactttttggagaagggattagttctaagacaaggagaaggggaagaacttgggagtcctaggcagaaagcgcgggttgtggggcggggtgaagaccaatcagtgaatgttgtgttggaaacattccttgtgtataaacttttaagctacaataataaagacttgaaggaagttgctctgattgcctttggtccgtttattttctcgtgtctttgaaaaaccaaaaagaactaaacacaaatttctccctggcatccccatagtgactctaggggaaagtagggacgggaaagaacccaggtcctgcaggggtgggggggggctggagatgggcggaggaggaaggagtttccctgggatggcaaatgcacttacac

SEQ ID NO: 21550 - DNA, 2317 bp, Mus musculus
acgacgtgtagttgctttgcagggcatacaccgtgtgcttccttgtcttgtcattaggactgctaaaacttcttacggttccccaaagctttctcgctcaaacatacctgtgtcctgttgctgttgggggggggggggaaatcacagagaaatatcagtatgtatgttcatttctccctagtttatcaaaagaaccttgctgtaagggtaggatggatattaggtttaaaccccaccccatcccagttgaaagatgcccataccactgctgtgtagctgtctgtaaagtatgtggggattttactgtcagtcatgtagggctctggagtgtggcctgcagtgtcccatgtgatgccccagttgtctttttgtatcttttctagtgctactgtctaagagctggagtcacagagctcgaaatggcccctgaaaagcactgagatgttgggcccttcacccctatctcagaaggatgcacgaggcaccatggcatgctaagcccttggcagatcactgttgaaactatttcccaggaatacagatcctggaagtgcagtagctcctgtgacctctgagttactctttctgatggctgttgtctcccctcagccttgggctctgttcttccctgcttttcccacccacttagcaagtgtgattgactcatccagtgaattaagtcttgactgtactcgctcctctcctcctattactccgactttgaatattttagcctgaagagtgtaaatgggtttggtattcatggttgctcttggagcccttctaatgtcacgcgagcagcggtggtccacactgtcccgtgaaggctcagagcctagacagtttccacactccagttttacagcctggggaggtaaacagggctggtgttgcagccatgggtgagctgcggaaaggcttgagaagtgatcccagtgagagtcgagaagttagcctgtggttgacttagcacaccgctctccctccgggccatggaaagtccttacgctggacattcggctggcctcacgagagacaggcctcaagtggtttacctcgaagaacactttttggctagcccgtggctttttagataggagggaaaagtactggagtggaagacagcatgagacccaggaaggtcctccaggctgggagtgagagcaaacggggattcaggcctgtcaggagtgatgcacgcgctcgccttgggaaacgtgtttcctcatctcttgagacactttagtgagctaaagatgttgggggcccatttttactgtgcgggatagattgggccctgctttgcctaagaagtttttccctgtaagatgcacaacagcgtagatccagtagcgtagttatgggtcctgctaaaggttgttactgctgctgggcattcgcacatttctctttccttttcttctctgtccatgagtatgttaaactttgacttgttgcatattcctgtgtgtcctgaaaatacagatttctgtcccgtgccaggtacagtttgtttagtacaggtttgcttgtctttaactgacaggccacagctgacccacgggctacttgaagttagaaaacgtggagatggacggagagaacaaattatcacttggatacggaggaacatgactaggcacattttatgaatactccaaatcctaaattacactgagatctagaccttcatttggcagggtcaggccattggatggtgttgctgtattgtcttgtcgtgtttttaaaatctgtgcactttgtccaaagttgagatttttttttttaaatgtgttgatgatttttacaaagtgatttgttttggacacattaaaggtggtttgagtctcgttttccgtctgtgcgttttgcatgctgggctgagttttgtttgaaagtcttttcagcatctcttatgtaacatgcagtgcttggaaggaagctggagcagccttcgctcagactcggtctcttacgtcgaccctgtttacctttatgaatctcctgtccctttgcactgccacagccctcggaggaagggacagtaaggcggaggcttgccaggggtcacgttacgctgggagccaaataatgtttttctgtaagttaaactaaaatttatagacgttattaatctaataacagccattacgtgggaacataggtaaaaattttatgaaaatatctttcaaaattatttcggggctttctgttcactgtctgtggagcagacatctttcttgaataagttggaaggtggctgtgggagtagtttggaaggagccacatggtcacttacctgacatcctctgtggaa

SEQ ID NO: 21551 - DNA, 1212 bp, Mus musculus
gcgctcatgctgtgtgtgcatgtgtgcgcgctcgcgctgtgtgtgcatgtgtgtgtgtatttcctacatttcggttgtgctgtattatcagttattttaaataatccattttacatatttatttctttttcttttgaaaacagatagccagcaggaaaaatagcctcacggttgtccagtcttcgacatctactaaaataaaagtaccaatccctcaacccgtcgtcgtccctgtgaagaaagacaaacggcagaattcttcacggtttaatgccagcaataatagagagctacaaaaactcccatctttaaaaggtaattgtggcttgtggccaggggagcaaggcagtctccagccctgcgggctgcttgctttggtgatcggttttgtttttgttttctcctgattcggtttctggttggattgggtgctgcttgctttactgcgctaacagttttcattcccgagctctggaggataaatgtctactcgctccatacaccacaagtgcactacagtaagacaactgaaaatcttaaaagctgtgaggaagcggccgtttctttttctcgtggttctctggcttgtctcacaatgccagcctttagaaggggtcactccaggtcatcaccagtgtccaggcagggcttgctcctttaaccatggccagccagatcagtccctcacctgtgaccagccgtgacctagggctcctcacttggagctgctcccattggcacagccgcctctttccaccagaggatggttaaagccttaagtttcctccaggaggcttcagggttgagctacgtaagactttgacaaggagaatggttcaaggaccatggtcagatgggaatgtctgatgagcgctacatattctgagacctaaaactgatacacagagtagctgtcagagtctgtcatacctgaagtttgtaatgacagttggttttataattaatcttggccttcttttttttttttaaagatttatttattattattcattagtacactgtagctgtcttcagatgcaccagaagagggcgtcagatctcattacggatggttgtgagccaccatgtggttgctgggatttgaactcagaaccttcggaagagcagtcagtgctcttaacccctgagccatctctccagccccctaatcttggccttctttagagttgtattcccagtgccacccacagg

SEQ ID NO: 21552 - DNA, 1102 bp, Mus musculus
ctccacacatcttggttagttccttttatctttttaaaaatctgtttttgaaattttttcctttgattcgtatataaataagccacttttgttcttttttgtctgtttcgttctgtttgtttttcaagataagatttctctgtatagctctggctgtcctggagctcattgtgtagacgaggctagcctcaaactcacagagatcctcctgcctcagcctcccagattaaaggtgtgtgccatcactctctggcttcttgcacttttcttaatcagaactaaaaccacatctccctggcctcgtccttgccttctgcatccacctgcacagcagagtgcttgccacatgtttgcagtctgctgtgggcgcttgaaggcgcttgcctgtgtgtgtgtgtttacttacaaacacaaatactataaaagtgcgtttattcacagaaagtttctagtctttttatttcttcagttagtaaggaaaacaagtaaaatgaaagaaatgtgagaaaacagacctttttgtaagtttgtaacgagggatgctctgagctgctggcacctttatgacctacctcatgtggtttatgcattcaggcagtaaacactgggttcagtttcctgcaccttcagtaaccgtgatttaacatttttgggctaggtaagcatttggaaggaggaggcaagcatgtagcgtttgccaccttccagagcttggtgtaggctcatttggtcagttttcaggtgctggggataacaaggcagagcatcttttcctggtgtagcttcagggcggtgtccccgtgttctcccttatcaaggcctggagatgggggcttccttttcttagttcttcagtcctgagcctaagtggaccttttagtcttgtgactgtcagtggtcatttgaaggacattttaattttaaaggttaggccacactcactgagtgactttctgcccctccagacagagccctttctaggttgtcagatgacactgtccagacatcaaagctgtcagatctaggggaggggccgctgtccttttcggagtctggcttaagtctttaccttccgagtctgcaacatgttttctttagaagt

SEQ ID NO: 21553 - DNA, 1165 bp, Mus musculus
tgaattaaggtggaaacaggtgagaaatgagtggaatccacctgtttagatcccagcacagaggcagtgtgtagggaaacccagctactttgtcgggctagtacagaatctacctattgcttaaagataaaaataaataaataaaagacacaacttgattttttaggggtgttactatgggaaatacacattagaacaggcaaaagaagatatttgcactttgaaattagaaaatatttcaaattcacaacagcttggaggctgagggtatagctcagtgattgagcgtttgtctagcatgtgcaaggccctggggtctatccccagcaccagcaaaaataatggtgtgacagttattttcactgtcaccttgacacggtctagaatcccgtgagaagggagtgagcacgggcctggtcagatcagattggcctgtaggtgagtctgtggtgcgggtggtcctgattactgtgttaatggacataagaggacccagcttacaacgggcagcacccaccgttctttacccgaggcatcctggactgcatatgtgtggaaaggggctcagaagaataggagtgcactcgttcttcctctctgctcttgatgtggatgtggctcgccggccgatcaacctcttgctctgacttctgcgtgattataacctgggactataagccaaacaaaccctttctcccctacattgcttttttgtgttcttattttatcatggcaagagaaacaaaaccagacatgtcctcatcatacttgtccccgttgtcttcgttgtcgtcgtcatcatcatcgttgtctggtggttttgagtcctaaagttgttctttagtactaaagttatgaacattttaaaagcaaggcttaggctccagtggccccggccagcttgctctgctgcttggcccaccgtgagtagtggtgaaaggcagagagctttagtcaatcggccacagtggacagaggaacaagtaaagagatccagtgatctccctgtgtatccttaggggtactgacctgaaattcaggtttaaacaggaaaagatttagagcaagtggcaagaggtccacatagttgggctgtcctggcttaggtctggttctggttccgagaggtagtccctatcattacttgaagggctcaatccagttt

SEQ ID NO: 21554 - DNA, 1173 bp, Mus musculus
gaacttagagaaaaatcaagaggctgcccttactgcgggtctttgggcagatgcagttgctatgtttgggcagccagaagtctctcccccatcccatacctgcctctgccgccatcacgcagacctggcctccctgtctgctgctttttctcacccccttttctcccagaccagggcctggcatgtgagtgttgctgcccagaaagtatttgtccattgagtgccttcagaagggttggttgtgactggtgctgtcaatcatgccaagcctgtgatgtcagcagcggccagctgtggggcacacacgcccttttcactgtttaaaggatacctaaccactgtccacctcacccatcttaattcacagtaaaaatcggaggctacgagtgtctcccggccatgtgggttaagcatcgttgtgactgacagcccccactctctcctttcagatgttcctcctgcggatcaagagaagctttttatccagaagctacgccagtgttgtgtcctctttgactttgtctctgacccactgagtgacctgaagtggaaggaagtaaagcgcgctgcgctgagcgagatggtggagtatatcacccacaaccggaacgtgatcacggagcccatttaccccgaggccgtccacatggtgagtgacagcgctcacagcacggccccaagatttggagtatcccaaacacaaaccaagccctcccactcccaccctgcagggtggtggtgagggttaagcgaatgcaaacagctcctctgcctgtcaggagatgtcatctgttcttcccgggagttctttggcttgactttttaacacctccctgttggtgccctcgtgtagttcagaagtaagtgccctgcccacccgtgtgccctcagcaaagagcagatgcccagggtagcaatgcccagggtggtgagcggcaggctcttgctcctccctctactccagctctcacgctgtggacatcgacagttctggaactgtaaggagctgtactgagtatcttcaaagctttgtttgttctggggtggccattatagtcagtcctggagcttcatccgtggcttaagtcaggagtgtagcttcattttcttctatggttattaaatttgttcttatatcagatattaagatccatttcctccattcattgaaga

SEQ ID NO: 21555 - DNA, 1150 bp, Mus musculus
tgagcttcctcttctgccatgcccttcactgaacccctcgtattcgagcctcaacattgagggcaccacctgaccaacccagctcagtcagtcagcaaggtctcaagggaaggagtgaggcttaaagagagaaaagacaattcaacaacattgtagcatgactccagcaagtactgaagcaaatttattttttcccagcctgcttttgtaccattctaagtacatgcaaagaataaggtcagttcttggtcaaggacaaaccaggcataaacaaaggtcccatggtcactatatttggggacttatcaagatgatcaagatacaaagagtatgtatgttcctcagctgtatttttcttgagcttacttccttgtcttagcccaatgtcagatcttcttgcgaatttccttgaagcagccccagggtctctggttccctggggatgccaagagctctccacagcaggtttcccggttccccggggatgccctgacacactcggtgttcgctgccacctaggttgctggcaggtgtacctgtcacagggtcagcagagactgcggcttccttctgggctcaggcctgggtcacagtgacgtggctgaatgtgctgagctcagggttgttggttgcatggacctgtcgccgttcgttcctttttatagaaaagaggagagagtttgagatcagccagcatgccaagtgcactgctcctcctgtgggaagacaaggtgaagagacagccccagcatttgtcactgtggctcctgcataaacgtggtggctggagatctgggcctgcagcattgcttctgctgtcacagtcaggtctgctgcccaaagactgacggagatggaaaagcagttggaagcactgccattttaaccattcctaccctaaatttcttaatttatgtaaaaatggagcagagcccttctgagagtaaattccctaagaggaaagttgaggtcctgaattgctgaattcatgggacactactttctctaaagccttggacacaggaagggaggccttgtgggcagaaagaggtctggctagggcactgtttggatagattggctggctcaggagcccttcgcagcacatggagctctggggttacccagacacctgtgctggatcactaac

SEQ ID NO: 21556 - DNA, 1177 bp, Mus musculus
gtgctttggtgttcctctctcaggcaatcctaaagttcttgtccacttagaactccatgattcatgtagacggcagactgcaggctctaccctcaagtctggtcatggtcccaggggtagcagctaagccatgaaaagcactgtgtgccatttaagaaatagtctgtggttctcactaaataaaagaattccaactgcagttataattatgctaagccacagaattcagcgttaattttgaatgcatgtgtggtttttcttaagtccagtgttttgagcagataaagaatgaattagagaggtgataaagaatgagttagagagttgtgcgtgagcctgatgaagtgccatgtaacttgactcactgttgttttcttcttcttcctagcttgtttatgaatttttcttaagatttttagagtctccagatttccaacccaatatagcaaagaaatatattgatcagaagtttgtattgcaggtaagttcccagccaggcgttcttcggcagccttaaggacagcatggccactgtcactaagtgccgttttatttttcttaaagcttctagagctgtttgacagcgaggatcctcgggagagagattttctaaaaaccaccctgcacagaatctatgggaagttcttaggcctgcgtgcttacatcaggaaacagatcaataatatattttataggtaagtcccccgtgtggttctcatccacccttgctgctgtcacatcaaagatgcggagggaaactgagtcatgtgctcatgtccccaccacgccaccgctcatgctacacacacacacacacacacacacacacccatgtcttactgcattccctacccttgctgggttcctacagagttgtccagttgctcacaatgtagatgcttctgtcccaggcacctgcttgctaccttgttattcctgctcagttccaggcaagacaggaaggaggaggaggcggcaaggaagtcggcagcctttgccttcgaggatctgggaagtagatgaacagtttgagggccagccaaacacagagaggagagcctggcagctggcagacaagacagctttcctatctatgcccagacttgggacttcaggatctaagaatgaccacagacctgcctgtccccacaacccccagctcagaaaggacaaatac

SEQ ID NO: 21557 - DNA, 1906 bp, Mus musculus
aaaaataataatgaatgaaaaaaatcagtgcatctaatgatggaattagaagcaaccctggttccccttggaatactgtcacctcggggtaccagctctggcctccttggctcctctgcagacttgtctgcacagtgggtatagactgtagcaggcaggcagccaagctgggaacattggaccaacttggaggggatgggggagggagggctatgtttaaagtcttgttaaatttttaatttttaggtgtctttagtctcactcttggctagtttttaggtttcttttcacgttacacgtgttgagagccgtggtgtgagacgtgaggaggaccagagagcacaggaaaacgtgactgtggcacgggtgtccccctgctttcgccccctaacctgcctgcgtgcgactcttctctaatacaagtgatgttttcttgtttttcagagagaagctaaaaatgaaagagcgagaagaagcatgggttaaaatagaaaatctagccaaagcgaatccccaggtactaaaaaagagagtaactcgggagtgttgaggctttgcgtgaatgtctgagatagggcctggctccaccccaggaagggaggccaacgtcactaacactgtatgtgcaaatgtccgcaataaaacactttccaactttgtaacttcctcttgtataagtacttatttgccacacgtaacttttaccacagaatcgatttttttctcttctttttaaaagtaagatgtgatgtggtaaagagaacaccaggatgtaacctctaagattgtaatgtcctttcttgctcgaatgtcatagatgctgtcacttgaaccgtgttcctccgttttattctcatacatgagagggatgggggggaggcagatgaagaatgctgaaaactaactgaattctgccctgctcacactaactgttcctctaccctagccgatgcagtgtgctcccgcaaggcgaagccaggcagatggtcctgtctgtcagagctgcaggtgactcagcagcctctgtccagggttggcttttaggctggcagagcctgggacagctttgcagccatagctctttggtgttgcctccgctggtccgaatgatcagttattggggtgttgcctctgctggtccgaatgatcagttattggggtgttgcctctgctgctccgaatgatcaatgttactgggtgtttcttttctccttgttgcgtgtgtctgattataacagccacttgatgaaatgtctgaccttctccacactaagatctctcaggcttctctcagctctccagggaagaaaatatcttactaaacagtgtatttctttttggttgagaagtgtgtattaagtgtgtacataaattattatgtaagttggatgtgggtttttttaatctttgtcatttaataaaaacaatatatgaagatatcagtgtgtattttcctatgagacagcattctagcctgcatccctttgaagaaaggatacttaatgacagtctgttgcggatctgcggttccacctaaaacaagtagctcacatttccctggcagcactttacatgctatagagaagttcttctaaggcttgtagcttaattacagagatctgcacgtatggacagggcttatgtggagagtgggcagaagcaccggcagttgttttaaaactcggcaaaagcctgtgtgggcagggttaggtgactcagccttgctggcattgcactggtggccttgctttgtttggaactttgtttgtttgtttgtttgtttgtttttaatctggccggtggagagccttggaaggcttgctttgcctagaaaatggaaatactctgttgaaaactgcacagagctcccacttacaaatgaagagcgttacggggtcagcactgg

SEQ ID NO: 21558 - DNA, 2535 bp, Mus musculus
gctggccaagcagggggctgggggagtcggtgacagtgtcatcaccatgttgtcaccaccccagcacagccctgagtgagatccaaagtcagagctgtaggaaagcaccctgactgtcaccttctcgtacccagtagaccctgtggtcctctgaaatagggattctgtggtaggtaacaccgatgctgtggcaaatcaaacgcacatggtaaaaggtgtctcctccctttacaaccctgacgctgtccccacgcttgctgtgccagccgcccgtggtggttggttaggtctctcagagatggctcctcgctttcccgttctagctgcctgccgggaaagaggccaacttttgcgctggggccgtccacagtgtttctttcctttggttaatggcacggtcaccatgtcctgcttaccttaatgtctaccgaaagccatatttcatagtctgtggtagaggccagggttccacctcagcgcaagggagggttctgagaagtgcttcctcagcccaccttgaggagaaccgccacgttggaatgacgtgttcatgttagttgcagaatcagtttttcacctacttacacatgatccttcaacaaggctctcgagtggataaagatcacaggatctaagaattccacattggtagaaagtgacagtaaactcagccccttggcctagtgcagcctgcagctgcctgtggcctgactgcgggccgcactgtgtgggcgccctcagtgagcctttctttctgttggaaaaagcacatgtcaccaagctcgcgaggaaaggcgcggtgcccgcgttcgcaccagtctccacatgctgctccggccttcacagaattcttgcatggattaagcttctgttttagatgggatagcacgaggagatacatccttaaacttagtgctttgtcttcttgtcctctcagggtggccagtattttgacttatttatcctgctcaaaagctgcttgaaatgtgtgctgctctctgaacagtggcgagtcttctcttgtctccagcatatatataactcagtgttacatgtcttgatgcataagataggttaaaaaaaaagaagaagaagaaaaatggggcttcttttaaaacctgattttaatcgtggtctcagggatccgtgaaaaagttgtgaaatcagacattgctctctcgcggccttggaggcgggtcccacggggaagaagggcatgtgcagggagggagagccagcacggctagtcaaaaaggcggccccagctgagggtgaacaggttggccacttgggtgagaacacttcctgagaaacttgacaagtacctatccactttaccattatgaaatctataattaaaaaaaaaaagttgagatgccttctccttttgagggaaaaagggtgcttttattgtataaagcagtgtctctgtgttttgatagcccactgtttgaactctcgtctttagctggtagagtctcagatatccctgacgtgtggggcattccgagtgtggtgagaggtcccaagaggctcctttgccctgcgtgaagagcatgctatcagtgtacgggtgattgtgcaaagctcagcgcgggggagcatcttctgctctaggttttatttctgctctttattgaagacaaacattcgccaataaagaaaagggaaaaaaatgttttgagagaaactaattttctttggcaaaagtattacttaaatttttggcctattaaggttcccctagttagtactcggattccccatgctaattgttcagcttgtatgttgttaagacactgttgattctgtaccagactggtttcaaaacaaaaaaagtaccacgttgaaaataaactggtgactgtttttcttcatatggctctagtttggcaccttcactctttccaaaacgtgtctgtgcgccagagatgtcacagttcaagtgtctttctagtgtggctttgtatggcttcctttgaacattgtacatacattgtatctttgttttatggtaataagtaataaaaaatgtagacttcgtattttgtacaaaatgtcctatgtacagaataaaaaaaagttcatagaaacagcaaaaataggttaagtggcacagttatttttctttagaaaatatctgtaactttatgctttagtgaaacgttaagtaccaacatattttttaacattttgtaattcaaaacttttttgttttgacattgtttatgaagaaagacttcatgcacttgccatttaatatgctcttttatctaattttaaagaactctttaaaatggtgtattatatggactaaataaagaacatgtgaattttatcgctctatgaaactaaatttagccatggcgttgggcagtctggttccgactcgctgttactgtcaggtcagggaccagccactccaggggcactggcttgaggtgggaagcaggtgtctgccctgtgtccccctaatgagcatcagctgtgcgttagctcctggtctaggtccttctcagaagccgatcctgaaag

SEQ ID NO: 21559 - DNA, 1221 bp, Mus musculus
atgtatgtacgtgcactatgtgtgttcacggtgccaaactgaggctagaagaaattactgaattctctggacctggaaagttatgatggttgtgagctgccctgtgggtgctgggaaccaaacccaggtcctctgcaaccagccagtattctttgctgctgatcttttttcagcccactctacttccccatcctaccacccaggcagggtttctctgtgtagtcctggttctcctggaacttgtattgtagaccaggctggctttgtactcacagaactccacctgtctctgcctcccaagtgctgggattaaagcttttatacctttatacctggcttcaactgcacccctaagaaaaccaaaaccgagtccattagagatgttgtttgtttgtttgtttgaaataccgtgaatgatttttctgtaactagaatatgttcagcatcaaagtgcatttcatagttaagacctactttacttgattttattacttgacgtgaaaaccgttaaccctctttgtcaacctaggtctgaagcaggcgttggaaacggtgaatgactacaaccctctgatgaaagacttccctctgaatgacttgctgtctgccacggagctggacaagataaggcaggcccttgttgcaattttcacacatctgagaaagatccgcaacacgaagtacccgattcagcgggccctgcgtctcgtggaggccatctccagagacctgagttctcagctgctcaaggtcttgggcactcggaagttgatgcatgtagcctatgaagagtttgaaaaggtaagttgtggtctttaaaaaccaccccgagccagtgagatcactgtgacctggcgagtgacgagccatctcccaactgtacccaggtcatggtggcttgcttcgaagtcttccagacgtgggacgacgagtacgagaagctccaggtgctgctgcgagacatcgtcaagaggaagcgggaggagaacctgaagatggtgtggcgcatcaaccccgctcacaggaagcttcaggcccgcctcgaccagatgaggaagttccgccgccagcacgagcagctgagggctgtcattgtcagggtcctgaggccacaggtgtgtctggcagtcacaggcgctcacagcccttgttttgttgcctccttataattctttgaaagaactgacggcctggtactccatgtttttcctttagttccct

SEQ ID NO: 21560 - DNA, 1104 bp, Mus musculus
gaagcacctgaaccccaagacatgaaagtggccgaggtgctctttgatgctgccgacgccaacgccattgaggaggtgaacctggcctacgagaatgtcaaggaagtcgatggtctggatgtttccaaagaagggacggaagcctgggaggccgcgatgaagagatacgatgagaggatcgaccgtgtggagacccgcatcaccgcccgcctccgagatcagctcggcacggccaagaatgccaatgagatgttcaggattttctccaggttcaatgcactgttcgtccgcccacacatccgaggggccattcgtgaataccagacccagctgatccaacgtgtgaaagatgacatcgaatctctgcacgacaagttcaaggtccagtacccgcaaagccaagcttgtaaaatgagtcatgtccgtgacctgccccccgtgtcagggtctatcatctgggctaaacagatcgacagacagctcactgcctacatgaagcgagtggaggatgtcctgggcaaaggctgggagaaccacgtggaagggcagaagctgaagcaggatggagacagcttccgaatgaagctcaacacccaggagatcttcgatgactgggcgaggaaggttcagcagcgcaaccttggtgtctccgggcgcatcttcaccattgagagcgctcgcgtgcggggccgcactgggaatgtcctcaagctaaaggtgaacttccttccagagatcataacactctccaaagaagtccggaacctcaagtggcttggcttccgagtgccacttgcaattgtgaacaaggctcaccaagccaaccagctctacccatttgccatctcgctgattgaaagcgtccggacttacgagcgcacctgtgagaaggtggaggagcgcaataccatttccctgctagtggccggcctaaagaaggaggtgcaggccttaatcgcagaaggcatcgcgttggtgtgggagtcctacaagctcgacccctacgtgcagcgcctggcagagacggttttcaacttccaggagaaggtgagttgactgaccttcagcatttctggttggcctagtcaccaagtcagggacgtg

SEQ ID NO: 21561 - DNA, 1231 bp, Mus musculus
tcaggctgcaggagcggtagttctcccgcagcacatccctagggagttacacggcatagggcccaccggtgccgaagacatgcagaatgcagaggtcctgtctgtcacctcgaggaatgtagcctggctctaaatagagaaggctttcttccacttggtgaagaaaaatgtcttcatctccaaactgcggtgttcctagtttcacctctagagctaacgtcaagctctacaaaagagcacttgaagtgagttttacatcataaggaacagctaccaacagcttgcccgcatctgcaggatgcagtatggtattaagtctccttgtcacttaagagctgaggagactggcagttcacaagtctcaaaggtgcagagcacagctctgatcctgctgcacacgtcacacacagaggtagacactgactggcgcacctgcccccttctcattctgtactttgtgagccaaccttcaaaggcagccactcagtgaccccactttctctgtagattgaaaggatactgggcgtccgcctgcaagctggccttcgagcttggacccaggttcttcttggacaagctgaggataaagcagaagtcgacatggatacagatgctccacaagtcagtcacaagcctggtggagagcccaagatcaaagtgagtctctcccgtggcactcacctgggtatagcaaagcaagtccctccccttggaactgtctgtggacgctgagacaagagggtcacacctcaaggccagcttagcataagcagtgagatcctgctttaaaaaggtgccaggcggggaagctctgggctgaggctgggggttagaggactggcttagaatgcaggaggcctagactagatccctggcacggaggctggcactgcatgcgagtgcctgtgaagaagtcacctaacagtggaagagcctgatagacaccatttaaccagttggtgaatgttagcaccgccagtggtgtgagtggctccccgtgtttgtgacatcttgtggtgacaagggcatttcacatctgccctttctccagaaaacttatgagaaaaatagaggctcacagaaaatcagtctgcggagcatcgagcagagcagacaatgccacaggctggggtgggttgaggagactgagtgcagggtgaggggaggcggccatccagtgtcagcgaagctgctgaagcgccttgtgctttctttacacatcttctgtcaa

SEQ ID NO: 21562 - DNA, 1174 bp, Mus musculus
ttgtaccctatgtgtggcttctgtggttcatagaaattgaaagtttgttttagagccctcaaaaggatgtagctcagtaggtagagtgcttgcccggcatgcacgaagccttaggttcagtccccagagccctgggtgatggaggcaggtgggcttgtgtaacgtcaaagctagccttggataaattcatgactgtgtcttagaagaaaaagtaaaaaacagcatatggggtgtgtgtggaatgtgtgtctgtgtgtctgtgtatgtgacttcattctcctgtgtctcctgacagcttcgacaaaacctagacggcctcttgaaccagctgaagaacttccctgcgaggcttcggcagtatgcttcctatgagtttgttcagaggctgctgaaaggctacatgaaggtaggggactgccacacgtgggtgttggatgtcttcaaaaggcacctgctcacgtaactctgtccctgaacagataaacatgttggtaattgaactgaaatcagaagcactcaaagaccggcactggaaacagctgatgaagaggcttcatgttaactgggtggtttctgagctgacgctgggccagatctgggacgtggaccttcagaagaacgaagctgtcgtcaaggatgtgctgctggtggcacaaggcgagatggccttggaagaatttttgaagcaggcaagtgataggagagggtatcaggccgttgtatggatctgaccatgtaaaacgaagctttgtcatctacagttatctctgtcccctaatgtttgctgcccctgcaaatgtttgagtgtttatttgtattgctaacggcctcttcctggttccgctcagatacgagaagtgtggaacacatacgaactagacttggtcaactatcagaacaaatgccgcctcatccgaggctgggatgacctcttcaacaaggtcaaggagcatatcaacagcgtctctgccatgaaactctctccctattacaaggtagggcggcagcgcagggtgctcttccttatacctcagatgcctagttatagttccgtaaagtgtgctcctaatttgtcattttcagtgagctccggcatatctgagtgaaaaggtcggcagttaagttctgtcctcttgtgtgcccactaggtttttgaagaagatgccctgagctg

SEQ ID NO: 21563 - DNA, 2222 bp, Mus musculus
ttgctcagttttgacttgaaggattttgatggccaacgcactgagccctctgcctctccgtgcccatctctaacgctgcctgaactcccagttttccgccttaatcttactaagcatcactaagctcattttctctgtaagccacttgaatccctccggggttagctttgctgtctcctgagtgctctctcctcctctccaaagagtttgcgtagggtgagtggagcagatgctgccaaaatgacttaagtgactggcattgcgttctcccacgtcttactgtaacgagtctttctccaggccctggcagatgtttgtatgagatctgagttcagacctgaggtgtcccttgcagctgcttcctcctgtacgtaggcagtttgctcggtcaccctctgtacaccaggcagtagcagccgggttgtttgatttcaggttctactttgtgggtgatgaggatttgcttgagatcattgggaatagcaagaacgtggctaagttgcagaagcacttcaagaaaatgttcgccggcgtttccagcatcatcttaaatgaggataactctgtggtcctcggcatctcatcccgagaaggggaggaggtaagcgcagtgcctttgtggcttagaaacttcgctcacacgaggacgccttcattcttatcatgtctttttatcttcaggttatgtttaaaactccagtgtccatcactgaacaccccaaaatcaatgagtggctcactctggtggaaaaggagatgagagtcaccttggctaaacttctggcagagtctgttacagaagtggagatttttggaaaagcaacttctattgacccaaatacctacattacttggattgataaataccaggtaatcttaaatagaagcaagcagcctgaagatcttagctctcaacaacttgaagatgatggtcttggctaattggtggttggttggttggttggttggttggtttgtttatttcccacccattgtccccctggtttcatccctatcactagatagaagagaaaggatagaggggagggagagcgagagatctctgaatcttaatttcttcccttttgtttctttgagcgtaactactagcaaaccgcaactgatctctttaaatgaccgacaacccctcttggggcccttatgtttatataccctctcaaaagttcccagaattccaaatgttgtacaatcgtagaaactgtctgcaactgacacaggcatgagcacaaggcaaatcatagtcagttactgcagacagtccgaagcagccccacgccccacacctgggattaaaacgaaagcacattcccataatgtttgtgtgtttgtaaagaaaccaacatcccaaaattgtccctactaatgaccccttgggaaccaggcggtggcacctatactcaggctcttggggaggggggtgagggcagtgagataggaaggccagttgagtggtgagttcagaaccagtcaaggagcagcgatgctctgtctcagaaagcaaccctgtctctctcttctttcctaggcccagctagtggtattgtcagcccagatagcctggtccgagaacgtggagaatgcgctgagcaacgttgggggaggtggtgatgtggggcccttgcagtctgtgctgagcaatgtggaggtcacactcaacgtcttagcggactctgtcctcatggagcagcctcctctccggagacggaagctggagcacttggtaagcctcctgcctgagccccgtcttaactctcagcccacgcagtgagagggaaagatgctttaaaatgtgccgtttgtatcaaaagaaaaataggctgggagttggggtccacacctgtaaccttggctttgggaagtgaaggcgagggaagggcatcaggctgtctaggccagcctggcttacgtgaggcttttgaccacggtaatgtgtggacacaggtattccacgtgcgcctgcctggtgtttggttctgttcctctttaagagtaatatatgactatgtaagagaagggaagggaccagctttggtttgttgttgttgtttttgtttttaaagttttttcgaaacagggtttctctgtgtagccttggctatcctgcaacccactctgtagaccaggctggccttgaactcacagagatttgcctgcctctgtctcccaagtgctggtattaaaggcatgcgccagcaccaccg

SEQ ID NO: 21564 - DNA, 1106 bp, Mus musculus
gcatcctcttcccagaggtgtggctgcagcagggtgggggcacaaggtcggcagcctgtagggtgcacctgacgaagctgctctgtcacattcagctgcccagggctgttacttacggagggttcttggcttttgtgttttctgtcactctgagtctgcgatactgtcccatggataacttttccagtgtcccttctggtgaagttctgtttgcagtttggaaggtttgctgctggtcactgcaactgggcctgaagcctgtgtcaacttaacagatagtctgcagacccagacagcacaatgttgctttagcttatggcaaatttctacttcctcagatcacagagctggttcaccaaagagacgttaccaggtccttgatcaaaagcaagatcgacaacgccaaatctttcgaatggctcagccagatgcgattttactttgaccctaagcaaacggacgtgttacagcagctgtccattcagatggccaatgccaagtttaactacggctttgagtacctgggtgttcaagacaagctggttcagacgcccctcactgaccgttgctatttgacaatgacacaagctttggaggccaggcttgggggctccccatttggtaagttacttcacagacctggacagatagagtcatggcagatcttaattttacacacaaacctgatggtttggatgtgtttatttattccatggttttacattctaaaatctttaatttccttgcatttattatagcaattttaaaaataaatattatggcttttttcaaaccaagaacttagtaggtaatggacttgagtactaaattatttttctcccaaataataggacctgctggaaccggaaagacagagtccgtcaaagccctcggccatcagctggggcggttcgtcttagttttcaactgtgacgaaacctttgatttccaggtaagaattatttcacattgtctaacgccatcaagcttctcgtctcacaaccccagtgcagacaggccttccctggtgctgtccgacctgcagcagagcctagcacacattgaagcctgtctgtgtctgtatcggagactgggtttccttgtat

SEQ ID NO: 21565 - DNA, 1126 bp, Mus musculus
tttgcagtggtaatgttcttatgtaaatgaggaatggatagctaaatgtccattttgggaggtggatagtattcccattttgaagggagatgttgtaggtttcagaaagatgtgacttgctcagagttggacaagtcagcacagctcagactacaaagatgtctctccacaggccagaagcccacagtggttttgatggctctagctcccagtgaggcctctctgctttgtgtgtagattgcttaccttacccatcatctagcatgtgcagagaggaggagagcaatggttggaagggtggactctagtaacttactcctacaaggaccccagtcctctctggtcagtctcccttcattttacctcctgtgggacctatgtccaagtacagtaacattggggctaggacatggaggaatgacgttgggaaggggcacacgtcagtccataacaaacgatttaagcctctttggttctttttactctaggcgatgggacgtatctttgtggggctttgccaagtgggcgcgtggggctgctttgatgagtttaaccgcctggaggagcggatgctctcagctgtatcccagcaggtgcagtgcatacaagaggcactgcgggagcattccaaccccaactacgacaagagtaagacttctgtggggtttgtttcgttctctttttgtaaccactgaggagctggagggaaatgtgatatgagctcatttgcttacttccatagcaagcactgagtggtgggtggaggtgagtgtgggctgggtgatttgggatcagtttgcttcttgatggtggcagcagcagtgccagagcctgtgggtcctggagcagagcatcctttgcaagaccaaggccacacacagcacattcccttccacaaacggaccccacagtggctcttgggaggcttttccttccagcgtcactggaaagccagcctccttagcacccatttgacctcagtgctcccgccatgtagtctgtggagtcctctgtcagcattggagtagctgttctggaaggctccaggggtggccttgctctcgtcacctgacagagcccaggcacaagtgatagaggtaggcttggtgccagaagatgtcctggc

SEQ ID NO: 21566 - DNA, 1100 bp, Mus musculus
tttgggcttcgggctttgaagagtgtgcttgtaagtgcaggcaatgtgaagagggagaggatccagaagataaagagggagaaagaagaacggggggaagcagttgatgaaggagagattgctgagaacctacctgagcaggaggtttgtacagaacgctgtctgtttccccttcactctgtagaccaggtcaatggaaattgaacccactatgtactatgtagcctaggctagccttgaacctcatggctgtcctcatcctcccaagcattgagatcacggtacccaccaccacaccccgcttacaagtgaaaacatgcatgttctgaaattccccctgagttctcagtatgatcgatccctgtctgggcttcttcctcccaccccgtagattctgatccagagtgtctgcgagacaatggtgcccaagctggtggcagaagatatcccgctgctcttcagcctcctgtctgacgtgtttcctggagtccagtaccaccgtggggagatgacagcccttcgagaagagctgaagaaagtgtgtcaggagatgtacttgacatatggcgacggagaagaagttggcgggatgtgggttgaaaaggtactgtaactgctgctcccgcccatctgaggagaccggttcaccgaggctagtgtgggcatagagtgacttagatttgcccaaggcttgcttgaatgtccctttactaacacccaggtaggaaaacatgtctcttacatgtagcactacctctaaaaatgctgactaaaagtatgattgtaatgaagtgcttatgcctttaaggatttcccaggccgagagttaagtctcagttgacagtcagctgcacttcctttctctgctgttatttacactgcgtgtgttgacctgagaactctatatgaaatagtcctttgcatttgctcttttctcatccttggagaatcttcggatgtttccgtatacagagagcatagaagccgtctatcccgctagccccgctgcctccctgtgtaggatgcctttgagatgtggttcccgcagattcttgccgttcctggctttagggattaagacattccatttcttgctcagc

SEQ ID NO: 21567 - DNA, 1365 bp, Mus musculus
cggagggtcagacctaaccctgccgtcagtcttccatttggttcagatttcatcaaaattgaatttcacttatccatagcgctatctggtttacgccatcctctggtccttatctggagacagccggctgaagatgagagcagagctgggcgagtacatccggaggatcaccactgtgccgctgcccactgcgcccaacgtccccatcattgactatgaggtaaggtggtgggacacagcctgatttgtcctagagcagcagcctgtccggaacttggccttatcttgtagtgtctggcttcaccagacagcaggaaatgtggatgagcttgtcctgcctgtactttggagatttaaactgatcaaactaggtagtcctggaagacaggaggcacggaagccacggagtgacttatccttgtctgtatgtaggtgtccatcagtggagagtggtcgccgtggcaggccaaggtgcctcagattgaagtggagacacacaaggtggcagccccagatgtcgtcgtgccaaccttagatacagtccgccatgaagctctcctgtacacttggctggctgaacacaaacccctggtcttatgtggccctcctgggtctggcaagaccatgacactcttcagtgctctccgggccttgcctgacatggaggtaagagcggcagatggcataaacaagagctttggggtgaagtgtgggcttgaacattgaagctattttgtgtttacttaccaaaggttgtgggcctaaacttctcaagtgccactacaccagagctgttgctgaagacgtttgaccactactgcgaatacaggcgtacacctaacggtgttgtcttggctcctgttcagcttggaaagtggctggtcttgttctgtgatgaaatcaacttgcccgatatggataaatacggcacacagagagtcatctccttcatcagacaggtgtgtgccagggctgctcctccccactgcagcgctcatccacagcttgctaactttacacaatcttctccttcagatggtggagcatggaggcttctatcgtacctcagaccaaacgtgggtaaagctagagagaatccagtttgttggggcttgcaatccacccactgaccctgggagaaagcccctctcacacaggtaagcaactccatggacttctgcccactgtgccacatgtgtgcacatgcatatcacactggccaggtgtgtgggtgagtaaaagaggttcctgcaaacctgacaacctgagttcaacccccaggactcaaaggggagaaagttgtcctctgacttccagaagcatagggggggggaacacacacacacgtgtatgttcatgtatatg

SEQ ID NO: 21568 - DNA, 1598 bp, Mus musculus
tggcaccagttagcatcctgcaacctccagctagaactgggctcatctctctcctgccattggcatctagagggcaggcctgtgtctgcctggtctttgtccattagccatggcatacagcaactgctcaccaaatgctttgatacacaaattcaagttcagatttggtgaaaatgttgtaagcaccgtcctagaaaagccatgcacagccaggcggtggtggcgcacgcctttagtcacagcactcagggaggcagaggcacgcggatttcttagttcgaggccagcctggtctacagagtgagttccaggacagccagggctacacagagaaaccctgtctcaaaaaaaaaaaaaaaaaaagccaatgggaagcgaggcctacaggcctgaaaatgtatcacctctgatgtttcagaatattccgacaacctcaaggccatctgcttctgattggtgttagtggagctggaaaaaccaccctgtctcgctttgtcgcctggatgaatggcttgagtgtataccagattaaggtgggtctgttaggtggcatcttagtcccagagatggggatcttgattctgcatgcagctgtcgaatgaggaaagctttaactcgcggctggttctgtaggtccacaggaagtacactggggaagacttcgatgaagatcttaggacagtgctgagacggtctggctgtaaaaatgaaaagatagcattcataatggatgagtccaacgtcttagattccggattcctggaacgaatgaatacccttctggctaatggcgaggtaagggagcttgcgtgtgttgcactgtgtcacatggcacctcatcgagaggtgaggaggcacagtgaggctgttccgtccccaggttcctgggctctttgaaggggatgagtatgccacgctgatgacacagtgcaaagagggggcccagaaggaggggctcatgctggactcccacgaggagctctacaagtggttcaccagccaggtgatccgcaacctgcacgtggtcttcaccatgaacccgtcctcagaggggctcaaggacagggcggccacctcaccagcccttttcaacaggtaacgctgcccttgctggtcccgggtctgaggcctggactccatcgagggtcactcactgttaggatcaggtttgagatgtgggcatctttttcaggtgtgtgctgaactggtttggtgactggtccactgaagcactgtatcaagtcggcaaagaattcaccagtaagatggacctggagaagccgaactatatagtgcctgactacatgccagttgtgtatgataaactgccgcagcccccaacacaccgggaagccattgtgaacagctgtgtgtttgtccatcagactcttcaccaggtgtgtgcaatttggggtgcatcacaaagagccacgctgtgttcttaagactagacccaggggagcttcccacctgaccctgtaccatcccgacaaagcagatgctcttccacacctcttcttgacacccattctcgtcagcagtcttttcttcccttcactctaccttctccgcccaggcctgttccctccagagcagga

SEQ ID NO: 21569 - DNA, 2003 bp, Mus musculus
caggcagttctgagtttgaggccagcctagtcacagcctaggctgtgctgcttaggggctgatcacttacctggctggctaaaaacaacattagtgctgctcttttgtgttggggctttttgttggtggtagtggggttttccctgggtcactctgcctcccaggctgcccttgaacttggggtcctccttcctcggcttcctgggtgctggggttatagtcttgtaccatacatttccaatactttgtttggtccttcctgacttgaagtcttgaggaagtgtcactgtctcagtgacttgggtgtgcgaccatggccagtggtgactagcttgctggtcactggtcatcctaaccccgttcctaaaaggccttcggaatgctggagcagagcgcccatgttgggctgtggttttccatgcaggtggatatgaaggataacttttctgttgagtaataaaaagtattttactactgcatttcagttttgaaaggtgctggcttctgtttggaacagctgtagattgtagcagattattgaggcttgcgcaggcctcagcctgtctgtggcttggggttgctatctgcctcagaaagcaaaaatggaggctttatcttctaggagaacaagtcatcttctctgaaaagttcccctctcctatatgtgttaaaagagaaaacagccgggtgcggtggcgggaggcaagggtaggtggaactctgtgagttcaaagccagcctgatctacagagtgagttccaggacagctagcctacatagggaggacactgtctcaaaaagacaaaaataaagtaaaattaaaattaaaaatagaatgagaaaattactgttgttggttggaaatgtaattcttgtttgtttggttttatttttgttaaactaatacaatttattttaaaatacacaactttaaaatacacaactcagtatttacattttttaagtcatcaaaataatttatgagttaactgcctcttatatatacatgaagcttcttctgaagctaaaagtaatattcactcagccagtttttaaaatctatttggaatattaaacatgatagaagtagaagaaaatctcttatgaagtcttctatgaaaggaaattatgacaagtttctgatcagacagaaaccgttccatcaccagtggagaataggcagcgtacctggcttcatagaatgggaaatgtagttcttgaaactatgcagagtgtttccaaggaacagcttgccttagcctgggggaggtcagggatgctgtctagcagactcggcccttctccagcctctctgagtggagcgggagccctggtggtcatggttggtcctcacttggatgctgtctgtctcccccatcccacgcctgctgagcagctgtgaagtccatcaagaagcagcacctggtggaggtgaggtccatggccaaccctcctgcagctgtgaagctggctctggagtccatctgcctgctgcttggtgagagcaccacggactggaagcagatccgctccatcatcatgagagagaacttcatccccaccatcgtcaacttctcggctgaggagatcaggtgaggctgtcgctgcagctgtgggggaggcgtgagcacatctgggagaggctctgcttgttgtactctggcatgtcatctaccagacgggaacgtggtcacactcatcccactggtgccttttcagaatgcctgagagagaaagctagcattctcctctgcatacgtttttgatatcacttctgccagcggtcagttaaatcctcccgagctgtgagtgcttgccccagccgagcagggctcttccatctgttgcaccaggactggctggagttactgtagtgaggagggcagagccagtgtgcctgtcctcgttggccctgtcagcttcctctgagaaccagggcacagcagcatcgtacgtgctagccctttacttgtcttgcatggaaacacatttttattctgtgc

SEQ ID NO: 21570 - DNA, 1132 bp, Mus musculus
gccagcgctgcaggtgagaggccacggctctgtcacttggtttctacttgctcagtgctgctgctgtggcgattgactgggttttctgtttgggtttggacttagttactttttgttttgttttgtttttttttaaggttcatttacattattttttttcccacatctgtgtgtgtctgttgtggatgtgtgcacatgagtgcaagtaattgaggagcccaggaagggctcagacttcctgaagctggagtgcaggaagcggggagctccctgaatgagtgtttgggaaggccttgccttgctcctcactgctgagccggtcctctaccccccacaggcttgtgagagagagagtctactttataacccaggctgcttcagcctccgcacgccagggtcacaagcacaagccaccatcctggtttctgtttatgtggctacactaaggcatgggtgtcattacggcatgccacacatttcaccctgtgctttgccttcccagctcaattatgcagacatgttaaagcgagtggagcccctgaggaatgagctgcagaagctggaagatgacgccaaggacaaccagcagaaagccaatgaggtggagcagatgatcagggacctggaagccagcattgcccgctacaaggaggagtacgctgtcctcatctctgaggcccaggccatcaaggcagacctggcagctgtggaagcaaaggtcagccttcctgccaccccatagtctccatagttacctgcgggaagccaaggtcaacagtgctgatgggctcagcagcattgggcttgctgaggcagtgagcttgggtgtctgtgtctctgggtatacgtgtatgtcgtgtgtgtgtgtgtgtgtgtgtgtgtgtgtgtgtctcgcagtcctggctttgcactcagtacattggcttgcactcacttcctccttactagccagcctgccttccctcctggccacacccagctggtcctctcctcaggctaaaagttagcctctgcctttggctggtactctgaagagatcccagcacctgggccgcttagtgtccaccacagtctcgcctcgccaggactctggacggtctgagtgcttttagtcctcctcaggccctgcaca

SEQ ID NO: 21571 - DNA, 1200 bp, Mus musculus
ggtaagaggcactcaaagagaagagtcggcctgggcacagttgcgctggcacagtctgacagtcacaggagatggataaccagtgtcctctttcagttccgcacagacattgcaaggacggagtacctctccaatgctgacgaacgcctccgctggcaggccagctctctgcctgccgacgacctgtgcacagagaatgccatcatgctaaaacgattcaataggtgtgtgctcttaggccgaaggtgcagctagagattggtgtgggcgtcctgttaaattgtactcacacagcttgtttgaagaaagggaaggagaagtggttgtggggaggcagtgctaagaggtcagcgtttgtctttacatcttagtgagttctgcttaccacagcttttccgggagatatcttgatttaagtcgcatctgtttaggagtctggcagtgtgtagagattgcctgtctggagtaatggtctcttcccatccgatcaggagactgactttcctgatggagctttgacctaatcacatgtcactttaccctcaggtacccgctgatcatcgacccctccggacaggccacagaattcatcatgaatgaatataaggaccggaagatcacaaggaccagcttcttagatgatgccttccggaagaatttggagagtgctctgagatttggcaatccccttcttgtccaggtttgtgtctgtgtttgaattgtcactcctcctaggcgcatctgtggttgctgtgaagtaaatggaaattacatagcacaaacaccagtagaatttatttgaactttgtatttgaatggggtttgatgctaaaacaaacacacaaacaaaaaaaaaagccaggcctggtggtgcacgcctttaatcccagcactcagaagacagaggcaggaagatttcttaagtttaaggccaggctagtctacacagagtgctccaaaatagccataaaaagatcctgtctcaaaaccaatgaccaggcagtggtaatgcacatctttagggaggcagaggtaggtacatctctgagttcaaggccattctggtctacagagcgagtttaggccaaccagggctacacagagaaagcctgtctggaaaaaactgggtttttgtttggtgctggggtggaacccgggcctcacactacaagaaaagtgttctgccactcagtcacatcc

SEQ ID NO: 21572 - DNA, 1101 bp, Mus musculus
taaagcagaaaggccagacgtggacgagaagcgctccgacctcctgaaactgcaaggtgtgcctctggtccctggcttcccaaccgagttgggtagcaggctgagctccggagggtgagggtgacactgctccccagtggcagagtgacacaaatctgtcttgtcacaggggagttccaactccgtttacggcagcttgaaaagtctctgctccaagctctgaatgaggtaaaaggccgcattctggatgacgacaccatcattacaaccctggagaatctgaagcgggaagctgccgaggttaccagaaaggtggaggagacagatattgtcatgcaggaggtggagaccgtgtcccagcagtacctgccgctgtccactgcctgcagcagcatctacttcactatggagtccttgaagcaggtgaggccattggcacagcagctctggttcccagctgtggcccaaggcacactctgatggtcacatggcttcctccaggttcacttcctgtaccagtactctctgcagttcttcctggacatctaccacaacgtgctgtatgagaaccccaacctgaagggtgccaccgatcacacacagcgcctctccatcataaccaaggacctcttccaggtagagcgtataggagcttgcttctgtctggtgcaagggtgtggaagtgtggcctccagaccaccaccatcccctctctctcgcttcccaggtggcctttaaccgagtggctcgaggcatgctgcaccaggaccacatcaccttcgccatgctgctagcgaggatcaagctgaaaggcaccgtggggtgaggcaggctgctcagcagtgatgtggctctgcgggctgccctagcatgcattctgtgtaaaggcacctgcctgacctgtcccccacttcacagggagcccacctatgatgcagagttccagcacttcctcagagggaaggagattgtgctgagtgctggctccacccccaaaatccagggcctgaccgtagagcaggcagaagctgtcgtgaggttgagctgtctgcctgcatttaaagatctgattgccaaggtgcaggcagatgaggtaagtgt

SEQ ID NO: 21573 - DNA, 1099 bp, Mus musculus
acgacattggaacaaagacagacgctccctgggtccaagagaaacaggaggctggggtccgagctggatctcgggggcttcgtgcctggctgagctggtgctctggtggagatgtcagcacctttaccctcccttgccacgcctcgtttcagctcccattgggcaggccatccaccgcctgctcctgattcaagccttccgacccgaccgcctgttggccatggcccacatgtttgtttccacaaacctcggagagtccttcatgtccatcatggagcagcctctcgacctcacccacattgtgggcacagaggtaatggatgtcctcgtgccccatccctgctccccatgcaccctgtgatatagcccagacacactgcttcttggctgcagtcttccccgagccaacactaccctcaggccttctcctgacaggtcctgtcttataacccgtcatctggggtgtgccatgtcatttacaggtgaagccaaacacacctgtcctgatgtgctctgtgcctgggtatgatgccagcggacatgttgaggacctcgcagcagagcagaacacgcagatcacgtctattgccatcggtaaggatgtgtgctggtttcgtgaacaccgggcagcctggaagcataaggctgcctgccgtggttcacacttgtcttccttgtctcaggctcagcagaaggctttaaccaagcagataaggccatcaacaccgccgtgaagtcaggcaggtgggtgatgttgaagaacgtgcacctggccccgggctggctgatgcagctggagaagaagctgcactccctgcagccccacgcctgcttccgacttttcctcaccatggagatcaaccccaaggtgagctgagggtgctggtgcctctgtcaagcctttatcagaaccagtgggtcagctgggtgtggtcacatgtctgcaaccccagaacttgtgatgctgggacaggaggattgctgcaagcttgaggtcaaccacacattgtctctccaaaataaaagaagacatcaatcacagagactaccttctccctcaggtgcccgtgaacctgctccgtgctggtcggatctttgt

SEQ ID NO: 21574 - DNA, 1426 bp, Mus musculus
agaggtggctcagcggttaagagcactgactgtccttccagaggtcctgagttcagttcccagcaaccacatgggggctcacaaccatctgtaatgggatccgatgcactctactggtgtgcatgaagagagcaatggtgtgctcatacatataataaataaataaaagccaatcttctagaaacctgtctaaattcaagggccattctgccaatccggatctttagaaagctaggtgctttggtcagccatattgcttgattctggtgctgcctgcgctgccggtcagatggttgaagggtgggggtggcttgttctgcagatctttgcttctgaagtaggatctggtttccttagacaaacacatgctttctgacgaatctgtctgtggtcattttcttcatctagtctccaaatgagcgcgcccgcttgtatttcctgctggcttggttccatgccatcatccaagagcgcctgcgctatgctccactggggtggtcaaagaagtacgaatttggagaatctgaccttcgatcagcttgtgacacggtggacacgtggctggacgacacagccaaggcaagttaggctacatcacccatcccgtgatgggggcagacagtggatctgaactcaagggagggctgatactttgtagcagccagaactagactgcagcagaaagctggcccctccagggtacacatgtaacccagcctctgtcctccccagggccggcagaacatctcaccggataagatcccatggtctgccctgaagaccctgatggcgcagtccatctatggtgggcgggtggacaatgagttcgaccagcgtctgctcaacaccttcctggagcggctgttcaccacccgcagcttcgacagtgaattcaagctggcgtgcaaggttgacgggcacaaggacatccagatgcctgatggtatcaggtgcggccgcatgtgggaacagaagtcaggcttgggggaggggtgtttggggggaaagcgtgtttggagccacagtctaccggactctgattccaaatgtcctgctttctcaggcgagaggagtttgtgcagtgggtggagctgctgcctgacgcccagacaccctcatggctgggcctccccaacaatgctgaaagggtcctgcttaccacccaaggtgggtagtgagtcccctcactcctggacccctgcccaccctaagccttgctggaagggcttgttcatggggagtcctgaaaagaaggtttgagggctagctttagttcaggagttggaagcactgatggaggcttggtggtatgcaggctgtgccctagcctggagccaaaggcagaaaaccgtggagttcaacatccagtctacacagcatgcctcaaacaacacagcataccttgtattaagtcagttttactttt

SEQ ID NO: 21575 - DNA, 1237 bp, Mus musculus
ctgtggggttggatgcagtctctccagcacacaggctgattggttctcagtgctggtgtcacttgacccagcgcttccctaagccctgtacccatcaacactgtcaagaaccagggcattgcccagcttctccacctttctttgcacagtccagagagcagggagcctcagcagcctgggcatcaattcccaagtgtgagggacaggcctagcaccagtgtgcttttagtaacgtggcatttgtgtgagcagagttcagaagagtcccagtggccatcacaaacccctagcagggtctgcctttaggctgagtgaggcttctgaggcctgcaggctacagcctcacagcacacaaccaggccattgggtctggctttgtcttaattgccctggggtagacgtgtggcacgaggacagcctacaggctgccgtggtgagctgatggtcaaacagctcttggcctgtccactgaagtcctccccacccgggcctggcctaggcgtggacatgatcagcaagatgctgaagatgcagatgctggaggacgaggatgacctggcctacgcagagacggagaagaaggcaaggacggactccacctccgatggccgtccagcctggatgaggacactgcacaccacggcgtccaactggctgcacctcatcccacagacactgagccccctgaagcgcaccgtggagaacatcaaggtagctgggctgggctcagcgtgctgctccccaggcaggcagatctctgagttcgaggctagcttggtctacagagtgagttccaggatagccagggctatatagagaaaccctgtctcgaaaacccaaaatacaaaaaaaaaagaatggccaccgctttaattaaactctttgaaagctgtgatctgagaggggcagagaaattcatcaggccagggccacactgcactctggccagctcccaaaaaggtctggtcaaaagctctggtgctgctcccaggtgtgccttgtctctgcacagagcccgtccttagccctcttctctctggctttaggatcctttgtttaggttctttgagagagaagtaaagatgggggccaagttactccaagatgtgcgccaagatcttgctgacgtcgttcaagtgtgcgaggggaaaaagaagcagacaaactacctgcgcacgctcatcaatgagctggtgaaaggtgctgatggggtgtgcggctgggagctggtctgcca

SEQ ID NO: 21576 - DNA, 1391 bp, Mus musculus
gtcaatgtcaccgcctcacagagtgccacccttgatgcctgcagctttggagtcacaggtgagctggcgtctgatctctcagcctggcctttctgtgaaacctgtttccaaatgaatgtacccaaagtgtctgggcagagccgcccagctgagcctgtgggtgtcctggaagccgagctgtgtggctctgtatggcttcagccccttctccacatctcctcacaggtctgaagctccaaggggccacgtgcagcaacaacaagctatcactctccaatgccatctccacagtcctccccctcacacagctgcgctgggtgaaacaaacaagcgccgagaagaaggccagcgtggtaagtgtcgtggcctcgctctttggctctgccgtgctgggactctacttgtgtgcaaacaactgcaccccagccctggacccccatgggagcttgtccctagagctgatgaacagtaaagtccctctgtctgtctcacaggtgaccttacctgtctacctgaacttcacccgggcagacctcatcttcaccgtggactttgaaattgctacaaaggaagatcctcgcagcttctatgagcgtggagttgccgttctgtgcactgagtaaagctagacttttctccagtcctctttctggaataggaaactcccaatatttaaccttcattcatccttaacggtgtggaagggttgatggactggaaagcaagtggttggttcgcgttggcgggtgacaggtgctgcggttggagacggtgggatgggagaagagaagagtgcgctgtccgagggctgaccgaatggctgggtttagtaaataaaacactaagcatgacgggctcccgcctcttgccgctctgctcagtctgctgtgggaatccttgcgtcccagcccacctcacctttgtcaccgtggtcacagatgcagaagcaacagggtgagaccaggaaagctgcacctcctccctgaggcctggcagcaactctgttcgtgactgacacccctatccctggggaccttctctctctcagacctaagccctgccaccagtccatcctcccacacttcctttccacatgacctgtggtgagagagtggcctcgtcccacaggaagggtgacaattagcctggtcctagcaactcaggatctctaaatccctctgactgtgtggtacagggtgggcagaggctgttgtcgtagctgttaaggactccttagcacagagaggcactgtcctaactcccttctctgggagaagacacagcaggttcctctgcaggaggaaaagcctgtgttctcttaaggaacctaggggtggtgcaggtgacacggcacccacggcttcttgctccgtccaaacacctcagaggat

SEQ ID NO: 21577 - DNA, 1336 bp, Mus musculus
tccaggaaaaccaaagctatatatactaaccctggctttaaaaacaaaaaaacgaagttgacttttgtagctattgaaacaattggattattgctgttatggaagcctcagctaaagggtttgaatgaaatgaacagtgacctttgtgtttgaggatggctttgggctggttctgcctctgtcccagtgctggggtttataggcacatacttggcttgccccctatgaataaagtttcctttcaggggattggatggggtgttaatgtctaaagcaagtctccgcctcccttagcggacattaactgtaacatttatttccaaaacaaggtattgatgaggatgatcctactgtggatgacaccagtgctgctgtaactgaagaaatgcctcccctggaaggagatgacgacacatcacgcatggaagaagtagactaagtcaccagaactatgtgtttgcttaccttcattccttctgataatatattttccatgatttttgtttatttttgttaacatttaaaacatctgtgtggcatgaaaactaaggggaagataaaatttctacatgtgatactgtgatactataggtttaactcaagaggttgatagagcgtttgttataagacgtaacgtaacctactgttcatgtttgctctggtctgaagtgtttagctgttgagctggattccttaggagaccaaattaagatggcttaaattacatcttaaaattttcatttcctgtagttaattctgcatgtattagtcttagaagtaaacacaagttaaaacaacctgacaggaattccccaagtggcttgttttccaaagtcccgagaacaaccctaagtttcctaggtcttgtaactcagcaaggcttgtgaatggaaataacagtgcccaatcacattctgctttaaaagataaatacagaggagataaaaagaagtgtggaatgtgtcttttctttgcgcacccccacacacacacacacatttgatccataaaaattacactggtccagagacttaatcttgtgtgtcctatatgtggacatcctctcttccccagcacactcagaccttcttgctagagtgggaatataaaacagctggtctgtggggttctgggattttgtcctagcacctcttagataaaggcatgtttgaagacttggctgggtagtttgaggccagcctgagttccatgaaatcctgtcttggaggctataaggaaaaatagtgggtatttactatagggggcaggtaaagagcactaaccaaagccgggcggtggtggtgcacgcctttaatcccggcaggcggatttctga

SEQ ID NO: 21578 - DNA, 1151 bp, Mus musculus
gacagacagaaaatcccattcgttgggtctgtgttggtgggggactgaggatgtaacctagtggagacggggtttgcctaacttgtttgaggctctgggctcagtccccttggaaaaaagccaaaaagattccttaggtttcagaatgattaaataggtgtctttgtttttccccagatttcattagaggggtagtggattctgaggatctccctctaaatatttcccgtgaaatgctgcaacaaagtaaaattctgaaagttatcagaaagaatttggtcaagaaatgcttagaactatttactgaactagcagaagataaagagaactacaaaaagttttatgagcagttctcaaaaaatataaaggttggtggtacattttcttgttactggcagttttccaaactaacttgattgggggaggggtcctcacacacttgcttctgcctcccaagtgtggggattaaaggctaatgcttcataaatggctttcctgtgcttgtgcttcagcttggaattcacgaggactctcagaatcggaagaagctttcagagctgttgcggtactacacatctgcttctggggacgagatggtttctctgaaggactactgtaccagaatgaaggaaaaccagaagcacatctattttatcacaggtaatggtcaagtaaacaggtgttttctctacctgttggacagcacttaaggaggcaagaatgtccagcctgtacctaagggaaagctgaatacatgaaaccatttctaaaagtaacttaacaatataaatatatatattgtctcaggtgagaccaaggaccaggttgctaactccgcctttgtggaacgtctccgaaagcatggcttagaagtaatttatatgattgagcccattgatgagtattgtgtgcaacagctgaaggaatttgagggcaagaccttggtgtctgttaccaaagaaggactggaacttccagaagatgaagaggaaaagaagaaacaggaagagaaaaagacaaaatttgagaacctctgcaaaattatgaaagatattttggagaagaaggttgaaaaggtatgtgaatggttacacatcactcgtagtcagtttggtccttttatctgagttttgactaaatcactgctaatg

SEQ ID NO: 21579 - DNA, 2140 bp, Mus musculus
ctggcgccgcggcggcagcggggccaccatccgagttccctcagcccgcggaggtgggcggccatggcttccgaccctaggccccaggcgggcctcatatctacgccccaggccggggatgcggcaatggccgccgaggaggagcggtggcggcggcgaggcgggcgcggggcgagcgaagcgagggttgggctgtcgccggtgccgccgaggcgcgggcgggcgagggaggcgccatagcggcgggttgggggagggtggccgttaggaacggcgtgcgtggagccgcccgggtccgaacgtcctcccggaggcgcgcacatgcgcttcgtaattaccgcattctgaaatgaggtcatccctttgtcatccaccccccgccccgtcgcccttttctatttcgtccctttcttagtccaaaatagagtcggtaagagacctctatagaggaggggcggtcgttagcacgcctgcagccattctgtgaggctttagagtcgtcctctgtgttccagatgcctgaggaaacccagacccaagaccaaccaatggaggaggaggaggtcgagacctttgcctttcaggcagaaattgcccagttaatgtccttgatcatcaataccttctactcgaacaaagagatctttctgagggagctcatctccaattcatcggacgtgagtataccacttggaggattggacgttgctttccctgaaaatttcaccttggggtttgcgcttgacggttttttcatttttaatcttttcttaataggctctggataaaatccgttacgagagcctgacggaccccagtaaactggactcggggaaggagctgcacatcaatctcattcccagcaaacaggaccgaaccctgaccattgtggataccgggattggaatgaccaaggccgacttgatcaataaccttggcaccattgccaagtcgggcaccaaagccttcatggaggctttgcaggctggtgcagatatctctatgattggccagtttggtgttggtttttactctgcctatttggttgctgagaaagtgactgtcatcacgaagcataacgacgatgagcagtatgcctgggagtcctcagctgggggatccttcacagtgaggactgacacaggtaggcataggccaaaaggaatgtattcaattgtagggggtgtctggttaacttcagtaagtgcttgagagggttaacttggagagttgaagagttaaagagcagtctggcatacatagccttagtgctaagtcctgagcttttcaacaaaattgttaatctaaagggagcttcaggacctgggctaggaaataggaaaaatgtatggctgtttgctcagttgtacatcttgggcaaggaagttaaagctttggagacctttgcatttgtggggaaggttagctgctaggaaacctccagcaagcatggaggctttgaatagtaaccattgcccttttcttttccaggtgaaccaatgggtcgtggaacaaaggttatcttgcatctgaaagaagaccaaacagagtatttggaggaaaggagaataaaggagatcgtgaagaagcattctcagttcattggctatcccattactctctttgtaagttacctacagggtaaatttcatataattgagataactgaggctgtttagagttctgtgaacctggtgttgtactagacagattagcctgtttggaaaggtggtatctgaagaggattgtggagaaattagagaaactactgatgagaggcttcttggttgtacacatttctgagatctgtcctagttgtataaatttataatgaagtgatttgcctttcaaggtggagaaggaacgagataaggaagtcagtgatgatgaggctgaagaaaaggaagagaaagaggaagagaaagaaaaagaagaaaaggagtctgatgataaacctgaaatagaagatgttggctctgatgaagaagaggaggagaagaaggatggtgacaagaagaaaaagaagaagataaaggaaaagtacattgatcaagaagaactcaacaaaacaaagccgatttggacgagaaatcctgatgacatcactaatgaggaatatggagagttctacaagagctta

SEQ ID NO: 21580 - DNA, 1220 bp, Mus musculus
ccaggataaggaactcaaagtgacaaatcgagcttcaggcattcagaacactaaatttctcctgggttagcccagaagaccttgaatgttctcctgggttagccaagaagccaggccgctgactaatttctgaaagtttctcaacccgtacaaaaggggctagcaagcccacctgcaccaatgacaggtaacacagcacttacagctagtgaaaagagtagaaagactacctgactcattcaagagggtccttagggactataaaccaactcttttctttctttccgtctctatttattgagacagagtctctctgtacccgtctggtctcaaatgcacagcaatcaccctgcctgtacttcctcagtgctagaattaaaggtgtgagtgagcctccagaattgtctcaaatctgaggccagcctggagtacatactgagatcctgtctcaaagtacatagataggaaagtaaataaaatttaacaataaaagtcaagacaacgggctggtgagatggctcagtgggtaagagcacccaaccgctcttccgaaggtccagagttcaaatcccagcaaccacatggtggctcacaaccatccgtaacgagatctgactccctcctctggagtgtctgaagacagctacagtgtacttacatataatcaataaataaatctttaaaaaaaaaaagtcaagacaacatgtttactatgtactaacagtgtaatggatatggacaaataaagtatggtttctgcccttaagatcagccttaaggggacaaggcaaaaacaaaaccgggaggactgtgtgaagagggagaggagtacaggggttggcctgcagagcagacaggaccaagtgtgcccgacccagggcgctgcactcaccacagaccctcagtggagctcaagcctctcccagttgcctcatcagtatctaggtgcagaccgttgtcctatgtggcatggcatttcccagttccagagccatctccagagcaatgagggtagtagataacctaaaggagtggctaaggaagactggaataatgtgcatttctagtggcatcagaaacgggttagtgatccaagttgggacagtaaatacaagaggcttctgagaagtaacctcgttcttcggagaaactgagtgctggtctccctctagcccatggggtgcagagagcctcgcacccctccaccaagtgcccacagc

SEQ ID NO: 21581 - DNA, 1134 bp, Mus musculus
ccttttcacagtttgagctaagcccagttttcatttgctcagctgtctttacctagagttatgcaagtttaaatgtggtagattaattaatgttgcaaatgtgtctttccttggagtaactgttttgtgcatttgtacagagaatgatcagcagtctacagcaggtactttaaaacccttctgtattggggtgagggaggtggcttgggggggggtgtaaagtgatacttttgattttcagcccccacatagaaagccaggcatggccacgtgtatctttcattccagtcctgggaagcggagactgaaggatccctgggatcagctagtctagatgagtcaggtgagccccagtttcagtgagagaccctggtgtttgtttatttaaaagcagacagtagaggaagctgcagcatgttgacctctggtctatgcggacatacgtgtccatacacatgcatcacctgtggaatgggggaggggacgacaagattacttcaaacttaagatgtgattttggattttttgctgctgttatgtcttttttttttttgagactgggctttgctgtgtaaccctgactggtctggaactcattatgaagaccaagatggactggaactcacattgatccttctgtcgttgcctcccaagttctgggattgaaggcatgcaccaccatacccagctcttgatatgtatagtaaaaaatagagaattccagacattgttcacatcattggatagtttcatacagatggaatgaaatgacatagtggtgacatgtcctcaggctgctcaaattacagtttaagcttctgtgtgtgtatttggtaggcatttagctaaggggtagctttcatgctcttgaaaatatttcttatacagttacctgaaatggttagacctaaaagtgaatcaagaaacacaggttttgcagtgttgtttgcactagggtcttgggcacatcttcagttctgttcagagaggaacttgagctgtctgacctatccgttaggaatatatcaggacttatacagagcagacagaagttggcaaatagattgtatttactcaggctgttacggtggcttttcagttccaagtagtagcgtgtatttggcacttttcctc

SEQ ID NO: 21582 - DNA, 1188 bp, Mus musculus
gaggtcatgcaccatggatagatgagctaatcccagttggtcctgagtacagaggaggaggccaagagaggctttctgctgaagtcatgcacatgtgttatgagtgccttcactgtggaggggttgtttggagcattatagcgtgaatgtaaagcctcttgccatgctgtgccccttgggtgtggtctgtcactgctcacactggtgtgctcagttcccagggccggaacgtaacagtgaggatggcataccgcagcacgtggtatggagagttttctctgtcacttacatgcacacattgtttagggtgaccgtagtgcacacttctggttcgtgagtgagactgccctgtaatgcttctggtcactgcagtagcgccactaaaggcactgttgctgtgtcggttgggcagtcacacttttggctgcactttcttaccaggattacattttttgagttacagtaaaatttttccattgtagtttaaggctgtagttaaaaatttactcctaatcctcctgctagaagctttcgtgaccttcaactttctcacctgtagtagagtaatagtgcttggggaagtggactcggatcagccagcagtgcggctctaacccagccctccctgcacagggaatccacacctttagaacatgcccatctgccatagtcatgtccccgggtgcagagtgaggagtgccggggcaacatgacctagtggacacacagagactcagcgtgagccttcaggctccggagagctggatgtctcttcatttcttcatcctcctaatatcctctttccctaaagctatggtctagccttgaaaatgaccagagcccttgctaagaaattatgatggcctaatggaatcttgcagagtagtgctaggtgttcaggctactgacattagcatacggcaggtcaccaagcaggaaacaggagtcagggaacaacaaacaaacaaacaaacaacagtatccccaaaggcagtacttactggtctaagatgccagtcatgttctgtgccagtagcagtggtagctgatactctgcctaaacctaagaacttggagctccaggcctccatgctgtggatagacttttagggtcccaagtattcctgccagtgatttgttagtagtctatttcttgcaaggtcttttctttttgcatgagcttgcatt

SEQ ID NO: 21583 - DNA, 1170 bp, Mus musculus
ccatgagctgggatcaaggggaaatagataggatgctgacagtgactcgaatcactcgctagtgggaagcgggggaggtagaacagggtggaaactactttctttaaagggggaaagaaaagaccctgctgatgttgtcggatggagacctatgaattctcttctgcatccccataaaaacgtcacagtttgtgatttggggtttagtcacagtatatttcaacttctgctgctaagtgttgtgtccttaatgattaacctggaaaccctgtttggggtcctttgctgtgtgtgtgtcttaccctcctgggctccctgctaggttcagggtctggtaagagcccaggccagctctagagggctgtcttagttgcatgacctggcccaggctggcccctgcatggagggcgtggtgctgctccaggcccgctctacccccctgactgactcctgcccccctttctttgacagccggcagagcagttctgcaggcaggaggacagagtgcaaggtgttctccaagaccagaactaaaggtgcggcagctccagaagagggtgctggtgctggagggcggggcttccttcctccttgtgccctgcagacagaggtggtggggtgtcatggggttgcaccgattgccatggtgggtcctgatctccaaagaatgaggactagggccactgtgcttctacagtagccacccagagaaatgtttttagttttctaaacaaactttgagcttcctcatcaaaacttccctgagcgttttcatgagcaagaatatctttggtaactagctactggactaaaacagctactggcaagaggctcttaaaggcagggttccagtctgcttgctgtgacccagacagagtctgcgggctcagtgagggccactggacagttggaccctcctgtctgtcctgcttgcccaccgcagacaacctttctggtgactcgagaaagcagctgccctgtagctatggtgaatcagcccccagctccccccccccccgttttccttctctgtgcatgtggtgccagggattatgccaaaggactcaacccctgcccaacacgccacatcccagccctctgcagaggctcagaagttgtatcttcctcttaaacaaatgctccagagagactgggtgatacctgcagcta

SEQ ID NO: 21584 - DNA, 1334 bp, Mus musculus
tcacgcagccgtggtgtctgttctgctgcagatgaggtctcccgccggctctctgaagcatacaagaaggagctccttttgaagcacaccattggcgcagagctggcccatactgcagatcgcaacctcagcctgacctacctgtccatgtggctgcaccagccctacatagagagcaacagcaagctgcagctggagagcatgctgctcgagacaggtcaccgggccctgtgactgcctgtgaccacagcttggagctccaggccactggctggacagtcagtcccttgggtggaacctgttgtgcctcaaggccagatactttgagggtcctgggatcactcttcccgctgctgcagcctctccagacacaggcactgctgagctgtcctcccgctgcttcccgggtgtcatgaagctccactgagtgacagaaacaagaacagctgagggcagttttataaatctgtggagacaacctgagtttcccatttctattttgtacctatctacttttttttttcttttttgtggtgctggaaatcaaatcaaatcaagacttcacacaagctgaatattcaaccactggtccacactgccaaccctgtgctttgaagagaatgttttagttctgaaactaactatcccaggattattagatgttaaagtctcataagtagggacagagtggtgagttagcagttgagagcactgtggacttctggcctcccctggcagcaacacacaaattacttaggtatctgtgtatcggccgaatgtatagatgaccagggcaactgtaaatgggagtgggctccttggagttagaactacaagaggttgtcagccacctgatttgggtgttagaaaccaaactccagtcagtcctctggaagaacagttcacgctcttaactgctgagccatctctcctatggctggagatacatatatttaatatattgtataaatatattaataaaacatgtattgaaatatatatacatattaatcctgttgagttaactgagtatagagtttagtatcacagaaatgaaaatcacccaaaattgctgctgcttgcctgagaaaatggacaagccaatacaaagaccagcagttgcagactgtttgtatctggggcctggccgtgctagatgtttagctttctcactgttcgccaccggtgtactccctaagtccatagagagctaacattcatcatgaagagttgcctgcatagtgaggtcagctggccctcacagttaggtcaggggccgcttgcacttcctcctttcactccttcctgatagggaacacactaagaccactggg

SEQ ID NO: 21585 - DNA, 1204 bp, Mus musculus
gactgagtagctggtctatattaatatactttgttggaaagtcaagttcaagaccaactaacgcaacaagacctttctcaaaacaaacaaaacttcccaggattgccctaccttgaactgtctgtcgtaagtaaggtagagctgggaatcgtggctcacacctggaatcccagcacttgagaagctaaacaggcagactgctgtgactttaagattaacctgggctacagagtgagaccctctctctctctctctctctctctctctcttttttaagatttatttatttatttaatgtaagtacactgtagctgtcttcagacactccagaagagggagtcagatctcattacagatggttgtgagccaccatgtggttgctgggatttgaactcaggaccttcagaagaacagtcagtgctcttaaccactgagccatctctccagtcccgagaccctctctttcaaaaataaagtaaaataaaataaaaaaataaaaccaacccaagccctttcccctggctggcagcgcggaggccgcacgatgcctggagttactgtaaaagacgttaaccagcaggagttcgtcagagctctggcagccttcctcaaaaagtccgggaagctgaaagtccccgaatgggtggacacagtcaagctggccaaacataaagagcttgccccatatgatgagaactggttctacacacgagctgcttccacagcacggcacctgtacctccgaggtggtgctggggttggttccatgaccaagatctatggaggacggcagagaaacggtgtcagacccagccacttcagcagaggctctaagagtgtggcccgccgggtcctccaagccctggaggggctgaaaatggtggaaaaggaccaagatgggggccgcaagctaacacctcagggacagagagatctggacaggatcgctggacaggtggcagctgccaacaagaagcattagaacaaaggatgctgggttaataaattgcctcattcattaaaaaaaaaaaaaaaaccaacccaaggaaaatctaggaggcaaaagcctgtgatattagctctcaggaggctaaggtaggaagattgcaactttgaggccaaccaggtctacttagcaagttcccggccagccagggctacacagcatgagctcgtctacaataaataaataaataaataaata

SEQ ID NO: 21586 - DNA, 1194 bp, Mus musculus
accatgctgtcagagcagtgtccacatcatccttactcttcctgtcctactgaattggaatcagtggttggcaccgatttgcagaagtcctgtgggcaagtcctcatagttgcaaactctgctggtactcctgtgattatactactaggacgtacttgctggccaaagcaatagaacatggatttacatattatctgtccagcctgctccctcagtagttgcctttgatgtcatttagaaacatgacacacattactgacaggccacaaagaggtgaggggagctccctggagctgtgactctgcataagccttgcagtatgataagtctggggttttacctgagcagttgtacatgaaaaggtatctattatgaaagaccacagatagcaaaagtaccaaaaaaagaaaaccacagatcaaaagagtgtgacaagcttcaactgagtctgcggggctcttcctctctcactacaggtctcagtgtggatcggccctgcgcccgagccgtgaaggtggactgtccatacccactgtcccagatcgcagcccggaacagtgtggtgtgggcactgacagagcagagggccctcctgtaccgggagggtgtgagcagcttctgtcctgagggggagcagtggaagtgtgacattgtcaggtatgggcccagcactgtgacctttattcctgagcctctcctggcaaaaccaacacttacaggtttcacggtgggagagtttttgcttttgtcaaagttggcctcaatagactggtcttgggaatgttctgcgctcctctgctggtcacattaccgtttgtgttggggtttaggtatagagctgggcaggtagagtatttgcctagcacacacaaggccctgagttccatcctcagtcatacacaaactcagctgtacttgcctgtagtctcatcacttaggagctagaggcaacccgtaattgcctcagttcagagtcatcctcagccttggatacatgtctccaaaaaagtgtaggggtagagcaatggctcagaggttaagagcaccagctgctcttccaaaggtcctgagttcaattcccagcaacaacatggtggctcacaaccatctgtaatgggatctggtgccctcttctggccatccaggcaaaacagtgtgtgtgtgtgtgtgtgtgtgtgtgtgtgtgtgtgtgtg

SEQ ID NO: 21587 - DNA, 1162 bp, Mus musculus
gtcatcaggtttgtgcagagcgcagttacctgccgagccttctctccagtcacgttgtgactgacccaggctcttacctactctgtctattctagtcttgactcagattgagcagtttctggtttttagtaatttgttcatctgtgtcatctaacttattggcatccagtttccatatggtattcttatatatggtattctcttccttttatttctgtatgattgtaggaatatcctcttttatttctgattttaataatttatttttttctttccttttttgcatgatatgtgtgttctttgatgcacatgaatatggacactgagtatgaagaagtccagcgtccctcttcctcctccttgtttgagcaggtgtgcagcaggccagctggcctggggaatttccagggattctcctgtctcagcctcccatctttccatggagcgctggaattacagatgcgcactaccgctcctgactgcacgtgggctctgagattgaactgtggtcaccgtgcttacgcgcaggtgcctgactcactaagccacctcctgctccgcgtttttctcagctcatcatagtctttgtccactttatcttctttttaaaataccatctttggttttattggttttgtatattattttcctatattttgtctctttctgttctaatccttatttcctccccacactcttgtgcacagagccttgcttggtagtgatattccgctgagagctcccagctctactgactacagtgatgcatcttggaagccatgtgatggcaatgggctgtgagtgaggctccggcacagagcaatggccatgctgagtaaagagctagactacaattatggtgccaaagaccctgtccccagcctctgccacaggaacctctgcgcatcctggtcatggggaacatgtgtcaaaccacaagcccctattcctttctccatcttgattccacaataacctcaagaaatcaaaactaaaatgggggaagaaaggtttaattggagtgatttgaaggtgatcaacagcttggcacaggaaaatgctaaaatggaataaagtcctgtgaaaggacctcaaagctgtgctgagtgaagcagtgacgccaagtggctgctgaacaccgacccgttgagcagtgctgccg

SEQ ID NO: 21588 - DNA, 1281 bp, Mus musculus
caggattgtcacaagttccagaccagcctggaccacaaagatcctgtctcaaaaaaacccctgaatttatagccgggcgtggtggcacacgcctttagtcccagcacttgggaggcagaggcaggtgaatttctgagttcgaggacagcctggtctactgagtgagttccaggacagccagggctacacagagaaaccctgacttgaaaaaacaaacaaacaaacaaaaaaaaaccacacaaaaaaaaaccccccaaaaccctgaatttaagagtaaacaaactgagaaaaagtcatgattgccacaacatttgcatccatgttgaacttgtccaaaccagtaggaaaacgcaacacaaagatggacaaaggaggcgaagtggtgactcacacaaacatcctccagtaggaaaccccaaaggcacagccctccgagaaagcctctgatggtcctcagtccaaaagcctaacactaaaaacgccatctctgaaaattagtcaggaacaaaactgagctgtgtagcagtgatctagggcttacctagcatgcaggcccagtctcactccccagaatggcagcaaatgaaaccaaacaaggagggtgccggtctttatgagcttgaacacatgcctataatgccacaggatggatgtcagcagagcatactgtggggtcccacaggcaatcttagggcggtgtgaaactcttctggcctatcagtacagtacggtttacagatagcactgcatgtggggggtaccgtgtgtacatcactctttaggagggtcagaaagacaaggtctcatttgggacagacagctggccagcgaatgtttccaagcctgtgtcttttttaatcctttgaatgttgagccatgtaaatgtattatttatttcaaaactaaataaaatttatatgtagaaactcaattctcttaattttgcagtattaacagtatttgagtcaaacatcacaaaatcaacaccaaaagcattaaaaaaaaaaaaaaaactttacagccggacgtggtggggcatgcctttaatcccagcactcgggaggcagaggcaggcggatttctgagtttgaggccagcctggtctacaaaatgagctccaggacagccagagctataaagagaaaccctgtctcaaaaaaccaaaaaaaaaaaaaaaaaaaaaaaacttttcataaaattggaagtgcttacacattggtgatctttcttattttgtatgcagtggtgttttgcctgcatgtgtgtgtctgtgtgacagtg

SEQ ID NO: 21589 - DNA, 1193 bp, Mus musculus
ggactctaatgaccaagcaagaggacagaatgtgctgaggccaaggggacaagcttgtgtggttttgagtggccccctcctgtgctgtcagcctcataaatggcccatgggttggactgatgtgtgtccagcagagctgagcaggcagctctagcaggtgttgaatgggagccagactgtgtgtctgtgttctcatctcacactgaatcattgcttctccaccccagcctggagttggcccttttaccctcagtcaggacttggcaggtgctagccttgggtttccccacctgcttccccacaggctttgggtcccctgcatcatgtctcatgagaaccaggtgtgccttccaggtccccctgcccagccccagggatggccttactcactaacatcactcacagtggatgttaggtggtgcttgtgggcctgtgttatcaccctggataggcttctcacccatccttggaatgctgctttctgctggacacttcagaagccgggaggcttgttaatgaatgcaccctcatccttcaggataaaggggccctggctgcaaagctgggttcataccagggaactttgagactgggggagggcccgtccctatcctgggattttgctgggctgtgaaattcaacctttgtggcataggcttgcaggccatgatgtgctgccaggagcagaggctagctgtctgctaaagtggccagcctggtcgggggcacctgttgctctgctcctgagtacagcatgcccgggggtgggaatgtccagggtgctgggccacaggaggggaagcccagagaacagagggccctagactttgccacctgtcctggacccgtgttattgtcaagggattttaggccatttcctaggcctgaaaaagaaagggtacttgctggtacggatccttcgtcttgactggaggctgtttcccttctgctgagtagcttctctgagtcctggcagttgcgggtgatgggtgttagtgtcttcctctgcctcaagtttggcccattcatgatcagtccccctggacttctgggaggtcccaagtccagatgccattggtggtggcattccttattcgcaggacatgacaatggcttgctatagctcctggggagcctcaaaagcggggctcctgttgggaatctctccttcacatctccctagataagtgccc

SEQ ID NO: 21590 - DNA, 1201 bp, Mus musculus
tgcacataaaatattttttaaaggaagaaagaaatagcactgagctgtgtaaccccttagctggaaatacatccattacccagggtttcacagtcctggccagtgcttggtcactaggcagctgcagctgcagccccgctcacagttttaacagtgttactgcaaatgccctgagtacactgacctgtgttttggagggggaggagaagcggctctgttaatgttgttaattgtattttctatctactcacgttacttttaggagtaattttgtgtctgctaccgtaattccttggtgttgaaagtcttttgtcatcataactaagaaataaaacaatttcttatgacacattttcagtggagtttatggatggatttgctaacggaaatcacatcacaggtttttgtagtttgcacatctggccggagctcatcttgctgcggttaatggtgtgccccactccacctggcctcagcatctctgaccctgtgcctgctgacagaaatttctgcatagttagggtttgttttgggtttttttgtttgtttgtttgttcttctctttgagtgcactcagtgacttaagttgattcatgtcattttgaacacacattcttacatagcatgggggaaggggtctgaaaaaaatctacgtccttataactagaaaagctttgttttcaggagccctgctgagcaattctgcattcggagagcatagacactcagcatgtctccctcagtacgggatggtttgactctggctactggggctacacgtatgcctataacacctgcttaaaaggtttagttttaatttatttatttctgctttttcaagacagcatttctttgtgtagcccaaactgtcttggaactcactatgtagatcaggttggcctggaactcagagaaatccgcctgcctctgcctcctgagtgctgggactaaaggtgtgcacgcgccaccacagcccggaagcctctgccttctgagtgctgggactaaaggtgtgcgcgcgccaccacagcccgggagcctctgcctcctgagtgctgggactaaaggtgtgcgtgccacagccgggaggttaagagtttttaaacaacaatagtgtggacgttttcaattttactattaagttttactcaatgttagttaaaagttgaactttaagctgggcgcggtggcacacgccttt

SEQ ID NO: 21591 - DNA, 3598 bp, Mus musculus
cccttcagcagaccacatcgtcacctttatcatacaagcttcctgatacaactcctgtttccctaagagaggacagttatggctgtagatcaggtggcttctctcccctttctctctcccctaactctttcccttttctcctttccaagtggtaaaagctcatttgcagcaactgtccttgggcactgtagcctcatgggaacgtggacctcagtgctttctgccttcagccttcagcattgtaatcccaggatgagggtgcacccatctcttcttgatccccagctgccaccatcatccccagctccgagagatttggttcctatcattgtacctggtgcttgtacatttggaattggtgccttctccttctggcaaccatgttatcaatcccttttctgtttaagtgtcttacttaaagtttattgcttgccaaagatgccatcattgaggtgtagcagatggggagggtgtctgcaggtttgagtgcagactttaaatgtcaggtcagctcaggaaaggagaagagagaagctagggatggtttcctagacgctgcacaccagtagctctcatcctcttggcgtgcctggccattgtatgtcactccatgtgtccttttgtgtcatttgtgtactggtgtgatcacacaaacactatatcctgtctcttagcagcagataggacagataagtaatggatgtgtttgttgcttagtgagaccaagatgaaaagaaacaacctagagtggtggcaatgccatttgtttggactgggaacaagcaagggttgctaataaatgttctgagacttcagaatcacttttgctctcttaccagactgtgggcctgaagggcctgaggagcagccggctgggctgtgtcctagcatccatggccacttgagactgcactaaccatgtggaaatatcttttgttgttgttttaatattttttctgctttcaataccaaaaaggaaaaaaaaaaaagtagatgctttaaggtatttaaggtatgaatggagttctgaagaatttaaaatatgcaattaaaattcgatgttttgactcctaagcaccttcccccctcccctttttttaagttagctgattttctctttagaaagaggttcagctggggataggatgtatattcttcttgagaagtctggagaaaggtcattccaaggtcaagtgcagagggactttgtccatcctgtctcacaccggcccattgatgaggaagagtcatagagatgagtcagaggcacggcccgtggtcccacccaggaacccagggacccagggacccagggaccggtaacagagtaacactagtaacttcttttgtgcttttatcataaacctgctgtgtagctgaaggggaaggcaagcacaggatgaagttagcctccgctctgcgtgtgactcacagggacactgaggcacaagataaaaccctgctcacctagcgtgtttgcatgcccttccctccagtgagcagagcagcgctgtgctacagggtggctgctgccgtggttttctccgtctgccggtggctctgtgtctgtctttgtgcccaggctactttgcttgagatgtgttccccctcagcagtgttgagacttggtgatcatctcggatggtgtggcaggcagagcggctgtgccaggcaccaggcttgttctgtctttctcttggttgtgagcgtggcgtggtatctagccatgaagagtccggtgtcgggcggtatggttatgaccagagcagctgatcttccctttcctccaaggaagagaggcgcgcatgccgttctcacttggcagaggggcgagagtgggctctgcctggctgctgctgctgctgctggaatagtctccatgttttaaacttttcatgacacagtccacagtgatataagtccaagaaactgcttagctttcaaagccgagggctctggtctggactgtgactgttacagtcaagagttaggtgcatcagcaggttaggtttggaacatgacacctgcttccgatggaatgtcacttaagctttgggttcttaaaaattatcaatgtgaatgtcataattatatatttttgtgggaaaatcttctaaatataagttattgtgcaaaatatagtatcatggacacaaataatagtctaaggtttagtttagagatccctaaagatataaactgtattgcatatgcattaaaagtttgttttatttaattttctgtgaacatgtaaagtgttaggtaattcttttcccttatccacgtaagcacctgttacttgaatattgtgttgaccggccagcggcagtgatcaatgctgtactctagctctttcctcagaggccctggcctcggccgtgctggtcagatgagtgttggcacacagtgggtgctgtgtcagaggttcacaacagagggtcacagcacacccactgcctctttgtttatttgtcaaaacagcttcctaaagaaggtttcagagagtttttgtaagaccttcccaatggtggttacaaaccttaatcaaaaacacagaaggtgacaaagcttactgtggtgggctcatgaagcaggagtcctgttagacagtttcccagcgctgcctctgagtgagctcagtgacactttaattcagctccgcccacttcgtctttctcactatgagatgtactattggtataattgcacaccaaaaataagccaaacagtgcattacactaactggatccctgctttcatggaagcaaaggaaagacacgtctcacgtctctgtcctgtttgtacacctagtgacccaggattcaagtttttagtatcaagtaaacttcgcctcagactgactaaggcagctgtaggtcatctgagtctaatgctcgtgtgcaatgcccttcccgcctctcccgggtctttgcagcttctcctcactgtagtaaagcacaattgcaggagcgtccgtcacggctcagaaggagtcagtagtctatgcatgttgtaagataatgagtgtttacagtcgccttctctaaagtgagcatttatactggagtgggtagcattccattatgtagacttcaaactttgctaagtgctttttagattgcttaaaaatttttcaagattttaaaagatgtataaggttaagtttgcaaatataacggaaatgctgtatatcttttgaagtgataaaatccatgttaaaattttaaagaaaatatgttgtaataatgctgttgtaagtaatatttccatgtctctctgcttgttttctagttcagcacagtcattgtggtgaatgtccatagcattataatcgcttagccattgaattataatatttgttagtggagattgggaaatttatttgtgaaattctgcagaattcatttttctatttccaatatttgctgaagttaaataaaaattttcaagccattgatgtaataaaatacgaaacaaaacaacgtaatgcatcgctatgtcccgtcttcctacagcctggggttgttccctccttgcaggcagcctggggcgtctgactgtgttaccgtcccggtgttagaccctgtgagacaaacat

SEQ ID NO: 21592 - DNA, 1146 bp, Mus musculus
tctgcctcgagactcaggaagggtcctctgtccttgatgctgtgacagggcaaaggtgtactttatctggttcttcctttgcagatagcattggtggaaggcagtcactgagatctgtctggtggctgatctggcttcaaggatccaagatggttacactccgatgcctgtgtggttggaacgtctagatcagggtttcctttctcattgtggtctcaggtctgttgttaccgatgttgttgatggcattgctgagtatggctgctcagaactcctagacagcaaggtctctaaagaagccttccggagttaaacggtggaatgcagatgggattgtgctgatgtgaagagtataaaagacttgtgaccacccaccagtgtgtgtgatactcaaatagcacagtgctctctcagcagtagtgtcagctaagcctttgaatggattcagtgctgttaatgaagactctgagtaaactctggagggtcaccattcataccgtggcagtcgccaaatcaaatctgtgtgtcattccccgtcaggagctactttactcttctctagacccggtcttgctgtgtgacccaagctgcctttgcagtagtggcccttcctgcttcttccctaagtggagggatcccaggtgggcggagccctggggtgggctcagcagtgagcctcactgttacctgtgaccagagtctaagagtttgatagtggtttctaggagcagctttgggtttgtggcctcttcctgtgagtttatttagcaaggttactcggaactcatgttaagaaatttaaggtagtatttcagttctctttggtttttcaagtcagggtttctctgtgtagcctcagctgttctggagttaattctgtagcccaggctggcctatagactcagatatctgtctgcctctgcctcacaagtgctgggattaaagacaagtccatcatgcctggctagtagttctgtttgttctttaaaaagcttagttgaaaaaataatagtggagctggagagatagctcagtggttaagaacactgtctgcccttccagaggacccaggttcaattcctagcaactacatggtagctcacaactgtctgtaactccagttccaagggatctgacgccctcaca

SEQ ID NO: 21593 - DNA, 1188 bp, Mus musculus
tcctgagttcagttcccagcaaccacatggtagttcacaatcatctgtaataggatctgataccctcttctggtgtatctgaagatagctacagtgtactcatataaataaattttaaaaaatgaaagaaaaatattctgtgtattttaaagaatcttgtaacacaatttactaagtacatttttcaggaatattctgaatggcagtgttaacggtaggatctggttaaagtaaaaagaaggtggtcacttggtcatgtttcttattccatggcagactaaggctgggaagggtcctggtgccccatttaaacaccaaaagtacagacctcggcacgggtgcttctctcagccatgtatgttgggccttttcaagggttcaggggttgactgacagttctcattacctttttccgggcagaatttcagtttcctaagatggagtcaagcaaaaagatggatgctgctggcacactgcagcctaacccacccctaaagctgcagcctgatcgcggcgcagggtccgtgctcgtgccggagcaaggaggctacaaggagaagtttgtgaagacggtggaagacaagtacaagtgcgagaagtgccgcctggtgctgtgcaacccgaagcagacggagtgtggccaccggttctgcgagagctgcatggccgccctgctgaggtgggtgccctccagggctcaacccccactcacctgcttcttccaagacctccagcgtggggggcctttagagcaactcaggcacatctcatgcttgagtgcctgagacctccataccttgccctgcctgcctcacatcccacttgcccaggcctctccgcccacaaagcttctgtgcctcccatctgccttgctgtactctgtgcaagaagcttatgttttatggtggtcatgtcaaatgatcctaagtccttaaaattgaagagtgccctgggccaggagagaggaaggtcagggtcacatgcagaacagagcatgtggcaaggctgcatgcttgcctgggggatccacagagatctggggtaccaagactctagaagctcatgagtctagtaattgctatggtaaagtcacaagggcaagttgggatttggaggacagagttgagtcagctgggaagagcatcatcgtgcagctttttatatttgccaggcactgtgcttgacact

SEQ ID NO: 21594 - DNA, 2098 bp, Mus musculus
aggccccagcgagcatcccatcctgtcatactgctgcatccggctagcgcgctccgaaagcaacatccgtgctcagagatggtggcatacggtacttgtgccttagatgtgacatgctgcttcttgtccctgggtttgcgttcaccatggttctagaaagtgtcagtttaaccagatctctctccaccaccagaactttgtctctgccagggccctcaggcaactctgaacctgcctggggatgccaggcctccattggcagctcttgaagcctctgctgctaaatattcacagattccaaccgtaggcccctaagagcagctcagtcccactccaagggagggaggtgtgagcagaagccacacccttccaggtctctgcaagggccctgaaatccccacagcatgaaggagaagtgccctagtcccaagcgttcccgagaccactggtctggggcctgcccgggctggcagcagcaaccctggcctccctgtgaggagggcagccagctgatgcccagcctgtgagtgcagaggcccgccctctcagctcactgttcccactgtgatgagaagcctggagccctgccccggtgccccttttgctatgcaccacacttcacggtgctctacactgatgggtgctacacgcgacaggtgcttcttaggcaaaaccaatgtgtgcaaaccaccacatctgtgccacttgcccaaaaggcgcgcccacaattggccagctgggcctgcgcttcagactgcctgcctctgggctctccccatggtcgcacggggacagctgggttggtgcccggtagcccaccttgtctctggtgctgccatctgtcctgggtgtgccttcgccccagtgcctgctggaagtgccctcctctcgcacacctgtccccgtgcttccatgagcgacctcttggtttcgagcactcaccctgcccttccatggctgaagcgtttggtttgtcctctgctccccgcttctctccattatgctgggattgctttggggtaagtcagcaaccttggttctgcccacaaggaaagaccgcagagctcaagttctttcaaaggtgccctcctcttcctctaggcctgtcaccagggttcctcccccaaagacctggagttggggggaacacccagcagtccttggctggcttcaggaagcttttctgtggccagatgtcagcaacggggccatccctgtagctccccccttcagagaaatcagtgcagtatcaacaggtgtaggccagcagcatcgtgtctgacaaaaagcatgtctgtccttagtttcagacccttgtatgagggtgaccctgacatgtcctcgggcccgtcctcccttttagtgagacttggtcaaggctccttcctatgcgaggtggccctcctggcttcccccgtgcctgtagggtgtgtgtaaagtaagtgactgctcccctgggatgagggccctgaacaatgtcacagcttcctgtagtgtgttgtgtctattgcatttctcggtaactgtagaatagtgggcaagcttgcccctctgtgccctgtctcagtgtgtgaagggcatctcctgggaggtgtggagcaggctgcgtcctgcctgggtgtgccttgctctgctccatctcagcattccttggtgctcaccacccgggggtgtggggcattgttgggctgtggtctcagcatagctgtggctaccagtcctagcagctagccctcaccatatcacagggtcctggccatgagaagtatggggtgtcatgcggcgtgtgtacctggctgtgcaaaagtgtcaagtgctcatcttttaagaggccggtagttgcatggcctctgtggggaaattggatacaactcctgcttgccggggtggtgtttgtacctgctcacagctgaccctgggaagatggcagccactaactagcagtgtgtcctgaggcccagcctgcagttttttgtgaatagctgaaagcttgtgtcagtaacaacccagggccttccaccttcgttggtcagggagaagaaggtagcctggggtgccctggccgagcctccttcacctcttggggatagacagagcc

SEQ ID NO: 21595 - DNA, 1348 bp, Mus musculus
ctaagtcgggggtttctctgtgtaacaagcttgcccagaccagcctggctttgaactcacagagatctgcctgcctctgcctcctgagtgctgggatcaaagttgtgtgccaccacacccagccaagaaagcaatttttaaaagtttttaaagcatttatacaatagtgttgacaagagcagaattaattgaaatctggccaggaagggccgggatgtctatgtttgcaggcctgtcccttcctgtcagctgccctgccagcagcctggccagttaaagagatgggtggtctctgggacaactcagggacattgacgtgagtctctagacttaccttgtttgtgacctctggagctaggcggttctaggcggttccagcgcagtccctgctctgacctggctggcagctcatgattttgtctgttttgtttttctcatgaaggtgacggcctctctcttaggttcgccttctaagaccagctcactgctcatcctgacggagaacgagaatgaaaagaggaagtgggtagggatccttgaagggctgcaggccatcttgcataagaaccggctgaagagccaggtagtgcacgtcgcacaggaggcctacgacagctcgctgccgctcatcaaggccgtcctggctgctgctatcgtgggtatgtctacgggtcctgagctgggtgggggttcgggttccacgcatgcccgtgtggtcccgtcctcctgagcgtgtagacagcttctcctgtgtgaagaagcaggccctggctcacgggacccacacgttgtttccccagatggagacaggattgcggtcggcctggaagaagggctctacgtcattgagctcacccgagacggtgagtcctgcctggctgcctcagagggttcagtgggttcatgcgagtgcggcatagagtgtgtcctccttcagggctgtggagaaggaacatcctggtacatagtcaggggacgttatgaaagtcctaggcaagaagtagagaaagttctcggttggcgtggcaggcacgcagcgcattcaagtgcctgggcatcaggagtctggagaccgtgctagcctcaaactccgcctctgccttcgagtgctgggattaaaggcgtggcccaccacacccagctaattttttttttttttaaagacacacaatccaggtattttatttgtaagccataagccaagtttgggtgggcctggaactattctatttctcagccgtaatgtcccttgttcctcctgtccacgtgctcatgatctatctcctttcatggtgcccccctccacctccgtgtcatttcttcctctctctacctgaaactccctcac

SEQ ID NO: 21596 - DNA, 2140 bp, Mus musculus
ctttttcttcagagagagaactatgataggtgagacggtaggatttcagtctgatagtgatacatgaaccatagggctaaattaactcttcatttccctgtagagaatagtgacattggtacaggaaagaaagaaaaggaaaagaaaaatagaaagggcaaggacaaggaaaatggctctgtatctaccagtgagacaccaccacctccaccaccaaatgaaattagtcctccacatgctgtggtgagtataatgctattaaaatagtgtgaaaaacctggtattaaagtaaaaaattcctttttaacttaatatacaacgcttaattaaaacagtgtgctatttattgggtggtggggggttgagttgaactaaactgactatttttagaatccattttccctgtttagcattttgatttgtttttgtttgcactaatgtgaaaggtaacattttgtgagtttttgacatggtctgtgggcagaggtgcttgattctgtcaatgtgactagttcctgtacctaatgatcttggcttttgtgtaaataggaagaagaggaagatgatgattggggggaggatacaactgaggaagctcaaaggcgcagaatggatgaaatcagtgaccatgcaaaaggtctgacacttagtgatgatttggaaagaactgtagaagagcgtgttaacatcctgtttgattttgttaaggtaaatttgtatagataactttttctctggtatctttgaatttattttttgggtgtcttttgttttcagtcagggtctctgtctaagccctggttttcttggactccagtaaaccaggctagcctcaaactcacgaagacccccaatttgctgagataaaaggcatgtgtcaccacaccctaccattctttgaatattaatagaaggcttgcatttacgtccttgcttattattcaagaaatgtattggaagatttacagtgggtgttgaactgtctttggcaagtgataaattgggtagaaatcatagagaaggaggacagctctcaagcatagcaaaatatggctatattaaaaatttttttttcagaaaaagaaagaagagggcattattgattcatctgataaagaaattgtggctgaggcagaaagactggatgtaaaagccatgggtcctcttgttttgacagaagttctctttgatgagaagataagagagcaaatcaagaaatacaggcgccattttctaagagtaagagacattttttaggtttattatccatgattgtcaccttagggctatagctttaaattcagaccattatattacctcctgaaaattgataacccccactttttaccgattctgggagcatctctaaatggtaagggtgtctacattgacctttttgagccattgtttcataggctattctttgagaaagtaaacgtgcttagtagatacagaattgtagagctgtaaatgattgttgatgctgtctacctgcagttttgtcataacaacaaaaaggctcagcggtaccttcttcatggtttggaatgtgtggtagcaatgcatcaagctcagctgatctccaagatcccacacatcctgaaggagatgtatgatgccgacctgttagaggaggaggtcattatcagctggtcagaaaaggtgaggagcatataagttacagcactgcagaagcatcaagacagctattggggcagaagaagttgtgtctagtaaatacctagtcttgtctacattaagttgaattgtaagtccctttatagttaaggcagcaaagattattttgacaatctcttgtctactgaaaattagggaatgacccaagctctttagagagctcattaattgtacgagtaatttaaattcttcaaatcttcactgagaaaattctggacttttccaggcctctaagaaatatgtctcaaaagaacttgccaaagagattcgtgtcaaagcagagccatttattaaatggttgaaggaagcagaggaagaatcttctggtggtgaggaagaagatgaagacgaaaatattgaggtaaatgctagaaacacatgttagtacttggttagcaatgggcattgcagatacacacacacacacacacacacacacaca

SEQ ID NO: 21597 - DNA, 2215 bp, Mus musculus
tgaaaatactgtaattctttcaaatgaaaaaaaaaggtaatggaaataatctagtcctgcatttgtattgccaggtcgtatattcgaaaactgccagtgtaccaaaagttgaaactgtgaagtctgacaacaaggatgatgacattgatattgacgccatttaaaagaatggatgcaacttagcttaacagtgtaatgctgcaaatttttctccattatcagccagaagtgcaacatgtatgtgcaagagctaaagtggcttaacatcatgctacacttgatactaaaaagctattactgtgagtggtctataattaagcccaatgagacatctagggagtccatacatatcagtgagcagttgtagtttgcttatttatagcatgtttctttcggaaaaacctagtggtggacacatttggatcacatttatacagttataaaaaataaagatttgattttggtcattcttcagactttgggctatgaatggcttatactgaagtaattggctacttttaggatgttacaccatttaatttaggctccttgagtttgatgggttgttaggaactgaaaacttgaagaatgcaaacaaatataatgaacttactcagccattaagaaatgaagtattttgaaagttgtatctccagtcccagtccattcagattggcaactgacaattcttgtcattctaaggaaattggtgattaaatgacagtgtgacatcctcgtaagaagtaaaaatgacctgtgtgtcctatggtttaagagcaaattttaaaacttggaagttgtggttttccagtttgtgtacactcacccccaaattgtagtctttcaagtcgtgtgcattgcacgttggataagccagggaaattgttaacaaataagtattttgtgtgtgtttagtggttgctttgtattgagagaaaagctttgaggtgtgattaaatcgtaagctctgattctatttgggagaaacaggaaaaaaggtgcacttaatctctagctaaaacagcgtaatttttcaacttttacccttaaattataatttcaagatgtttagacatactgtatcttgtgtttgtgtaccccctccccaatattatggtttattctttaatgccttttaatttggatataatagcttgtactttagattttggttgctatcttgccaaaataagtgttactgtttttcaagcttgacccccttccccaattgtcttatttaaagagaaagttaaactcatacttctgagtcagagcctgtattttggtgtaagacttgggatattttttacttcacattgaatatagctggatacctgagagactgatggccactgggtgggtgcagctagctaaggcctgaccagcccattcagagccttggacttcagacacaaaagtgagttcttacacacttgctggtgtaagctctatctggggtcctgactatatttgaaaacttgtcttcaatattaaaaacagcacatatttctttctacaaaagtgcattctgggagttaaaaatccatgtggttaatttgtgtgtggcgtgctagctcatacattatttgaatttcattctttgtgtcatccatctcacagattattagactttaataaacaatgtaaaaaattgtgcattaaaatcatacaaatatttagtaaaattagaactttaataagagtttgagtgtggagcaggagccatacacctggaatggtaacaagggaatgtgctgtgtcacaccaaagatgtggtacttggaaagtcacttgtctcctgggtttcagattctttgttgcatggtccgcccatctccatttgtcatcattttttgagattctcaagtacatcagcacattcggcctcaggttggcaagatttttgtcttagagctgttgctttaaagggaaacggtcaggtcttagacacttaggaaggtcttgggcttctgttcattctggtgccaaaccagtgggattcaaatttcacacaatctgggttttactcatggaggttaacctgataggaataatccttcgttgctctattgaggtgtcataaagtttcctgtttcaaacagctacattacttgattaaaacaatgttaaaattaaatttctgtctgctttaatattaaaaagtatgttttcattttactgtaagtaaaaagcactgaatgctgtccaggattat

SEQ ID NO: 21598 - DNA, 1139 bp, Mus musculus
aaatcacctaaaacaaacatttcataagaaagtgttgtatatcttgggtaattgaatacctgtatcctttccccccctcaaaaaaaaaaaggctggctgcactgtgcactgcaatcttgaccatcatggcttattggtgtttttagactgttaattacactgtttatcaatggctcaggaaaaagttgtaatgcacaatttgaagtacaatttttctactaaatgtcctccatgaatgtttttgtaccatgataagttggaaaaatcataaattggaactgtctcagctcttagaacaccggattgagctataaaacttgatgtttcttgtatcagtctcttgttttcctcttaaatttatatcacgtgctttggtcctttaggattcaatgaaagccttgatgttttgtttctaacctctagatgctcctaaaatttggcagtactgcatgtcctctcacttccttgtttttgtgtacattacgtttcagcacatttcacatggagacgggaggcaagaagtcacctcccgcaccgggcgctctggagctcggtgtagaaactcaatagcttcctgtgcagatgaacagcctcacatcggaaactacagactgttgaaaacaatcggcaaggggaactttgcaaaagtgaaattggcgagacacatcctcacaggccgagaggtaaatccctgtcttgcttttgctgtggtagctgtcctgctatctcttaaggaccaggacatcgttaacaactgctaatctcttaaggaccaggacatcgttagcaactggcaagtacaccaagggaatgagccaacttgaaaaattagtaatgctgtgtcttttttcaatggaaaaaaaatcaataaaactgtcttgaactgcatgtatgcacttctgtatataagcccatacgctcatgttacttgcagatcaatggttgtctgtgtacacaggtttatcccacaggtttccttccttctctgggatttctagtagcccatgtttgccaggttgtgccagaggctcgtgcttccccagcttttgtgaccttggctgcttcctcttgcattccttatccgtgttcatatagtgacacctcagaattatcttcctctttgcatcttgtatggtgcc

SEQ ID NO: 21599 - DNA, 1857 bp, Mus musculus
tggcaggtgcccatcatgcactcaggtgtcagcagcttgcttcccaccctagattatgagctcccgagggcagggccctgtcttgcccatccttgtgcatccaaacagcagtctagcgcttgctgtgtggcagctgcatagtgcctgtcagctaaaaagtggctggtttgtctctggggtgaagtggagagttctctttcccaaggaatacccatgtacagccacttaatagtatttatcaagtgtgactacctaaaaaaaacctgtgtttttaaaaggcctcttattaattgaagactctttttgaccttgaagtgttttctatttaaatttgtcttataattattatgtaattgattgttaatatcaaattaagaattctaatagtgtttttacatttaattagacataagtccttgtaaaaagcctttatcaaatgcctaatactattgtcataattgtattttagttaagtttaatttttgtcttgatgtttttctctaggctgaaaatctgttattagatgcggatatgaacattaaaatagcagattttggttttagcaatgaatttactgttggcagtaaactagacacgttttgtggtagtcctccatatgcagcccctgagctcttccagggcaagaagtatgacgggccagaagtcgacgtgtggagcctcggtgtcattctctacaccctagtcagtgggtcgcttccctttgatggtcaaaacctgaaggtataagaagcagttgtagccatgcacctcaaaaactaaagatttttattaaattgtataaattgacattgtaatgctctgtctgtatggatgtattatgggtttggtttattgttactgttttaaactaaaaatgaactcttgtttggttcctacttccccaaaggaactgagagagagagtactccgcgggaagtacagaatccctttctacatgtccacagactgcgagaaccttctcaagcgcttcctggtgctgaacccagttaaacggggcactctcgaggtaatcgtgctgggggaggggagaggactgacagaactgtccttagtttctgtgacgctgaacactgctggagctcagtaataagtgcacagtaacaaaacactgcctcattgccttcagagcattagtcagtgaaatgctgaaaatcatgttgctaaattctgtgatgctgagataactttgctccatgctgctgacacacagtttccctttcagcaaatcatgaaggacaggtggatcaatgcaggccatgaggaggatgagcttaagccatttgttgaaccagaactagacatctcagaccagaagagaataggtaatcactgtttctcatgtgcgtgcgtgtgtgtacatgtgtgcgtgtggacgtgtgtgcactatgctgttttactcctctgtgtatgccttaaataaaaataagcacgaactgtagcgatgcagtcatctgtccttagctcactccctgcagttgtgctcagcagctcttctgtcggaaatatataaccttctaaatgaaagaaaattctttctccctatgctaccatgatttccaaccaaaataaaatatataaatcgtattgtatcttttagatattatggtgggaatgggatattcccaagaagaaattcaagaatctcttagcaaaatgaaatacgatgaaatcacagctacttacttgctactggggaggaaatctgcagaggtaagagtgtttacagagggacagtggacagaacccgtttccactatagtcctagcactcacgaagtggaaacagaatcagctatcttgctgagttcagggccagcctacacgacaaaaaaaaaga

SEQ ID NO: 21600 - DNA, 1194 bp, Mus musculus
attaataacttatgatcttattctcaggagtcagaaaagtagttttgacggagtttaaagttgtgataactgctctcttattgagaggatgtgtgtgtgtgtgtctgtgtgtgtgtctatgtgtgacaaggagtttcctgacaagccattgggctctgtgcatggttgctgctcttctcattctcccgtagctggacgctagtgactccagttctagcagcaacctttcacttgctaaggtgcggccaaacagtgacctcagcaatagcactggccagtctcctcatcacaaagggcagagaagtgtttcctcaagtcagaagcagagacggtacagtgaccacggtaagtctgagaccattcctgtagtttatgaatgtgttcccttgtgtagagcctggtgggacagagattggctggctattaggggcctggtgtggttaaggtcctctaactatttgggacatttggtagctaatgttgggtaaggcttagcagaatgaaagccatagtatatctctcttgtatgtctttgtgaggtaattgtccagagcatcacatctggtggagctttctgtactaatggaagtttttttctgtttagggagggttggaacagctaaccgttgtaggctattgagcacctagataaaggaaatgaatttcacatttttccttttatgtatatgagtattttaacttcatatgtaccatttatgcctggtgcccatgaagccagagagtatgctagatctcctggaatatagatacttgtaagccataatgttgtttcattgtgtggccctggctgtcctgaaactctccctatagaccaggttagcctcacaaagagagacccacttgcctctgcctccttaaggattaatccctgggattaaagggttttctattgtaatttcagttaaaggtgaaaaatctgaggctcgacagtttgataaatgcctgttatcccagcacttgggaggtagaggcaggaggatcaagaatttaaggttgaaactagagagatgtcttagtggttaagagtacttactgttctttccaaggacctgtgttcagttcctggcactcacatctatccgtacttccagttctaggggattcaactccatcttctggccattatgtgcacaaacatacatgcaagcaaaacaattatctgcataaaatatt

SEQ ID NO: 21601 - DNA, 1201 bp, Mus musculus
taaaaaaaaataataataaggttctttttccagtaaatgaaaactcatacactgccctgtgcatttcagtcgcaatgtgtcttcagagcagaaggatgagaacagagaggccaagccccgctccctgcgcttcacctggagcatgaagaccacgagctccatggaccccagtgacatgatgcgggagatccgcaaggtgctggacgccaataactgcgactacgagcagagggagcgcttcctgctcttctgtgtccatggcgacgggcacgcagagaacctggtacagtgggaaatggaagtctgtaagctgccaagactgtctctgaatggagtccggtttaagcggatatcagggacatccatagctttcaaaaatattgcttccaaaattgccaatgagctaaagctgtaacccagtaattatggtgtaaattaagtagcaatttaaggtgttttccagagcactgatggaaatgtatagagtaatatttaggcaataacgtctgcatcttctaaatcatgacattaaagtctgaggatgaaagcgagcgcgcctgggagcgaaggctggccttctctacgaatgcactacattaaagtctgtgaccccgtgcctctgtcttgtttccattgccctgggagtcagagtgtaacaccatctgcacgcggctccttgtgtggtgtgagtggatgatgtgtggggagcactgttttggaagcggctcctcacacggcagccagctttactagtccctctgtgggagatcatttggtgctaaaacattacagttgccaagaaggaaaataactgaattactgctaagaattaaccttaaggctagttgataattaatacaggtttacagttcatgcctgtggttttgtgtttgtttcgtgatttttttttttgctttttttttaagtgcaaaaggtttaaatttatagttgtgaacattgcttgtgtgtgtttttctaagtagattcacaagataattaaaaattcactttttctcagtaaaaccttgcactgtctcctactgctctattgaggcctcagcctaagacagacccgaagcatgctgctgcctcccgttgggctgagtagtggcagaggatgtgtgtgaagcttggagcactgcgggctctgtacagagcccagcacttagatctcaagcacactgtctcccagccctcctgg

SEQ ID NO: 21602 - DNA, 1217 bp, Mus musculus
tccgtagggcttccggccaggcttccttctcttaactctcccttctccaccttcagatcgaaactctcttcaagtccaagaactatgagttcatgtggaatcctcacctgggctacatcctcacatgcccatccaacctgggcaccggactgcgggcaggtgtgcacatcaagctgccccacctggggaagcacgagaagttctcggaggtgctcaagcggctgcggcttcagaagcgaggcacaggtgaggggcagaaggcacaggtgaggggcagaaggtgcaggtgttgtcctcagccccgctgacctgcccatgtcccaccgcaggtggcgtggacaccgctgctgtcggtggggtgtttgatgtctccaacgctgaccgcctgggcttctcggaggtggaactggtgcagatggtggtggacggagtgaaactactcattgagatggagcaacggctggagcagggtcaggcaatcgatgacctcatgccggcccagaagtgaagcctggccctcgccaccatcaggctgccgcttcctaacttattaaccgggcagtgcccgccatgcatccttgatgtttgccgcctggcggctgagcccttagcctcgctgtagagacttctgtcgccctgggtagagtttatttttttgatggctaagctgttgctgacactgaaaataaactagggtttggcctgccctatttctgagtgttgcttctcctttcctagggacagtgtgtgtgtgtgtgtatgtatgtgtgtgtgtgtgtgtgcgcgcgctggccttctgtgtcatctcacctagcagatgaaacatgagccatagaagatacagggcagagagggagggaggctctgagtccagcctgagcatctaaggacatctgtgcttgcagggtggagcctagtgtttccttagtcccagccagctaaaggagtcagaaacttgacatcttccccagtttctttctgctgtcttcctggcagcctgaagagccaaagttttacctcctcacttcctccccctccaggctccaacccctactccagttcctaaataaccctctccctgcttcctccagcttccatcgtcctcaggtcgaggtgcctcctcctcaccgcccccccccccgcccccagctctctagcccctgtcccgtccctctcatttgcagctagcttcctctctggggccctagtggttggga

SEQ ID NO: 21603 - DNA, 1216 bp, Mus musculus
gactctgacgatgcagacctcgctgaccttggtggcgtccagggaaagtctcgggggtcccaagtggtttgcaggtccctggcggccggtgtttaaatctcctctgaccccgctcttccctgcagcccgctgccgccgccatgcccttctccaacagccataatacgcagaagctgcgcttcccggccgaggatgagttccctgatctgagcagccacaacaaccatatggccaaggtgctgaccccggagctgtacgccgagctccgtgccaagtgcacgccgagcggctttactttggacgacgccattcagactggcgtagacaatccgggtatgcacacccctgtagcgtcaggcttccgcctccccaagaagccccccgggcaaggatcccactgctcttccctgaaccttcggtgggctggggtcccctgttcccctctccgcgcttagccttaagagcctcggcttgctcctgcctgacggtgacgtcactgtcgccgcgcccctcctccaggccacccgtacatcatgactgtgggtgcagtggcgggcgacgaggagagttacgacgtattcaaggacctcttcgaccccattattgaggagcggcacggcggctaccagcccagtgatgagcacaagaccgacctcaacccagacaacctgcaggtgcggggaatcagggtccgggcgtgctggggagaggggtctcggcgctcactctagccaccaccttgtattcccagggtggcgatgacctggaccccaactacgtgctgagctcgcgagtgcgcacaggccgcagcatccgcggcttctgtctccccccgcactgcagccgcggggagcgccgcgccatcgagaagctggcagtagaaggtaggggtcgggtaacagcctccagagctgctgcgctcttctctgcgcgcgcgttcccactggggactgagggtcgaagacccaccttcgcccgcggggacacactgctgcaggcggggcggcgggcttgctcgcccgcccaccctgtccttgaactctgcactccgcagctctgtccagcctagatggcgacctgtctggcaggtactacgcgctcaagagcatgactgaggcggagcagcagcagctcattgacgaccacttcctcttcgataagcctgtgtcgcctctgctgctggcctccggcatggcccgggactggccggatgctc

SEQ ID NO: 21604 - DNA, 1133 bp, Mus musculus
gagtagggctgccctgtccttgcctgtgccagtactacacagcccatcaactccagcccccgcaccccaaacccaagactgaggctgccaagaacagaacacgcagctcatgatatgacaccgtctctgccctcatatgtctcctggagaggaggagctgttgatgggtgggcatggccctcaagggtcccctcaacccctcttgtttctcctgccaggcacgggcagtggttctgtatcccacgcaatcatccgcagcgttgcccccactggccacctacacacagtagagttccaccagcaacgggcggacaaggcccgggaggaattccaggagcatcggctgagccagtgggtgactgtgcacacccaggatgtgtgctgcagtggcttcggtgtggtccacgtggctgacgctgtcttcttggatatcccatcaccctgggaagctgtgggccatgcctgggatgccctcaaggttgaaggtgcgtcagtggtgttggttagggtgcaggtagggggctgagctgctgggtcatctggaacccaggaaaacccgtgtacccgagggccacaccacagtaatggtcacatcagggttccttttggctcacagcgaggactggctcaggctggctggagaccagggtcagagaagatgggtcccattctccagccaagatgggaactcactggggccctggggccctgacagctgcatccaagtgcaggcaggatttgcatgatagaacgggccaggatccaagctggagattataggcaatcccctacccccagccatttcctgcagactcccagcacccatgctgcagagccagggacccttttagggaagatgctgagggtagaggcggggtgatgggaaagccaggagaaggtcggccgcgagccagaaaagccgctgctgaggcctggggatttcgccttttctggagaagaaacaggcttggcaaccagggctgctctccaccccactctgtaccaagggcgggggaggctctgacaggcaggagcccaggctctctagctgcctcaggtcctgtgcagacctctgtgtccctgctgtctgctgaggtggcctaaggggaagcctggaggtctccacctgaagt

SEQ ID NO: 21605 - DNA, 1399 bp, Mus musculus
gggttacacttgtaatttttagagagatttcagtgctctttaaaataccgcagctgtccatcctttgttctcctgggtatttacagcttcagcctgatgaattcacagaacagatggtagttgattaaatcacagaaacaatttatatgggaattcagggctttttttcagtgttcagaaatagactttaaaacaggataatgtttgtcaaaggcaaggcttgctaggtagcaaccgtggctatgcagatgcgtggctgtgtggtcgaggaggccgagagcgagggcatgaagacagtgagcttgcctgggaggacagcagttcctcttcagtgtgtcttatgatgatggtgatcacgcctcatggaaacgggctcctgcaggcttcctcgggtctgagatatgagaaatatgatgtgagatatgatgtggctctagcaggcactgctatagtaggtcactctctagtagggtgcattcctgcgaaagctgctttgtggacattgagtcttttctagataaaagtcagatttcttagttacccaatatccatgtgattctgtgtctgttgtgaaagttgtgctccaggacagcctccaccttggctcctttttcttggggcccttgagaagcagtctcctgcccctcttctcttaaaccatattgctcttgtgctgagatttctacaagtctgagtgtgtgtgtgtgtgtgtgcgtgtgtacactgtgccagtactagggattgaaacatccctgtggaagggaagggctctacaactgactgtatccctgcctgcttcactttgtttgagacagaatgctgtggagcccaggctggtctggagactcaggcatctcctgggctagtttttcaggtgtgtccattatgggtgtgtgccctagtgcctggcttctacaagttgttggttttttgtttttggacacagggtctctctaaatagccctggctgtcctgaaactcactctgtagaccaggctggcctgaattcacagagatcctcctgcctctgcctcccgagtgctggaagtaaaggtgtgtgccatcttcttttggtctttgagacaggatctcactgtagccctggttggggaactcacagctatctgtgtgcctgtgaattctgagctctggaattaaaggtgtgaaccatgaggcctactttgactttcacaggttccaatgcgtgaaatttctacttcagggccttagggaacgaaggagctgttagtccaaagtacagttttatctatactaagagggcagcaagagtatactaaaagaagttttaaaaatgctacacctataattctattgtacagagatactaaatactaaaatcagtacattatgtgatttatttctgtttagaaacccactt

SEQ ID NO: 21606 - DNA, 1725 bp, Mus musculus
ccctcacttgctttttccaggtgacagacatggtggaggaccagcagtctgtgtccaggtcactagggtgagtgtgggcacctcagcatggcggacatggtgggctgtacaagcaccaacactcattttgtgtctcagggcttcagaagagcgcctctctccagcccttggcatcacctgggctaaccagctcctgatgcgactgatggttgaccgcacccatgaggacgatgttaccacaggcttgcccagaagcccagttcggactctccgagtgctcttcgccccccacctacccctctcctcctgctgctacacagtcagtggggaaggcattagggggatgccaggaacacagtcctactaacagtgagaccagtgggtcagcctgagcaggtcccaaggaaccctgattctgatgactctttccaacaacctgtcagtcagtggcacctggtgaacaggcacccagtgacggttagtctgtcagtatctgctctctcctccctggggttcacctacccattagaggatgactgagcagcaggagctctggcagcccagagggcgtctccgtaggaccccaaaatgacaagactcagctcttctctcttctgctttctgcctgggactcagcagcttggtggggcctaccctcctgcaggatggtcttaactccccccaacccactatacacacacacacacatacacacatacacacatacacacacacacacacacacacacacacacacacacacacacacacacatacacagtaacacctaccactcaggccaagcatggcttgcagtgagacactccccgactgggctcctccccacacatatacaccattttagggcagagtggagaaaactgtccgaggaagagagatgggccaggcccaacccagctgtctaggctaagtggctttgggcaacttatgaaagggacacccggaaacaggtgtgtgtgctcactaaggcctggcaggtgttcctggcaactcggctgggcggtgcatccaggctggaaggcaccacaaagcacccaacaggactgtgtacacactcagccagcaggtaggcctcctggtaacatgtgctctggactcagaatcaacaccttgtggacttgaggctcagcagtaagcaatgggtgtggcctctgtagacagggctgtgtgttgacgcacaggtagcacaggctcccaccagcaagtgtgccaagtggaccttcaccaaggagtcctgttgctccagtagtgtctgactccttaaaccaggacatacactgtcactgtccccactccagtagggaaaacagtccacttatggtatataccatgacatcttcagggcggccctatcctcttatgagctcatcgtttcaaaggcccctggggctcctacccgctgtggcaatcctgcagactaaacctagggcctcctgcatgcaagtgttctacactgagctatgacccactgacccgtgcctgagagctgaggatgaggggacacacagctgcttgggtggggtggttcacataaaacagctctgcagaactggagggctttagacccggaaataaaactttatttttgtaacaaagtatcaacacttgcaaattattttctaaagagactgtattgaaaattagaagacagttcccagaggcacttagaatctatgcccaaaggttcctagggcctggatccac

SEQ ID NO: 21607 - DNA, 1184 bp, Mus musculus
ccaattactgtaaatccacataaatacccagcttccaaaacatccagcccttccaccagtaagaagtcatgactctgatccccgaccgctgccagtgaagacaaaagccctgacgtggcccaaaggccccttctcatgttaaatgtctcagaccttgaacaagagcaaggtggctttggctcccccttcttggaaagcctcaaaccatcatactttctcacattgcctctcactaccaaaggagcccattcggaaactgcgtttcattacctatggcgttctgctgtggctggacatgcacgcctcagcacatgggggtctgcgcaatgatgagtcaaagtcaagtcggtggtgggctgggcaaagccacctggcagccctcgaggctgtcactggctgcatcctgagcaaggcaagtccgttctggagcttgacctctgtagacaggctttttctacaccaggattgtttttcagccaggccactggaactgtgtttcttctgtcggaacacaggccctgcctgaggctttatttttcatgtgagtcttgtgtagaactacgtgtaaatcctgtaggctctgggagcagtgctgtgggcagccgccatgtgctgatcgcacccgtgagcagccactgccatcccagtgccaccgatgctgtgtgacgtgcacaataaactgctgtctcacacctggctttgagtcctttgagtcttgtgttctggacgcaggacagctgcacaaagtgaggccagagcctgctgtgtactttcaaaataagttttaattatacactttatatacaaattactgtacagtcattttaataaagtgaaatagtaagtgaaagtagaaaacagaaagctgacgccttcctcttagaggcagcaacaggactgttcatcgccccggttagtgacagagtgaccagagtctaggaacagctaaggcattgtgaatgggctattgagagtggaagggcctgagtggtcacccccgaatgtatctgtgggaacagagccacaagcctctaatgaacctggaagtttacagaagcctgctttagcagtaatgtagtgcagcttctcccaaccctactgaaggaccacaatgcacaacaacataagctctttacagcattaatcagcggtgtacatattgcactaggtaagtgatactctgc

SEQ ID NO: 21608 - DNA, 1182 bp, Mus musculus
gcggaggccgcacttcccccagttctcctactcagccagtggcacagcctgaggcctggggcagcggctggcagctccacgctcctctgcattgccgagtccagaagccccgcatggatcatctgaacctgatgttttgtttctcggatgcgctggggaggaaccttgccagcctccaggaccaggggaggatgtttctactgtgggcagcagcctacctcccagccaggtcaggaggaaaactatcctggggtttttcttaatttatttcatccagtttgagaccacacatgtggcctcagtgcccagaacaattagattcatgtagaaaactattaaggactgacgcgaccatgtgcaatgtgggctcatgggtctgggtgggtcccgtcactgcccccattggcctgtccaccctggccgccacctgtctctagggtccagggccaaagtccagcaagaaggcaccagaagcacccccctgtggtatgctaactggccctctccctctgggcggggagaggtcacagctgcttcagccctagggctggatgggatggccagggctcaagtgaggttgacagaggaacaagaatccagtttgttgctgtgtcccatgctgttcagagacatttaggggattttaatcttggtgacaggagagcccctgccctcccgcacccgctcccgcgtggtggctcttagcgggtaccctgggagcgcctgcctcacgtgagcccttctcctagcacttgtccttttagatgctttccctctcccgctgtccgtcaccctggcctgtcccctcccggccagacgctggccattgctgcaccatgtcgttttttacaacattcagcttcagcatttttactattataataagaaactgtccctccaaattcaataaaaattgcttttcaagcttgtggtttgctttctggtgtggagcgtcacagccttgttagtgggtgggaggtgaaggggtgtggctggggtcacatcagggtgggtcctgggaactggtccctgaggctccaggggatgtcgtcctcatggcaggacactcctgacagaagtgggaggatcttgactgtctctggagtctactcttgcagtgaccctccctggccatctaagacacctgccagccccagctgtcgtgtgtctggcagagcaata

SEQ ID NO: 21609 - DNA, 1285 bp, Mus musculus
ctatctaatgagagcccctatcaaacccttgaatggccacagagccctggcctgagaggactgtcagtctacatgaacagacctctgccccatcccctgagttacgtgtgtacagtaagaagagacacactatctgagctgtcagagctggccccatttctggagtggatggtgacctgtccatctagcctctgtcccaccacatcaagggagctgtgctgtgcccgaggattgagtggattggtttgagccaaggtgccgcagccccactacttgcccttgctgtccccagctgatcccacttacccccctacctcccagcatcttcacatagacctcctgcctgctgggaccactgggtggggatgtctgcttggcagaaattgcttgtccctcacctgccagcactgctgagcatgcaggccccgtccagccctcatccaaagtgcatttgctgttgatgctggttgggactcaaaacagctctaagcaaggaatctaagattctacccaggcagccatacctaaggatgtaggtctgatgaaggctgtgggaacctggcttggactggcaatggtctgacctcactcacctgtgtgagccagctttgtggtgccatatctggtccctgtgtgtggcttacctcattatctgcccagcatcctttcctggtgcccagagagatgctctcatctcatcgggcacagccggttaccactctgccccttccctgccccctggatgctgcactgaccccaggagtgcccagtccctggccctgcatgtcctttgggctgggggtgcttctgctaggggcttctgaggacagctgtgatgcacctgtcctgcagcacggggccctcatcctgagggaccctgaggctaccgaggcactgagtgttctctgttctgttctcgcttctgaatccaaaccactcactcaagacacgaggcgtcggcagcagggttcggattacacgtccacctccgaggaggagtatgggtcccaccacagctcccctaaacacacacgctcccatgcctcaacagccacacagaccccaaggggcagcagctctacccgggctcgctcccagggcccccgagacacagatgatgacgaggaagagcctgacccctacggcttcatcgtgcagacagcagagatcgcagagattgctaggtgagtgaccagtcagggccaggccagaggccccctcccttggctgagagcagcctaagggccagggctaggctgggcttctgaccctgagtagatttaga

SEQ ID NO: 21610 - DNA, 2979 bp, Mus musculus
gacttagaggccagaatcaactctgagaatgaagtacccatcctgaagacatccaacaaggtgagagacagagaccccatccttgagcctggccccccatcctcgggcctggccccccatccttgggcctggccccccatccttgggcctggccccccatcctcgggcctggaccctcatccttgagcctggccccccatcctcgggcctggacccccatcctcgggccaggacccccatcctcgggcctggacctctaccctcgggcctggacccccatcctccggcctggctcccagccagtgggcgttgctgagctggtctgagccacatccttaatccaagtccaccaggaggccctgggggccctgcatgttcctactcttgccctccaaccttcctcctctctgtcctcccaggaaatcagctccatcctgaaggaacttcgacgcgtacagaagcagttagaaggtaggtgtggcccagacctagggcaggcaagggcgacctcagaggcttatagccagattctcaactggactctttgatctcttcctccagtcatcaatgccatcgtggaccccagcttgaacctcgacctactgatgggaaacagggctccttcagggtctggccagccaggacttgggaaagcccggccagcagctcagagctcaacttcacctgcctcggtggataccttgctgccagccctgcctctcaggagcttcccacagcgggccaactgcgggccccccggcctcccggagcctgccttccttcctgatgctgagaggtttctgatctaagctgtgaggcgggcaaggccagccttcttctgcgcgtgtgtcctgtgcatccatcccacggcccacctgcctggctgcaggaggttctctgtgaaaaccctgtatgtgccatagccccatggatgggtgcctcccatttccagaccctcctcagccagcacctgaaccacttcatccagcccatggcgcccccacctccacaggcctcccagcctagcccctggggtgtccactgccaagggccagctggtgaggccccatattcacctcctgtcaatcaccattgtttttgttggtagctttaaaggaaagagtacattgctcccttgcaggaacttgcaggccccgcttaggtccaggcccagcctgggaggccccgtctcatccctatgtgctggcttgaggccagacagagaaaggagctggaccctggggccagtcagtgccaaacacaggagctggatgggtttggcatgtccccaaactgcccaggaaggaggccacttgccttgtggctcctactgagtccacggccggagctgctgcagagtccatcaacctgggcagacgagtggttctaagtccttggtgccaacacaactgccaaacccactgagtttgggtactgtcccagcaagctctcctgagtggattcatcccagctagggacactgggcttccttacagtggggctgggtgtagctaggtgggccagcaatcccgttggttgtggcgagtgctttaccagagtggcagaaagagatttggaagctcctggctttgtgatctaaaccatgtacctgcccctgccgtcccagatggtgcgggcaggaagtggtaactgcagcaggctcctgcggcccgatccgttgcggaggcctggcagggacaggctcactactggttatgctttctcaggatttgtgcggctggggcctgccaggtgagcagggtagctgccctgctgctgccccttgctgatgcttctggaggcactaagccaaagagcccggtggctggagtgggatggggacagtcccttattgaccaggctggcatgggtgtgctctgggacctgcctgatgtgtgtgtgggcgttgctcctgaacaggacctgtctgctgggagaggtagctgcagcggggggcccagagcccaggggtagcatgggtctccctgtttacacttagctgatagagtcatgcacgggtcctgtgtgcctctgcccagcccacctgatgtttacgtgtgtatgtgtgtgtgtgtgtgtgtgtgtgtgtgtgtgtgtgtgtgtgtgtgtgtgtagagcttgctgtttgtctggaggaggtgccagctcagcctgttggctgctccgcctgcatgtcccacacattgcccacagcctgctccctgtaagtaaacggctgtcctgcagagtccatgcctcccacccttggtcatcactgtgtaattttttttttttaatgcacaaattggtgttcctctccatacttagttcctctgtcactttagccttcaacccggcattggtactgtacatgcctggcttctgaaggtatctctgtacattgttctcaggcggtcttgtggatgtctttcaggaaatggttattttatatgatttgtcatgaaatttgttctaataaatcattcctccacgtggcagcacaccagtgactgccgcctcggccctcttctctggggatggtgttgggtgaccatctccttgacacaaggagtctctgaggggctcaagacactaaaggcagtgggtgtggtggcatatgcctttgtccaaagaacttgggaggcagggatctctatatctgctcccagccagggctacttaacaagatggtcttttaaaaaaaaaaaaaatgaattcagatgttgccaccaggtggcactcaaagcaaggaagcagcaagcagatgtctgcttttgtttaagctaatgtgtattagtggtttgcctgcattttcgtatgcactcctagtgtcagtggagagtagaagaggccattgtgtcatctgaaactggaattacagatgtttgttatccgctgtgcgggctctggaagccaagtcaggtcctctgcaagaacagccaattctcctaaccattgagccgcctctccagccccaattcctcacttcattacagatca

SEQ ID NO: 21611 - DNA, 1735 bp, Mus musculus
caatggccttgagggctttgctgcagccacccctcctcccagttccacttgcaagtctgacctggctgagctggaccatgtggtagagattctggtggagacctgagaggccaccccagtgggctaagggtgaggccaccagtccccatggagctcacgtgtgttgtgacccagagacagataagcacttgtcctaagaggggctctggctcttgagctcattatccttttgtgtgacattggactcactgtggaggatggtgtgtcacagctatgtctagtctattttcaattagataggtgaactttctaaaattaagttttatatgtttttgggcaatattttgtcttaagatatattttttaaactttttatactttagatttttttcagctattttcttaaaagtatattttttctacaaacatcctctgctgctacattagaaacatttataacctaaatacgattggtgtgtcattttaaaggtttaaatagaaaacttcttttgttactgagtctctacactcccaaggcaactgtaaatgtagccggccgggtgtttacatgagaggctccagtatggtctacattctagtagagcttgaaaagaaccatgcacagctccactgccccctcactgggtctgctctggcggatcggagctctcttcctagccccgtgtgcaggatggctttatttatgcctatttatatgtaaatgccactgaaagctaaggtcttactcctggaaatcccaacaccagttcttcagggactgctgtgaggcagtgccttatgcaggtcttgtccttggccatcactgtctggttcccagcccagcacatgtgacatgaggacatgacatgcccgaaccacccagcaccacatgctccatgtcaagtgtgtacgtggagaccactggctcccaggcctgtgctcagagagggtgtgcagtcctacgtgtgctgggggggacgacggtgacctgtgcttgcttgcttttaaaatggtgcttggacgttttaaggttaaaaacaatccgactccatatgatttagggctcctccaccctggggtggcccctatgctgtctgcttggatctcaaagtcttggtactcggcactgtcagactccaccccatgtatcctttttgtttctcttgtgctttttttggacttcccaacctgagcctaaggttttattttatatgtgcttcaatatcaacaatgtaaacctcactttattaaaagtatccagcaaatggaatgtgttaggagccttttttttctatcttaatccttcaagtgagcttgctctatcctgtgtggttttggcattttatatgctttgtaatgtagacaaactttttgtggtaaacaggcaatggggttattttcctgaccttatggctcccaaggcaaaattctcccttccctttcagcccctgcttgccttccctgggcctagggggtctgaaggaacagaacagactggctcatccccaggtctgtgagcagtcctaaggctttctcctttatcaaagctagtttaaagtggtctactaataagcctaaagcaggagttttcttttaacgttttatttatgcctgtgtggaggtcaaaggacaacttgctaagtcaacctttcctctgagcccagggatggaactcatttcagctgaacaatcccggtggccctaaagctatatttgcttgtttgaagcatttctg

SEQ ID NO: 21612 - DNA, 1550 bp, Mus musculus
ctcacacaagttcaccaaagaccccagctgctccctcggaaggccagcccgctgggctccagggcccaaagtggacaaccgcgccgtcagaagtaccaaggacgtgcgccgtgctggcagggaatagccagccaccaggctggcacccagaacccttgctggcaccacgctgcctgccggaccataggaggccaaggccgtgtgcatagtttctttattttgtgtaaaaaacaaaaccaaaaccaaaaaacaaatgtttattttttacgtttctttaaccttgtataaattattcaacggctgtcaggcggaaaacaacggagtattctcggatcattgctatttttgtaaagtttccgcgtccgcacgcactgtggcaggagagcagggcgtgtgtatgtgtgtgtgtgtgtgtgtgtcctcaccaaatcgtataatgtttgttaccacaggccgtcgctgtttacagaatcttcttttttattcctcatttgggtttctctctagctcgaggcccaaaagcccacgagacctgtgggctgggctgtggctctcagtgagatctgtggctttcagtgtggcccgtggctctcagtgggacctgtggctgacagcatggcccgaggctgtcagtgggactgtggctgttgtcttagctgtagctctcagtgggacctgtggctgtccatggtacccatggcaattggcccagcctgtggatgtcagtgggacctgtggctgtcagtggcactggctgctgggctggcgtactgtcagtgggacccgtggtggcccgtgtgatgccggttacatagctgttggtggcgcctgtggttgtcagtggggttggaggtcactggtgtggcctaaggctggcacgtaaacctggcccatgccttggctagcccctccagcctgctgtccttgcttcctcctgcccagaactctccagagatctccaactgtgctttcagaagtgcccttcccaactgctcggtttccctcccgggacggcggcagtattgaagcttgtgacaagtgccttcacacagaccccctcccagctgtcagcgtttgccgtgggcaccaggccgctgcccacctgccggccccggccaccctccttgtgaaagtgcatttctgtaaatatgtacatattaaatgaatcactctgtatatttgatttaataacttaaacgttttggcctccctgttctttgggttctgttccttttctccatgtgcagttgggacataggtggaagtgggacatggcctgagggttgggtcatgttgatgtggggtcttaagaggtcaggtggttctgttgacctcagcgcagtgggtgacttgggcctcaggcactgctggagtcctactgtagtagttgacacccgtttagtggaaccctcctggggagtaaggtttggggaatgtgtgtacctggcctcctaactaaagagagggctttatgaaatgggacagtgctcagcaaaaatgaattcacagtctaagagaccccaagtttgagagaaggaagcccaaggatg

SEQ ID NO: 21613 - DNA, 1194 bp, Mus musculus
gttttgatagatattgagaacctgtcacatagtggctccttcagagtttggtcgccccttacttcctccagtggcccctcatacacatacaaggccattgccttgttatgatttccaaggctcatcttccacaggaggcactttgccaccctcatgcctgaagcccttggggcacacgtagacccaggtgttactaagtctctgtccttctctttcactttatgttcacctgggagacttctccaatacaacagacaccatgtttcgtgtcttgatccgatctgaagcatccttcttcctttagtggtctgaagcaagcttgtctacttactaagcctttttagtagagttctcttggtcttagctgtctgtgctaatgtcctttgtgtagtttcctctttttcttgaactttatctgtgtccctcttccacacatcatggctttggagcacagcagaaaacaactagctggatattctaggtccacttctacagctggggacagagatgtgcctttcagatcaaacactagaaggcactgtgtgcacgctgcaggctgtatggagacagagctaaagcacctttggcttctgagtgttgactgtggacaaccctggtgtcaggtgaggccagcaccacagtcactgtgttctgccactgagatttgtccctgccactatctttgtgtcctttgtaatggcatccacctgttctccccacttcaggctgccactggctgctttctgtcactgaattcgtggtcttttatatacttttgtgcagaaatcttttgtagacatagtgtgttcccttgcctttccttggcatgatttttatgcagttcattggcagcatgaccctctgtattgggtaggtgttgttagtgcggtgaggagtgtggcactcctgttaagtgcatctgcatcagtcccaggtagccctatgtacgggctcatcccatacttacttccttggtactgggcagatggaattgttgggtctggtggaggtggtgttggcaaatagtctgaacagcactgtcagcatttatgcagccagcccccctgttttctctccttcctttctgtttttctgtgtctagactgtcctttcagacattacctgtaaataaactatggctcacctttgtcttacaatgtctttcacagggcaggcttgtaattctcttgtaaa

SEQ ID NO: 21614 - DNA, 1140 bp, Mus musculus
tcaaagaggcctctgtcaaggtggccgagatctggatcgtctccctgtccagccagcccatcgaccatgaggatagtgccatgcaggctggccccaagaccaagtccacaggtgagtcactgccttccttcctctgctaccccgctctgctcttgccacttcctgccacatgtgtgggaggccgtcccagtgtggtcggagaaggtagagtcttttggcttttctctagctagaagctttgagggagtcgtgtgcactgttgaagttcatttataagttctctgaaccctcgatatgtaggtgccatggatctatcctgtggccttcgatgttgtgaacacccagtttctggtgtggagaaggtgcttggcccctgtcattgctgctgccatcacagtgggggtcgctctgtttcccctgctctcttactccaccaacatgccagcaggcacatgtcagcagacgtgttccttactccaccaacatgtcagcaggcgtgttccttgagacaccaatgctgtgcctccatgttccctggtctacacgggtctgtctcccctctgctcccaggggacacccatggttctgttgccacctcatcgccatggcgttgggtagaatctagaggtactctcccttctgtgtgctcattccacagataactactctgaggaggagtatgagagcttttcctctgaacaagaagccagtgacgatgctgtacaagggcaggtaaagtttgagcctgagatggggaggtacctggcacctccctcttccacctctgtagatcagggctggggactgagggccttccctgagtgagcccacacaggatgagaaggggactatatgtgccacacctgtttgtttcttccctgggcctacaacatgttagtaggcaactctgcagggtttgggactaatagtagctgactgcccagtgatggcctcccttgcactgtggggcgggctgctgtgtgggcgcggtggcctcaggctctctgcctctgtctgtacaggatcttgacgaggacgactttgatgtgggaaaacccaagaagcagcggcgctcgatagtaagaacgacgtccatgaccagggtcggtggaaactcgttttactaacactgggaaaggg

SEQ ID NO: 21615 - DNA, 1149 bp, Mus musculus
tctgccgcctctgccttgtgcagtgcaggacacaccagacatcgtgtcacgcatcacccagtacatctcaggagccaactgtgctcaccagctccccatcgcagaggccatgctgacctacaagcagaagaggtaacatggtgggcctggcagggctgggggacctaagagatgtaccttgaccctctgctccatgtaggctatgggatggaccttttcaaggggccaggatgaaacagctgagtgtggcaggagcctactccatgtcagatcagaataccaggttgggtttttagaaccccttatttttgtgcatgttgacattctacgtgatgtagtaaaaggcactggttctttagtccttctgtctagtcatgttccttccacgtggctccttcctcacaggtcccctgaccctggctttggcttctgggtgaacagttagatcatgatcccaactgcccagaattgggcagtgctcagaagttctgtgtgaaagattagacagagtgggtctgagcccaagatgctgaggggccttaggcaggacctcctcaacttagggaactaaacatatctgtcttggctcagacctctggacattgtagcctacatgcagtcaaggagagttaagtacacagagcctaaggcagcctcctccttgatgtccaggttgggcccagcaccctgctcaggagaggcagagaccctgcagccagtgacaacaaaagttcaccatctctttaagttgtgcatgtcacacactgccttccccagaccaaaagatagttgagccagaggctcatctggtgtagtagatcagcagaggtcagccttgcttcttgactgcctggtgcccaggggcagatcggctacacagatccccccatgagccctcagccaaaccaccaggagccattctgctcctgcctgagtatgtagatgacttgttgttgttcctgagtgtcctaacatgtgtgttttctctcttggtggctttccaaaaaaggaaaaagcattttcactttgactttaccctgaggtacagctgtctggcttataccctatctgtctccaggctggtctttggggcttgtttagtagggccattgcccaagtgcatctcctgatgccccaggcaggatctct

SEQ ID NO: 21616 - DNA, 2636 bp, Mus musculus
tgtgggccactgagtaactttgctcggcttactaaccagaatatgtgggcaagtggaaaggctggtaagaaaggaggtgaactctggtcccatgaaagcccagaccacaagcaagaaatgttcttgcctttgtatcctgccctttgctgacgtcaggattctgcttcctcagggagtagggagcacggggagctttggagtttagtggccagaagctaaaggtcaagggcatgtttgctctcctagcatgagatgtcagtccctggcaccccatgcgtggttcccaataaactccagcctcatggcggaggttttatagtagcagatctttctaatgctctcaaatacatttgacaacgtagctgccaagcagatgttgctcttgtgaagtccccttgctggggcagagccagcaggagctgcatccctaccctacccctgtggctcccattccacgggcacctttaggcttctgctgctcagatcgggtggtcctttcatatgttccagtgtccgtcctggaaatgggagacacttctggggtctgtctgagcccttccctctattctgcttgctggacaggatcatccaggattggccatgtgggatctgagctgagaattgaggttgtaaactggaaacaggcatctagaggttgtgtgtgtgtgccatgtgggatctgagctgagaattgaggttgtaaactggaaacaggcatctagaggttgtgtgtgtgtgtgtgtgtgtgtgtgtgtgtgtgtgtgtgtgtgtgtgtgtgtgtgtgtgtgagagagagagagagagagatttgtttgtagcccgtgaaggctccagcatgctggtctgactacaaaggccacctcccttacaggactaggtctagccaagccaagctcctcatagccacctggatctggttcttggtggcagctccaccattttcccatccaacttgaaagggttgtgctggtgtccgacagctcaggtcatcctggctgtacacgctccaccagactcatgaaggggtcactgcctcagtcctaattttcttaagaatcctttctccccgaggtatctaattagaagagttcctgtcaccctggaagctagggctctctcgggggctctggtggtccattgggaagcatggtgtctgaagaatggtgtctcgaccttgagaccttcctaagagtatgttgagaaaattgtcgagagcaggacaggctgagtttgaggactgctcgcccttcctggggtgaaagatggcaggtttttatttacttacctcccttattgacttgctgaacagggtctatttgtcctggataataggtccccaggtccctgggtccagggcttcttagtggaactcctggtgaggtattctctgaaaagatcttgtgctgagtcaggccactgtaatccttggagcctaagagcctagtttacctgccccttgtgttttttcccaaaagtcaaccttcatatgaaacatttgacctagatttctagccttgaggccacaggggttcaagctcttgcctgagggcagcccttttccagaaccttcccctgtacatacgtgctccttccttgactggttccaggggtctgactttacacacacaagaggaaggtgtaggcagcgtctttgtcccacagctggcccagggtggagtcaggaaagcctagcacctgagcaccatacaccttccccccaacccccaccatggcagtgctaggtgcagacctagacagcagtccttcctccctgtgcctcactcccccagtggttagagagatggtccattttccttgcctacctcatggagctgtaatgagaagtcatggagaagcactttgtccctttgaaggatgacaccaaagcccccctgacaggcagtgcagtggtacgaaccgcagagtgtgtttgcatccgaagctctgaggcatcaccctcagagcctgccagtcttagaggtccctgtcaagcaacaccagttgccattgctcattgctgtcagttgggggccctgcctctaccttcaagttggttcctgccaccaccctctgagtacgcagctcagtatcactgtaaaggtaccagtgctgggaggtgggggtggggaggcgtggggaggcgggaggctcagccctgaagcaatggcttgccctagccttatcctgcaagcctcacttcttcctctagcctccatctcaaatgaattccgcataaaaacgtcctggcacttctccccagggccagggtacttgctccctaaatccctgtgcccttcagagactgctctgtcctggaagggggccagcagaagctgacagccttgcgtgaggatgactccgttcgcttctgcagactgcccagcgcgctgtgactgatttctagagtgtgtatgttgctagttttgtttttgtttttttaataaaaagcaggattcatgtaaatagctttttttgggagcagatactgatctgtcccatgcgaccatgtggacgatttcaaggtgctgaagcgacactaataaactgacggcgctcaggccgcccactgctgtgatttctctgaatgtgttggggccatgcggcttgaacgctggggcgcacgcgtggagggggcg

SEQ ID NO: 21617 - DNA, 1151 bp, Mus musculus
ggagtggaagaccaccctgaaacacccatcaccactcctgtatgaccctgacccctgggccacctccaccccccacccctcctggttctcatggtttctggcccatgatggcatgtcatatgctgaagaaatgaataaatagcatgaataaatagcaaaagagtgaaggtctgggctcctgcatctgactcaggcagtgggaggtggtgagagcgtggaaggtggtctgcagggcactgaggtctcagcccgtttccaagagtcccacagctgcctgcctggcggaggggctatagccaaggccctagcaatctggtgaggtcctagactggctcatctgtacctgtttccccacggcgtggctagagatccatccctgttttcatcctgtgtcctatatctgctcctccaggacatagctggtatcctggagtgtctgaggccccatgaggataggtggctggaccctgagcctgtgtgtcaagcaagtatgtatgactaaggagtagggataggtctgtgttcctatgtatatgttggctgccaagcgtggtctggggtaccatctgtattgcctgtagtgctttgcagggtagtggtccccagagggtatccatggcaggtgaagggtcagcccctaaaggactttttggatagggaactctagtgccatcctgggagccccagcacggccttgcaatggtgctctgggtggtggctgttggcttcctgccccagtcactgcttgccagattctcaggcccccagatgagagaggacacactgtggctccctgagcaggccttggttcagtctgttgtctgggctctggccccctgggaaatgtgttctgaatagtggctggtggagacctaggttggggtatctctgcccccaccccacccccttcttggcacacgtgtcaggtttaagtttcaggaaaactgccttgccccagtgtcccaactgtgaaggcatgtggacaggaaagattgggatttgcagcacaatgtttgggcgtcctgtactccctggcaagcttgtctggaagacgtgttagggtgggttaggccggtgaaagtatgggggaggaggttgcaggagccccagaacacttgggccaagaggtcagccagggtggaaagatagac

SEQ ID NO: 21618 - DNA, 1146 bp, Mus musculus
gtgatgtggaagactaaccaagggtctgcttatactggataagggctgttccaccataccccagccccttgagttggtttatattctgcatttcagacctcagaggacagaggttgtgtgctttgtgcgtgtctcttagaacccaagatcacaaagtctttatccttttttattacataatccttaaaagtttgcgtttgactttggtgtccatcttgttagtttctttgtgagggttaagggcctttgtactttaatgcttgtgtccagttctccccactgggtcaccttgacagcagtgaggatgtgggatgctggtattgggttggtcgacccgaccgtacagttgttcggtgatcatctggcagcttttgtcagtgcaagtcttggcctggagcttactgtagtgttgggagggattttgctggtgcgagccctccctccagctttgctctttacagaacagtgccttctgtcctggttcctggcttccctgtcaaagccttgttgggctttgtttgtttgatttctcgctgtgtagccctggctgtcctgaattctcttgtagaccaggcctcaacctcacagagacctgcctgcctctgcctaggagtactggaatagagcagcgtgtcaccaagcctgctcttggttggttggttggttggttggctggctttctggtttggttttggtttttcgagacagggtttctctgtgtagcccttgtcatcctgaaactcactgtgtagatcaggttaacctcagactcagagatctgcctgcctctgcctctgcctcccgtgctaggattaaagatgtgttcgacgacttccctgactgttgctgatttttttttactgtgtagtattttacatttatttatgtaaaacacaggtgtgtgtgtgtgtgtgtgtgtgtgtgtgtgttgtgggatgtgcatgcgtgccaaagcacacatgtggacaacttaggggagcctgttctttcccttcgaccatctggtttctgggaaaatgaggtcaggttgtagggtttgactgtgagtgttcttagttgctggccctggcttgttgatttctacaaagcaaacaagttagtgagatttggatgaccctggctgatggcagggcctcttggagactg

SEQ ID NO: 21619 - DNA, 1178 bp, Mus musculus
actgggcattttacagcgacttggagcattaaaagcacaaaacaggaaaggcacacaggccctgcccccaacactgccaagctggggaccaagcctttctgagcatgggtctgtggaggcaccccatatcttataattgcacatgcaaagaacactcttatctctgtgaaggtcccaaggctttttagaagccatgtgccaggaagtgaggatggagaccacgtatgcatttcctttgtcaacagtatcacagtagctgttgcttttgtgtgtgcctgacacagcaggtcctaggaacacagtggccttactattttgagcccaggtgtgtgctgtgaatatacttgtacttagggactttgtggttttaaggcagtggcaaataatgccactagtcattgattacctcaaatggtatagtcttgcctgatatccaggactatcactgtgggaggagtacggtgtatgttggctttacagtatcgtcaacttgaagcagaatggtcagaacaataaaaaaatgtagagggagaatctcataccaaaggagcctcctcagtaagtgaggatatgttagatatgtcagatatgtcagatatgttagatatgtcagatatgttagatatgtcagatatgttagatatgtcagatatgtcagatatgttagatatgtcagatatatcagatatgtcagatatatcagaagggaggttgaagcagtgcacttggccgctgctgctcagccattgattggaggcaccagaagaggatgtgagcctctgagttagtctgtaagctggaagtagttgggagaaaactggaggtgcaaacaggagaggagtctgctaagatgtgtgacggtgcatggggctgaagggagcggggactagacaagtgaaaaaataaaataaaaatcaagacccagaaaggcagccacacctcactgagttggtgccacagacagcgtgcttctgactacagggccttgcttggccatgattctgtgaacattgttagaagcaagaaggtggacatggcgatcggtccttgaatacagctcagcatggtgacctcccagtgcttttggaccagaatggaagattcccaaaacaagacaaaccatttagagtcaccattagtaaagcaatgaatggcttagatttggttcttgctacatg

SEQ ID NO: 21620 - DNA, 1171 bp, Mus musculus
cagagggaagtgtcagaggccagccgaggctgtcacagtcacatgaacttacacagggaccagagaggtgggagaggtctcaaaggtcagaggaccttgctttcagcctctgtttctcagaatcaagctgctccaggtgtcccaggcatgtgtgggctcattggctagtgctaggagaacccccaagaaagctatgctttgtctgtggggcctgcctgtgaaaaaaagcaggacctcaggggagtctccagctaccacagtgtcctcctccttcctagtctctgcagcctttcgacacaaaggtcagcggcttccccatggtatctgtcttcaaattaagcttttagccgggcgtggtggcacatgccttcaatcccagcacttgggaggcagaggcaggcggagttctgagttcaaggacagcctggtctacagagagagttccaggacagccagggctacacagagaaaccctgtgtaatttaaaaaattaaacttttagaatatgtgtgtgtgtgtgtgtgtgtgtgtgtgtgtgtgtgtgtgtgtgtgtgtgtacacacctcctgtctggacaagaccagaagtgttgcatctcttagagctggagatactaatgtttgtgagctctggtagacaggagtactggaaattggaacttaagacctttggaagagcaatgtatgctcttgacggctgagccatgtctccgccccagtgtgtgcattttgaatgatgacatggaatgcttgccttcattcactgtattggaaatttcaaagtgagtgattctggttgagttccacaggcattctttgctctctgttccaggcagttacagatcatttgctatgaacagcaccttggttttggggaccttagaatgtcaagggttgtaccctgtgacaccccccaccccccgattaagcacagttcacatcaagactgaaacccactcacaacattgggggaaaggccactgtcctgggcctgcataggctggagtttgtagcctccagctgtagcctgtgagcatcggagaacctgatagttccattcctcccatggctcctgccgggtcttctgcaggggtgggaccctcatcctctgtgactagctggtcataagagctcccttgccttgctctgctctgtcctggatttaggaccca

SEQ ID NO: 21621 - DNA, 1118 bp, Mus musculus
caccatgggcaggggcttcttccagggctaggctaggacttagctaaagagctcctggctggttgagtgggaggctagcggctgtttgaatgaagaagatagggccccacaatcagtgctgagcccccagagcagttgtggctcagcaaatcccagcatggcctaggagggacctgtctacatttgctacagacagtgaggcttagtgtcccaggtctgaggcagctcccaatgcagtgacctccagcagacacacatggatagacagacttctctcagccagcattgagtcatgttttgtatgttgcgtgtcctctgattctttcatacctggggacttgtgccaccacgtgcatctacagctacctgagcccctccagagctgagccccagagaccctttggtgggtgtagcacctgggtcctggccctcactgactggcctggtggagcccgtccctccaggtcaactccggtggtcagtgggtctccttctccccagctctgtgggtacctttgcacgggccctggattgcagcagctccgtgcggcagcctagcctgcacatgagtgccgcagcggcctcccgagacatcaccctggtgagtgggccacttgccacctctcctgttttcttctggggtccagcaccgacctagacacaggggtcctagcaaggtaactaaggactcaggactccagcctttcctggtgtaccttagatttatctaacatgctaagggagttagggagggcttctcccccgcccccaactccccccgggaggggcttggcagctactagattgtcaccttgagacctgaaggggtgggggtggggggtcacatcttggatgcaggaagacactccttagagcctggggacagcctggtcccaggggaaccctgctgtcttgcagttccatgctatggacacgctgcacaagaacatctacgacatctccaaggccatctcggccctcgtgccccagggtgggccagtgctctgccgcgatgagatggaggagtggtccgcatcagaagccaacctttttgaggaagctctggaaaaatatgggaaagatttcaccgacattcaacaagattttgtaagtgctta

SEQ ID NO: 21622 - DNA, 1289 bp, Mus musculus
cctgcctccagtcaagcggcggcgaatgaactggatcgacgccccagatgatgtattttacatggccaccgaagagaccaggttggagccttttctgggaaaggacgggatatgagagtcttcagctaccaccctctgatttgtactggcttacctcttcccacaggaaaatccgaaagctgctctcatcctcagaaaccaagcgtgctgcccgccggccctacaaacccattgccctgcgccagagccaggccctgccgctgcggccacccccacctgcaccagtcaatgatgagcccattgttattgaggactaggcggtcacccacaccgtggcctgcctgggcccctccatcagccccagagtatccagtgaggcctgcagaggccaagcggcctccctcccccaccagactgctgcccaccccaccctctgtttccgtagtgccccaactcccgccctcacatgcagagaaactgctcctctggtggacatgtggggaagaagtgtggtctaacttattccgagacaccgaggaggagtcttttttagctttgtgtttactttctggctggagcagagctgaggagcgccctgggccgtgtgctgcagggcttctcacccggggtgggctctaaggttttgttgtgttctgttgaaggtgccattttaaattttatttttattacttttttgtagatgaacttgagctctgtaacttacacctggatgttaggattggtgcagcagccagcagcggccaagctgcctgcagggttggtcccctgtcttttcaagtaattttcatattaaacaaaaacaaagaaaaaaatctcataaaaaggaaaaccccaccaagcccttctgcgtcttttgttcccagtccctctcctggtttagttagggccatgaacctaggctgctccaatacccagaatacccagggcatcccttggcagaaagatgggcagtagccatagctagggtcagcttagcgctgggggtcttactcaggctggcagagaatatcactctgagacctattcctgtaggcctttggtcaagggcctgctgcccttccaagggggactgggcacagaggatgccttgtgcagaaacagtgtctcacgtgccacactgagagctgaccctacctgaggccccacaacttttttctaccagggttttctacctgggtcagcttggcacagaagcttaaggtccagggcccaccccctgtgcccagcagatcccttgccccagctgtcgggctttctgtgctaagctg

SEQ ID NO: 21623 - DNA, 1124 bp, Mus musculus
gctatggaatactctttggacccaaaggtgagtagagtcccggtggaggaggtgaggacctctttccctccccagatccctgttcgttcccgctcagccacgccgggcacttttctccgcaggagtgaatactggtgctgtgggcagctatatctacgacaaggacccggaaggcacagttcagccctagatctgcagatgctgtcctcggggtccccctgtttgacccggaggcaaagtggcctgttgcctagtcctgcctcagcgtgtctcgcctgcaaatccgggacctaagtggtggaggagaaagcctggatagtcccagagcttcagccccctttgtcaccttggcgtgtcccgtgctgcccaccgtttacttcctgtctgtgtgcctccgtagccccatgggtcctgtgttcctgtgtccctgatagctctccaaggtgactgtcctatgatatatccctttgcccacacctgcccaccagtattatttatgctctgcttgccggtgatggccgtgagctcacagcattcccagggtgatggctggcgcccttgcgaggagccctctgctggttccacactactccctacctaccctcacatggttcatggctatggagacttttgctgtcaataaatagtttggtttgaggattgcaagacccagtgtcgtgtgtgtgtgtgtgtgtgtgtgtgtgtgtgtgtgtgtgtgtgtgtgtgtgtgttgcatataaacacaagaccgtacccctttctccacagacatccccttgtatccatgggcccagtattggtagggatgtagtccaaagacatttctgaactggggaggctgacaggcatcagtgccaacggtgaagtgtgtgggaagcagcgaggagctgtactgggcagaggagggaaggaaaggggtccggatgatggacagatggaatccatggaggacagaaatgaggtatatacctgtgatgagcatggcggaacacctcacaggtgtgtgaagtccaacttgagaaaagcaggagccatgtaaatgaggcctggaggcagggaccagaaaggtcctgggcagagcatgtggagctggtgagaactgggtggaacctgaagtggaggac

SEQ ID NO: 21624 - DNA, 2337 bp, Mus musculus
agccacaaagaccccatcgactggtgagaagtaaagatggggcaccaagaccccaaggcctacaggcagccgaggtgatcaggacactgagcgccaaggaggcctgtctgaagaaggcgttgcaccaactgcagcggcaatgtcagcaggagctagccaggctggctggtgctctgcctggcttgatttggattctgcctcctgaacactgaaggccctaggatgtagccatctgtgtaggatctcagaggcaaggagcagagaggtccaggcttgtgttccctccagggccagagccctttcgcctatggttttggtgttacaacagtctggtcctcctgagaggtttggaggggacctatatatacgcggtagagctgttcctggggatacctggctgctgccctcttccactgtccctttatcttcctctttttggcacactgggatgtgtgtagcgtacggttggcaccatgctgtaatcacacatgccccaaagtacaggaagtattgggcctccctgagtggaacagctctggttgtttccctgaacctctttcttagactctggctctatgcctcctgcagcagagctccctcctgtactgggccacggatgcgcctgatgtgtgtgtgtggtgggaagctggatgggagcctgggggctctgcctgggagaccggaggagaggaagctgcggtgcagacagaaggcttttgttctgaaggctgctgggcaagctcggcgctcacaaagcagcctgtgtccgggacgtgcgtacagcctggtgggatagttctgtcctaacccagtctttcccagccagcaggctcaagcgggttccatggtctctagccctaccttccttccaatccccagctccaaacactgaccaggcactggacagccggtaggacccaccaggcagcctctgtctcttgcttatctaggccagaagccactacgtgactcggagccttgaacactaaaacattctttcatgggggtttcctgcttgtctggtggtgtgtgctggagtgacagctcatgtctgggtacaggtggcctgtggccctgaggcaggacaccatatggttagctacagtgaatgttcctagcccacttctggatggccagtgtctaataggtccttcctaacttttacggacatagctcctagaatctctggaacctcctgcctgccgctgggcctctgctggacctcctggcccgcagcccctgttcctgcttgcgaacacttgttcagctcttcttgctgcttccaccagtgggttccggctctggtccagggcatgtgggaacttgactgtctggctcctcatgactgtgatgtggtctataaacaaatctacttaagctcgctgtctctgaaaactgccctgctctaggacttccagtggtcctctggaactcacccttaaaaatccaaagcggattcagagctctcgcttctccatctgctctgcagagttagtgcaattcctgtcagaatcctctgtgtgtgtgtgtgtgtgtgtgtgtgtgtgtgtgtgtgtgtgtgtgtgtgtgtgtgtgtgtgtttgtttgtgtctgtctgtctcaggccatgagaaggcaagagcctgtaggggtagggggcttagccatgggactcatccttggtcaagttgtcacctgggaaggacctcagaactagcttttccacacaagggcttgaaatagcccacgtttgtggtctcagtgctctgtgtcctcagctcccatacttgggagccacacagtcaagtaggaataaaatgtagtgtcagttggccacaatgtccctggcagatcctgacgtcctggggcaagttcacaggttgatgaccgtgctgctccagggtcctgcagcataacagatcaggcattagggaccaccatcaaccctatcctccctgcctctgaggaagaccacgttgtccgccaggactcccaacctgatcctaaggtccgcagcatctttaatacttgtcacgagaactgaagctctggccacccacgggtacatttgaggccagcaggtggacagtggggccatgctctcgaaccagtgaggacatggagtttgttccttgggttcccacccaaggcagacacctccttgcttgaggtagtggggaataccagaggtggattcctgacaccggaatgtgctgactggaagggaagtttagtaattccaactcttgtcaaaactagaaacttctgtttaaaagtcgacattaataagatgtgtctcaatggcggaacgcttgagtgtcttatgtgaaattggatttcatctccatcttggtttga

SEQ ID NO: 21625 - DNA, 1211 bp, Mus musculus
gagccgccacgcactgggttgccactgtgggccgaaggcctcacctttttctattgctatatgctgctgttggtgctgccctgcgtagcgctcagcgaggtcagcatgcaaggggagcacatcgcaccgcagaagatgatgctgtacccggtgctcagcctcgccactgtcaatgtggtggctgtgctggctcgtgccgccaatatggcactcttccgcgatagccgagtctcggccatcttcgtaggcaagaacgtggtggcactggccaccaaggcctgcacgttcctcgagtaccgtcgccaggttcgcgattttccaccacctgcgcttgcacttgagctgcaaccaccgccttcccagcgcaactcggtgccgcctcctccaccactgcatggcccgccagtgcgcccccacgggccctcacccacgcgggatgcgctggacacgtgacagccccccccccccgcgcgggccgcacagacgctggactaactgcgcgcggtttgcatgggatgggatggggcaggctccccttagggacaggtgttgtgaatgcatacctgtgcagtgcctgcggtgcctggggccatgtctgcttcttcatctcaggaatctctcggaccacggactctcagcctccactccactagctcgcctcgatgcaaaggcagctggtgaggcctggtcttgagtggagatggctcaacccctgcctgatgcggggctgccgggatgggagggcgggcagtgttccaggagatctggacctatggtaggggcttctggctcagagtttggggccaaagaggcctctgtcattttaaagacttgtgtttacagttttgtacccaaagcctggctattattcctgtctcatgagtcccctgcctaacagctggccagagtagcaaggactggtgagtgctggtggccatggggcagtcaggtacttctggagcaaacaggtatttgtggggtctcttctccaggtagtccattgtggtcccgtgtcagagacaccctctcttctcccacctcactgtgactgtccccacagaatctgcttttgctatggtaccttgacttcctccttctcctcccattccacctctccacagcctcccaggcctcccacccctgtccaactcaggctcagaaaagtcctgcacctccacccccttcccgtgcagacttgctctgcctgtggg

SEQ ID NO: 21626 - DNA, 1178 bp, Mus musculus
ttctagttaataaataaataaattatgcacatgtgactcttaataactttacaagctttctagttacaaccgctccttaagaaaatttattgaaagtgcaattagtcactgcccctttacagccaagtatttaaaatatttggtcaactagttattaattcaaaagtttaggtattgtaaaattttaaaaatttaacttcttaaaagacaaaaaaagagaaaaattgtatccccgtacatactatttagtgcactcccatgcacactatttaagtcttaactttattttcaaaatttaatattttaatgtcaaaaagtttaataaatgctttatagtatcttagagggatctacttattggcttatagattgatcctaaaacagctaccttattagaaaaaggaaaaacaggttttctctacagaacgctacagaaacatattaattcgtgtgacgagctggtaggtaagttgactcatgtcctgattaaattgactaaaaaactaaattaaattcatgttttagatccatccttacttgtcatttttccagtttagattagcttctagctttttaactttatggcaatagtacatcagagactgtacattcagacttagtaaaattagtcatttaatagagtcataatgatttttctcctttcttcagtgtgaccagccattctaactcaatcttagactggtctaatattcagtccaatgttagagattctaaattacctaacaaagttaattcagagcacatcccccacttcccctagatccctaacctcagaaggattgctggccttacagctagtgaaaaaaagctattaaagagcaattggtcacttaatacattggtaaaatagaaggaccccctgactaacaaatggaagggtccagatccagttctaatttagagtaggggctcagtttgtgttttttcacgagatgaagatagagcgcagtggctgccagataaattaattcgtcagatgaacacagattctaaatcttctaaagtatcaccttgaggactaaaattcctcttttgcttaaaagtcagcttgaggactcaggctccgaaaaagctactctctgatccagctcgccaacaggaggccagagactagcctcagctttacaatttacatttaaataaagtacctggacttc

SEQ ID NO: 21627 - DNA, 1213 bp, Mus musculus
ctgtagattgcttttggcaagatagccatttttactatattgttcctgccaattcatgagcatgggagatctttccatcttctgagatcttctttaatgtcttccttcagagacttgaagttcttatcatacagatctttcacttccttagttagagtcaggccagggtattttatattatttgttactattgagaagggtgttgtttccctaattactttctcagcctgtttatcctttgtgtacagaaaagccattgacttgtttgagttaattttatatccagctacttcattgaagctgtttatcaggcttaggagttctctagtgggttttttagggtcacttatatatactatcttatcatctgcaaaaagtgatattttgacttcttcctttccaatttgtatccccttgatctccttttgttgtctaattgctctggctaggacttcaagtacaattttgaataggtagggagagagtggacagccttgtctagtccctgattttagtgcgattgcttccagcttctcaccatttaccttgatgttggctattggtttgctgtagattgcttttatcatgtttaggtgtgggccttgaattcctgaactttccaagacttttatcatgaatgggtgttggattttgtcaaatgctttctcagcatctaacaagatgatcatgtggtttttgtccttgagtttgtttatatacttgattacgttgatggaattctgtatattgaaccatccctgcatccctgagatgaaacctacttggtcaggatggatgattgttttgatgtgttcttggatttggttagcaagaactgtattgaagatttttccatcaatattcataagggaaattggtctgaagttctctatctttgttgggtctttttttgtggtttaggtatcagggtaattgtggcttcatagaatgagttgggtagagtaccttctgtttctatttgtggaatagtttgtgaagaactgggaatagatcttttttgaaggtctgatagaactctgcattaaacccatctggtcctgggcttttttggttgggagattattaatgactgcttctacttctttaggggatataggactgtttagatcattaaactgatcttgatttaactttggtacctggtatctgtctagaaacttgtccaattcttccaggttctccatttttgttg

SEQ ID NO: 21628 - DNA, 1248 bp, Mus musculus
agttggttcaggggcttggagtgcctccagagaggattatctatgcaaatccttgtaaacaagtctctcaaatcaagtatgcagccagtaacggagtccagatgatgacttttgacagtgaaattgaattgatgaaagtcgccagagcacatccaaaggcaaagttggttctgaggattgccactgatgattccaaagccgtctgtcgcctcagtgttaagtttggtgccacactcaaaaccagcaggcttctcttggaacgggcaaaagagctaaatattgatgtcattggcgtgagcttccatgtgggcagtggatgtactgaccccgagaccttcgtgcaggcagtgttggatgcccgctgtgtgtttgacatggcaacagaagttggtttcagcatgtatctgcttgatattggtggtggctttcctggatctgaagatacaaagcttaaatttgaagagatcaccagtgtaatcaacccagctctggacaagtacttcccatcagactctggagtgagaatcatagctgagacaggcagatactatgtcgcgtcagctttcatgcttgcagtcaacatcattgtcaaaaaaaccgtgtggaaggagcagcccggctctgacgatgaagatgagtcaaatgagcaaaccttcatgtattatgtgaatgatggagtatatggatcatttaactgcattctttatgatcatgcccatgtgaaggccctgctgcagaagagacccaagccagatgagaagtattactcacccagcatctggggccaacatgtgatggccttgatcggatcgtggagcgctgtaacctgcctgaaatgcatgtgggtgattggatgctgtttgagaacatgggtgcatacaccgttgctgctgcttctactttctttttttttttttaaattaggtatttagctcatttacatttccaatgctataccaaaagtcccccatatccacccacccccactcccctgcccacccactccccctttttggccctggtgttcccctgtactggggcatataaagtttgcaagtccaatgggcctctctttccagtgatggctgactaggccatcttttgatatatatgcagctagagtcaagagctccggggtactggttagttcataatgttgttccacctatagggttgcagatccctttagctccttggctactttctctagctcctccattgggagccctatgatccatccattagctg

SEQ ID NO: 21629 - DNA, 1152 bp, Mus musculus
agtccaactcttaaaacatgaggcatgaccatcagttgaagagaaaaatgaggtacactgcctgaaggttaagaatattcaaacaatgattgcagctatgaggtagaaacaatttctatccaggaaaataagcattggactagcgtgacaaggtcagagtgggactggagacctcactacttcatagaggaaaacatgagctcaaagtgaagatgaccaccattcctgaatagtctgtttagctgagctcagatgggaggcaagcatggaacctgaatgaacaggataccaaattcttgctgagttccaaatgggagagtgaggccacacagctatccaggcatatcagaagcatagctagatgtcagagactgaatgaaaatctctctgctttagaacattctcagaaaacactaccgtggtatctgcttacacagaactcagatactgtcctgtgagtttttattctcaatttgatgtaacttaaacagctaagaagagagaagcttaactgaattgcctatattgcattggtctgtggctatctttattggaaagtgtcttgattattggttgacatcagggttggggggtacacaagccaagcgtaagcaatcccatccctgggcaggtggtcctaagctgtataagaaagttttctgagtctgatctgataagcaagtgccagtaaccagttttcctttatggttgtctctgggctcccttgagtccctccttgaaattactcaaacatgggctaggttaaaattaagcactttctgccaaaagttgcttctgttcgtgttgtttctcacagcaacataaagcaaactagaatgggcatcagtggatctgcatttggaaaacacatgaccatacattgaacctatcagttatttatatctgaaatctgaaacgttgttcactccgtaaccattcttatcatattgtcttgcttcaccttctttactgtggaaagtccctttccatattttatcaaaaaatagatatgctaaaatgaaaaacatatttatttcaactaaatccaaagagcttccttgtaaaaatatttagtatcaaatgcaatgttaattgtcacaaaataaataggcaaaggtatcaacaagtaggagtacaggattttataatgcc

SEQ ID NO: 21630 - DNA, 1103 bp, Mus musculus
ggacagactggaacatgaggtgagagggaggttttgggatgctgtgcaggatgtgagcctcactcattttcctttttagcggagaagaacttactgagaatcgatggggttggagtggacgcactggactccactccaggtgcgtcaccccaaccccaaccccaacctctggttctggcaaacaatacctctcattcccagccacattgttcctagcttaaaatgtatgggtagatgcctcgtgccccagtccaggaagtgccgcaaacactcatgttcccacccctggatcgaaggtactcatgctggactccctgtgcagtagcactcttgtgtacctgggtagcgcctataaatatgaatgttcttgtgcaccatatattcacaatcaggactgtgtagctgtgccctgccctttacctatgcagctgcctctatgcaatgccctgcggtggtgtgtgaaatctttccatctgggctctctcctgggtgcttcctgaggctatagtgttctggccaggggagcactgcccctcagtggacaatgtctgcctcgcactatcttctgattgggcaggggattcccagtgtagaggtgaaacaagaggccttgaagagtgggccatggggaggggcaccaaaggtactgcctgcctgacaacagggctaaaggaacatttgagctgagaggccaggacctgtgtgagcaatattgttagaacccgtcttcctcccagcaacagaacagcatgatatgtgtgaaaccaggcacgagggacaggggtttgagctgtctcttgtaaattccaggcaacgtttcctgggaaagatgcccaccaaatgtgaaagagggcaatgcagagactcagcttcattgaaagttagctctatatcttggagctataacatcctagagaagatgctccactctccccctatcccccagagacagtgctacaccaagaacagtaatcacacacgtcagtgatcattcacagattctaagtagctgtgatagtcttaaacatagcagatcaaaatagttgagactgacacataccctaataagtcaagttctcaggatagggaagctgtcattcatc

SEQ ID NO: 21631 - DNA, 1365 bp, Mus musculus
tagtgaggatttttgtaactaaggaaaaaggtggtgagatctactgttgccagaataacctttgttgtgttttaaacaaaggtttttttatacacataaaaacaccttccatctaaggaatgcttcagaaataaataacacattgttattcatatttttcttggaaagtacatgtttacatgctttcaaaatttttgttttttgagctaggatctgagctctctgtagataaggatgatgccattctcctggttattcctttgagtgctaagaatccagggtatccttcatgcctgacttgtggaagactgtgtgttaaacccagagcctcttctgtgctggtctaccaactgagctctctcctcatccattttatttttgtttgtttgttttggctacattttcaatcggctttgcctacagtatgagtatgtctattttaccatcattttgtctgattatgtactttgcaatgcctaatcttaatagatagctaagaggatgattaattccactcactttatgtaatgcagaatttttctgtgctagttttgtaggaaattgtgagattgatttggagatcaaaagatatttttgtagagctggtgtgaaaagtattcaggtaagtttttttcaaattttcattttagagttttctagactgtattcagaaagaaaagctgtggagtttttattagctaggaaggtatttgaagtaattttctatttgtggttgtagttgaataaagtgtaaagctatgtgcttaaaagtcaccaagtgactttgaagagctatgttttctgacttgtggtttcctgtctgagttcagatccatgggacaatgcgggtgatactggagcccctgattggagacatgcctttagttggagctttgtccatcttcttccttaggaaaccagtaagtagacatttcatgatgtcatgtctatctttcctctcttggcagtaacatggatatgcagaaggatagaatggaggatcaaaattctgcccttcactcttccctatctgatgcatggtcaataaaaattacatttaaaagcacaacacatagagctgtacatgtagctcatcaaatactgcccccaacaccatcaaagaaggtatatttatctcagagtctttaacttctgtatgcctcaagtgagggttttatctcttgataaacaatggtctttcctgagtaaaaaaatgtttgtggaagttaggaaaatcatttttagctaagtaagttgaggatacatttggcctgttgctaagtatgattttataccatttgcttatttaatcctcatacttctaaagctaaatattgcttccttgtactgacctggagctgacat

SEQ ID NO: 21632 - DNA, 1171 bp, Mus musculus
tcctgatgattaggaccattctctttgattatgttggtatttattttaaacaaaattgtattagtcattttgattattgtgccataagtggtaaacaggaataaacaggaataaaagtgtagaaaaaaattataggtcattattcctcctctgagacttttaaattttgtgcttgtggtagcacagggatttgaagaactatgtcatcttagtgctccattttaattggtttgtgtgaataatcatcttgtcactcgacagacgtcggctcagttcttgttctgctgcatggattggattgtgtgttactttatcaagtgaagatagtgtagacacatgctcacagagacttgtctctcacctcgtaggtgctggcagacatcagagctgacaaggaccaagccagtgatggcctttcatctgcactgctgatcttgtatttggattctgcaaggaaccttccggtaggtaacacagagctaactcctgtgagtgtatttcttacttggaaactactaccttgtccagctacgatatattacctaatcttatgtggcagcaacagagaggggggcataaggtagtatttgctttgcacatctgtatttgtatctaattattacagcctagttatctcaaggtaaaactcctcctcttaaaatgaggaataaatgaagcagctctgatcacaaaccctaagtgtgtcttagaagtagcacagtggaaagtgagctgctgagctgtgactcctcagggttaaagcggaacattattaatgccaccaggtaggtgctgaccttcaggtacccgggatacttccaactgaacaaagacacaaacagagtcaaataataatgtttatttgtttatatcagattgttttggttttaggagggaaaaactataaaataaaaagtaatttgaacatgttagggatagtgaaattttcactttcctgctataaaccccactagctaaagtcatgttatcctcataaatgttacattattgggtaactttttaggtgccaatgtgcttgcatatgagggcattccctatgtcattgtgtcaacagctttttgttgaaagatagaacactgtcatcagttacaggtggtgtacccaccaagattacccattgcataattctgccttcatagtaaatgctcag

SEQ ID NO: 21633 - DNA, 1155 bp, Mus musculus
acctacaaaccccttcagatccctgggtcctttctctagctcctccattggagaccctgtgttcaatccaatggttggctgagagcatccacctctgtatttgtcaggtactggcagaaccactcaggagatagctatatcaggcacctgttagcaagcacttgttgggatccacaatagtgtctgggtttggtgactttatatgggatggatccccaggtgaggcagtctctggatggcctttccctcagtctctgctccacactttgtctctatatctcctcccatggagatatctatagtgaactattcatacttggtctttattcttctttcttttcctaattcttttttttgttttgttttggtttggtttggtttggttttggtttttcgagacagggtttctctgtgtagccctgctgttctggaactcactctgtagaccaggctggccttgaacccagaaatccacctgcctctgcctcccaagtgctgggattaaaggcttgcgccaccactgcccagcctctttcttcttcttgagtttcatttggtctgtgaattgtatcttgagtattctgagcttctgggctaatatccatttatcactgagtacataccaagtatgttcttttgtgattgggttacctcactcaggatgatattttctagatccatccatttgcccaagaatttcatgaactcatttttttaatagctgattagtattctaatgagtgaatgtaccacattttctgtatccattcctctgttaagggacatctgagttccttccagtttctggatattataaataaggctgctatgaacatagtggagcatgtgtctgtcctttttacatgttggagcatcatctgggtatattcccaggagtggtatagccaggttctcaggtagtactatgtccaattttctgaggaaatactaaactgattgctagagttgtaccagcttggagtcccatcagcagtggaggagtgttccttttgacatcctcgccagcatctgctgtcacctgagtttttgatcttagccatactaactggtgaggtggaatctcagggttgttttgatttgcatttccctgatgactaaggatgttgaacatttctttaggtgcttttcggccat

SEQ ID NO: 21634 - DNA, 3416 bp, Mus musculus
gctatgtaaaggttaaaatgatttttaaaaatgagaacctcaaaacatgagattttcatattgttaagaaattagagaggtaggaaggagtgatgaatgatctaaaaggaattacccaggaattttcacagaaccttcttttaatccacaggtgctggttgttctggcatctgaagaactcgccaagggctggacccagtggtgagtgcccctgtcccaagttgcaggcagttcccagagaaacctagctgctgcgtctaccatcccaaagcctgacccaagtctgttgtactttcttgtgctttctcaggtatgacctcacagaagatgggacaaggccacaggtgataacgtagctacgctggacgtaggtctatttttcagtgtatcacgtggcacctcaacatggaacacaccttctcgcagatgtaccaatgctatttttataattttaagtattgagttatacataccttaataattttataaaacttggcattgtaggaaaatttggccaatattattgttgaatctccctgttgagcttcctccagtgcttcaccagtggtgtagtgatgtgtttcctgtgctgtgtggagctctgtcagctgcacctgctggaaagcagatacctggacttgtttctgccttgtcctgcatcctggaggtgcactacaccatgtaaatagattcttttttataatatctacatgctggtttggataaagaagaaaatgaattaaggaaatatgtattttcttctaagacttattacattctgtgacaaattaatcattttcatcttttcagcaaaatgttctcatagatctgttgtgtgatatggctttttaaaggaaaaaatggaaagattattaaatattagaatttttatgtctattatgaacgataaaacaaatttcaaattactaacattattataaataggaaaatacagtgagaagtcagtgaatggctaattttaaaagttgtataactgagtactggacaataccgagagcattgtcaaggctctggagaatcacagtatactcatctgaaatgtattacataagaaaggaatgtgctgtttatttgtgtaattgtttgttataacagactcatgagtagtagagagatgcacacatgctaggcgttgtacctcacatctgtaatcccagggtatgggaggccacaccaagaagacccaagtgttaaaggccagcctgggctacacctcaaaactctgtcttgggaaaaagaaacatacattatattttgcccaaagcatattaggatataaggtgttatcaagagtgatgcaagcttaatttgttttgtccttgtttcttaccctaggaagacaggtctgttgttactgtaaagaggtgaaatgggatggatgcatagtaacaaagggtgctgagctaaagacgttagttagagcactgcacttgctcttgatgggagaacctggccataagtccacacacaggacagacaccttcccgagcttcccctcatacgtgacaaaagatcctgcgcagtgccagcaagctgctgtaaggcttgagatttcctggatatcctcattttgtgccatgccagatgttaatacaatttttattttggaatccttttatttttagattgggaaaagcatgttttgtatgtaagagatctcaaacctcttgtgaggtgaggctatgtcacagtattataagctatgcttgtctgtaagcaaaagatgcacaaatgtaggaagatttttttttcagtatgcattttaacctctaggatgaaaagggcttctcagctatgagatcatttaaaactatgtacacttatagcaggaaaatacagctttgtaatcaaaattggagtagttccattcacatgcttcttggaattaaacctatgggaagcttatgtgaccaaacataccaaagtgcctgtgatgaatatcgagtgctccttttgcactctcctcctgtctaaaagatgaaagtgtgcctcagtttgtaatgtaacacgtacagttgtaacacagtctgtggctcttcacagcacaccccaggtagtcataccgtcagagtaatctctctcctgccatctgacaccttcctctgaatcctgtttataaatcttttttcattagtgagtaggattgtgagaaagtttgtgtaggtacacacatgaacatatatgcacataaaatattcaagggtggcattttagttgcaggagaaaggcaggttatattaaaactagttgcttgaccatggtattagctttttttttccttaagtgtgtttttaattaagtccatttaagagcttctgtctataaaagagatttttttcctgaaattgtatcatggcaatcgttttttcaccaacaacctatctatcttagttttgcatccatagacttagttaagtgtgtattttatttaatggaatgcttttcataactaattaggcaaattgagtagagttaagggtacaatcccctaataaatcagtatgatccctactacagtcacaaaagctggtgccaatgagttcagatacagtgcccccacgtgcatcatctgagtcttcaagtagcatctccagtctaagtggaaaggagacagaaggtctagtaatactagtccacttagttgtagttctgagtgctgcatgaggagggctgacttgccatcaaggcacactccagtgtcctaaagatataaaatagatagatacttttagttctcaaaatgttaacttttagtttttaatgacttacctaggaaaaaagaatgttacattttctactttgagccaaaccaatgagggaaattagtgatttgaagtacagctctcctaacttattcatgtggtggcttatcctgtgccttaaagtacaaaggtgttttcaagtttcaggtgaaaacagaagcagccttgcaaccatatgtactaccatttgtattttgcactctatatttcttgtacaggcagtccctatgcagaggtgtttaggattagtttaaaaaacctcaggcagatacagagagtgcagcctgctgcagtgaatggtcccatctggattacccactgtagggtaatagagggtggttcttgttttttgttgtttgtttgtttgttttaatcatagaatgtcctttttgcttaattttatataacagcacatgtatttattcaataaaacttttatgttagtgtactcgtaatatgttttttgtttgtctcttgaacaagtttagtgtgggaacagctaatttggaaagctcacatgctgtttcaggtatatttgctatttgtgcattctttcactgttcatgtggtttgatattcctcttgttcccatcctcgttcaaagagcaagcagctcattttgaagggcaatga

SEQ ID NO: 21635 - DNA, 1638 bp, Mus musculus
tcctggcagaaatgctcccacctctggaaacaaaacttctaggccagcagtatttaaggttccagaaacaggaagcaaaaattttcctagtgagtcactaggagagatagggagtaaaccatttcctttttcaccccttgattcctggacctgtgaatcctggctatgagagaaaccatatgatatgttggacacttgatacaaagcttatatgaccttcaggagaaccctagcagtgttccagacggctgccacatactcaacattgtactgtgtcttcaaaaggccatttcatctctctatcaaggcttcaggatggtaggaaactggattccagaactgtgggttcactgttgtgcttccctgactgtgaagtgagttccttggtcagaagcaattctgtgtgcaataccatgatggtgggtaaggtatagtgatgtccatggatggtgatttggcagacactttatatataggaaaggcaaattcatatccagaaacagtatccactccagtaagagcaaagcattgttctttctatgcaggaagtggtttaatatattcagcctgctaccaggttgctgactgggcgccctgcggattgatgccatgtctggggttcagtgttgggtctctgttgttggtatctctggcactcaatagcagctgtagtcaggtcagagttggtgaatggcagtccatattgttgatccaaggcacatccctcatttctgtcaccaaggccactttgtccatgggcttattgggcaaagacaaggatggctggcaaaaaaaaaaaagaatgactatccatagaatagcacagtctatctatctacttgactactgaaagcctcttctgctgaagttatcttttgatgagcatttatatgggacaccagtatcttcacagatcacccatatgtagggatttatctacacatttctttctcagatgtctttgtcaccaaatcatgctctttctaagtccctgaccatctagacaattgaatcattgaacaatcacatatctggctagttctacctccaaacaaaatgtatacacatatatactgcctgaagttctgccaactgttaagatttcccttcacaagtgtctttcagggttgtctcagaaaggagttaataatgttgcagctatccacttctgggtggtgcctgcattatgtgcagaaccatcagcaaaccaagccctagttttctcttcctcagtcaaccaattgcaggatacaccccatgagtctacaggtgtgtgtttcacagctgacagcattgtaacagaattagaaaccatagaaatttgggcaacttcttcatgtaacttgtttgtaccttccggaactgctccagctggatcaagtacatagcatttgatattggattgctgctgagcatgtcctactttatgattcagcaggccagaaagcacccagctcatgtcttatggtaatttaatggtccattgtaaaatgttaagtttccagtaaggcccaatagtaagccaagagctgtttctcaaaggagaatagctgtctgcggatgatggtagaatcttgctccaaaatcctgaaggtctattctgtgattcatcgacagaggcttagcaaaggttccaaa

SEQ ID NO: 21636 - DNA, 1233 bp, Mus musculus
ctgggttttccccagggaaaggtttaggaaaaaatgaagatgggactttccatcccattgaggcccatggcaacactggaagaagaggctgggggtgttttttgatgcgggctgttgattcagctgcacccccaggtcgttgtgctgatcccatcacctggaagggggactcacccgtctgggtggatccatggtccctaaccaccaaaaaattacaagctagacaataataacagatccagggaggagaagccacctgagaacaccatttcttcatgaagattctcttccaactggaacagatcaaccagaatacaccttataacctgacttgagaagtcctcaatgctgaaggagacatcatcagaaagatgagcctgaatccactcaagttcttccgggtgtcttgtggtgaccactacaaagctgaggcatagttttagcaatggtgtaagtctaagaacaagacagcctaaggaaaacatgaagtcatcactgtagaactgctgagaacatatgaattgcttatgaaaattctgatcccagattctgcaagatagcttggcaggtaaaggcatttgccaccaagttctacaacctaagctcctgcttgcttttcccaccatcctctgagtctgacagtcttcatgctggtgctgcagccactggcttctaaaagagactcggtgagcactcttcataatcagtcttcctccttgcaagaaacacacacggtatagtccatgtggaaagagtactttgctgttattaggacaacttaatccttttcacctgcactgtgctgtcatttatgccatcagtgaactgtccagagttaaagcattcccaaatctcacaagcactaaatttgtctttttatcattatcccccatgagaactatgccttgacacaaattttgtgatatttacttataacagaccatcaaagtgctaaagatgttaggcaccagacgtggggaaataaaggggtgggagggacctgcgtcctgccggagctcggagacactgggcaggcagacttgggacactgccacgtgctctccactctgccagatgggcgtctggctctgagaagccacggaaccccagttcaagtgggtgcagagggagcagttccggtccctgggcctcacggagtccagggacaacaggttctagctcttgggcatcacaggacgtcactgaacaccgaagtagagctgataacatgtg

SEQ ID NO: 21637 - DNA, 1690 bp, Mus musculus
ctggaccacctaatggtgtcctagggatggctattttgaaccctagaaaggaattgcaggataaaatctcagccctaaaacaacaaataaaattagaggaagagtcagctacaagaattaaagcctaagaagacatctcaggaggggaaagccaccagagaaaatcccccaggacgtcaagttcctcaactcggagtccaaagacggcccctgccctctggctttagttcagcttcagatggcccagaggagggagaggctgaggctttccctgtatcagagatcaccgacgctcaaggggttgcttggagacatcacacagggttcaatttccaaatcattatagattttaaaaacgcagtgtcacaatacggtgccactgctccgtttactcttgcaattctggaatctgccacagaggagtggatgactcctggggattggaataccctagtgagagcatttcttagcggtggtgaccatcttatctggaaatcagagaatcatgagaattgtaaagagatggctaggaggaatgctcaggcaggcaatgcttggtcctttgatgccttagtgggagaagggcaattcgcttcaagtgatggccagatgcaatatgacccaggtttattcgctcaaattcaaaaaaggcttggcataaactcccggtaaagggagaccctggtgcatctttgacagcagtcaagggcctgatgagcgattttctgattttgttcattgatgacaacagcagggaggattttttggtaatgcagaggcaagtatagactatgtgaaacagcttgtagccattagaccctacaggaagaagacagaccttactgggtacatcagactctgacatagggccctcctatcaacagggcttggctatgctggctgccatgcaaggacagtcagtaagagacttcttggcaagtagagacaaaaaggcccctttttaagtgtgagaagcctggacattttgcaaaagattgcagggcaggaaacgagtcaactctgagacagcctgggaaataggctgggaaacattgcaaatgcagaaaacattgggctaataagtgtagatccaagacagatatacaagggaacatacttttccctaatcagggaaataggagcagggaccagccccagaccccgaaccaatacaagccaaaacaggcttatggggtggtcagcttcatgccagcaagcaaccacaattcctttcagaacttggtcaagcaatcccttgaagggcaggactagattctgccacccatatacagtactaaccccagaagtgggacctcaggctctacccgccagagtgttcggacctctatccaaatgtgtctggcctgatagtgggaagaagcactgctgccatgcagggactgcaattgttcctagtgttagagacaatgattatcaaggagagattaaggtaatggccaaggcaatatataatatagtcaccatccccacaggaaggaggatagctcagctgttgttacttccattgcttcctactaatcacaaatataagagtcctaagagaggggatcaaggctttagttcctctgatgcatactggttaaacaaaaacctatgatgacaatccagcttgatggaaaggcattccgaggcttggttgatacaggggctgatgtgactattataaaac

SEQ ID NO: 21638 - DNA, 1152 bp, Mus musculus
ccgggtttcatggtggaacaagtaccagtgtaactatgaggcctgtgtttccttgatacaaattaagtgggagctttctgtagagattttaaccatgttttctgtacttgactttttcagctgtggtgtgatttctgttctgagaaatcaggagagtgttacaggcaggagctactgtaccttgctcgattgtctctgttcctgggggcaagtggggcatgtcctggagctcattgtggactggctgcctacagtgccacctcaagccaaggtttgtatacagccgtggccctggaatgtggagaacaagggcatctggccactgtacagagttagttctgggaacacaagctctaattgcctctttgcttcactgctttccttcagagtaacttggcctctaaacggaaagtggaaatcaatgacacgtgctcagtgaaacctgagttagcattgttgtacatggagtatttgctgacccatcccaagaatcgagagtgtctcctctctgtaccccagaagaaactgaaccagcttttaaaagcactcgagggatccaaggtaactacttatcctggacattaaagtgacttcatatagcagtaacagtgatgcagtaagatagagttttcatggttttggtgctgtaatgtttgcaagctggaaaagaattgagaatgagcatctagactctgaagtgtacaggggaggctgagaacagagccatttccaggacctgtctccttacaagcagtgtttagagaccacatttctccaaggtttctagtgtgtcagggctccagtcctcatctcttctctcagaataggctgtgtagcagagtggtcagtgaggaaatactagctctcttaagtcttaagctgtgttttctaggaatcttaggaaactatgtgacatgaattcattgttccccaagcgcccttcggaatcttttttttttcctgtgctgccaccctgactacctcttgtatgattctccactgaacagtccttattgataccacccaggatggtggttcagaggagcctgccttgaggaaatggactgtggtatttgtgggtagtggttctgtggccccgtgaacctgccaactatgttgtgtgcttctgatgctcagcaggtagtgctaggt

SEQ ID NO: 21639 - DNA, 2759 bp, Mus musculus
tatgggctctgcgttgggtgctgagcctgtttacctttacggctgtgaaacttgtgctctgtgtagggcacaggctgttttcaaatgtgtctgctgcagaccatgtgtaaactctgcatttgaggggaactgaatctgtgtcttctctatttctttcagattcctatatgagtcatcaatgagaactttgggagaatttctgaatccatgacaaaaccaccgtcaaaaacactgggtgtgtagaaatagagaaaagactcatgaaagtgaaaatgtgtgtcttttgtatattgcttttttttttttcatcagactaagcccggagtcctaaggaccacacccaggtctgacggtgcccaaagatggagaccagtacaacactggtgctctactgtaccctgtgcctttaaccagcttgcagagatggagagtgatgaaagtcatgtgagagaaagactggcaagcagctcaccactctctccagaagagctggcaaagcttgtaggaactgtggcatgggcagctcttacgttccttggcctgtgacttacccattatttattatttgttgtgaaattctcctggaacagatttctctttggcctttcagcagggctatcattagcccacacaggacctttcttcaaaagacaaaaagaatcacttcatcaaaatattttattgccctctgttgaacagttgtaatatatacactgatatgaagtgtcttgcttactccattgcacttgggctcagctcaactcttacatctgagctgtgacttttacattttagccttactctaagggcaacagcctccttctacaaaaggcattctcagttcagagaagatttcttgtttgagtgttgctgtgtactatgcatagtcagggacagagcaggcattaagaaaaaaacaaaaacaaaacacaaaggcccaaaagccaaccaaagtggaagtgaattgaggaaggcctggaccaggagtgagttgccacctagaaatgattgttgtttctcaagccacagtgaagtattgctcagtggatacacgtgcccagttgcctctgttttccctctgcaggtcgatggcagaggcatcggccttttcctgtattgactattgaagagtaagcaaagaactcaagagttaaagggttgccctggtcctgtataaatgatgggttaatgatacaaaagagaaaaaggatcttgtttaaaagtgacataatatgcagccatacataggcaataatgagttcatgtccttcgttaaaaatgcttaaaaatgataggaggaaccatggcactagcaccatggtggaagaatctgctgggctgtagggcaatgctagaattctatagcctgtattaccccctcaacatcctttccctagcaaagactctggcaagtagggttgagtagccttagagagctcaggtatgactgactacactggcgatggagggtggcctcagcaggtgggaaagaggaaaggtaccagatcaggctgaggatttgacatcacacaggattagacagttgcagaagttgaaccagtgtgccttgcagacagctataatgacaaattcaacaaggatatgagggaagttggcaaactaacaagacttgactttgaatgatgtaatgtgctgctgggaggatcattagtataatgggaagaatttacatcatgacgtagcatgccttgcaacttactgagctgattatcctccaactcttaggacttttaaaaataatcatgattgggttgttttagttctcttatttttatgaggtggttatattgaagaagaaggaaggtagagtcaagatatctggtccctgaaagttagatgtcagatgatttcaaaattatagctaaattttttaaatactctgcttttcgttgatgggtgaggcctacagtattcattttaatagacaaaaaggaacatcagcaatactttgtttaatttatagactaacttggtctgaggtttcaaagactgttgaatgctaatccctagatgttgcctttactttcagtgtgaacactctcatgaggtgaccattgttacccttgttagaagtactaagattaagttttaaaagcaatttttcccatgtacttgcttatggatggcacagtttggacaggtagtattattccttggtcaaaatatttcagctaaatattaagaatgaattggaattattagacttatttttcttgctattaatcttgttgctagagatataacataaagattgggctggtaaaattaaaattttaaaatattgctgctaaagacaaggcctttgactgacttgagaagtcagttacttcttttctttttcagtacatcaaataacaatgtgtgatacaggtgttttcttttgggcataagaaaaacactaaaaagcaaaagtaaacaaggaaaaacaacagcaacaaaacacaatgtaaaaatgtagatagactcgaagcatattgactcgaggtttagggtcaactaatacaagttgttaagcttgtggctacaaagcgtttgataatatatatgaaaagctctagacattgtttttgaaacacaacctagctaatgctgtctcttatctgttggagaacatccaaattttattaagttccaagcctttatgcccaagatttagaatgaatggtattattcatcgttcccgctatttttggaaagatggaagtataagttttaatgcaaatatcactgtgacatcc

SEQ ID NO: 21640 - DNA, 1195 bp, Mus musculus
ccagtatctgtttcctaaactgtttcatccaggcttgccctgggcttggaagaagatgttcctcactcactgtcccttctcacttgtctcttcctcaggagcagtttgagtttgcgctgacagctgtggctgaggaggtgaatgccatcctgaaggcccttccccagtaggcgctgaagctggagctggcgggaccccaccacgagtgcttccagaaccgcaacaggatatcagtcctgcatcttctgtgtagtaacagggtccttcgggctccacagtcagtgcaggtggctagtcatgtgtacttctgattgaccaaatagcacatgtgtggaaacacccagttaggatggaaggaaggaatgaaggaaggatgggagggaggaagggagggagggagggagggagggagggaggaaggaaggaaggaaggaaggaaggaaggaaggaaggaaggaaggaaggaaggaaggaaggaaagactcagcttacttgtatcacagtcttgacaaaattccttttccctaaagcacactttgacattgtcacattattgacacagtaattagaaacccactgtggcctcttcaggagtgtgcttatgtctgtaaattgctggagagggggtagatgggccaggacaaccagcaagacacctgttgggaagcaccgggtatagaatcatatttggtgtttgcctgtaagacaactaggggagccctttaaggaaaagatcagtgtcctgcacccctggggcaaatgacaagggtattatcatggagttctgcctattcctactggtgtccaccagtcacacatttggaatgtagattccaaagacagaaaagataaagggtttcccaagggtagacaccttgaccatcctgaagtatgggtgctgtacctgttccagaagcgaggacccaggtgacagcctcacctttgcaaagttatagaggaacctgccctggtacatctttaatattaggattctgttttctacattgcaagcacaggcacccatagtacacttttgttgaagttacaaaaccagaatgagtatggcaagttccaagggtccccagtgcttcccattcagcatccccagggagcccccaaaggtactgaaaagtctctgatgctcctactcctggaaagaagtctgggaagcccctttcgctctgcctcctgcatc

SEQ ID NO: 21641 - DNA, 1138 bp, Mus musculus
agagtccggccctggcctcggcggccccggccgatggccctctgcgccgcagcccgagcgcccgggagccggagcgcgagccgcccgccgcgtctctgcggccgcgcctcagggacctgcctgcgctgctgcggagcgggctcacgctgcggaggaagcggagcgccgccggcgcccgggtgagtggcccgggcgcgcacgtggagccctcgactgccccgcgggcccgccacgccgtggctggaagttggggaggtggcgggactccgctggagcggggcctgggacgtcggggttagggggcgcccctcgggctgcgacggccacccttccccctagatgcacctgagcgcacccgggcgccggggcatcgcaggaagaagggctgtttgctgctttctgtggggaagctgcaggtgtccggtgactgagtcaaccagccccgtctcacagaaagtcttaggcctcccgcaggtcctgtttgcaggtggcctgcgacgtgcgtgcttgttttggaagactcagcagtgtctgggcgtcgggactgccctggcagccgccactgctgagggggagacttaggagttggaagagcttgggtgagctgctagcgctgggagcactcagtactccgggacgccccctagagcgggagagggtcggacccccgggaatctcaaatatcgactttctgatggtgtgttcagatatgacttcctggtgaaggagcattccttgtgttgtaagtgcatctcacgacctgagcaggccagacatgttttttatgttaaaaggagggcctgcttgtcatcctggtgatcctcaagccactcaagaaagccccagtaagctctcactgacttccttcctactcagcagagcttgggaataccttggtacatcctactcatactttttttaaaaattattttttgattattatgtagtatttactgaaaaatcgtaacaatggtgtgattttttttttttttgactagaagtcttagttatatgtcatgaaaggagacagtagttggagactcacagctcctgtgatgttattggcttgcggaaacctaagggctgaggaagcatttgttctgtcgtggcttcctatagatgggcaaggatctgaatt

SEQ ID NO: 21642 - DNA, 1099 bp, Mus musculus
tcagagaaacttcttatagtgggtggtgattaacacagagacccagaacttgacagtgtgcagagaaagagaaactttgggaccctcagctttaaatgggatgtctactaaatccttccactctagactcagacagaaagactctgaaaggtagaggtggtggataactccaaagaaacagtcttccatacacaacaggctgatgcacatagtaatgttcagggactgtggcaacaagcacaagacccacccaagttcaaaccagacaaaattccaccactgagaaagcaggagtagacacaaggtcttaccccttacccagaagccacttgtatatgataactaatgagaaaggagaaatcagttttttctgtttttgttttatctatctatctatctatctatctatctatttatttatttatttatttatttatttttcgagacagggtttctctgtgtagccctggctgtcctggaactcactttgtagaccaggctggcctcgaactcagaaatccacctgactctgcctcctgagggctgggattaaaggcgtgtgccaccatgcaggaaacagttttttctgaggtgatactatgtatcaatcacacctgagaaagggccccatgcccaggagttgctggtcacaagtaacagatcccatgcagttggtcagcatggaacagtccctatgcttttcattctgctttgccatttttctcttattgtattcttttgtccatttgcttgttttgagttttgtttttgtggttgttgttttctgaaaaagagaaagggaagggagaatataaagttgtataagcagggaggtggggaggatctggggaaagggaaagaatatgatcaaaatatatattgtataaacatttttgaagggcctggagagatggctcagtgtttaagaacacttattcttacagtggacccagtaatccacttcatgtggctcacaatcatctgtaattcctgtcccaggggatctggtatcctgtctgatgtctgtggacactaggcacacatgtggtacacagacatgtttgagcaaaacactcgtgcacataaagtctaaagaaaa

SEQ ID NO: 21643 - DNA, 1148 bp, Mus musculus
tgcaggttaaaaccctggaggtgtcaaaggaaggttttgagcctgtgtggggtagaatataaaacactgaaacaaaagaaaggcagtaacctaggactgcagtgtagctcaatgggagggggcttgtctagcatgtaaaagacactggattcaatccctagcaactcgggggataggggggagggaaggtgagaggacagacagacacacacacacacacacacatacacacacacacacacaccaatgataccttgatttgcctatgaagaatgtacttgaatgccaggtgcttgtgcactaaaacctttgatgactctctgaactattaaatggcattttcactgtaacttggcaagtacacctgacctttatttcagttttaagtagatcccatttccgtccaagtcactaataaagttcctggccatcaatgttactcataatcttggcacacgaaggaaatttgcccagacctgagaaaactcaccacaccctggaaaaattcttactaggtttttacaaaatgcattccccatctattccccatcttgctgtgctgtgtcccgccctctgtcatttgccatttatgtgtcttaactctgacttacaccttacattccacgcatggctaactcgggatctctatggatggatgcagagagaatgcctggttaatacaagacctaggctttgagattgtcctggtacagaacagaggaaccagaagccatgccttctctttctgaatgcagaaccacaagatgcatgtctcagcccttgagaccccatggaaggacaaaggcttgggtataggcaaacatctgctgtgtatgctttagctgaaggcaggagccacagacatgggaattgggaccctttggttactgagctgtcttcaggcagagccctgcatgtggcagtcatttatttagctaccacacataaagttcacatcgttgaagccctggataattttaatgttgacttagccttctttcttcatgcacagaggcacgttttttttgtttttttttttgttttgttttgttttgttttgttttttgagacctggtaatattcctttattatcacctccattcattgatagaaacagtgagtgaacaactgtgaccaagaatgaagct

SEQ ID NO: 21644 - DNA, 1160 bp, Mus musculus
cttactgtgttgttcccattaaatctcatttcctagtttccacacttgtctttctcccttaactttatcaactgccaagatctgaattattaacaaacttgtctctatccttggcctttgtgcaaaaaactgtgttttccttctaactgcctggtaaatatctacagtattccatcctgtcaatactcaaacatcagctgtcattctcagtctcttaggccacttatctttgaccaccaaaccccgtggcttccacttgccttggtcccctgcccttagcatcacctgaggatgtgaccaagctgtgcttctgatttcctggtaccagataacttagttcagagcagagtttgtcttctttgcttgctacttactgtccagcagggtgtcctacccaaaggaggccctctttgtttgctgcataacaactgtcaattacaagttttaatgcttctgtttcaaggatgatctgtcattgaacatattttccaccattagtcctaattcttatttttaccctagcaatttctgaaataaagatttaatgccccagctcgatggtgctgtttcctctttttcgggaaaaggaactggggacagatgccgagattcgggtgcatcgatttagtcctccttcatagacggttataacacaagggagtcttctgttttcacagcaggtttcaataatttacattttcccttgctcattgatttttctgcttctcctctcccttatttttaacaggttccaaatggaacctattacagtggcataagatgctattgatagtatatcaatccgactcagctattctcctgcccagtaaagtatgactgctgtgtgcacagccatgtcatacatatcacttacacagacattagcaaagtcctgcccatccatatgtatgtgtgcagcctgcagaagttaataatgccatatatcacatgcacataggatgtaaaatgtacttcagaatgacagtggctcatataagatgaatattggcttacgattagagggagctggggaaagactttgccttctcacatctgttctttcaaataatagaattatttgtctgattccacgtgtctcgtaccagctttcttctccccccccccccacctttgcaccatgtatgcccctctctccagcc

SEQ ID NO: 21645 - DNA, 1117 bp, Mus musculus
tgtgctttggattctatccctgcaaagcgagctcctaccagagtcagaacacaagtccatctaggaaaagtcacaaacgttctgaacatctcaaaggattcgcacacacatttgcagatgctccacagcctccacgtggcaacttgccgacaggttaccgtagcacatggtgtaactcgcagtctacctttttagtatctttaattgcattgagaatagattccttttcctgctccaatatctacaagcaagcagtgtaactcataccttgaatttagaggcatgaaaataaagtcccacccctcctagtttgtagggaggtatttcataggcggacagtcttctgagtgaggaagcgggagtatggatacgtggctgcttgtatagacctctcatcctgaagctcgtgtggctgcctaagtgtcagctctgtggttttgtacagactacacatgcattgcaaagcctgaaccaaatgacacaacccacgaaagcttatcagaattgggcaaaatcattaagtttagaagacaagggccactatagctgtccagcatagaatttcttctcaacttcaaagacatgtccttgaaatttcagcccactcagtaatgagtgggccagttttgctctagagagaacacattttgaaaattgccaaaaagtcagaagaaatgtactactgtataaagcaaagctgtatatactgagcatttttagcagagtaatatttatttgcatagcctatttattgtatttgtattacactgttattaaataccaggatgaaatcactgaccagaagcaagaactcttgcctttggatgtctcattgcttaggaccgccgtgatgctgtcagcttgggataacaattagaagatagaaaacccacagtccgggcgtctacctaacttctcagggactacacctcgtagttttccaccattataagcgctggtaaatatgaaacatttgttgagttaccagactgccgttgacagtgtttgatttctcatagttcatgctttctgcctctgtgtacatgactctgctgtgtatttatcaaagtaggaagcaataatttatatgtaaaaatggccaagcaatataaggtta

SEQ ID NO: 21646 - DNA, 1106 bp, Mus musculus
ttctccgtctgtaggatcctttggcagacataccccattgtcctctgtttgctgaaggaaagcagtttttgctgaacatccaaggctcctgaaaactctgctgtagtagtgactcgtgctatccagaattttaagagcctccagtaacaagttggataggtagttagttgtcctagagatctaactgtttcgtgcaggtggaccacagtgctataagaggctgtcaggcagtcggctaggtgatccagatgttgtttctttcaataataatcttccttatagttttttttaaatgtatctttctttgacgttagatatctagatgacaaacataaaactttgcccatttttataaagagctttcgaagagattgaaaatcaggtatttctatgctgtttgcaatgagtgggtgtggtctgtaaaaccacaccaagattcatgtaacaatattcaccttttggttttgagttgcttcaataaacttgaagaaataggcataacatccccgaggcctgcacttgggccgactggggttgctgggtgtgggaatgaagtctctggagttgtggtccctgcagattatatctgttttctcctggaatggtctccctaggccatccatcctaagaggcagtatgtttgtcctaccccgcagctggatgcctttccttcaagaggatgcagaacggatccgtgcagaaggagagcacattgcatgttgggcctgttggcctaaattttgaagtggtctcagcccctgctggagacctcccagccactattatgagggcctcaaagttatcccgagggtaacaggtaaccccacaatccagctcatgtggctagtgagtggaggggctcaccccaggcacaagttgaatatttgtcaaactgaaaagaaaaaggtggttgagggctaagtagagtggttggatatgtgaatggctgggtgggttatggctggttagatatatgagtggctgtgtggattgtgactggttggatatgtgaatggatgcatgggttatgactggttggatatgtgaatggctgggtgggttatggctggttagatatatgagtggctgtgtggattgtgactggt

SEQ ID NO: 21647 - DNA, 1163 bp, Mus musculus
tgtatccatacctgcatagacctgtattgtgacaagtgtctgctgaagagttaaaagcacagtttgagtggggcagagttaatgctcaggtaagttataaagaagaccttgtctgacagctctcgcctttgatactcagttcccccacggtcactcccttcctgcagaggctgttgctttgcctcctgagtgaccatagctcaaacctgatagtttatcctgctctggatattaaattctgggtcattaggaatttatattgaagaatgttactctaaactaccaagtgcaattaaccacacactgtgagtaaggtgtcctttttattaagagacaatagaaacagacactggaggcctcactgtgcttgcctcttccttcaggacctgcctggagcctgctgcttctatttttttaaaaaaaaatttttatagattatgctttttatagaacactcactgcattgtttccaagtcttagggatacaagataagccatggtgttttgaatgggtgttgggggaagctaaaatcaataagtattcatcccttataggtgtgtagtgtttggtccttgtgtactgtgattactcgccctcctcaaagaataattctctaacaaaagaatgtatacccctgttactaaaacatccttgctgtgtctggctgaagctggagggacgtgagctgtaaaaccaaggccgttcatgcttccagcagtagagccacacctgccagtacccacttagctatcctgtctttgctccttagcctgaacgtccacacgtaggtggggcctctcgctttggttttgtaaacagggcactcgtaggcatgcttaatttcttgtctgtccacgggcacggctttggcaaagatgacgggcatcatggacgttaactccttaaggcgggcatcaacaagggctcctgactggatgtcccacctggcacctgtggcagagacaacagttgtgtaactggcatgcgggttctgatgctcttaattgttccatgcaataaatgttccactttgaccatgttgtcacctgtctgtggcatccttgtgcggtttgagaagtttaactgctttataagatcaaattccagacatattcaaacccgtgaaagaagcacacagctctcttagcatcctttctcgctg

SEQ ID NO: 21648 - DNA, 1245 bp, Mus musculus
ccattggtcttgcaaactttagatgcttcagtacaggggaatgccagggccaagaagttagagtgggtggtcaggggagtgggggggggtatgggggattttggggatagcatttgaaatgtaaatgaggaaaatacctaatttaaaaaaaaagaaaaagaaaaaagaaaaagactgaggaacttagaggactcttggtacccatagatggcagcaaagggcagtcatgtactgagcaccttcaagcccatctttttcagatgcatgtattcttctcattctttccttaatacttttccaaattccagtcatttctctgatgaattagctactctagggaaacaattttaaagaactatagatgaatgctagcaggaacaagtaacaaaatgccaatgttgttcacagaagtaaagaaatgctttctaatgtatagcagaggtcagcaaatgttttcaacaaagggttaaatagtaaagagtttagactgtgaggccataggcccattatgcccaatagcatgactatagccaccagcaacatgtgtaagactgtgccaggagccggtagtggtggcacacgccggtaggacttgctgaaggaggcagaggcaggaggatcacgagttcgaggccagcctgggctacacatttttaagccgggcagtggtggtgcacgcctttaatcctagcatttgggagacagaggcaggcagatttctgagttcgaggccagcctggtctacaaagtgagttccaggacagccagggctatacagagaaacccagtctccaaaaaaacaaaacaaaacaaaacaaaacataacataacaaaagactgtgccaggtatgatggagcatataattttagcactccagaggtaggggaaatctctataagtttgagatcagcctggtttacatagcaagttccaagacagccatggcttcaaattgagaccctgtcttaaaaccaaacaagcaaaattttaaaaatctcattctgctaaacaagtataagtcaggattatctggcttatacagccagcttgagaatctcttaagcagaaaaacagcaggagagatgggtaataagaacactgtactagggagaaatatgaagccccaggagcctgtgatatctatgacataaagactaacactaataagccttagtgctcatcagttttgaaatttacccaaagatgaataccaaacaagagaaagtttggccagcctgaaactt

SEQ ID NO: 21649 - DNA, 1206 bp, Mus musculus
aaaggacccagatgtagctgtctcttgtgagactatgccggggcctagcaaacacagaagtggatgcccacagtcagctaatggatggatcacagggctcccaatggaggagctagagaaagtacccaaggagctaaagggatctgcaaccctataggtggatcaacattatgaactaaccagtaccccggagctcttgactctagctgcatatgtatcaaaagatggcctagtcggccatcactggaaagagaggcccattggacacacaaactttatatgccccagaacaggggaacgccagggccaaaaagggggagtgggcgggtaggggagtgggggtgggtgggtatgggggacttttggtatatcattggaaatgtaaatgagctaaatacctaataaaaaatggaaagaaaaaaaaaaaaagaaatgtacaaggcgaaccgcaggatgttggaggtgaggctgccactgctgagcaccctagatgactttgtcctggggtctgcgcgtctgtcggctcctgatccaggcgatccacaatgatggtgtcactgcgtcttcaacaacctcctctactaccaaaccaattaccttctctgctttggcatcagtcttgcgctggccgggtacattcgtctgctgcacaccctcctgagcgcactggtagtggtggtggccctcggggtgctggtgtgggctgctgaaacccgtgcagctgtgcgccgctgccgtagccagccaccctgctgcctgcctggctgcagtacttgccattagcctcttcattctctgggctgtgggtggcgccttcaccttcctgctctgcatcacagcgcctgtgcttttgatcctgctgcatgcttcactgcgtctgagaaaccttaaaaacaagattgagaacaagatcgagagcatcggtctaaagcggacaccaatgggattgcttctagaggctctgggacaggagcaggaagctggatcctaggaccttggcatctacaccctgaacgtagaggacccccaccccatacccaagaccaacccttttcctagccattaaaataggtgcctagagtcctctggcctggccaaaaagagacacctgtgattgatcactgcagccccaaactagtcgtctcttagcctccagcccctgttacctagggaccaaagtcttcctcggtcctgaatttgagactc

SEQ ID NO: 21650 - DNA, 1176 bp, Mus musculus
tgttgcagctaaagaattaaaagggttagaattacactataaagagaaaataattcaaaggattgcttgtttgtatttcattcaaaagcacttaactaatgaaatgccagcagaagcccccttttcagcatttaagagcctttaagagtgggataacagagatcattcagttttgttgcagtgattcccaaaatgtcactcaaagattttgttaaattttttttttttggaagtaatggcacacacctttaatcctagcagtcagagacaggtagatctctgtgaggtcaaggccagtttggtctacatagtgagttccagaacagccagagttacatagtgagatcctgtctccaaaacatcatcatcatcatcatcatcatcatcaacaacaacaacaaaaacaacaaaaacataagcagcagcaaccattacatttcttttttattttgagacagggtctcactgtatgcattggctgatctcaaactcattatctgacatcaaaaatcacagaatgctggttgtggtggcgcacgccgataggatttgctgaaggaggcagaagcaggagatcaaaatcacagaatatctgcctgcttctatctcctaagtgctactattaaagttgtgtaccatcacttccagccctagaaatgcaacttcttgagttctattgtcatctttccaaaatctacagttagactcaggaatgcgtctgttttgacaagcttttcaaacgatgctaatgaactattaaggttaagaactattattatttggcaagcaaatttttagaatcctcttgatcttgttaccaagtttaattattttcttgtctgtattaagatctattataggttataacacctcacatatgttttgggcatggggaggtagctcagtgggtaaagaacttgttatataagtatgaggacccagagtttggatccccagcaccctcataaagttggatggacatgatagcttatcaataaatactgaatattgcagaagggataaagattcccaaactgagcttcccagttggactaccagaatcagtgagtcctgggttcaagtaagagacgctaattcaatatatatgatggagaataatcaaagaagacactggtatcaaccttggatctccacaagcatctacacatgtgtgta

SEQ ID NO: 21651 - DNA, 1235 bp, Mus musculus
gctttccttctttcatttctcactcatggcattttaaaaagctggaatcagggaggccaaagtaatgtagaaaacccaaacacattttgagaagttttatggtataaaaagctcaaacaagaaatttaagtttacaaatcagcaacagttttacatttcaaaatctctgagaaaggatagatacagagaaatcactctcatactcaaaatttgcttagccctgatatgtctgtgtgctgactgatttctacaggctaagtggctatgagcctttctgagaacgtttggacagttgagacaaagttttgggtgttttacgctgtttgagatatgtcacaatttattttgttagggattaatttatatattagtgttttatcttcatgcatgcaagagcaatacatgaatgtggtaaccatagagaccagaagactggatcctttggaactggagccacagatcgttgtctgtcaccatgtgaatgcgtccttaggaagataagcctgtgctcttaaacatttaatgtctaaacagtacttaaatatacatattttggtctatggccgtaccaccctgaacttgcccgacctcgtctgatctcagaagctaagcagggccgggcctggttagtacttggatgggaggctacctgggaacctgataggcatggccgccagctgagggggcctcaaaatattaatccagagttcctcctgccaaaagaaaatgcaaggacaaagagtgtagcagaaactgaagggaaggccatccagtgactgccccacttagggatccatcccatttgaagacaccaaacccagacactattgctgatgccaagaagtgcttactgacaggagcccagtttagctgtcccctgagagctggaccaatacagatgcagatgtacacagccaagcattggactgagtgcggggacaccaacggagaagttagggcaaggactgtaggaactgaagtggtttgcaaccccataataagaacagcagtatcaaccaaccagaccctccaccccccaccgagcttccagggactaaaccaccaaccaaagagtacacgggagttggggcaacccatggctccagctggatatgtagcagaggattgccttatctgacatcgctgggaggggagccccttggtcctgtggagacttgatgcccaggataggggaattctagggcgctgaggcaggagtgggtgggcgggtgagg

SEQ ID NO: 21652 - DNA, 1212 bp, Mus musculus
caaacagtgcctgagaaagttttttccctgtgttcaagagaatttctttttaacagtgttgcagatctattcagatgtttaaaataatgcttaaattcaaagaattttgcttctagtgaactgtaatcactagaaaattctgccactaggtatggctaatatagctttacattatgtaagaaaaatttttattgtttctgcttctatacaagaagccaagagttttaatctttcagtgtatattgtttcctaagtgaaaagtattttattaactaatgcttcttgaagtttaccttaaatccttgctctcacccaaaagattcagagacaatatccttttattgcttagggttttagtttactacaaaagtttctacaaaaaataaagaaagcttttataattgttattaattggtaattaaaaattggttgtgcccaaaacaattctttggccaaaaagaaaaacattattgtaaagtcatttttctcatcctcccagctgatcgttggcccacgtgggcccaactagcttctgtggggcggagtcttaagacacagtttcccctatttcagcacagatgatctagttgtgtgctgtagatggtgttttaaaatgctgaataatcaaaccttaatttgtatattaatagtcaatgccatatctctgagctcgcaattgcttaaattgttcatccctcagatactattaattctcaaatttacaattgcttatgcatatttctagttgataaataaataaattatgcacatgtgactcctaataactttacaagccttctagttacaactgctccttaagaaaattgattgaaagtgcaattagtcactgcccctttacagccaagtatttaaaatgttttgtcaactagttattaattcaaaagtttaggtattgtaaaattttaaaactttaacttcttaaaagacaaaaaagagagaaattgtatccccatgcatacccatgcacactatttaagtcttacctttattttcaaataaaagggatctacttattggcttatagattgatcctaaaacagctaccttattagaaaagggaaaaacaggttttctccacagaacgctgcagaaacatattaattcgtgtgacgagctggtaggtaagttgactcatgtcctgattgaattgactaaaaaactaaattaaattcatgttttagatccatcctt

SEQ ID NO: 21653 - DNA, 1833 bp, Mus musculus
ttccccctctcaccccattcccttcccctaccccccacgtgctcatggctggcctctccctctccctctccctctccctctccctctccctctccctctgcctctccctctctctctgcctctccctctctctacctttctctgcctctgctaccctcttaacttcccctcttcatgctctgaatatactctattctgtactatactgtcatgtggctggtccctcagcgggaagcgataccttggcatacgccctctgaggcacccccttcccccatatctcaccatacctccatagaacataccccccttttcttgatctttttataaacacttcagttgtgagctgctgtgtgagtgctgggacctaaatctggatcctctgcaagcactcaagttcttttaactagtcagtcatctctctgccctcattaccagttatcttgaaaccatgaagaaaaacaaccatgaaaacaggatgagaaaataaaagacccgttcctagcgcagccatggctcgtggtcccaagaaacacctgaagcgtgtagctgctccaaaacattggatgctggataagttgactggcgtgtttgctcctcgtccatccactggtcctcacaagctgagggaatgcctgcctctcatcattttcctaaggaacagacttaagtatgccctgactggagatgaagtaaaagagatttgcatgcagcgattcattaagattgatgggaaaatcaggaccggtataatctaccctgctgggtttatggatgtcatcagcattgacaagaccggagagaacttccgtctgatctatgacaccaagggtcgctttgctgttcatcgtattacaccggaggaggccaagtacaagttgtgcaaagtgagaaagatctttgtgggcacaaaaggaatcccgcacctggtgacccatgatgctcttactattcggtaccctgatcccctcatcaaggtgaacgacaccattcagattgatttggagacaggcaaaataactgacttcatcaagtttgacactgggaacctgtgactggaggtgctaacttgggaagaattggtgtaatcaccaacagagagagacatcccggctcttttgatgtggttcatgtgaaagatgccaatggcaacagcattgccacgcggctgtccaacatttttgttattggcaagggtaacaaaccatggatctctcttcccagaggaaaaggaatccgcctcaccattgctgaagagagagacaagaggcttgcggccaaacagagcagtgggtgaaatggtctctaggggacatgctggaaaagtgtttgtacaagcctttctaggcaacatacatgctagattaaacagcatggtgaaagtaaaaaaaaaaaaaaaagaaaaagaaaagaaaagaaaagaaaagaaaagaaaagaaaagaaaagaaaagacaaagctttgaataatatccctgagctgcagaaccaatgatccagtttcttgggggttctttttccttgagaaattctcgctcgttcactgagtcagagttgccaagcatctgttaagccctagatcctgttctaggctgttgaacaaaatacaatgtcctcatagatcctcgtggagtcagagtctaacctggaatggcaattcattaaagatgagcaaggcaaggctactctatgtaaggaagcgtgtggagcgggcacggagactaaggagacaggcttttgtatccaattgaagacagggtgggttggccttgctaaggaagaaagattacactaatactataagaaacagaaagttctttctcaggctgtcagaa

SEQ ID NO: 21654 - DNA, 1122 bp, Mus musculus
actgaccccgactaaagtatccgcgaggagtccaggtctctgtataggcaccccaccttccacccacaaacacctatgcagacaaattcagtccgtgtccaggacagaagctaattactatcctgtaccttccccggttggctggtgggcttgcaatacaggacttactccctttatatcaactaaggtttttaattcatctcgtgatttttgtgtcatgatccagctgttaccccgcatatattatcaccctgcatccagtttagaagaaagctatgctggccagaggtcaaaaagagaaccaattactttaaccctggttgcattcatgggaataggtatggcagtaggagtggggacaggagtgtcagctttgatagaaggaagacagggaattcagtctttgagggatgctgtcaatgaagacctagcggcaatagagaagtccattgacactttagaaaaatctttgacctccctgtctgaggaagttttgcagaacagaagcggtcttgatttgttgttcctaaaggaaggaggactgtgtgctgtccttaaagaagagtgctgtccttgtaacgtttcacctgcaaaacacactcgaacaaccagatccttctacggcaaagctttattgcttacttctcaggaagaccctgaacccggaaaatggagctgcttaaatacccctctgtgtgacgtgtcagctcctgattaactgctcactataagctcagatgacaccacgggacaggcagggcacaaggaatggaaaaataccctagcacatgcgcagactatttgtttaccagttagaacaccggatatcaccgccatcttttaatggcgattgcaagggcggctcctcacatcttccccttttcttttatttaaaaggcaacaggccacccagtactgagagtggagatagagggcaaatccccagtgtgcaaaaataggggcattacacaaaaccttcttccaggctcatcacccggaggggtcttggtccactcccgtgtcatttttcctgggggaaggacacttggacactcaaccttcatacaagaagacatgtctccctagaataggctcattttatgccgcagagcctttctactg

SEQ ID NO: 21655 - DNA, 1141 bp, Mus musculus
agcaagcaaagttgactggagcgagtggacttgaccggagcaagtagagagaggtcctaaaaattcaattcccaacaaccacatgaaggcttacaaccatctgtacagctacagtgtactcacatgcataaaataaataaataaatctttaaaaaaaaaaaagatacagaattcaactctgaaactatgtaccatttactgaggttctgctgtgcaattgagtgctgtgaatgatctgtttagagagttgtgcaactagagtccaggttttgtcatgttgagtcatgacattggtgtttaaagtgcctccacagtcttactttctcagtgtcttattccatgtgctttttggaaaaaatatttttcaggcttaatgggactgtttgagaaacgccgtttcaggaagttcctggtttatgttgccaactttgatgaaaaagatcctagaactttcgagggtgttgatcctaagaagacctccatgagagatgtgtataagaagtttgatttgggccaagatgttatagactttactggccattctcttgcactgtacagaacagatgagtaagtaggctaatggctctcatcacctagctgtgcagaggctgtgagctattgtctagcagtgctaggaggtgtcttcctgcatgtggctttaggcaactttacagttcctgtattagatcagatatttattagagagtatcaacagcagaaaaaagggtgaggattccagtcaggaatgtttggttttcagatctgtgtttttctttaaactttgaactctgagactgttaagtgtgaaacttaggacttgtatgttgctgtctggccctgggaaagagggtctatttgcaaatgagtctaagactgttttaattaggggatagtcctttgagattactgcaggaaaaagagtttaaaatcaataagaagtagtgtttttctaatgttcatttgctttttttttttcccagctacttagatcagccgtgttgtgaaaccattaatagaattaaactttacagcgagtctttggcaagatacggtaaaagcccgtacctgtatccgctttatggtcttggagaattgccgcaaggatttgcaaggtgagtacctattttacccattagccctg

SEQ ID NO: 21656 - DNA, 1603 bp, Mus musculus
catgtccactaaaatcaaaactgagatgttggtatctgttgcatggtcacataattctgagaacaagattgccattggatgttgtggatctttagagtgcttctggtgtagataataaatcaaagctgtgatacttatctgtttttccccatatagatttgtcagcatcagtgacctctttgtacctaaagatttgggaacagatagtcaggtgagtgtgatgatctaaaaaggatgttactagtctttactgagcaatgtccatccctaagtagtctaattcttacttccagatcttcatttcccgtgcctatgatgctaccacgcactttgagacaacctgtgatgacattaaagatatctacaagaggatgacaggatctgagtttgactttgaggaaatgaagcgcaagaagaatgacatttatggagaagactaacagcagtacatattatgtaataattaggacaaacttaaaatttggcaaataatgtatattgtatgaaatcaatactgtaagccctgcttttatgatcaaaatggagattgaagagtgctataccagtgaatgctccttcactttctaatatcatgtattaacttgttttcatggaatggctagtcagaattggttggttctgttcagtttaaccagactgcattttgttctaaaacaaatattgatatcgatagagaacttgtatcatttaatcagtgtagcctttgcgattgtgtgatccaagagctggatccatacaatttgtgccaccctgaaattgggactctaaattgagtatcctttggtttctgaagacgttcaacgttttctctattttgttatgtcaagtatcacagcagggccaatagaagagagccacatgttttgtttatgagggtagccaaacttcagacctacaacagttgctgagaaaaggaaaggagccttaaggtaaagcaggtaaaatacaggagccccttttatcccagacacggctcctcccccggaccaagctgcaatgcagtattaatctgacagagcctcaatgtcaacgatgcctgttccaaaatggctccagatgatttctgtactgcaaaataaagccaaactctggaaaccactcttggtattgagtgtctgtgtcctggactaaaagaactgctgtgcgctaagattttggatgggtgtcatttcctggcttcagtttagtagtcagtgatcttcaaataccagacaagaagcaacctgtgtttgtttcatggtttgagtgtacaattctttcttaaaggtatcctggtgatggcctaaatgttgcacacagactacaaatgactgcattttcaattctttatttaaaaaaaaaaaaaaaagacaacacaaaacaacaaaaaaaaccaaactagaaactaggtataaaagcctaagtatacaaatggtttttttcttgtttgtattttaaagatttaagaagtttctaatatcataaataaaggatttcttcctcaattgacttttgtagtgcagcattaaaaaacccaagtgtaaaaatttgtcatttacaaaaaattttctttatctatgtagtgtttcttacgtaacagcaa

SEQ ID NO: 21657 - DNA, 2445 bp, Mus musculus
gtgctggaagacctgcaggacggggatgtgcgcatgggtggctccttccgaggggccttcggcaactcagacaaaggtagttactaaagggggccaggttagacggggaggaagggagtggaccagaatggccacacatttgaagctaacctgggctacagagtgagaccccatcttaacaaacaacactgaaaagaagaaacaaatgtccctaaatgaaattagactcaacccttagcattttgaaaatacaaccattccccagtcatatgctggcacagcatggagttggtcaacaacctctaactagcagctgtctttaacagtgtgtgtctcataagtactggaactttccttactgcatgaccactttctcagtcttgatttcttttttcctcccttcagctaaaaatatctttagggtccgcttccaagacccttctccaggccactcccacacactgcaagccaatgatgtgttccataagcagcagtggttcaactgtattcgcgcggccattgcccccttccagcgggccgccagccccttagagcttcagggcttgccagacctccacgaagagtgtgaagagaacaacccttctgctgggaacctcagagcccagcgacggtcatgcgtggttcctggtgtcatgcagatagacgaggaaagcgccctggattgtggctccagtgtacagacagtggaagacaccaggaacatgaaggcacagcggcctcagcctggcttacgaagagcaagggacaaagcacagtcaggtggcaaaaagaaagagactttggtgtaaagtgtgtattccctgatggggagctgtttatttataaatgtgtacagtttttcttataatgggagcatcaagggttactctgtaccagaagtaatgtgttcatggtttgggtctctctctcatcctctccctctcccttccccccgcccccaatcgtcgtcatgtcattgatgttgtccttgtcgtcctcgttgtcatcgtcatcgttgttattaatggcagctacagatacacagattactgttaaattggagactttaaaaaggtattttcatggattatttggaacatgccaacttggtgtattttatcagaagcagtgtgtgtggagccggtgctgtcctcacctggttccccatgactgagcaaatgtcacagtgtttgccaggcttaaacgcttgcaaatgctgagactccatcagtgttctctgtgaaacctcagagggagcatggaattgtaatagtgacacctacgatccgcatggaacagatttgagattgaaatcttttgtattgacagtgaagtcccgcttccttgagaacaagcgtgaagctggatgtcttccccctttgtctcaactggaatgaacaaacacccgtggcagtctcactgcacggttcgccttctgcattcatttattctgccaactatttaattttttttttattgtaaagtagtttttagtatttgcttttatttttttacattgatgcctttttaaagtggcatgtccttgaagtttttcctcctaattgtgtgtgtgtgtgtgtgtgtgtgtgtgtgtgtgtgtgtgtttgtgtgtgaatcattaattttatcaagtgaaaccaagccatattgtttgagccaattaagaaaagtgcagtttttacagtgtatcatgtgtggtaaagtcccatgaaatgacttagtgtattttagactactgaaaggaaccacaggaagggttgggtggaagtttttgtgttgtctgaaaagcaagagagaaggcaggagtctgggatagggaagggaagggaagagaagagaagagtagcttgtctaaagtaaattgtctggctgaaccagaggaggagccaggagcagcctggcctgagggatgtagaaagttgtagaaggcagaggggatgtgaactgtgtttgctttggtttctcatacctgcaaatgctacatttgaaaagaactgtacagtgtgttggaaatttgactatattaggttaattctggttggttttcttcatttaaaaaaaaacccgtgattcttgactacaaaatgtttgtgttaaaaatggggtcatgctctttacaggggggagaaggacagagaccccatgtcagcccagggttatactggcaatcagttcaagtcattgttaaccattatatgtgaaatatatctccagtggaaatgaaaattggaaaaggctgtaaatagatcaatgaaatgatttctttgtataaaagaattatataattaaaaaaaaagcacacacataataacccaaaacatttctctcctggtggttatttggggggccatccactgggccatgagggcttagctaaacctttaatggttaaggaaatcccaaataatttacccttttgaaatttgttgataagaaaagtccata

SEQ ID NO: 21658 - DNA, 1519 bp, Mus musculus
ctgaaggatcagatcagccttaacctgagagatttcgagctggtacactgatggcagtagcctcgcagttaaaggtaagcagaaggcagggacagcagtacggtggtgaacagaaagcaagtgatctaggccagcagcctccctgaagggatgtcggcccagaaagctgaacttgtgactttgagacaagctctatgaatggcaaaagaaaagtctacactgagagcaggtatgcttttgccactgtacaaagagggctgttgacatctgcagagaaagacctaagatgctgtggctaaagaaaatcagatggcagatctaaccgccaaacaggtggcccaaggagcaatgatcctggcagtcaaggagcctaaagattattatgacatcagagagaccagctttagatacacccctgagcactatcaagttatggacagtatttgacccacctgggggccaagaaattaaaaggtgtggttacgtcctttgactactatgttacaggactttctgacttggcagaagaaatagtcaaaagctgcaaggcctgtgctatgacgaggtagaatttctaaaagaaatcttcccaaggtagttgggtccaataacggacctgtctttgttgcccaggtaaatcagggactggccaagatattggggaatgattagaagttacattatgcatgcaggccccaaagctcaggacaggtagagagaatgaatagaaccattaagaaacccttaccaaattgacagcggagactggcgctaatgattgaatagctctcctaccctttgtgctcttcagggttagagatacccctggacagtttagactgacccccctataaattactctacagggggccccctccactggtaaaaatagcctctgtacatagtgctgacatgctgccttcccagcctttgttctctaggctcaaggtgctcgagtgggtgagacagctagcagcttcagaaggcctactcaagagaagaagacctgcaagccccacatcagttccaagttagagattcgttctacattagacatctccatgcagaaaaccttgagactcagtggaaagacccttatcttgtactcttgaacaccctactttctacctttatgggaccccttttgattttgcttctgcttttaattataggtccatgtgtgttaaataggcatgtcacctttattagaacaagaattaatgcagtgcagcttttagttttgagacaacattaccatgccctaaaggatcaagtatgtcagggaaaagatagtgtctagttctaagattagaactactaacaagtagaaggggggaatgaaagtataacaaagtaaaaacaaaattctaggcctttaggcccaggcttgggaatgtgacctctctgactcatttctccaaggtatgctaatcacaaaacagatagccacattcctctacccacccgcttcctgggttcaaagagtgttcattcaaagaaagtcaccctgaccattgaa

SEQ ID NO: 21659 - DNA, 1324 bp, Mus musculus
gtaatcccctaacagaagggggaggaacaggaattggtggattcccgatgctcagtaaccagtcagcatggcttactcgggaagttccagagcagtgagcatgcgcacacacaagaaaagctgatgctcctatcctggcgtattgagtgagtcgtgctgcgtaagtctgctcacagtcaccttctcctcaggtcactcctgtccccgagctgttcctgacagccgtgaagctcagccatgacaacacgggagccagatacctgcacctggcaagggaagacaagaacaacttattcaggtgtgtgctccttttaggagtgtgttcttccatgtctccatctagcacccctcccatgcagcctaaaaggggagggtaaaacaggccttgccgggcatggcaactcgccaggaaacccagtactagggaggcaggagcaggagcattgctgcaagttccaggcagtgctaggttacatagtgagttccaggccagagtaggcggcagtgcgagaatatttccacttctccctctcttcccaaagaggaagatctatggattcgtctaaagattctctcgtgtagatacattgaaatttttcagtatgactcggtgattcgtacatgatagatgcattttattaaaagattgtggtgtgagaatgattgtttttattgattcagggtggccccgggttcaggaattccttgtcacctgttcactctctttcctgtccctcagtgtgcagttccgcacaaccccaatggatagcactggggtcccacatgttctcgagcatacggtcctgtgcggctctcagaagtacccgtgcagagatcctttcttcaaaatgctcaacaggtcactgtccacatttatgaatgccatgacaggtaagaagacactattgcatatgccagcaagattttgctgaaaggaccctgatatagctgtctcatgtgaggctaggccagtgcctggcaaatacagaagtggatgctcactgtcatctattggatggatcacagggtccccaatggaggagctagagaaagcacccaaggagctaaaggggtctgcaaccctataggaggaacaacaatatgaactaaccagtacccccccagctcgtgtctctagctgcatatgtagcagaagatggcctagtcagccatcattgggaggagaggcccttggtctttcgaagattatatgccccaatacaggggaatgccagggccaggaagtgggagtgggtgggttggggagcagggggggggggtcggggggtagataggggacttttgggatagcatttgaattgta

SEQ ID NO: 21660 - DNA, 1224 bp, Mus musculus
aagtaggattcaatgtaggtggtgggttggtttgatttaaattgacatgagtaatttagttaatttgattgactgatttgtccagatagccttggcattttcagtccccctgcctcagcctctggagtaactgggattatagtcccacatgtggtccaaggcctggatttattggtcttttacattaataccacttgctttgggttttaaaattcatatcattaagcattccttaagagattaaggcattgtaaaacagcagtttattgtttgtagaattattttatcataacataaaaggttaggtaggactgacttatttaaaaaggtgagtgtgcatttgactagctacatacaggaggcaagtgcctgagaccatcggtttaacgcgttctctagtgagacgtgatgtaaaagccttcagtcctgatgtcagtagagtacatcccaaatgacagtgcttgggttttgatagtctgcctctttctgctttctagatataatggctatacacgggaggcttacttcagtgtcgggctccaagggatcgcagagaaagatgtcaagacggtcagagagctcgtagacaggacaatcgaagaagttatagagtacgtgtgtgtgtgtgtgtgtgtgtgtgatgacagcctgcccctgcttccacccttccttcatgagtgctctgtgggaaggagactgagccatctctaccactagcctcttgatgtcctgggacgtgtgttggttcaatttagtacttacgtatttgagttttatcctggatttctttctggcacagattgatggagtggtgtgacattttcatgtatttctatgattcgtccttatttttctttctcatcatcaccccactccttgctgtctttctttttccaacatgcgcacacgtgtgtgtgtttgtgtgtgtgtgtgtgtgtgtgtgtgtgtataatatatcacttgtgtaatcgtctcattattgcctctgccaccgtgtgcctctgaaacctctctctgtttcagcatctcatttattaatttgggtgtctcattttttttttttttttaggaaaggatttgaagatgatcggattgaagctctgcttcataaaatcgaaattcaaacgaagcatcagtcagccagctttggcctgaccctgacgtcagtacgtgatcttctcaccaccactgctttcccttctgtgttgtgtattgttccttctt

SEQ ID NO: 21661 - DNA, 1169 bp, Mus musculus
aatcaggtgagggtgtgagttagcccgaggttgaattcagaatggcttttgtaggaatcttccaagcccttacggccagctacctctttaacttggctgttaccattgaagtgggtgtggtgggaaaaggcctggagtgctcttgacctcccgcttcactgcttccgggatttcaggcttgctttgtggctggtggcatgagacaccgttatctctatgagagcattttcctggaaaatgataggttttttaattcagaccagggttgggcttcaatgtgcagctgtggaggctaggatgggatttgatttgatctgatttgatatgaactgagagtctcctgtatgctaggcaagcacttggtgacaaccccaggctaggtacactgtttccggtgaggcatctccaacctgccttgcatattttaatggtgattatctcacgtgtcatgtcggatacatttgtaatagatttgtgtatgcagctgagagagagtgtgtgtttctagaaattggggaatgttttgatcttttaatctacaggctctttttatttttccattttcatatgtgtgtgtgtgcacgcatacatgtatgtgggaatgtgtgggaacgtgtgtgcatgtcgaggttggtattgggaaccattctccactgacttcgtgcattgtttattaaggcagggtctttcaacccagagttgagcgctaggactactcttgctagacagccttttctggggactccacccttcacagctaaaactgcaggcgggctgctatgcccatgtggcattttacatgtcttgtctgcctggagatccaaactctggctctcacgcttgtgaggcaggaaccttacctaccgagtagtcacccagcccctcagatattttatttagaagtaaatctcattaagtgtctctaataagtttctatttctttaatagggacaataaatcagtcatcaaccagtgcttccattcagtttccatacagtgtagggcactgtgctaggtggagatctataaaatagaatcaagaaagcccaaggacattgagggcttgtggagtacagggcattacacactgctcctgaagggtaagggggctctgctgcggcagaccaacagcgtgtagaggagacgctgcgatggagtcaggtgttgtg

SEQ ID NO: 21662 - DNA, 1109 bp, Mus musculus
atcagcacacagaatttctacatgtttttctaagataactcccaccccattgcccgatatttgagcaaatgacgcatgtgtgagcatatttaggaggaagaaagtactcgtaaaagacgtacaagctaaaggctgggagatcacgttcagcctgatatctttactaaggggcactaactagctactgaagcctttagctagggtcctgagcactgaacatgagttccgaatggagaaatggcttcgtacctctgggagagggcacatgagctatgtagagagttaatgccagcatgctttcaaaactgcaaagtgtacaggacggatggagaattgtggctattgaattagcatacaataaactgtgcgtttgaaaatggtaggcacagatgctaactcgggtgctacccagatgggctccggtaaactcgggtatacttcttgttcatcaggctgggttgtggcatccttaactacagagagcaagcccaacagattgagctcaagacaggaggcatgagtgtcacgccccatgtgctccctgacgactcacagctggatacctacgagcaggtaggtaccccttcatgctccgtcatgatgtagtcaaaggcttgtttccagggtgtcctcgtttttaatggtaccctaattaattttgtcttgcatctttctttggtgatacagggtgtgttattttcatctctctgcctggagcggaacctgccagacatgatgcatctgtggagcgaaatatttaacaagtaactttactcacccatatattaataagtgagagtatgacatatgtaactctgagatgctttgccaagtgatttgcctcacttgtcagattctagtcagattttacttgtaattcctaagcacacagaaaaaaaatggaaagatactgagttcctctgtaataatttccctgtggtatcggagtgaagctggcccactctaagacatccctcttcttctgtagtccatgctttgaagaagaagaacacttcaaagtgttggtgaagatgaccgctcaggagctctccaatggaatttcagactcggggcatctctatgcagccctcagagcaagcaagacactg

SEQ ID NO: 21663 - DNA, 1151 bp, Mus musculus
ggagactttttgatcccaagcactgcggctgtcgggtaaagtctatttgaactgtgcagtatttggctgtcagtgtggtctgactcagtgtctgcctcctttggttcaggtgaaggtgatgaaaagaattgcagagatgacagacatcaagcccatcctgagaaaactgccccggatcaagaagtatctactaaactgtgacaacatgaggtcggtgtcccgcctgtccccaaacagctcttaggagtcccaccattttgtaaattgtcattttttaggtattttccatttgaagatgaaattccctgaatttatcttcaaaacagaaagtgtgttggtgtaggtgttaggtgataggactgactctagactttaaattaatgtgctgggggaataaaaaggattacattttaaattagttaaagttgcatgaggtggacaagaaagcaacgaattaaagtctagaacttcgggctagagacatggctcaacggtcaagagcactgactgttcttccaaaggtcctgagttcaattctcagcaacagcatggtggctcacgaccatctgtgatgaaatcttctgccgtaagattcattatcttttccctagcttctgtgagacgtagagaaggttatcttgctcagtatcagtgtcctggttcgggtttctgctgctgatgaaacaccacgacccaaagcaacttgggcaggaaagggtttatttggctgacgtaaccagagtcactgtccactgagagaagccaaggcaggccctcaaaccaggtgggaccctggaggcaggagctgatgtaaaggccacgagtggacactacctggtgggcttgtgcactgtggcttgctctgcctgctttcttatagaacccaagactaccagcccaggttggcaccacccacagtaggctggtccctctcccatcagtcactgattaagaaaatgccctacagctggatcttacaaagcatttttctcaattgaggtcccctctcagatgactctagcttgtgtcaaggtgataaaaagctagccaggacagccagtgtcttgaaacagtttggccacattacgttagctttctgtcctcgggctcgagcataaataaaaatgaattatcagtagtttacatattgt

SEQ ID NO: 21664 - DNA, 1150 bp, Mus musculus
ctaggtcattgtttttgttgttactgttacatttctgtctctctccctctccctctccctctccctctccctctccctctccctctccctctccctctccctctccctctccctctccctctccctctccctctccctctccctctccctctccctctccctctctctctctctctctctctgtgtgtgtgtgtgtgtgtgtgtgtgtgtgtatgtgaaggtcagagaacaacttgtggaatcagttgtctgttttcaacttgtaggaccaggtccattgagtcatctcactgggcatgaaagacatagttttatgactagaaagcacccggggtggtgggggagggggtgatggaaacactttaagtttgtacacgggctgtcttcatgaactatttgaaaagtgtgctaaagcttttatcactttacagtaggaagcctgtctgccttggctgactcaggtagggagctctgaaaacttcataaacatttcaaggaagtttctcttcactcttggattcttttttattttcagaaacccacacccagtggccccagtggagctgcacatgtcagtgggtcccagatcgtcagaaaattggtgacagtaagtgacccaagctgtcaggctgcgcttcctctgactctgagcgttctgctggtgggatcattctcgggctgagccgcaaccttagacctggggatgtgctatctctcgttgttaccagggggagcctttttcccttgagacagcccagaatgggtgtcatatcctttcataagcctctacttattgggccaagtggtctcatcacctcccagtttacttactgtagcgtcggatgcttccgtctcagcagccacctgcagatgggcagcagcatcaaccctctctacttctgggtttccacagttgtgctgcttgatctggtcctttgaatggtgctcatggaacatggtccacactctgaaatgcctttaatgtaatagtaatttctttttattgcatcttgccaaatggtggaatgttactggtttaagtgtcctcgtacgtcaagttctgctctcaggagtgcctccctagtgacacccatggagaaggagatgctggagtggtgccgcctgcttttactacctgagggccaccttg

SEQ ID NO: 21665 - DNA, 1139 bp, Mus musculus
cttgacagagaaaatgaagaccagcatccagaggggcctcgtactcaggtaatggagagggtttctggtcttccattttaggtgtaggttcttggacagaagttgtcatgggattcaaaccccagtgggatttttcctttgccactggttctgtggatgctaaagaagcacaggtttctttagaaacctgagttgtttaaaaaaaatcaggtcttcatctaaacaaaggacaaccttttacattttattcttgctctatagcctattggttattattttctagacacttgcccctcatttccttgagcccccctcccaaacagcctttatgagcaaagggaaatgtacagagtcagggtaggggcagagatgaaggaggctgacatggcaaatgactgggtgccttgagccttgagccagcctggctggctggagcagttcttcagaaagcccacactcaacccctccacagcccggagtaaacttgccatcttcacatccgtttcagaaacgaaagctgcagtgtaaattataccactgacttcatctaccagctctactcagaggagggcaaaggagtgtttgactgcaggaaaaacgtgctgggccatatgcagcaggtaggccaaggtcttctgtgatccctgagccccaggcatccccctcagaatggtgccattctgtgggacgtgagcacagatgaattcgaaagctcttgtaagtatgcggagttttcagacatatggaacgccatcccttttaggactctgtgtaatatgtgacatccgggtttatgggaagtacttagatgctttgctcttgcttgtgaccaaacagctgacaaaaagcaatataacagaggaaggatttatggtggccaacaatttaaggggatagcgccagcagtggcaggaaagacatcagggagggagtgggaggcagatgcttgctttgaatccacagtctggaggtagagggcgatcatgaggtggggctgggctaagagactacgaatgagcttccgtggtgacggtgacctgcttgctccaggtcatctacctcaagctccaccctaagttggggactaagtattttaagacatgagtctatggaggagacagtccaccctcaaaccacag

SEQ ID NO: 21666 - DNA, 2104 bp, Mus musculus
tagtctaatcagtttgtttatgtctgtctcatcaacagcctgtttggatcagagcttagagatccgtattcacagacctggggaacaaagtgttctttctttgtcatcttcttgaatcattaagtgactgcaacatagtgttctggattagtgggcatttgggaaagattaaagtaggacattaacctgtgtggctttgttccccgcaggggactgggtacctacctcagcagagccttctgttctgatctgcagtcttcctttacttgtaggagggctctgtaacaaagaccacacggtgaccctttcagcgcttgagtatcacagagagatatccagcacaacatgaaccccctcttcctttgttccatctctgtttctagagaatccagggcttcccacccaccaaagcacatgcagggggattcactagagaaattacagattggaatgtttttcttaaaacccatgtttgttcataagcatgatgatgtgttaagtataactcagagggatcatgtgaaaatctccaaatggctcttttgactttgcacattccctaaagatctgtgactgtgactgttgcagtccaagtaccccttcaccctcgtgacgtctctctcctcttccctcctgactgttaatgggcacttttcttttcagtgttaagcatctcctgtgttggaggcacagctggctgggacaggttctgtcatacctgtcctccatcagccccgcccagggctcctgtcctccagggacttcaatctggagaggaaatatccaaatctaataagacactttttaggaaagcatactgggatgaagggaggacacagagggactgtcactcctggaggtcacatagtgtcttcctgaggaaatgactttctaagtgggtcacagggtgcagataagagaacaggaaagagcctgagtggatttcttacaattgtaataaatggctgtatacttgctgttaacctaatagccatttgctcatagcagtgaggggcagaagtcagggaactgaagtcaaggtgtgagctctcagggagaggctgtccctatatcttctgctttcgcaaactgtgaccctggcattccatgaaccctaacctctgttgcatcctcttagatggcacaaaccctctcactcctttgtgtagtagctttgtgtagttattgtgccctggcttctcttgactcctttacagtgacactatgacaacctcttagatgatccagacaaaccccacctcaagatgtataagaggagttccagggagtgtgtatggaatacctttaggggcctctatgtttacttcttcactgtgcctggagactgctgtctgaaggtccagagaggctcaagagagtagcgtctctgagctaggacagcacctggacctgggagctggacagggtgctggggattggcagggctatgcatcccatagaaaagccttgaggagtacttacaagagagtgctgagggggttgaagaatccaaggacaccatcaggtttggattgcatgtgtggatctccatttccttggaacagaacgcatgctgagaatgaggtagaaggctaccactgatttctgaggaaaagattgacacttgcattgctgccgtgggtgtgaggccctgagtggttttcagctatcctccgtcctgaacctgggtccttttgtagaatggttggcagtgggtttcaatatgagagtgcctggaagatatctctgggtgcctttgtccaggaagctgttctctttggacataggtaccctttacgaaagatccaaggcaaacaaaacatccaacatcacaaagagcttttcacagtgaaacatcagcaaagtaaaaagaaaaaataggtagttggataaccaacattcctagagaaatattaattcacatcagctaaatattgacttgcaaaaaaaaatatacttccagcaaagatatagtcaaacagttcaggaagtgagctgagttgagtgactagtctccagggtaatggcctagccagggctccacctcggatgatcacagagatactgacaggctgcacatgagcagttttgccattgagcctct

SEQ ID NO: 21667 - DNA, 1062 bp, Mus musculus
gacggtggtcaagcatgtagggtggcatcttaccatgctcagttccttccaaaggcaacaagctgatctcttacttgacatgttcacatctgacctggtgcataaccctgtatgtcgtgaccccaagggggtgtcacatatcagataccctgtatatcaaatatttatattaccattcataacactagcaaaatcacagttataaagtagtaaggaaataattttatgtttgggggtcaccagaacacgaggaactccatctacgcatcacggagttaggaatgttgagaactactgccttagagcttacagtgagttttaaacattagagcgattccttatatcccaagttctctctactaagttaaattacttggcaggaaaaatgggaaggtgcccatttggaccaagcatccgaatcttccattaagatcttggcatgggactattaaatggattgcaatactctaggtatgtcccttctaacctgtctgttggtggagctcttaaacaatgtgaaagctcccctgacgcctacttatcttccttggagtttaataactttgcatgttaaatagaatcacacagaagcctgtagactgaaccctagtcattggatgacttagggccaagagagtccagagctttcccctctaacaacttggttgacagtgatatcataggtagaagtcctagatgggccaacatgcttcagccttctggcttagaccctgactgacagggaagtgaggatcagtcagttttctctgccggtacctagtatgacaagattctctctgcctagactgcctagccccttccctttctggcttccctcctgagttcttcagtaagtactctgaaagaataccagttatgggatcaggggcaaagagagaaggaaacctcttatcttgttaataagacatgattgcccccacactaattaatataacccttaaaggaagatctagttctgcgacagactctgccttaccgcctcacgtttcaagtatgttactgaaaagagaagtgtgtgtagcggactggccatgatgttgg

SEQ ID NO: 21668 - DNA, 1165 bp, Mus musculus
acatactgttgggagctgcctggatttaggaactgtgggtgagtagacctgtacgctaccactaacccagctctaatatctgaggcaggtgctggaaacctctgcatactaactagtagccttctttacaatagagtcagacagttttaattatcgcttcaaagcagtgcctgagattccaaatgatttctcttgcttcctgtaagcactgccaaaggtctaggaagaatgcttcctccaggagggagacagattttccagtggggagcagaggggcacagtgatgatggtgtgggtcttggggtagacctgcaggtaatgtaaaatgcatgcctcttttcctgtcagcctttggcggtggtgcagtgaaccagctgcattggtgatctcagtcatttgatgttctccatgagccccgtgctcctccccattctccactccacctaaagaagtgttgggatgggctttgcgccgaaaggcccccaacctcactctctttccccacctcctcttcaatgctgagaaaggagcagcagttccatctaatgactaaccctcgatgcacctctgtcccctcggcctgctacctgctttgctgtctgctttgccccaccttagccacttgtgtcttcttcctgtgggacaaggtgagggctgagggatatacccagtggcctgtgaatagttgaagcatgcccttcgcctgcccagatgccaattctggcctctcgtgggctctgctggcccatgtggaccaacttcccgctggttacttggttccctccctgtcacatccctggagttactgcccacgctcagtaacttggcaagtgatgtaccagcactttgctaactgctatggccctgctgcttcagggttatcatggtgccatcatgctatctgaggctcgaaacaaccatgaggagttttgtatcccaatatgtgttttgcctgccactattagcaacgatatccctggctcagacatcagtatcggttgtgatactgccctgaatgtgattgtcgaggtaagagaccttctgcttcaatttttactttgctttgcctgaacggggttgttctcctccatttagccctcctgacagctcaaattctcaacttgtagtctttaaccttcacctgtccgaccttaactagaaattg

SEQ ID NO: 21669 - DNA, 1215 bp, Mus musculus
ggccccttcaaaagatgtttagaagcactcgtttattgtggaagctgaccagagggctcatctctggagatgctagtggcccatgtccttatttaaacgtcctttgagactttctgacgtagattgatttcctgggctgaggtcacagctgatgtgggaagccagtttggctactgatgtggaagacatgggtgccaggagagtaaaacccaggatgtaggaacgtggtatcccaagtgcaagcttccagaaactaacccaagaggacagcaggcatcctgagtccaaaccctaaattctcatattgcctggcagttcttactagagttataatcttgctgttacagagatgagtggggatatccatggcagaacaggatagccccttactgaatcattgctttacagcatagaaagcaggcagagtgtgaaatctggggtggtctccggctatgcacatggtgtctcttgtgcatagaatgaggagttggctatctcttagtggttgcaattatcatttgcaggccagccgtatgggagtggaggctgtcattgccttgctggaagctacccccgagaccccagcctgtgtcgtgtcactaagaggaaaccaagcagtgcgcctgccactgatggagtgtgtgcaaatggtgagctcaggtgctgggtcaccacggacattggatggaccacctgtgggaacaagtgggtggttgctccactttgtgtggactgcttcagactcagtgagcactgggttaaagtggccttttggaggacagaatgatacccactggacaatggcagcagacttcctgtgtcctcggacagtgtgtgaaagcttccctgtggcttgcctgtaggtcatgagccttctccgctaagaactggaaaacccttaagaatctctgactgttgacacctatcgtcacagatggcccgtgcagtgcctgcacaccagaagcagcaagaccaagtgcaggaaaatggtcctgcctagaactggtgctgtaggcatgacaggcctaccatcctccagtgttacttcctgcccttttgtccccgaggacattctgatccgtgagggtattggggaacagattccaataaggttgagatagccccactcagtagacggaagtgtctactgagagatgaaagaaaaatggattctacttttccactcagtttttgagtagatgaggtgacagtggg

SEQ ID NO: 21670 - DNA, 1237 bp, Mus musculus
ggcacaggtgaactctcattctttgatatagtctggacccttcatgaggacaactacactgggactatgcttttaagtgaagtcaccaaaattacacacctttcagattgttcaaagatctgactcatgggagagccaggccatcatctgaaggcaggacaagtttgtgctacaggtcatggctgatgcccagtggagtgccagttcatctcttgtcaggacagttttgaccccaagaagctgggaggctgcagtgaccctgtacacacttgttctttccattcagtggatgctaccatccatctttcacgggtatcaggctagtgtgttcctttagggacttccactaaaggtaggaaactgagatgaaaatgaggaaaccccgtggaaagttctacaggtatcatggttcactgcctgtgccgatccacctgacttactgtcagtgagcgtgatttatgtcctttccagggtgggaccatcatcggtagtgcgcgctgcaaagcctttcgaagccgtgaagggcgcctgaaagctgcctgtaacttggcgcgcttgggcataaccaatctgtgcgtgatcggcggggacggaagtctcacgggagccaacctcttccgaaaggagtggagcggacttctggaagagctggctcggaatggtaggtttctctttctgtttccacccttgttagtgccttgctctgagtagtcggcctcaggtttctctgttggtgctttttaagagcttcggaagtaacacattgtgccttctttaagggggagggggggacgacagttattttatttatagctgacatggacatacatacttttgagccattttttaaaatttcgttttagtttctgagatgtggtctcactgtactgaccagcctggcatgtgaactcatagatctacctgtacctgcctcctgccagtttggccttcaaagtgtgtatcaccagttccagcttcatttttagtcatagccaaattgtggctgttgttttgcctcctatcatctggtaccacacagtttaaataagaacagaaatgacagtaagccctactgtgtgctaggaaatgccccctttcctagagaggcctgtaaaaccctcatgacagtaatcatgtacacccccatctaagagaagagtcccaggtcgtaggggaagccaggctgctgtaaccgtcatctttgggcatactggtccttggatgccagcatccatat

SEQ ID NO: 21671 - DNA, 1195 bp, Mus musculus
gttctgactgtcaggccaggaaagagccctgccggaagtgaggcgcgtgcctctgctctactgcacagacctctgggctccctcaaccgccaccctaacagctagagcaggtggggtaatgggcgccccacgagcctctgcgcccacgtggtgggctgacaggctccgcgcccacttgtgggatcatccctgcagctgcgctgccattcacttatgccacttatgggtttcctacccggctataatccctccatcccccgcttgagaaggcaccccaacccgactccacctctcagggaccacagcgatgcatccctaacagaacgcgtgtccatactatcctgtccacccctgcagagtgctggagtctttgacacaacaggccccgcccttgcgtgagtcccgcccatcgccacagcccattggcgctcgggcggggcgtgggcggctcctgcgggtgcaggcggggcagcggttccaaggctggcgcgcgtgggccagggcttcagtgcttgctgagtacgggagtgtctggcgtctctacctcctcatcatgagtgacttggattcttcgagctccagcgcctatccgaagtacctggagcacctctctggggatggcaaagctatcggtgtcctgaccagcggcggggatgcccaaggtgcgtgcctaccagctctctcgctggtctccaagggccgggcagggggcgagggcggctggagagggctgcagaggagggtaatcgggttgggaacagagggagagctggggagaaacgttgggtgacctggatctgggagaaaggatgaggaaagggcttggtgaaaattacctatgagagccgaggagaaccggtggctcaggagtagggaaaaccctaatctaggaacaactagggtgcctgaggagcgaccatagagttccattacgtggtgaggggcagaagataaaggatatttgtgtaggattcttcattcccaagatgaaccagttttccatccccaaatttattaattgagctagccaatggggtcgtctactgtctgggtcatatgagccaggcgttctttcctggaattaggtacagggcgacgataaggatgccacagcaccgccccaccctaatccctgggactcgtaggaaaaacagcggggtacccacagcgcctccatcccagtcctgcctcccaa

SEQ ID NO: 21672 - DNA, 1226 bp, Mus musculus
gcggcgtcgccagcagcggtggcatagaaaatggtgccaagacctgctggcttctcggagcgctgccttggagtgactgtgagaaggccgagtcccgggcgccagcggctcgggaacatggcggtgtgcatccggggagagttgaggactttaaggttggaaatctactgggtaaaggatcatttgctgatgtctacagagctgcgtccatacgcaccaactaatgagcaccacaccgttagcccaaacagagatttccaggactatccagatttgcaggacgcgttaagaaacgcttggactgatacaagagccagcaagaatgctgatacttctgccaatgttcatgctgtaaagcagctgagaaccatgaaatacatgagtgcacatcaccataaacctgaggtcatgccacaagagccgggcctacatcctcattctgaacaaagcaagtatggagtcatcactgggttaccagaaacctaccttaagaagcattacatctcctttgattgctcacagattaaaaccaatcaggcagaaaaccaaaaaggctgtggtgagcatccttgattgagaggaggggtgtgtggagcttctgagagagtgtgcatctgaaggatatgtggaagaagtgcttcagatatcgagtgatgggactatgatcactgtttattacccgaacgatggaagaggctttcctcgtgctgacagacctcccttgcctactgataacatcagtaggtacagctttgacaatttacccgaaaaatactggcggaaatatcagtatgcgtccagatccattcagcttgtaagatctaaaactccccaaaatcactcattttacaagatatgctaaatgtattttgatggaaaattctcctggtgctgatttcaaagtttggtttataatggagccaaaatacataaaacagaagatttaattcacataattgaggaaactgggatatcttacactttaaaaaatgaaaatgaagttaccagcctgaaagaggaagtgaaaatatatatggaccgtgctaatgagcgtcaccgtatttacttgccactggaatctggaatctctgaggaggaaaagggaagcagggctcctttattcttccctataattataggaagaaaacctggtaagactagttcacctaaatgtgacctccaccgagcctgaaactggctgagccagaccttgactttgctgccac

SEQ ID NO: 21673 - DNA, 1150 bp, Mus musculus
ccagtgtgatgagcaccgtggagtggaataaaaaagaggagcttgtagcagaacaagccatcaagcacttgaagcaatacagccctctacttgctgccttcactactcaaggtcagtcagagttgactctgcaactggagattcaggagtattgctatgacaacattcacttcatgaaagccttccagaaaacagtggtgcttttttataaagctgaggtcctgagtgaagagcccattctgaagtggtataaaagacgcacatgttgcaaagggcaaacgtgtcttccttgagcaaatggagaagtttgtagaatggctcaaaaatgctgcggaggaatctgagtctgaagctgaagaaggtgactgaattttgaaacaacatcctcagtaaagcaaacaggagttgtagataaaatgtcatgtctcatgtgtcctggttcttacatcttcctacctccctatagcaagcatgatataaggactttcatggcaatttttattttaactgtttttatggttactggaaatgttggctttggtttctgaaaccacgtgtgaggagcaagctgcaggagccgtagaattggatctgatgttgcattggttttcagttaccttctacctcctgtattttctaccgtaataatgtgatataaggccttccacaatgagcagttcactttattccctgggttttctatataaacagttttcaagatatgatttggttaaaaataatttgttacaaaaagattctgtttgcaaattaaactgtaaaagtattcaaactctcaaaaggcaatgatttgtgtgataacttagtgtgttcagagccctgttcatcagtgaaaatcctgtagatgattgaatctataacatgaatcctgacattagttataagtgagcattttcttatatttttaaccccagatgttgtttgattcctgggtatcgtccttagtaaagccatggatagcaaacttgagtttgagaactacatatggcagaggtaggaagaaggaagctgagtctttttccagaaacttctaggttcatttgcatctttccaggtagaacatgttgataactcctcacacaaacgttctaccccaggatacagctagactgttaaaagttcccacaaggac

SEQ ID NO: 21674 - DNA, 1207 bp, Mus musculus
cgaggatccccgagtcctgcagcatttggattacaggcacacaccaccataccccacctttgagacaggtgcttggcatctgagctcaggtcctcatgaatgtgaaataagtgctgtgctagtggtggcattggcctagctccttaagatgggtgttttaagtttgtattttaatgcttgaactgtttctcagttttcaccctgtgggcatttccggctactgttttcagtcactgagtacttatggtcagggattatcttcaagttaaaattcaaattcctggaaagaacccagatgtccttaaacagagcaatagatacagaaaatgtggtacatttttgaatggagtactactcagcaattaaaaacaatgaattcatgaacttcttaggcaaatggataaaatgagaaaatatcatcctgagtgaggtaactcagtcacagaagaacactctcacttataagtagatattaccccaaaagctcaaaatatccaagatacaattcatagaccacatgaagatcaagaagaaggaagactaaagtgtggatgtttcattccttcttagaagggggaacaaaatactcacaggaggaaatatggagacaaagtgtaaagcagagactgaaggaaaggccatctagagactgccccaccttgggatccatcccatagctagtcaccaaagccagatactattgtggatgccaagaagtgctagctgacaggagcctgttatagctgtatcctgagaggctccaccagagcctgacgaatacagaggccaaccactgggctgagcacgggtcaggtccccaatggaggagttagagaaaagactgaaggagctgaaggagtttgcaaccccataagaacataaatgtcaaccaaccagaattcccagagatcccaaggactaaaccaccaaccaaagagtacacatggagggactcatggctcctgctgcatatgtagcagaggatggcattgtcagacatcaatgggaggagatgcccttggtactgggaagactttatgccccagtgtagaggaatgccaggcagggaggtaggcgtgggggagcactgtcttagaagcagggaaagggaggagtggatgggggttcccaaaggggaaaccaggaaaggggataacatttgaagtgtaaataaataaaatatccaataaaaatttcaaattccaaa

SEQ ID NO: 21675 - DNA, 1447 bp, Mus musculus
accgcttggtgcagagatacttactgcaagggaaggtccggcttgaccatttctgagtttcctgtgagataaacccggtttgaaagaggttggtaccaaattttggttaaaaataaaaaatattctccggctctacctcgcctccccaaaaggtaccaagagccacatgtgtgggttttacccacgggaggaatcgggtccatgtccacccaagccaaggttaaaagcccactcatctacggatgagaaaatcatttgatcacctcagttaagcgttgccttatttaacttaattaataggggggagagagattggagacgtactattgaaagggcaagcccttcactgcctcccacccaaataaaaaggccaattggccttgtactacaagagccggtcactccttctccctgtttcccacctatcttccaaaaatgctaaggaattcaacttagtgttattttcacatcgttcagtcaaacttagccagagttccaaacgccctacttaaaattcaactagaaagttacctaccaagtactaattagcattataaagtcagagtctgcagctccaggcctttcagttgtttactagaaaggacagtcttaagccagatacagtttaccataagaaaagttaaagattcccagtgaagcaagttttttctttagccctagattccaggcagaactattgagcatagataattttcccccctcaggccagctttttctttttttttttattttgttaataacagggaggagatgtagtctcccctcccctagcctgaaacctgcttgctcggggtggagcttcctgctcattcgttctgccacgcccactgctggaacctgaggagccacacacgtgcacctttctactggaccagagattattcggcgggaatcgggtcccctcccccttccttcataactggtgtcgcaacaataaaatttgagccttgatcagagtaactgtcttggctacatttcttcttttgccccgtctagattcctctcttacagctcgagcggccttctcagtcgaaccgttcacgttgcgagctgctggcggccgcaacacttttctaaatttcctttggttgatattagaaagtgatagctattatcttttgggccaattaggtcattttattagaatggcttcataaaagtgatcatagaagttttcctaaataaaaaaatgtctactatatttaaatttcaattgtctttttaaatttttttaaacaagatactatagactcatcttgaaatttataatctaaaaatagtatttcatcaaaatactgttaactattctattctgggcattggtatgctatgtatttactatttatggctcatcaaatatggtaaacactatacaaaaagcctttaaatttattgataagaactgtcctgtgtgatgaaaattatg

SEQ ID NO: 21676 - DNA, 1145 bp, Mus musculus
cactgtgggagacaacgtcgtttcaggcagtgatgaccgcacagtaaaagtctgggatttaaaaaatatgagatctccaattgcgacaattcgtacagactctgccattaataggtaagggttgattgtaatttcttgtcttgtttgggcatacagcttttgggaagagagttcaacctcctggggaaatatattttattctcttcttatgtgatttcagtatctgtaactacttaaacttactcagtgtgtagtatggcagtgtagaaagacaagagtcggaaaagacctttggtagccagatgttttagggctttgttaactgagaggctctgtgtgctattggaccatgtgactgtattgtacgcgtgtgtggagtcacttgtgatctggcagttaagtgtgccatgagcttttgtccagtgtcataggcagacttcccatgtggtttactcacttagtttgtcttgaaatgaattattttctgtaaattcaaaatactacactgtcagttttatacaaacttgtttctttgtcttttttgtaggatcaatgtgtgtgttggccaaaaaatcatagccctcccccatgacaaccggcaagtgcgattgtttgatatgtcgggagtgaggctagcacggcttccccggagcagccgacaggtattgtgttcgttatgaacagcaaaggagaatttgtagtatcagtagtgcctcagagaaatacaaacagaccacattaaactatttagaagacataaaaatttaactttagcaagtgtttcatgagatgatgagctagtcatagattggtgggaagtcctggagatgggatacctacctctacctccgaccagagaaacatcttcctatggtggggtatcaccagaaatagaaactgttttccgtataagttagggaattattccttgctaccatcagacgtgagatacaggagtttggtggatgcttttgcctgttgtgttcatctcatcccctagtgcctgcattcacggctccagtttagcccagcaggatcagaatgtatccaaggaacacctagtcctggtgccttaaagcaggcccttggatgacttcttgatgctctgtgaagtgggggctggggcctcagcttatactatgtgg

SEQ ID NO: 21677 - DNA, 1204 bp, Mus musculus
aagtgactttcagttggcagtagcacagcagttcctggaaacaacggtgtgctggaagagttactaaaactaaagcttttggatccacttggagcaagataagccagattcctaacactcatggtggaggcaggaggacctcaagttgtaggccagcatggcctgcgatataaaatcttgtcacactgtctctcaaataacaagatgaagaggaaggaaggagaaaggaaaggaaaagcttttttcttttttgtttttgtttttgtttttttgagacagggtttctctgtgtagccctggctgtcctagaacatactctgtagaccaggctggcctcgaactcagaaatccgcctgcctctgcctcccgagtgctgggattaaaggcttgcgccaccatgactggcaaagcttttgttttgacttgggagcacccatttttttttctgagacctgtagtcttcctttgtaacagtcttatgggtggatgtcacagccaaggctggactcctgttttttgaggaaggggatacttggctttagctaagtatgtattatgtgaggttatcagtatttggatggtaggaacgacatggcgggatactttttacacattagaatttttgttgttgttgtttttggattctttgttttttcgagcccaaggtgcttctgatttgggggcaggttttctgtcaattttcttccaccactgaaagcattgtgtatgcaactgaatatgcttattctccatccggttgtgttgtcagaggcgtttgctcttcatgggtcacaggtctcaccatcagcacgatagtttatgaaagctcagactagtctaactaacatactacctcttcagataaaattgctaaaattaaaattgatggttggctgttgaaaattacttttagcttgtgagaaattactttctcactagattctggcttttaaaagtaaaagagcccaagaaatctagttagagagtttcttttcctgtttgaaattgttcttgtactttaaacatcttggatggtttgtaagtattagtttaaaacaaaagagggggtgacttttataatatttctgaaatttcatttggataactggcaactatttcttctcagaattttcttccccgccttagtgcctgtgcaaggataaagtccaaaggaactgccattacttcacacaattgagctgaa

SEQ ID NO: 21678 - DNA, 1173 bp, Mus musculus
gggtctcttagtaatcttgaccaagtcagtgtttatttgtttgtctattttttattgagacagggtctcttcacgtagtcctgactgtcctggaacttcctatgtagacaaggctgtctgataactcagagattctcctgcctctgcctcataactgttagaattaaaggtgtgctccatcatgccctgcttaagtcagtcagtggtctttctttctttctttctttcttcctttcttcctttctttcctttctttcctttctttcctttctttcctttctttcctttctttcctttctttcctttctttcctttcttcctttcttcctttcttcctttcttcctttcttcctttcttcctctctctctctctctctctctctctccccctctctctctaaagcataatgagcatatggaagtagcatgagatgatatgccacagtatcatgggcatcatgttatcctgtatctaaatagtgctcttccattctatcctgtgagtgggataggtaaggtaggaaagaaacgggcctcaatagttccttatactagcattctttatattagaaatgtcgagagacttggaaaatgttatttaccataacttgtgatggtggcaagttttatgtggtctctgactcctcctcctaagatgtcatagtgttgggcatctctgtgttttctgtaagctgaagctcttatagattatagagggatactttagttgattttaggagggacactagctttcagaaaggtaagatgacaatgatgggtttgaggtttgagcaagtccttttctgttttctataaagtttcaagcaagttaaatagaattgacttatacttgtaaaatgtcagtctcttcattgagctttctatttttgtctttactgtgttggggataatctgaaagcacattcctaattgatgtaacagattgtatctgcatatatttatgtaagagtaaatttatatacatgtcctgggctctgcaaaattattgttaaaagcaagctgtatgaattcattaaattctgattttgcttttttgcttgatttcatagactcatcattctttatatttttttgagttacttaacagttgaaactttctcatttatctgagagcagcttcacaactaaaaagtttaaagaaaattttgcatt

SEQ ID NO: 21679 - DNA, 1438 bp, Mus musculus
ttctgtttctgaggaagaatgtaaccttgaatccagatcccaacgagattaaaagctattgctatgtatcaaaggaagaagtcagagaaattttgaagaaggcagccagtggtgaaattaagttaactccgtggtttaagataattgcagatactttcctcttcaaatggtgggataacttaaaccatttgagtccatttgttgaccatgagaaaatacatagattgtgaatgtgtaaatgatttgaaaaattttctacctggtaagaatggtttggtttggttttaaattgggccctcttatatgatacataggtattttacaaccagaatttgttttgagaaaagaaaaactcaactagcttacagttttatatcatatatcccatatatatgcactgatgtctgtaaaagatatttaggtgaggttattgcaaaattatgccataagtaaaacttaatttagcctgtccaaatacctggctatgacaagattgaggaagtaactagaactcatattttacatttgatagacactttcagaactctttgctaattgtcaagtgttgtttatatctttagatttttatcatacatcagaaaattgagcagctgctttgaaacagcactaagaggttaaatgggcagggctcaggagacagctcagtgtaccatgattgccttgcaggcatgatgtcatgggttgttgagtccctaaccctaaagataattgtaacaacagcagcaacaggcagagcaggttcagagggaagtatatggcgctctctctctctctctctctctctctctctctctctctctcggtcttcagacaggatgattaatctcaggaaccctgtataaccaatactggatgctcaagtcgatagaaggtatcgtatttgcatattactgactacacttcacctcgtctctggcgtggccatgacactcaacccagcgtaaatgctcctgtaaatgatagttgtactatgctttatgataaggagacgtctgcatgtgcggcacagatcaaatattaatagacagttgcttgagcccttggatgtttggcccacagatttaaaaggccagttctgtatactaatttttgtcattctcacttgattttgtgctttaaccatcctgaaattattattttactacttaaaggtaactgttacttttggtagtaatggtaactgattagctattcagcaaaatctgtttatagtcctagtgaaaaagatggttagtcataatgtgtgagtgagttctactttaaaaagttgagaaaacctttgactctaccatggctggccctggatcctcttgttgtagggggtctggcttgagttagataatttagtagcattagcacccctttttaagacaacaacaacaaaagaaaatctagggaagagtgggggcgtgtttct

SEQ ID NO: 21680 - DNA, 1422 bp, Mus musculus
tttcagatgtcattttcatctggaagtctaggaagtgagtgttgaggcagcgttttcctatgaatctcaggctggctgagagtccagactggttgcttccatgttcagctgggattacaagagtgcactatggaactatgggttttaatactggcattgacatgagtcagatgtggcatgtgctctcatggtcctgagtttcagtgtgttactctgaaagcctggtccaaggtttcctcagatagtcatcaagttcctgcagatagtgtggtggtctgagagagagtggtgactgagacaacggggttgacatactggctttggtaaaatggttcccgggtagcacagaaatgtggttttcattaatgtgtcttctcctgcatagatggtgaagaaagccaagactatgatgaagaaagctcagaagaagatgaatcgcttggggaagaaaggggaagctgataggcatgtgtttgatatgaagcccaagcacttgctgtctgggaagaggaaagctggtaaaaaggacaggagataatgtcctcttcagttggaacagtttaagtagactcttggttattttgggtgtggtatggtgtgttatagaatttggaatcaccatctgttgaccaaaagaaacagtgggaatgacttttaaatgcttgctgctttgctggaaactggcaaaccctactaagtgtgcagtgctgtgctcactgcgcagtttgggtttttatgtccagtgcgttccgtacttgatgagcttctttcagcattttacagaaaagacttattggtgtacggaggctgcgtgggtggaggaaaactgttttgtagtgggacttttgtcacctaaagtacctatttttgttaagaaagtatacctgctgggaggtctaggcagaaggctatcctccttacatttagggtttatcagagcttaaactactcttaaattattttctaaacctgtagtacaatgtatcattgtaacttcaaccattttatccaaagtaaacacccagcaaaaacatagtttgatgacttacattttgtttgatttaattgcaatacacttgatgaccaaaaggggtggtggtggcagggaataggactttgcttttttgttcttagaataaaaaataaaggaagtaagtgcctggggtataggctcaaaaccaaaaaaaaaaaaaaaagaagaaagaaagaaagaaagaaagaaagaaagaaagaaagaaagaaagaaaatgtcttctttcataaacacttgctgaattaagattgatgtcctggaaagtacaaaaacatctacaagcgggatcccggtgtacctggaagtgcagccctgtcctcagattagaggataatcttcagacagtcagtgcttcctgttaggctgcagcttctggcctttatgagaat

SEQ ID NO: 21681 - DNA, 1186 bp, Mus musculus
ggcttgctttttcactgcatgtcagtgtttacatatttatcttctcatttatttatctgtgtgtatttatctgtttgtgcatgtgtgggtggtgcgtgtgtgtgtgtgtgtgtgtgtgtgtgtgtgtgcgctggggaattaacccaggatcttgtgcttgttaggctttgtcacttggctgcatccccaacctatatgtgtatttaaagtttcattttgtaaccagtttagtgtgctatttgagaggacgaatgggggtttgtacaaattcattttgtgtatctgctgggaacactagggaatgaaggaagagttccctacattttttatctttaaagacgaaatggaattggcaaaaatagtgcatatagtgttcatgctgtctctttggccttcatatgtccccttttccatgagattaactctatacaagtggggtccacttgtgactagaccatacagtattctcatattttcaggtacttaaggaaacatcattcctataaatatgttgctacacttccgtgcaagtttttctttgtgaattttgtgattctttttaaagaaattagaagagttggaaaaggaagaagagctaagaacagctgctggggagtatgacagtgactctgagagtgaagacgaggaaatgatggaaatccgacagctggcaaagcaaattagagaaaagaagaagttgaaaattctacagtccaaagaaaagaataaacagggacccaggatgccccgaactgccaagaaggtcagtcttgagcattgcagaggcaaggtccaagcttgcatgttggatcctgtataatcccccatgagtgacaggctgccactacctgggcatgacaggtagtggcacaccctgagattctcaggtacactggcttagcagggtctttgctttgggctttagattctgacagttgcgtcttttctccatgcattgcagttccaggtgcgtctttgttacagactgagtcattgctgccgtgatgtgttaaaactaaacttgaggtgcttgaggatgtttgttaattgttaaataggctctcattcagtccgggctagccttgagcctctagccaaggagctcctgactcctcctgccccatagataccaggattacagctctgtgctattatggctggtgctaacatttttatattacttaat

SEQ ID NO: 21682 - DNA, 1136 bp, Mus musculus
tgactgctcttctgaaggtcctgagttcaaatcccagcaactatatggtggctcacaaccatccacaatgagatctgataacctcttctggagtgtctgaagacagctacagtgtacttacatatagtaaataaataaatctttaaaaaaatgtttacctttaaaaaaaaataaagataggtctaatataggctaggatggccttgaactctttttttttttttttttttttttttggtttttcgagacagggtttctctgtataccctggctgtcctggaactcactttgtagaccaggctggcctcgaactcagaaatccacctggcttgctgttccacttattttttttatttaatttatttaattaacttaaagctgctattcaagaattaaaaacgagtcatagctattgagcaaatagtgtttgcaacttgcatttgcaaagtatactttgttctttgttctctgggaaactggaaaacaagaatgtacgttttgcttcttttttttttttttttttttctcttctagaaaatatttctagacttgcaggctgaaggattccctgtcatcgagaccagtaccctgactgaggaaggtgtcattcaagttaaaacagaggttggtactttcttaactgggtcagggccagtgtttttgttttagaaaggtcagttgtggtgggaaacttttcattttaggaattactgacactggaaataatttaggtgggttgttttgttttgttttgttttccttgaataggattagttgtttaaattgttagtgtcctatggggaacctagttaccttctgaaagaaaatatgtaggaagtcagcctgtggatgagtggaggactggattcttccttgtaatgtgaggctggggcctggagtcgattggctttgtttgtgactgttgtttttgtgctttcttaggcgtgtgacaggcttttggctcaccgagtagaaacgaaaatgaaaggaaataaagtgaatgaggttctgaacagattgcatttagctgtgcccaacaagagagatgataaggtaagatggccctttgcaggactcagttttgtgttgctatgattggtcagtgactgtttgccacggtcggttcctggtgctgc

SEQ ID NO: 21683 - DNA, 1099 bp, Mus musculus
ctttaagggggctcttcagggtttccttagacccctgcatgtattcttttgagacagacagggtctcactctagccagggtgaccttagctccctgcagaggtcactctagtcttaaactcatggcagtcctaggtttgcttccttggtccggattacaggtgtgagcccccatgccaagctcctggattgggtttttgtcttataaagaatatgtatttttttcttgttcctttgtctatttcattgtgggcagttttcaatgtcgtagtttactcgctagttttgttagaactgatttggaagtatgagagtgactctgggactagccaagacatttttgagtgagtgttctttactttggttaatgaagcctggttgttaggttgtagataccccagggattttggatcatcctttggaggatcggaacaccattgagatgcaggccatcacagccctggcccacctccgagctgcagttctgtatgtgatggatctgtctgagcagtgtggacatgggttaaaggagcagttagaactcttccagaatatcagacctctgtttatcaacaaggtaagtgtgctaactaatactttaatttacaagctagtaccttcttacttatagttaatgggttctaagaccacggaaaccatagatggtactgagtgttctatgttccttgaccacagatgttagtgatgtgacagttaatgtgatagcttacataacccaagtggctggctgcctggtagcacacacagtagtgagccagactggtttgtgtcctggttggaatgcagcactaagacaagactttactgcactgctcaggacaggacaccatttaaatttacatgttgtttatttatagaactttccactttatattttatagcgatagttgatttcagcttgggtaaatgaaattgcagaaagcaaatgcatggacaaggagaggggcctacattattctgtagtgtaaaagtaataacttctgttctttcttgctagcctcttattgttgtagcaaacaaatgtgatgtgaagagaatagctgaactttctgaagaagatcaggtaaatcactcataca

SEQ ID NO: 21684 - DNA, 3677 bp, Mus musculus
ccttaagtccacgcctggagtccccaaggatcagaggaggcagcctgggcgccgagcctctcctccagctgccgggaaacgcctgagcaaggaacagaacacgcctcccaagtctcctcagtgagagctgcgtgcctgcgagggctctggaagagctgtacccaccgtgagaagctctcccactcagtacggaatgagccgctggttaggagcttgcagtgtctgtggggcccgtgggatacctgcaagttacttccttctgtgagtcggatattccccctcttggaaaaaaaaatgtatttttcaggatttaattatataatataaaccttattttaggttggtgcttaactggaggtgatacagaagtctggtgttttcaggatagaaaatgtatttatcctaacaaatggatattttttattaagcctccacgtggctctgagtgcaaagctataatgagtttttctaaattaagggaactctgctacttcctttttttttttttttaatagttggtctacaagtgcgcattggtagggtgtccagcagatggatgggggctgatggcaggggcaggggcagccttggcctcacagagcaagggactggcatgtcaggacactgacagactggcataggagctgtgttttcatctaaacccttagcaacaggtaactctagctttaaaacaagatacagatgtacatacagttcttttttgatctagtgggcagaacctgcaaagagcaccctagaaagacctgaaacctttgagttttgatgtcctgcgagcaagtaaccagcctctcactccagttccaagtggctactatgtaaaataaattcaaagcacattgtgaatagaacctagatggaattagaaactgctgctgcccactgatgtcagaagttgtacacgatgtgtgtccctgtgagtgagtggctacctggctctcatcctccatgctctctctgtgtcccccacactctggagagtcgtgtcttagccagctctgtgtggatgtcttcttgtccctctgcatcagcacgtggatttagaagtacctagccgtgagagagtgctgtcggtggtcccctctggcttgcgaggacagagtccttgctcttttacctccaggacgagggttttcttgattgtttcagaagctgcacttctgaggagcgagagtgcagtcaagttagcaagttcataataaagttacagataaattattttgttttaaaacgcctaagatttttctttaagtattctaagcagcagacattaaactatttcctgctatatgtaaccatacagcttattccacaaaatgctatttaatgagactgaaggttgttttggtttcttttttctttttttttttctaaggaaaaaaattatttccatccaatatttaaagacttgaattttatttaaacttgaaaatgactttgccttaacttttgtataagacagcttagagctcacggagacctgcccctgggttggcgggagtggatcggttactcagttgccatgcggatctcctggtgttggttttgctgagaacgcatactgttgtacaagaactccagtggtttttgtaacatacctacagatcttcaacagttgatcttttttcagattgttgaaaagtcctgtaaatgcaaatagtcgctactgtgttaaatctgtgcacttgggagtgtgctctgcttgtacagtgtaaataatcagaacatatgagaaaggtaccctacagagaagaatctgataaaaattattgatatattataaatgttgctgttgagctgatgtagataaactaaatgttgtggtttgagtattattttaatttgttaaggtttttctttttccccttatactggtgtgttgaactgattttgcctctttgctgcaaaagggaaatggaaagtcttattgaaagcctttggatgttttcatactcttaaaaagaatgtaagtacatactaatcatatgtgatatgtgagggttttgaaggagagtatagagagcagagactggcaggatcttccaatgaaagtaaaaaacagaatgtgctaattaaaattatactctgttaagtgatttttcctgccagaggcaaagatggcctgatgcacgtgaccatttccttcagagcaactgtcattcagttacataggagtatacgcagtgctgatgtttcagacgcctgtgaaaggaacataggacgaatttccttatagatgtcagatcactgacaaaaaaaaaaaaaaaaaaaaagaaagaaagaaagaagaagaagaaaacagctggcctcttgaacccacactagcagatactgtctatctggaaaggcgagcctgaggcctcaggcccttcacatcacatctttgctggaagaggggccaaattatggtcagcaccccttacccccaagggtgctctcacagaggagctttgatttttaatgagaagtcctttccccaaggctgagcattgcagcacgaaacctgtgtggcagagccaagctgtaggtgcttgctgtctgctggctggaagtgtacagctcagtggccacacgcaagggcaggtgggcagatgcacgaggtgggacactgattactgcttagccagtgacagcctggcatcaggaactaaagccttgctcagatgtgatttttataagcactcgtttttcaggaagcaaaggtgatatgccaaatagctgtataatgtcaaaacagagacttcctgaacactttgaggttttccactcagaaaaaaaaggaagttatcaaaataggaagctgttgagggtgcatgcagactcttgctatgtcacatccagcaagtgtggtatgtggctttcataatctatttacgtttactcattcctttcagtatctcaaggtatagaatcagagataccacagtcacaaggacctttttaacctgtaaaattgtgtgatgatgcttacttaccatatggaaatacggactaggaatctggccccacctcaccagacaggaatttcaagtgattcctctctcatagtcagtgtcatgatgtctctgtgaacccctcctgtcattgcatcactggttgccactagtgggtggcaaaaaaaaaaagaaaaaaaaaagaaaagaaaaaaagacaaaaaaaaaaaaggaaaaaaaagtcttatattgctgtattagggtttctgcagttgatattgaaaaactggtccagtgtgtcacagcaggcgactgatggtgcatacctgtctctgtgtccccttcagtgagctgtagttgtgggtttgtgtgctttgtagcctgttatacggaaagcaacagacaatcgaagattccaggagtgctaactaacagctgcaagtcacagacggggagtgtaacaagtggaagcttgcctgagggcttctgtttctgttctacttttcattaagactggagtcaagcttacatgtaaactattggtgatttaagtttccttttgtgtcatttttgtgtaaaactgtctaatttgaaaaaaatgtagcttatgaaaaataaagatttaggcactgttcaatttttcttttgattcttttaaattaaaattttcttgaagaatgcatttttttaaagatttttttgtttccttcactgtacatgaagaag

SEQ ID NO: 21685 - DNA, 1164 bp, Mus musculus
ctggattccacccagcacctgtgaaaacaaaacaaaacaaaacaaaacaaaacacagctcagaccttttttttttttttttcctgagacagggttcctctgtatagccctggctgtcctggaactcactttgtagaccaggctggcctcgaactcagaaatctgcctgcctctgcctctcgagtgctgggactaaaggtgtgtgccaccaccgaccggccagctcataccttttaacacatatgtcactatcctctatttagagaatgagatagaacttcaaatggttggaagttaacacaaatgttgggctctgtggtttcctgaaaacttttcaacgcaaatgtatatcatgaaagttcagagcagcctacctatagttgacaccaaaaagttgggtgtctatctaacttttgcctgtgaggtgggctagggagcttagtgatcatcctagttatttggtggagagccaagctgtaacacttcaccccagtcaagtagcaagtccatgaggagaattcatgttttcaatatccttggctgtgattggtagaggcatatgctatgtgttttttgtagtgctcaacctctagaacagtggttcacaacctgtggattgtgacacctttgggagttgtatttaagatatcctgcatatcagatttgcacactacgattcataatgatagcaaaattatttgtgaagtagcaatgaaataattttatgattggggtcaccagaacgtgaggaactgtattaaagagtctcagcattaggaaggttgagaaccactgttctagaaccttatttaaaatcgaatccatagctagggatatagctcagttggtagagtacttgcctagcattaatgaagctacaggtcagattcccagcaccacataaatcacatatagtggtgggtgcctgcaatcctagcacttgggaaatggaggcaggaggatcagaagttcaataccagcctgagatacataagactgtgtctcaatatataaagctgtgtagaacacttgtaatcttaggggtggataaagagtgtctgctatgttctttaaattttctttgtgcttgaaaatttgcatgtttttcatagaagacagaggaaaatctaatctcttgcgattaactcttccttatgctttaaga

SEQ ID NO: 21686 - DNA, 1194 bp, Mus musculus
gcaagtgtatatctctagactctctcctgtgtgtctacttctgtgaacaacattacttgtattttaaaaagtatatgattataaagaaaagttcagttctgacatgaaaaaccctaaaggagtttggcattggtcatttcttagaatgcattttggtctctttgactgtggttggaagaatcctaaattttcatcttagaatgcattctaagggcagaatgtgtcaaagaggttagagtggactattgtgtgtgtgagttaatgcatttatttgcattgtctttaaaaaggcatacatttgaatcttctaaagccacactttgattcttactatcttttcctggactctggctttctggaacaaacggaaggagcagagactttcatgttagatttaagtgctttctctttggactaaataaagcacacacatttaggtgtaaataggacccttttcattttttgccttattcctgactctgtgctagacctactaaaggaactctaagacagatgttttaaataattgcatttttaaatagtttgcctattatgatacttgtaatcctggcttgtgtgtgagcactgaaacttggggtgtgttgtattcatgtgctgtgcctttggttgcctgaccatgatacatttggctaaactttacccatatgtcggccacttcgcaaatatttgtgctaccttttctatcttgggatgggtctggcttcctgagggtgcagaaaaattgttctttcagagcaactttagtttgaagttttggtgggggcagcatggaatgagatgcgttttctttttaagcatacagaagataattacagcggttggcagtattccttgtgctgaacaatagagactccagctggcctcctattgccttttcagagtccgggagggagggagcatgctggggtctagaaggtttccttagggagcttgttatccaaggagtgctgctctatactgtggctaatcctcagtgctgaggcactctgtagggccaacataacatggtgtcatgatgtgtctacctatgccctccaggctttattttgaagaaagcagtgtgaagaggacagggttggcttatccatgctcactcagcatgtattggtgcttcctaatatggaataccaagcgaagcaggctgtaagtggtcacccgaggaacctttcattc

SEQ ID NO: 21687 - DNA, 1106 bp, Mus musculus
cctgctttattcttaaagtatccacaggggtaggaggtattggttatttcattctggcagtttccttggtgtgatattgatgtctctcttgagtatataaaatcctgagtgaataaaagatgagtttgtgctccaatataaaattgccagttttgaatcaaatatttactgtgccaaccttgactgcatgattaagtttcatctatgcacacctatagtcaaatagtggatggagtttggagactcttggaaaaataagaggaaggattgcaggcactgaagcggataggaactccacaggaagaccaacagagtcaactaacctggacccttgcgtctctcagagtctgaaccaccaaccaaagaacatattctggctggacctaggcctacctgctcatatgtatcagatgcgcggcttgaccttcacgtgggtcccaaacaactggaatgggagctatcctaaaagctgttgcttgcacgtgggatatgttcttctagctggactgacttctctgacctcagtgggattgaaatgcctggcctcacagattcttgaagtgccagggaatgggggatactcagttggggggattacctgctaaaagaaaggggatgggtgaatgggggctgcggaggaaggattgtgggagggtgtggcaaggggaagggggagatcagtgagcaggatataaacggaacaagtaaaaaactaaaagaaaagtttcacctgagcacatgagtaggttttgctcagttgagtcatatcaaattgacaatactattttgaccatcaattaattattaattgaacatcaatttcatattatataatttagtatgtgataattatttcaaaaggccttttttgtggcaagtatagaagccaatgaagacaccatattctgtcgaagaactctatcatatttttaatgggggcatcagctctatagaatttcctcatgaagtgttaagggaaggctgtgaaaaaaatgacttcaatggattttttaaaatctgttttctggtgttgtccttctaggtgacagactgatgaggaacctctaagctctggttccttccttttcccgctctctgttgtctat

SEQ ID NO: 21688 - DNA, 1190 bp, Mus musculus
tgcttttcttgacctgaagaaactgcccacctccaaatccccccatcgctatacgaaagacgagctcttggatataaaagagcgtccatactccaagcagaggccatcatgcctctctgaaaaaaaaaaaaaaaaaaaaatgacagtgattgtgtctgggaccctgagaagtggcatgcctctctacccagccttgggacagagctcaccagtggaaagtctgaagaaagagacagaatcaggtctactttttctagtgcacaaaatagcaaacccacaagagtgagtgaaagaagaggacttagatgtcgttctcaatccagagacaaagctttggaggtggctgctggtgacagctgctcttagctccctacactctggcagttcattggagaaagacagtgatgggcttcgcctacttggtagacgaaggattggcagtgaaaagataatttctgcctgggcatttgaataggatcactgtctcagtgacaaggacctgcacaacttgagagatggagacagagagagggactacaaggacaagcatttcaggagggagtttggagatagtaaacgtgtctttggtgagcatagaagaaacgattcatacactgaggaagaaccagaatggttttcagcgggacctaccagtcagtccgaaacatagagctgataataagactctagaagaggatcacaaagggagaaaaagaacaaggtgacagagcaatggaggggtggaagaggacagggtggaagacattctggcccagggtccctctgctgatcaggaagttccaaagaatgccatcctacctgagcagtccccaggagaatttgactttaatgaattctttaaccctgataaggcaccatgtttggcttcgataatagaagatgttctgggggaagggtcagtctctgccagccacttcagtaggtggttctctaacccaagccgctcagggagcgtttccagcagccttggatctacatcccatgaaaaacttgagagactggcaggtttggagcaagccgtcctctctcctggccagaactcggggaattattttcctataccatcggtagaccgtgctgaaaatagagtggacattttagaaatgctacagaaaggcaaagtagatttaaaacctcttctttctagtctttctgcaaataaagaaaaa

SEQ ID NO: 21689 - DNA, 1200 bp, Mus musculus
aactagtatccagaatctttatatagaaagaactgtttcacaaaacattaatttatttctgccttctaaaagctagagaataacattcaatctgcatcctctcaaagtgcattgaagaattattttagctaataaaattagcatttactacttttccattgttatttctctgacatcaataagtggtttaatgtacatgtagaaagacattatatttcaaaacattgctttgagttggttagaatctgccaagagctcccatctttgagcccaaactgggtcagtgtgttacctgtgacagtatttccacagctgggatgtgtagtagtttgaatggggatgtcccacataggttccgacgtttgaacatttggtccccagttggtgatcctatttgggaagatttaagagagtccttgtttgaggaagtgtgtcactggaagcaagattttagagaaaaacaaaacaaaacaaaacaataaaagaaaaaaaaacaaacccttgtctatttctagtttgcgctttccactttgtgtttaaggttcaagatgtgaatgctgagcttcctgctcctgttgccatgcagttgcttgctgctctgctgccctgccatgattgactctatccttctgaaatcagaagccctagtgaacgtttccttctgtaacttgccttggctgtggtatgttatggtagcatcagaaacctgataattcagatggaattacccgctgctcaggccacagttactgtagtcagaggaggactttagcatttccagggagcctatcactcatgaacatatgcagttctaagagggagaaaagggctgttttctagtcacatagcttttctcttctatcattccaagacaccatttttttttctaaatttttaccagtaatgggtggtcccactcacaatctagagcctttgatggaccctgcacttacagcctgcccagcagcctgcttctttttaggcagatatccccagtggtcttctggaaagacaaaaattggtttgttcctgaaaagaagttatgctctttgtgtgattcatcttctatatttaactttatacaatgcagatgagtgtattaatatcatagtttgtgatcatatagttgaaatttcctatacatgtatctgcctggttaggttaataggctttaacattttaaaatgtggagccctgtag

SEQ ID NO: 21690 - DNA, 3159 bp, Mus musculus
agtggtcgtggtggacatcggggtcatccccatcaactcccggggagagaaacagcggatgcacttgcgagacgggttcttggcagaccagctggaccccatctacgtggcctataacatgtagtctcatcgctttgacttccacagacttttctacggacggacgtgaccatttttctttcttttttttccttctcagtgtccacagagacatgcagacactcgggccacactcaaaggaggagcctgatgcggtggggtttggggtagtacttctaggagcaatcaccctggcatggagatgaaatgtgaatttatgctggattttgctcagaaggactttggatcactgccttcagtttgctggataagatcattttaagaactttctttccttccttttttctttcttttttctttttttaattattggataagaagtgttctcttcgtaaatgtggtattttgttaagccgaaatagcaattaaaaaaaaatagtctacccttcaaatgggttcttttaaacaatttatgtagtgtgacaaggaattgttttttctgttttaatgtgtcatgggatcttactgacatggatctgttactaatttaagccatccctagatctcacccttctaggagagtttattgaggtacgagaaccttccaggtagcaccttccaattagattttagcagcttgctttgtcagagacacgctgaagaaacagaggccagttcatggcctttgaagttaacatagaaggagaagtgattataaataaggtatttcggcaactatcttgcagatatctttgtactaaactaaaaagataaaaataagttaacttcctcgatatgtaattatgtacaaaatgtttaatttattttgatctctttagaagtataaaagagaaaaaacattcaagaatattaaagtcttgtaatgtttgctaatataaaaaaagtgttgtattatcttgcgtggatagtatcacaacaaatatatatatatgaaatataaattcactaatgaacaaaggagattttaaagtttaactgcagaacttgtcacttgcatggtgcgccctccactgtatccacacacacttggctgtttccgagcaatcgcagatcgccaggaaccctgtcttagacccaagaccagcaagtggagtcaccgctgtctctgagagggtgaagggattcaatgctaacatgcactattttttcctttgctgtgaggacgacagtgaatgctttcctgccagcatgtgccagtgacattgaggggctccaggttggcaaacagcactgttttctcagctgcaagaatttgttgcatagtgtcaattttattttagcatttttgtgtcacattttataatttttgttgttgttgtcccttgatatgaagagaatgacaccctgtggtcatttgtaccacatttgtgtcactaatttaccactgccagtggccaatctgagcagataaatgaccagaacgcctttgagggaaaagctagctatatgtgatgtcttctcgactgtgtagacccagccaactctgatcctccaatcttgggaactccctagcttggccatgagagtaggcactagtccagggacttaaaacagcaaggagttctgccagcatcatccttgtactagccgttggggaactgatccctggtcccatgtgcctatattttcatgtgcacaggttagccactgtatccttgtctgtatccaaccaaggagaagatatcaacaatacaagacaatgtttattttgtaattgccacagtatggcttcagtggctcctagtatgagagaaacctaaaattgttattcggcaaaaatgaggttcctgattgctttatgggcgaggtctttgtctgccttagttacagctgccaacagtaagccctttgctaaaagagcgttttctatgacttccgagatccaaggctcatttgttttggtttgttattaatttaagtggtacatttcttttgaaaatttacatgtgtaaagcattattcatctccataaatcacttaatttttcaaatattgtttgctcattgctatatgtttctgcatgtttcaaatacacattcctacagtttgcagcttccccagggggggaaatccctgccacatacagaaagaattttcttgatacatgcatttgcacccccatacctcccccccccccagggaacttggtttaatgtttcagatagtagactgattggtaaacatgattacagtgtgcaggaaatcttccatctggctaatgtgaggaagcaaagcaaatttagatgtcactcagaacctactcttaacttttcaccatatcaacttcacacccaaggagggcgaaggctgcagcacaggggcaaagcccatcccagccggtctcttctgtaccctgccatctgtcacgtgacgctttaggtttcaaagagttggtggactcggttggaagcttagttgtgcaagaaaaagggaagaagacacttaagtaccaccagtttcagcaataaagaaggatcgttgtgtattagaaaccgtactgtagataaatcattcatgagaatgttttttaaaaagaaaaatgtttgtcttgtgaccatgtgcttttggagtcagccaaaaccgtgtaatcaacttgcacaaaaagagggtacacaatgaacattgagacacagacctaatcaaacaggagcagattcctcatggtgcttgtttattatatatatttaaccctgcttgacactttacccaaggggacggtccctttatcagttgaatgttagcagcgttatttcagagtgtggtgactggttagagaaaactcatgtactcaaccaatcacagtttcaaacaaaatttttatgtgcaaaggacagcaaccttcttgtatgttcaaccaccagtacgctttgtacatctgtgataacgcctgttttatattcaaatgaacaaataaaagcttttatttttgttgctctgaaaatagcagtttcttaattgataccctggggaaatgtctgggctggaccacttccctgtcaggaaggaggtgactcctgctgggaaatgtgtctgattctgtttacatgacttctgcataacttagtacagtgaccctgc

SEQ ID NO: 21691 - DNA, 1415 bp, Mus musculus
tatcctttagttattttttgaggttagagaaataatttgtaaatatttatttagacctttgatatttattaaagcaattactcaaaacagaagtgaaagagtcgggagaaaagcctttaagacagttttccccggttcatcagggtcactctaaagatgaaaggaaggagccgtctgtgaggcctcctccacgcagtgccggtgctactgcagacggcgtaactactgccacacacgcgcacggggcgagctcttttgtaaaaccaaccgtagcccaggagctccctcgggttatacaggaactgcaatagcttacaggcaccaccgccccctcctcgctgccgtgtaccatcactgctgctgcgctgcccgaacaaggacacttgacggtctttgattgttttcagacgttgatccacccctgtgagagcaagttattgtgggaatatttttggtgtaaaatcattccagagtatgtactatttacctgatagctgcatgaacgtgaggtccctgttactttggcttcttgtctctgtcgacacggctgcacatttccaagtaactacagtgtgaaaactgtgtgttttaaaaaaaaacaacaaaaaaaaaattaaaaaaagagattgtggcctggttttgtaaaagttttaggtaaaattacaattgattgttttaggactcattaaatttttctgcaatcctaaagctctatcaaggtgttgagtgtcccgctctgcacactgtaagtaccattgtggctgtccagttctatgatgccctctggcattttgtaagctgctctgactagcaatatatagatttcatttactgtgttaacattggttaataaatgtatttaaaaaacccaacaactcttgtcagtaagctgcttcagctcagtgtctgctgccagacacaacacagctacagaaaagcttggtcgagagcgggagttgctcatgatgatagtgaagccatgtcgggagctgggtaagagcactgactgctctggcagatggcccctcacaagcatctgtcactccagtcccagggaagccagtgtcttcttcagacctctgtggactccaggcacacacatggtgcacaccgctatgcaggcaacacaattcacacacataaaaatacaaaaaaaaaaaaaaaaaaaaaggaaaatgcaagtttatcaggtgcagttcttcacttcaacatttatactggattccatgggtcacttctcagaaagaagagggcgagatcatgtacttagggctgctcttgatggactctgagcagccagggccagcttgctctcattgggtggcagatgctgctgttttaccagtctccggccttcacgccaacgtcagcccgtcttcatgtagctctgcgtgctttcagcactgccgtctagt

SEQ ID NO: 21692 - DNA, 1334 bp, Mus musculus
caaactcaaagacaaaaaccacatgatcatctcgttagatgcagaaaaagcatttgacaagatccaacacccattcatgataaaagttctgtaaagatcaggaattcaaggcccatacctaaacatgataaaagcaatctacagcaaaccagtagccaacatcaaagtaaatggagagaagctggaagcaatcccactaaaatcagggactagacaaggctgcccactttctccctaccatttcaacatagtacttgaagtattagccagagcaattcgacaacaaaaggagatcaaggggatacaaattggaaaagaggaagtcaaaatatcactttttgcagatgatatgatagtatatataagtgaccccaaaaattccaccagagaactcctaaacctgataaacagcttaggtgaagtagctggatataaaataaactcaaacaagtcaatggcctttctctatacaaagaataaacaggctgagaaagaaattagggatcgtccccgcggcggcgcggggtctccctccgctgggcgtcgggaccagggtccggtgcggagagccgttcgtcttgggaaacggggtgcggccggaaagggggccgccctctcgcccgtcacgttgaacgcacgttcgtgtggaacctggcgctaaaccattcgtagacgacctgcttctgggtcgggtttcgtacgtagcagagcagctccctcgctgcgatctattgaaagtcagccctcgacacaagggtttgaaaaaaaaaaaaaaaaaaaaaaaaaaaaaaaaaaaagaaattagggaaacaacacccttctcaatagtcacaaataatataaaatatctcggcatgactctaactaaggaagtgaaagatctgtatgataaaaacttcaagtctctgaagaaagaaattaaagaagatctcagaagatggaaggatctcccatgctcatggattggcaggatcaacattgtaaaaatggctatcttgccaaaagcaatctacagattcaatgcaatccccatcaaaattccaactcaattcttcaactaattagaaggagcaatttgcagattcatctgtaataacaaaaaacctaggatagcaaaaactcttctcaaggataaaagaacctctggtggaatcaccatgcctgacctaaagctttactacagagcaattgtgataaaaactgcatggtactggtatagagacagacaagtagaccaatggaatagaattgaagacccagaaatgaacccacacacctatggtcacttgatctttgacaagggagctaaaaccatccagtggaagaaagacagc

SEQ ID NO: 21693 - DNA, 1174 bp, Mus musculus
aaatgttatcccctttcctagtttctcctcccaaaatcccctatcccctcccacttccccctgctccccaacccacccactcccattcctggtcctgacattcccctatattggagcatagagccttcacaggaccaagggcctctcctcctattgatgaccgactaggccatcctctgctacatatacagctagagccacaagttccaccatgtgggtttttttagtttttgtttgtttgtttgtttgtttgtttgtttgtttgactggtggtatagttccaaggagctctgagggtactggttagttcatattgatgttcctcctatggggcttcagtccccttcagctccctgtgtatttctctggatccagtcacttaaaagccaagactaaaacatgaggagaccgttgtctgtggcaactgctatgaactttaaaccaactgtgctcaagatagtacagtgagtagtagtcagaatgtccggcagacatttagtagtctttatttttcagtttttctgcctgtctctctgtaggccttgctgctgcttcttgcgattctccttcacctctgtgcagaaactaagtgaatatattttttctcagcacttatggcaggaattctccccacagtgatgaagtgtgttcctgttaagagaacaaactaagttaatctcaatttttttctcagacttggatataaagaaatggtgctcatttgcaaacagtaaaaagtgttttatatttatttaaatgttaggttttatttaagctatctaattctttcactcacataaccatatttttttccttaaaccaacaaagaaacatgtgttgtccttttcatttcttttgaagttgtgtaagaggaaggttctaacaattgacctttcaacatctgattggatcagtgaatgaactgagcatttcaaacctctcctaatctgaatcgtggtgtatatttcctaatccccacgcaagtgctgcctaaaaacctttgaatatattatgctgccttctaattttaaacaaacttgatttaagcatgtatgcaaattgtttcatttgctagtgagaacaccttcccctgcagctcccagcaaggagcagtcttgggacaggatggatgaaattctgattttgaatattgatcagcttttctggtatcctg

SEQ ID NO: 21694 - DNA, 1194 bp, Mus musculus
ttggcattttaaatatttcatctggaaattttgtaaatagaagacatgttgacctagaattacaagttgtttcctttgtatggtttctatgaagtttgagttttattttcatgagaatacttttagcagaaaagttgatcatacatatgcctgggaggcaatgctctcaatggctttatttttggaatgatggctattaagaatctatttagaagaaacaaattgtaatgtttttggctcactggaatatggtgttcttattacatatctggatcattgtaatcttaaaaatccaagtggatgacaatgccagattcagccccaatctggtggatatcacagcccatatagtggtatataatggacatcacactgaaaaacagagtgagcttctataatagataatgatggctccaataataataccttacattttgattttcaccttagctagaactcatatgaattattaagtgatggaaacatgaacgagccttctaacactaatcaaacacttggctacctggtcagcatgggtgcttgtggccaagagtgcctggtaggtgcaccaggaggaatggataagatggaataggatgaggagtttctagccagacaaattactgggaaggttgaatgagcctcaaggatctgaaagccaatggaattgacttacaggcccagacgtagagaggctctggaaaggctgacagaacaaaagtgatgtgatatgcagcaagtgggatgtgggtcaagttggggagaagagtcaggcacggtacagagttggggcagacagaaagaaaggctgcctctgggtttagatcattggtcaagttcatctgacagtgagacctgaatgttaatccccaaatagaagttggccagcaaatcgtggccagtccaacccagcccaagacaggattttaaaggtcctggaaactgtcactcatccataagtaaagcagtcagccatgctacttacacaccagtagttttctgatttcagtgtgatttgagaggttcatacccaattcaagtaacatgctgctctttgcaaaatgcatgctacatggagaaatatcattgcattcttagtttaaaaacaagttgtatgcaatccatcacctatgaaaaccatttactttgagtttgaccacttgagggtaataaaaacaggaaaaaggtttagtc

SEQ ID NO: 21695 - DNA, 1993 bp, Mus musculus
gctggctccccaaatatgtcgttgatctaatcccatgacctatgtcatccccgtcatctttttcatcatcttcctcctattcttcctcctccttcctcttctctcttctccctttttccttttccttgcatgtttaggtaggtgtatagatactaagaaatataaaagaaaactcgaaagcatccttcttcatttattttaagtattccagagaagctgggctcaaagactaacgttctaaccggggccctgatgtgtgtgattgcatgcacctagcatgttccctcacagttggcctctgagatcctgacaggaactcattcacacttgaggcttgcatattcattagggctgcattccccgcccccgccccccacccccacccccccagtttagaattggacgtagccagaagtgctacccttgtctgtaatcacaggatttgggaagttgaggcaggaagatttgcttgagtaacaggccatcctgagttccatagcctctccaaaaacaaaaacaggaccagcaggaaggcttagtgagtaaatgcacaggctgccaaacctcacctggtttgtgctctgggacccacatggtagaagaaaaccaactccaaaggcgttttctccattttgctgcttgctctgctaccagtggctggtactagggcctagggatagtagtcttggtaactttctcctttgagctatttctctagcagttcccctccattcatagtaagcacacatgggactaactctttctaggtgattctctcatgtgtgtgctcctcacacacattgtgcttctttcatgtaccacttatttttcttctgcgctcacttaattcagtggagtcaggggaggtatgtttctcatctcttaccactgatgactttttaattaggccttcctagagagttgctttctctttatccccttccttatgacagtttttttattagcctctatggtcatttctcaactatatttttttttccttaagtttcttcttctacctacttcaagtcttacatcctgtattagttgctctcccagcctgttgtttcagaggttgatctcatctatcatactccaggaccctccatccttaatccttgttccttcataaggttgccccccccccagctcctgaaggagtacacacggcgtttcccagtaaagtgtcccaatccttgcttctaagtgtctcatctgctctccagtagaaagacgaattggtcccaccaaatcagcagattgcaggctcacccgatactgtccgtttttagactagttagctcaaaaatgtgataggctggtggtggaagtattcagggaaggtcctggttgcctcggtttaggacctgaagaacagagatggagcagcaggaaaggaacagatgagggacagtaaatagaagcattaaaggttatatagatgccagatctttccaaagtgaactataaagtcaaagatttccagcagttataccaactgatgtcatgacgaagataagcagatgattcatgtggaatgcaaagggtcaaaactggctagaggttgctgaagatgaagaaagattcagggaattcgtctgacagtacaccaaattttactgcagaaatagtgtcaggcgcagtacagaagtggcttacatcagtgccacccaaaaccaaagacctttgctaagcaagtgagtgatttaggtgagaagactttttttttttaagtaactaataagggattagctactagaatgtatagaaatgttctattttgaaaaatatagaagagagaaaggctttctcttgaggctggtaaacagatgctctgtggtgatgagaagtgtgagattcgggttcacatctatgacatttgcaagaacgtggcccacaatgtcagatctgtaagtagtcacatgctacatatcagtgctggagaacagttacacttcacagatgtgaacaaggccagaactccaggcatgtt

SEQ ID NO: 21696 - DNA, 1100 bp, Mus musculus
cacttctgaggtgtaactaagcggatgtagaactctgtggcagaggctcactgcttgctggacagacggactggaactgatatccctggtgtgccggtaggcacagtcatatccttcaaggtttcttgtctgttgtagtttcacagtcacttgctctaaggtggggatggaagagagaaagtgactcccaaaggcattatcatctgctgctctcagaatcaaacaggttgttagctgagccctgatgtcctgtgcagagctggaccaagggctgacttaaagccactcaactctttgcctgcacttgactccaactacttatattttagatatactacgttgtcttgttttttgatatttctggagaaattgctcagagcacaggctctgaaggcacggactcagactttaacttttctgtgtagctgctgtgtgacaggagccaagtgctgagacttccccacactgctcatctgaaaaacgagaacagtcgtgtcagtcggtctcattggggtgaggtttcaacaggattatgtatggagatggttctgatacatacacacagatatttaataagtggaggttctgtagagctctgtagtcttagccctgtaggtactcacaggaagaatgagagcgaagttaaggggggagggagagtaggggagtatgtatggggtgtgactgacctcctgggattagaaccccaacttacagtttacactgacagagaaagagaagccacctctcatgtgttatccatagcatcaggactcatcttgtgtgagacagactccttccttgcctcatatgttgttccaagccacttacaccaaacacgctccctggtgtatttggaggtgaaaagaagaaaatgatagttgggtaatgacaatcctatatgtttgtaatctttccaagcttattttcaagtagcacacactttttgtaccactggtccttagagtgaaaagaactgtctacttttctttaaggcatctttaacttgtcctaaattgtaaatgggactcactggcctgagtctcttagtttcgggacatagttccatggcaggcatgttctttaggctttggaacatt

SEQ ID NO: 21697 - DNA, 1175 bp, Mus musculus
ttatattttaaaatcctgtatctcccaaatgccgctcatgtgtcatcttttgagcaaagagaaaccttcattgctgcattagttggttgttgcccctagaggcttcaccttatttctgaattggtcttcctttaattattgtgatacatttattgataactcccagaattaaagtcaaatttcttcttcagaatccttctctctagtgttggcaacttttgtagagttatcttgctgcatgtgagttggggaagcccaggctgcgggaggtcctgtcccctttcttctcagcgggccatggagagtatagctctgcggtcctagtactcttctggtgaagccgtggtcccgttgacttcagaaaaatagcctagaattctcagatccctaaatacaatggcttagcactcagagtgagcccctaatgaaagtgcagtttttcctgaccatggccaggggtggaaagcagttcggtgccactgtgacgcaaggatagaggccacaggctgcttctgcctggttgtaccccctctcttctgtgttcacaggcctttgcagaggagctccatgagagagttcgccgagaactgtgggcctactctaggagtgagcagttgggcgtcccagacttgcgcagactccggtatgagggcatccggccagctcctggttaccccagccagcctgaccatactgagaagcttaccatgtggagactggccagcatcgagcaggccacaggtatgtggggaccgctcactgagcgcatgcactcaccaaagacatatgcagctaaagtccttataaagtgggagaacttaggatgaagtcatctctcatccccttctttctcaggtagatgggatctggctttttacttcaaaattgcaacaccgtattttttcttaactatttcagacttagcagtttaaactatttactcctgccccatcctggttgtggatttactgtgttcccttttctccccctgcctttcctgtcctagttttctgttcttggtacagtagtctctgtcttgtcagcggtgtgctctccctgcctgggcctgcgctgcttgctctagactggcaagccgccagcctcccatagccccttcctgactccctgcacttgtcactagcatccgtgctcctctgcggtcatcattcccctgt

SEQ ID NO: 21698 - DNA, 1193 bp, Mus musculus
actcacaaacctctcctctccttacttgcccaaggttttctgccattcagaacaatgtcccttctaggcttcaggaactccataattgaagtcatggtgctctgccttccatctttgtgtgggacattaggagagttgctaggatataaacgagagaatgaatagcagccccaggtgctgctgatgccttcttcccactctccttgcagttgcctacagctgacagttctttgggtctgccttggtctgatcctcagggtcattatggtggggcagctaactccaagaccgacttgtgtcctgaaagagctggtcgagtctgcagggtcagacttagaaccacaatgtggagctagtaaacacatgtcactctttactgtctcctcttctagtggcagtgtgaagccacagtgggtgggaaagggtagggattttcttttaaaagggttctgttttgtttatttggttatttgtctcgtttgcaaaagcttctacatcagcttccgtggccatgttttcattgtagagatagaaaagctaagtgattctgactattttcttcaacaggagagaaaatacgtacccctaagtcaagccagaaaacacggtttccacattgattggctctctgaacctcatccaggtctgtggctgctgctggactcacagctaagtgtgataactgacagtgtctaggacgtgttgcagtgcttggctacaaaggagcctgcagtgagaacttctcagttgtgtgtcatatgagccactccaccaatggaaaagaaagtagataggaagacctactgagtgccaccactgttgtgagatggattcatcatagtatactgagtccttgatgactctgtaccaagcatggctattgtgtccattttaactgaagagaagggaatttcagatagtaactggaatgactgtcaggtttctagtatcaggtttatcttctgtagcctgtgctgtgcttgagtgggacttctcaactgacctgagttgcatgcaggccaaagacttggcttggaatgtctgaaatataaaatggccttgcacttacaggtcttgagagactctgcagcaaagctgggtcccttttcactttcttgttctgtctctggatgcttcccttttaatttctgttatgtggtttcttcctgttttatttctagctacttttctta

SEQ ID NO: 21699 - DNA, 1089 bp, Mus musculus
tcgacagggacaccgcctttgccatcggtgagccacctttcacttagcaaagctcccagagcatgatatcggggagttgggggggggggaggttctgtattttcttgcccccccccccgttcgcttcccgagcagtaccttgttttcttggtaagggggtgggaaacagcaatactgctagatgtgtgaatgtatttataaataatggtatctgaaatttcacaaactaactaatatgtaaaaaggaagaaaagtaaagaaaccgagacaatgactgtggtgtgagaggagactttcagaactagatgtagttttaatgactaaaaagaagggctcgggtggagttcttgtcatgaagtactttcttttctcctagtgagtgggggtcagatttatcctatatgttaacaactaaagccagtgtttgagagtgtctaacacatggtaacagagttcatgagcttgggggtgaggagaacaggagagtatctgttgggtttgcctacaaagaagttacacgtgactctcctcctaggatgcactggcctggaggagcttcttgggattgaccctgcctttgaacagtttgaagcgccattgttcagccagctggcaaaaggcttggagcgcagcgtccagaccaaagcagtgaacaagcagctggatgaaaacatttcatcgttcctccttcacttgtctccttatttcctcctcaagccagcgcagaagtgtctggaatggctgattcacaggtagctaaaccttcattagttgccaacacttggtaagctagattgctttcacaaatttcaaaggttaacatgatgtttagaatgtcaagtgaacatgctcttcttgaatagggtgccattagttcctgtctagtgtgtttagggtttagggggtttgtttgtttgtttgtttgttttttgagacatggtctcagtgtgtatctctggttgacctcaaactcacagaaatctgccaccttcttccccaagtctgagaagtatgtcattgtctttggctagttttgttttggggataaggtcttattatagagctctcgtttgttgttattgttgtttg

SEQ ID NO: 21700 - DNA, 1200 bp, Mus musculus
tagagatgtgctaaggaagatctgaggatggaattcctaatgcacttctgcttgctgtgacccaggcagccctggctgaagcatatttgcctcttctcgccgggacactgtatggatcagcagttggtcagacagtttgtgcatatgcttagcagtaagagaggcggatggcagtggcactgaggagaccgagaggctctcgagttcacgccccgtctaggctgtctagtgagttcagggtcagtcttaacagtaaaaagaagtctgaagctggagctctgtggctggattactgtgtagcatgaccaagaccctagctgactgctctacactgggggtgggggaagaacagttgcttgaatgtggttgtgtgacttgggactcagacccaagcaggggagatgggaaagaagactggcccttcttgtagctctgattacaggttgttttggcttccatttcttcaggtccaccgctttctcaaactggttccagtccttctggccattgtgcaacataagaaaagggaggcagaggatgaacaggcaattaacagacagacagcgctgtacaccctgaaactcctgtgcaagaacttcggggcacagaaccgagagcctttcataccagttctcagcactgcagtaaagctgatagaaccagagaaaaaggaggagaagaatgtcctgggaagcgccctgctgtgcatagcagaggtgacgtccactctggaagcgctggccatcccccagctgcccaggtacctaggaacaggagccactacaacggaaatggggaaggaatgcgttcagggcttcggcttcttgaatagaaagtaaaggaaaatagagtagtgaaagaattgatcttttctttgctctggaaagtgcaccatttcctgtgaccttcagacattgcttggcgatgttcttcctttccagagtcgcagtgcttagggagcagcggaagcatggccagagcagccgtttgctgtggcagaggcaagctgggcgctcctgactctgcatttggctctgaccatagcctgctagcattgtaacaagttactaatcttaaaaccctgccatctgtaatacagggccatatcctctacacacacagacacacacacacacacacacacaccgtgtttctctttataggccttgttgtgctctgcacatgttcagccattgaaga

SEQ ID NO: 21701 - DNA, 1190 bp, Mus musculus
tgttatgaagactatatggtaggactttggttatactaacacttatttggtaactatccgtaaagtaatataatttacatagaaaagtttgatgtagagaaaaatcacgcatggctgtttttctatattgtttttacacaggacaagtttttactttgagtaatccttaaatgaagagtgggtaaagtgtgtatacggaagagagactccaatcaacaatatcaataagttgaaaaagaaaaatgttgtccttaaataacctacaaaatatcatctataacccggtaacagatttttaccttttttttttttttttttttttttttttttgcctgtggtaggattgacaggaaatacactcaagttgtaattatcactggggccaggcatgaacacacagttcagttagcacacacacacacacacacacacacacacacacatgtatgcataaaccttgacgctacaacacacacatgaagggaaggtctggggacaactcttgggaaattatattctaccatttgggtctggaagttgaactcaggtgatcagatttggcaggaggcacctttacctgctgagctatggtactggcttccttccttcccctgtctgtctgtctgtctgcccatctgttgtatagacgctagcacctatgacttcatgatttgggtggatgatagcactaggccgcactgtccgtccacccaccactcactgtccattcacttgtcagttttttctgattgtttgtttggttggttggttttctctgtgtagctctggctgtcctggaactcactttgtagaccaggctggcctcgaactcagaaatccgcctgcctctgcctcccgagtgctgggattaaaggtatgtgccctccccctgcctggctgcttgcttgttttaagatgtggcattgccatgttgtccagtctgacctcaaacttgaaatccacttgcctgaaaccccagtactgggattatagactggtgtgctcctccacacctggctttttgtggtgtttttgaaatgagaactgtacacaagaagttaatgtctcagacttctgctctgttttcccaacactgcttggaagtgtagcagaggaaatgtggagagccagaggcaagagagctgagcaaaccatgttgtccagtttaggctgctggtgggagtctgact
